United States Patent Application Publication US 2007/0283459 A1 - sequence listing, part 4

SEQ ID NO: 22085 - DNA, 386 bp, Glycine max
tatgtcagattgggaccaaagcgatggacgtggtgaacgatctggacgtgaagcggtacatggatcggtggtacgagattgcgtgcttcccgtcgaggtttcaacccagagacggcaccaacaccagagccacctacactctccgagatgacggcaccatcaacgttcttaacgagacttggagtggcggctaaagaggtatcattgagggcactgcttataaggctgatcccaacagcgacgaggccaagatgaaggtcaagttctgggtgcctacctttttacccatcattcccgttactgcggattactggcttttgtacattgaccaggattatcactatgctgtcattggccaacctatcaagaattatctttggatattg

SEQ ID NO: 22086 - DNA, 379 bp, Glycine max
ttttagggttctgctgaaaggaaacgacaaaggggtatggttgctagaaaaggagaaagagttacagatgcgagaacacgacatgtggatccggatgaaaaagcactacaaaaggatactgttggtagaacacgacataagggttcagatgcaagaaaacaacaggatggtacggattgcagaggactacagaagggtactgttgctagaaaacaacaaaagggtgtgatagataagataaccggaaccgacctaataactatctgcacggtgaagtgccagaagacgcttatcaagctgaggatggtgccaactcatgcaaaaatcccttttggcgagactgagattgatgaaaatattgatcagtctttcacgcaca

SEQ ID NO: 22087 - DNA, 392 bp, Glycine max
tttatggtttaccaaaaacaaaacacaagccgggtgaaagtgagaaaaaataaaaatcaaagagcataatgtcagggatcattcacaagattggggagacccttcatgtgggagggcacaagaaggaggaggagcataagggtgagcaccatgctggagaatacaaaggggagcaccatggtgaacacagtagtgagtacaaaggagagcatcatggtgaacacaaagctggagagtaccatggtgagcacaagccagagcacaaagaggggttcctagacaaagtcaaggacaagatccatggtgagggcggcgccgccgagggcgagaagaagaagaaggagaagaagaagaaggagcatggccatgagcatggccatgacagcagcagc

SEQ ID NO: 22088 - DNA, 387 bp, Glycine max
  modified_base (13)..(13): a, c, g, t, unknown, or other
ttgggacccacanactccacaagtgtcacaagtcataactcgttagagagagtttgtgtgtgtttttgtgtgtcaccttggtgcatacaacacaagatggaggaccaaaatggtagtggtaagttgagccaagggcttcgcaaggtgaagccttaccttgctatattgtcccttcagtttggctactcagggatgtatatcatcactatggtttctttcaagcatggcatgagtcattggatactctcagtgtaccgtcatgtagttgctgctattataatagtcccttttgcacttgtccttgaaagaaaaataagaccaaagatgactcttcccatcttcctgaggatagtggcacttggtttccttgagccagtgctagatcag

SEQ ID NO: 22089 - DNA, 404 bp, Glycine max
ttatggggtaggtgcaagagtttgttgtgagctataagctagtttatcgtgaggagaatatgaagttgtttgttttctttgttgctgcagtagttttggtagcatggccatgccatggcgcaggctaccaaaggttccctctccgaatgaaaactggctatggtgagcgttcttcggaggtaaaatgcgcaagttttaggcttgctgtggaagcacacaacatccgagcctttaaaaccattcctgaagagtgcgttgaaccaacaaaggactacattaatggcgaacaatttagatcagactctaaaacagttaaccaacaagctttcttttatgctagtgaacgcgaagtccatcacaacgacatatttatattcggcatagataacaccgtactctctaat

SEQ ID NO: 22090 - DNA, 391 bp, Glycine max
ttatggggtggtttgaacatggagccgttggctctgaggctcaccctttcaccgtctgcttcaacttcatcgcttcctgcagcacttgctcactgctccaagctatgtgagtctcaaccgcggaataagaagaaggtgcgtttcgacgcgcctaggcttgcggtgcggtgtgtgaaagcctaaacgcagcgaaccggagatactatctacgatggaaagacttggactgggttcaccacacctgtcatggaagtcaccacattcaatcgaaccactttcaccgatgctgctgactttcccagctgtgaaaagattgccgctgtccgcagacttatgtatggtctcgctgagtgaattatacttacatcttattattaagaaggcattgcac

SEQ ID NO: 22091 - DNA, 368 bp, Glycine max
tgatggcaaggttaggacagacaagacataccctgctggtttcatggatgttgtttctattcccaaaacaaatgaaaatttccgtctactgtatgacacaaaaggtcgattccgtctccactctgtaagggatgaagagtcaaagtttaagctctgcaaggttcgatctgttcaatttgggcaaaagggtatcccctatttaaacacatacgatgggcgcaccatccgctatcctgacccactaatcaaggccaatgacaccatcaagctggaccttgaaagcaacaagatcactgatttcatcaaatttgatgtggggaatgttgttatggtcactggtggaaggaacagaggccgtgtcggtgtca

SEQ ID NO: 22092 - DNA, 373 bp, Glycine max
  modified_base (136)..(136): a, c, g, t, unknown, or other
ggagcgagagagagtgggggaacgaagaagctacagctacagctgaaacaggagctccttcgatctacaatctatagcgattaagctctcattttctgagagtgttctttctttctctctctctctctctcaccgngattccaccatttccccatcatgatttctgctaccaaactcaaatccgttgatttttacaggaaaatcccgagagatttgactgaggcgtcgctatcaggagccggattatccatagtggcagctctggctatgatgtttttatttggaatggaactaagtagttatttgtctgttagcacctcgacatctgtaattgttgacaagagttctgatggtgactatttacgtatcgatt

SEQ ID NO: 22093 - DNA, 384 bp, Glycine max
gaccaaatctctctctctaataacatttctaatctcattctccttctgttcaaacactctctctcatggcatcagataagaagattaggatcggcatcaacgggtttggaaggattggccgtttggtggccagggttgcccttcaaaggaatgatgttgaacttgttgctgtcaacgatcctttcatcaccactgattacatgacatacatgttcaagtacgacaccgttcatggccagtggaagcattttgatgtgaaggtgaaggactctaagacccttctctttggggagaagcccgtcaccgtttttggaatcaggaaccctgaggaaattccatggggtgaggttggtgctgattatgtagttgagtcaactggtgtat

SEQ ID NO: 22094 - DNA, 397 bp, Glycine max
gctagaaactacagtgggggtatcgcttgagcagacttaacaacgagcacagagcgggttactgtctgttcaagctaccatctctctctctctttcttagtgcctccttgccagaagttaaaatggtccaagaaactttcctattcacatctgaatcagtgaacgaggggcaccctgacaagctctgtgaccagatctccgatgctgtgctcgatgcatgcttggagcaggaccctgacagcaaggttgcctgtgaaacctgcaccaagaccaacatggtgatggttttcggagagatcacaaccaaggccaacgtggactatgagaagattgtgcgtgacacatgcaggaacatagggtttgtctctgatgatgttggtcttgatgctgacaactg

SEQ ID NO: 22095 - DNA, 388 bp, Glycine max
ttagagacagatgttactttttatcatggtccaatacaaagggcaagaaggggtctaagtattgctggggactcaaatgtgtcagttaaagcaaggaaatctaatggtgacagtgatccattcccacgttgcgttgttcttgacattgaaggaactactactcccatatcatttgtttctgaggttctcttcccatatgcccgtgataacgttgggaggcatttatctctaacatatgatacccccgagactaaagctgatatcaagttgctttgttcccaagttcagagtgaccttgaacaagggattgcaggtgctgtgcctatccctcctgatgatgctgggaaagaggaagtcgttgctgcactctttgccaatgtgaatgcta

SEQ ID NO: 22096 - DNA, 285 bp, Glycine max
  modified_base (7)..(7): a, c, g, t, unknown, or other
cttctanaaagggtgtgtaaccttttttttgaggggctcacctgagagacatcttggatgtacggcgccgcatcggtaaatcataacccccactgtgtacattggatagcattccttactgaaaaacccaacggcgtctccccattatccttgcgcttattcaacaccaaaagaacgtgacagtgaacagcgcttgcattttataaacatttaggaatctcaataatgtttccgagagaaactcgtgtaaacttgactcaattagcatacggatataacactaac

SEQ ID NO: 22097 - DNA, 399 bp, Glycine max
acatggaaaccaaggattgtgattctctccaaaatgacacccacatgtattgcgtttcacaggtgaatcattcttctccaaattcacaatggatttccctccatactgtcgatcccaattgcgtagcaacacttaccgtgccctcgttcacctcctctctcacatttctgcttacaacgcttcaattcttgaagcttcaactcaacccgtcaacattcccgataatggcagtggtagaatggatcaagaaaaccaggaaaaggagcctaagtgctccgaagttgttgattctgattttttggatcccaaggatcctatatgccagaaggatataccggaggtccaggaaaccattgagggggttgaagacaaggatatggattttacttctaacaagat

SEQ ID NO: 22098 - DNA, 412 bp, Glycine max
aagagacttaaggggccatgttagtttgttgatcgagataactagaaacagtgtgatgaaaatgaaggtccttgttttcttcgatgctacaattttggtagcatggcaatgccatgcgtacgatatgttccctctccgaatgaacactggctatggtgcccgtactccggaggtgaaatgcgcaagttggaggcttgctgtggaagcacacaacatctttggctgtgagaccattcctgaagagtgcgttgaagcaacaaaggaatacatccatggcgaacaatatagatcagactccaaaacagttaaccaacaagcttacttttatgccagagacctcgaagtccatcccaaggacacatttgtgttcagtatagatggcaccgtactttctaatattccatactacaaa

SEQ ID NO: 22099 - DNA, 411 bp, Glycine max
  modified_base (20)..(20): a, c, g, t, unknown, or other
  modified_base (22)..(23): a, c, g, t, unknown, or other
  modified_base (43)..(43): a, c, g, t, unknown, or other
  modified_base (46)..(46): a, c, g, t, unknown, or other
aattcgagcggccgctacanannggactttttattttttgttnganggatttaattgagagaattatggaaaacgataccaaattgggaaatattaaccaccactgtcttcattttttagtatccataaaacaaagatcgaaaggatactacccctcatgctcaggcatattgaacaagaaaagaaggggaaaatgaagtgttatcgcattttatgaacaattaggagtctcaattttgtttcagagtgaaacttgtgtcatctttgctcaattagtatcggtatctaacagtaacatgggccattatatacgtgacaggcatcctttctctattacctcagcccctggcgatgactacctgagtgttcacattcggcaactgggtgattggacacaggaacttaaaagag

SEQ ID NO: 22100 - DNA, 402 bp, Glycine max
gcgggtgtgcgaaaccagtatgggtttctaagcggaaccaatgaatggggccgctatcaaaggtcttctcaggagcgatctaaatttcttctaaacaccctaagaggaacgctagagtatcctaatattcgaaaataaactttactttctccgggcattacgacgatgcatataatatggccaattgggagaggattacctatgtacgcatttttatgcgcactgggttagccatttattatataacaaagggtcactcgcactttagataacctggcgcttacccatatgtgtatatacggaataaggatttcctatgtactctcgatggactatttgattcttaccaccatgacgagcattaatgcgttaatgacagaattcgtgtgactgctagacatt

SEQ ID NO: 22101 - DNA, 240 bp, Glycine max
acgagtatgggtttcaaaggaaaccaacaccggggccggacagggcgacgacccaagagctacgaccttgtctaagaggctatgagacacggtgctagccagtatggaacgacatgttcttccacggacaaaccacgatgttacggagtgacccggtcgaagattttaagtccgtatcgaaggtgacggggttattcgatatgagtaaagggcatcaaccaacttagagaacctgtgatt

SEQ ID NO: 22102 - DNA, 394 bp, Glycine max
tgagggtttagagagtgtgcgcgttaccggttctcaacttaaactcaactcaactcacatccgaggctttctcattcattctctgtcgtagttctgcgattcaccactcagttatttttatcgtgtgctcgaagtgaagtctctgaaatttgtgctttctctgtgttcttcgattttggatttggcttctgtcgaattgaattagggtttgtatggcgagaagaagcagcagcgagtctgaggatgacgcgaggaagcgcagtggcagcgaatctgaggatgaggagaggtataggtatcggcggcgcggtgctgagaatggtaagaagagttccggtcaccgtgatgacggtcattcgggggaagaacgaagcggagccaagaggaatggtgg

SEQ ID NO: 22103 - DNA, 409 bp, Glycine max
gcgagagacgacagagggggcactttacacttcttcaagacgacaggccacggcttcgccaaaccccttcctctccactctctctcaaaccttcgatgcccatttcgcccctgccccgaagtcaacgtctcttgaactcagggcgaggaggcacgttggggtgcgagtttcgaacgcgctgatcgaaccagatggagggaagctcgcggagcttgtggtgacggattttgagagggatttgaagaagggcgaggctctttcattgccgacgatcaagctctcaaggattgaccttgagtgggttcatgtactcagcgaaggatgggccacacccctgaaaggcttcatgagagaagccgagttcctacaaacgcttcatttcaactcgccccgactcgatgatgggtcg

SEQ ID NO: 22104 - DNA, 278 bp, Glycine max
acttatagggttatgggaaaatgagttactagggtttgggtgttagttcaggtactgctccagtgtaccatggaacaaaacttaaagtgatggataggagggtgaggataacagatctggtgttaaggagtgtgagccttggtcttggaattgcagcaattgatcttggggtgactgattaccacgtcaaagagtttttctacgttcaggagaaagctgaatttacagacatgaacgctttaatgatcttggtagttgtgaaccgactaactgaaggc

SEQ ID NO: 22105 - DNA, 399 bp, Glycine max
tttccctatttctaaggtcagagaaacatgctagaacaccagattgcatttatatatattttaccttttgtaccttattttataattacccttatgtttagttgaatttcatcaaaaccctaagaatctaagttgttggcatatagatattgagtcttagatgtttaagtggtttttaccttttgtatcttattttacaattacccttatgtttagctgaattttatcaaataatgtttatttagtatctgacaaaacatacaaaagggtcccacattccgttgtgagacacatcagaattgatggtgcatgtagttacaaatcaagtagagagaacggagcctcctttaatttacccggttatatattggtagtagtgagctgtttgtggacactgca

SEQ ID NO: 22106 - DNA, 352 bp, Glycine max
aagttatgtgtgtcaggcatcactactttatctgatagagggatattaacatgcaagaagggataaaagtgaagcatgtctttgtcattggtgcttgttgcacagttgcaccttgcatcaagttaacaacacaaagtgacttgtgatagttgtattatttttcttcccattagcttaaggcctcaagtgataagagtcacttcctctttagctgtcttgtgaatttattttaatcacttccttttgttgacagactgaagctgtggctcttcattgcatatgttgtatcctttgtttctttagctggatcagcaggcctgctgatccaagattcacttgataaatccgcccc

SEQ ID NO: 22107 - DNA, 58 bp, Glycine max
  modified_base (20)..(20): a, c, g, t, unknown, or other
  modified_base (50)..(50): a, c, g, t, unknown, or other
  modified_base (54)..(57): a, c, g, t, unknown, or other
gagacctcatgtcaggcggngctacccgctgagtttaagcatatcaatangcgnnnna

SEQ ID NO: 22108 - DNA, 387 bp, Glycine max
ggttcctttgcattctattcattcaagattcagcaagtgcgttttggaagcagagaccgaaatacttcgagatggcccgtacaaagcaaactgctcgtaagtcaactggaggaaaagctcccaggaagcagcttgcaaccaaggctgcacgtaagtctgcaccaacaactggtggtgtgaagaagcctcatcgttatcgccctggaactgttgctcttcgtgagattaggaaataccagaagagcactgagctcctaatcaggaagcttcctttccagaggttggttcgtgaaattgcccaggatttcaagactgatctgcgtttccagagccatgccgtgcttgcattgcaagaggctgctgaggcataccttgttgggctctttg

SEQ ID NO: 22109 - DNA, 417 bp, Glycine max
  modified_base (378)..(378): a, c, g, t, unknown, or other
gaacacagacgggggttacatatttattctatgcgtggaacaggcagtaagagcgttgtggaagcagagaccgagatacttaaaaatggtcacttcgaagcgaactgctctgtactcaactggatggaaaagctcccacgaagcagtttgaaaccaaggatgtacagtggtactgcaccaacaactgatggggtgaacaagcctcatcgttattggcctagatctgttgctctttgtgagattcagaaagagcagaggagtactgtgctcttaatcaggaagctatctttccagaggatgattcgtgtaattgcgcacaatatgaagactgatctgcgttttcagagtcatgccgtgcttgcattgcaaagaagctgntgaggcttaccttggtgagctctttgaggacactaactt

SEQ ID NO: 22110 - DNA, 394 bp, Glycine max
aagacgacagaaggggaaggtgtccacttaactgaaatggtgtccttcatgggatcttggaattgaaacgaacgggacgtgtctgtctccgatggcttcctcataccgcgaccgcacgtcggagttccggttattattggagactctgaagaagatcggaagtccggtgcaacccgagaatgctccttcgacctctcatggcgagtcgtattcgagatccgaattcaaccgaaaggcctcgcgtatcgggttggggatccacgagacctcgcagaatatcgcgaggctcacgcagctggcgaggaaatctgtcatgttcaacgatcccgcagtggagattcaggagctgactgttctgatcaagaacgagatcacggcgctcaactcggctctc

SEQ ID NO: 22111 - DNA, 344 bp, Glycine max
ttagggttctcaggaacatgcaactctttggagatcaaagtcaaactcaagctcctgtgatgatcttgtatagattacgggatgaatttgagtttttgtttctataattttttctagaagcgtaaataacttgagctgaacagaactttgaatagctcaactcaaagtaaacttatctggtaataacttacttcataaaaagaaaagcaaaatcaatatacgattggtgttagatcatttgaaagtttttaataatcgcacatgattcttgttaagagaattttatatttttttggattccgtccaatttaaaatatggtctattcaaaaatatcacaatggtc

SEQ ID NO: 22112 - DNA, 411 bp, Glycine max
ggggtgaattgaatttatatttggagaaagaaaaggtagcagcgacgcaatgcacaatgggagcatccaaaccacagagttaatgcatctttcttgctaccgcagacacttttgaacatggagtgaacttggaatgacaatatattataattatgttacatattcgatatatataattaatatatatgtgtcttaattatatgaattatcttgaacttaacgtattttattccttaaattttaaaaaatttatgaaatttatctcatttatttatccattaataagcataaaaatggagatagaatttgctaaaaaataaaaagttggaatacaacgtgtcaaaaactaaaaaaatcgaatgtaaaatgtgtcaaaaattaaaaaaactggaggtacaaagcgtaattata

SEQ ID NO: 22113 - DNA, 401 bp, Glycine max
tatataacatatttctaatatagatttataatatgtatattaacagatcgatcaggaatcacgaaaacacatctaataatatgacttctcttttcgcagtaacgggatcgagtgctaaacatttttttttattatgcgtgcatgtgttccagattccttttcttcttctccttctatttaatattgcagattcctatcaatccacaattcttattcttaaatccaccgacaggacaaactacaggatcattattgctcgttaatgtcatatcacatattgacaaaacaatctcattaataatatgatatttcaaatgaaatcacatgaaatccatggcttctataccccaagaatgggaatgggatctcatgcatcaataatagattgatgtcgtgctaca

SEQ ID NO: 22114 - DNA, 407 bp, Glycine max
ggtttcattttcatgagaaataacgacaaataggagccaaacgagagagaatgagaggaagagagaccgagagacagagagactgagagtgggtgagtgacaaacagagagcatgtgggtgatcggttctgtgtccacttcggaagaagagggcatgacatctacgacacagtggacttgtcggagtggtggtggagagacagcacgagaaactcaagagacgcttgacatatctcgtctttctgctatacgcgtttccctgaagacattcgagaaaaagaattgtggtttactttcaagaaatgaggcgatgtcagggaggtttatatagctaaggacaagaatagaagtggatggagatatggttttgttcgactcaagggtgtatatcatgtgcaacaacttgg

SEQ ID NO: 22115 - DNA, 356 bp, Glycine max
  modified_base (6)..(6): a, c, g, t, unknown, or other
gtttgnggatgatcaaagcaaacgctaaagcgaagacgtggcattcggtctgaagctgatgctaacctcatgaatcaattgacttggaggcttggacttacaagacgagagacgcagaatgctatgacgtctatggcttacatgaagagcaggtggtgatggttacaaagcccggtactgccgtgcttgttctttatcacacaaccacccaaactgaagaaacgatgttgctgtctgaaaattatgatatagactattacatgagaacatattttatgaagcaaactgggggtcatgcttgaaagacaattgtgctgcttaatgctctatggtacttgacttgtgaagacaagctc

SEQ ID NO: 22116 - DNA, 406 bp, Glycine max
tttcagcgcttgatttgaggccaggcaagccggactcaaccaccacacctctcctcgttcacgctacccctttctgctcttcttctacctttcaagttttaaaagtataaagatggcagagacattcctatttacctcagagtcggtgaacgagggacaccctgacaagctctgcgaccaaatctccgatgctgtcctcgacgcttgcctcgagcaggacccagacagcaaagttgcctgcgaaacatgcaccaaaaccaacttggtcatggtcttcggagaaatcacgaccaaggccaacgttgactacgagaagatagtgcgtgacacctgcaggaacatcggcttcgtctcaaatgatgtgggactggatgccgacaactgcaaagtcctcgtcaacattgaa

SEQ ID NO: 22117 - DNA, 386 bp, Glycine max
  modified_base (17)..(17): a, c, g, t, unknown, or other
  modified_base (53)..(53): a, c, g, t, unknown, or other
tacgattaatggtttgncacagggagccaaaaaggggggccctggacaatgancagaggcaaaccaccaacgccatctatatttccacaaggcacccaacaaagaagagtttcaccaagaaacgtgccgcaagattaaagcactccacaaatatgattgctagcgagccaataaatcgacctttgcctggggtctagaagccagagtaccatttttggacaaagagtttatcagagttgcaatgaacattgatcctgattgtaaaatgataaaaaatgaagaagggcgaattgagaaatgtgcactgaggagggcctttgatgatgaagaacatccttatctgcccaagcacattttatataggctcgaaagaacaattcattgat

SEQ ID NO: 22118 - DNA, 398 bp, Glycine max
ttagggttcagttgtattgttgaacaagggtttctctgtctgcttcttcactttctctcgtttcaatcgaaaccaaaacaaaaacatgggcagaaaattcttcgtcggtggcaactggaaatgcaatgggaccactgaggaggtaaagaagattgttactactttgaatgaggctaaagtccctggagaagatgtcgtagaagttgttgtgagccctccttttgtgttccttcctgttgtaaaaagtttgctgcgccctgatttccatgtttcggcacaaaactgttgggttcgcaaaggtggtgcttataccggtgaggttagtgctgaaatgcttgttaatttgggaattccttgggttattattggtcactctgaacggaggcagcttttaaatg

SEQ ID NO: 22119 - DNA, 403 bp, Glycine max
ttgtatgggttcacatataagcatgtgtttatcgcgcccgtgcctgggtacaggcacctacctccgaatataatcgtcaccgaaaatcaaataagggaaatattgagaaaagcagatagtaatggagacggtcgtttgagcaaagaagaacttaagaaagctttcatagaatttggatccaagatgcccggatggagagcatgtcgtcttctaaggaaagctgacaccaaccacgacggagtactcaccatggaagaacttgacaccattgttgattttgctcttgctaggtacacattcaagaagtaaatatatatgcatgatatgatatcatcgcgcccatatgccttaatcccaaagcatctaaatgaagcgcatgtacgtctataactaattatttatg

SEQ ID NO: 22120 - DNA, 197 bp, Glycine max
gacctcacccagttgcagaaagaaaagaccatcaaagtttcacttcagccttatccggtttagggtttcggtttttgacccaacctttgacgtatcgaaaccttaagtttcggatcaggtctgagcaatctggttggtagaacctttggtcttagagagtcaagttttatgtctgaattagacgatcaaattcctac

SEQ ID NO: 22121 - DNA, 392 bp, Glycine max
tgtaccccttacccttaatcgaaggtaaaaagatgaatctgaagaacatgaaggttccgaacgttcgaggtggcggggggatctctgcgctgctgaagcttgggattgttggtggaattggtttgtatgcagctgctaacagtctctacaatgttgaaggaggtcaccgagccattgttttcaacttggtgtcaaagacaaggtctatcctgaaggaactcacttcataattccgtggtttgagaagccggttatctatgatgtccgtgcatgaccccatctagttctagttgagagtacatctgggagtcgtgatctacagatggtaaataatacatgtagctaggatttgcgtgtagtcacagagaaatggttttggtatcaaattcgta

SEQ ID NO: 22122 - DNA, 406 bp, Glycine max
tgtgatgtgcttgtcatccatcattgggcaatttgtgaaattgcaggacatgccggaaaaccaaaaaatattgatgcacaatccgtaagtttccgtgacacaccggaaatcaaatggaagcatcgttgcataattaagtgaggttccgtaacattccgtaagtcaaaagggggatgattatgtaatccgcaaggttccgtaacattacggaaagaaaacaagtagcgttacgagattcgtaagtttccgtaactttacgaaaaaagaatcaccaaaaaaggtaagggggtgaacttatcaagataggggtgtaaatagaaattcaaatctaggcccttctagaacattttgaaagttgggttgcttaaggaggaagcaactgggcggcaagctcctccacgttttt

SEQ ID NO: 22123 - DNA, 400 bp, Glycine max
gtatacaatgtgaacttcagaagcccccatggaggatccgcaagaagagcctgatccccagaaaccattagtcttgaatccaattcatatcaaagcaccaaagtgttcactgatgactgggagctcaattccccattttctgtcgtctcttcgctttatcaagaacctgaggcaaaattttctgtgcatgatcgtgtgctttcagaccaaattatagaagatgatgatgacgacgacgacgacgatattatgagctcctatgtcattgaactcaactccaacctcagaagggaagagtgtggagaatcagccattgatgaagcaattgcatgggccaaagagaagtttcaatcgcaaagctctgatgaagaatcaagcataagaaacgatggcaaagagc

SEQ ID NO: 22124 - DNA, 396 bp, Glycine max
  modified_base (61)..(61): a, c, g, t, unknown, or other
gggtctcaagccaacatttccaatcaagggatccgtatagttctccaactagctaatacantgaaatatatcaacaaattaaaatcgaaccccaccaatccaaagctatcataccctagcatgttcacgagctttctttcgattggtttgtgcagctgctaattattaaaatgacgagaacgaggataaagataaagaaaatcgacaacataacggcgaggcaggtaacattttctaagaggaggcgagggctattcaagaaagctgaagagctttctgtgctatgcgatgctgacgttgatctcattgatttctcatctaccgagaagctctttgattatagcagctccaggtacgtgtacggacgacgactggtatattataacacaccactct

SEQ ID NO: 22125 - DNA, 394 bp, Glycine max
ggaactccagaacacaaacaaaaactcccgttttctctctctgtttttccatggccatctgatcaaacttttcttgattctctctctcagtttttgctattctgagtgatgggtatgccctgccgctgttcccacacctcccacatcactgaaatcatcatcaccagcttcttccgccacaagtcttaaattacaacaatttccctcaattattcatcaaccaaccaccttaatagccttttccaatggttccttaaagatccaacttggtcggagtaaacatggcggctagtggaagatccttttccaacatcactagcttccttcgcaaccaacaaccctcttcccaacctctcgattcttctctcttcctctctgctccttcaatttttgt

SEQ ID NO: 22126 - DNA, 377 bp, Glycine max
aatagcgaccaatttggctatgacttcgaacccgacgccaacgttagcgaccacgaactcgacatttccaagttgggttcaccttcgcccctcgtccactccctccaaaaacgtgggatcatcagccttttccccattcagagagctgtgttggtgcctgcactagaaggtaaagatatcattgctcgtgcaaagacagggactggcaagactttagcattcggaattccaattcttaaaggtctcactaatgatgatgaacaaagtcctcacaggcggtctgggaggcttcctaaagcgttggtccttgcacctactagggagttagcaaagcaagttgagaaagagatacaagaatctgcaccttacctcaaaac

SEQ ID NO: 22127 - DNA, 389 bp, Glycine max
gaaaacaaagggggaaaaattccaagttggggttctcacgatttcgattaaccctttctcccacaaactccgattcttcttgtaaacagcggtgccaggttcgatctttgcgttcgtcatgtttcttgcacgtttcatcgatctgctaacttgacatttgatccgacgcaagctcgttgcttttttttattggaaatcagattttcagatacccttttgtgttcccaattaatggattttgtctggcgattgtataagtgttaatctataagttgatataagatgggggcaatgatgtcgaggatctggctcatgttattccctgcaaaagagtataagattgctgttggtggattggatacgctcggaaaaccactaccctttataaa

SEQ ID NO: 22128 - DNA, 362 bp, Glycine max
aacatccgagcctttaaaaccattcctgaagagggcgttgaaccaacaaaggactacattaatggcgaacaatttagatcagactctaaaacagttaaccaacaagctttcttttatgctagtgaacgcgaagtccatcacaacgacatatttatattcggcatagataacaccgtactctctaatatcccatactatgaaaaacatggatatggggtggaggaatttaatgaaaccttatatgatgaatgggttaacaagggcgactcaccggcattgccagagactcttaaaaattacaacaagctgttgtctcttggcttcaagattgtattcttgtcaagaagatatcttgacaaaat

SEQ ID NO: 22129 - DNA, 358 bp, Glycine max
taaggaagaagaaaaagaggccggaaagataagctgccatggatgctcctttaacaacaaccaagagagaaggttttggattcctactcctgcacagatccttgttggacctatgcagttcgcttgctccatatgtagcaagaccttcaatacgtataacaacatgcacatgcatatgtgggggcatggatcagaatttaggaaaggaccatactcactgaaaggatcacaaccagctgcaatgttaacgctaccatgctattgctgtgctcaaggatgcaagaacaacatcaaccatccaaggtctaagccattgaatgacttcagaaccctccaaacacattacaaaagaaagcat

SEQ ID NO: 22130 - DNA, 421 bp, Glycine max
ggttctagtgtgtgattgtttgttgttgtaactcggtcttcttcttttgttgttctgtgtttgtgtttgttttttctctcacctgaaaatgtcttgctgcggtggtaactgtggttgcggaagctcctgcaagtgcggcaacggctgcggaggctgcaagatgtacccagacttgagctacactgagtcaaccaccaccgagaccttggtcatgggagtggcacctgttaaggctcaatttgagggtgctgaaatgggtgtgcccgctgagaacgatggctgcaaatgtggaccaaactgctcctgcaacccctgcacttgcaagtgaggtgttgggagagcaagcttcaagcagagatagcccttaattaggaataatgataaactattaatgtgtagctaaaaacttatgtattatgtc

SEQ ID NO: 22131 - DNA, 217 bp, Glycine max
ggatctcgccaagaaaatctggtgctttggccctgagacccttggacccaacatggtggttgatatgtgtaagggagtccagtatttgaatgaaatcaaagattctgtggttgctggattccagtgggcatcaaaagaaggtgctttggccgaagaaaacatgagagccatttgctttgaaatatgtgatgttgttctgcacgctgatgctatccac

SEQ ID NO: 22132 - DNA, 385 bp, Glycine max
cagaagttgaagaggaagaagaaggtgatgttgtggcttatttagtgccttcttggtcaacattatccattgaagtttttaatagttattggtctgtttgtcaggtagaaggctaacattgaagttgctcatctctctacagctggcaagagttatggtgtagatagaacgacaaacaacctggctgctgctgttgatgctgagttaagtgaattggtgccggaatccacttttttagattctgaacaagttggtgacagtgcatcaaacaaccagactgatgctgtgaatgctgaatcaagtgaattggttccagaatccacttgtttagagtctgaacaagttagttatagtgcaacaaacaaccagactgatgctgtggatg

SEQ ID NO: 22133 - DNA, 314 bp, Glycine max
gattgtatatcatgtacaatttcaaactctctctgggtgtctctctctctctagacttagattttgtgaatggctgaagtgtaacacggacaagtcatttgcgtccacaccgactatgagtggaagctccacctccagaacgcaaaacacttcaaaaaactgattgaggtgcattttactgctctctgccgtggtccatgccaccttatcgccccacatcttgcagacactgcaaaaaaatctcctcaatagatcttcctcaaagtggatctctatgaactgaggcctgatgctgaggaatatctcattgaggc

SEQ ID NO: 22134 - DNA, 406 bp, Glycine max
  modified_base (280)..(280): a, c, g, t, unknown, or other
atcaattaaattatttttttaaaaaatttttatgaattaggtacgaatcttatatataaaaatgaaaggaggattaaaattcattgatattgaaagggataacaaaaaatgcggtgaaacgggtcgatgcatgattaaagttgaaatatgtgcctgacttgaatttggcagtgcatagaatatgtagtcaactagtcaatgatctatagtcatatgtaataccaatttactaactgctatttttgaccactttcatgttttttttttctccttatgtcgntgacttatgtgcgatgcattatttattatataaatatagtgtcatctagaattgcatgcataaccatgacggagtgtggtcactgtttgggattagtttaagaaaatgtaattaaaatgtcatttt

SEQ ID NO: 22135 - DNA, 344 bp, Glycine max
ggggggaacaataatcgaaatcgtgttttcctatgatacaagggagcgacgaggtgcacggaattggatccctgagcgcaacaataagaaaatccccaaaaggaaccctaggtggcggaaattcaagttgcatagttatagcaagagtaattattctaaaaaaagactcaataatcgtcatcactcaaacatcgatttataaagaaagaaatgaaaacacttaaaaaggagattgaaatagatccttcctagcacaagaaagaaaacaccaagtttatatccgagggattgattaaccgacttatcttcaaaggtgaaatctcaattgcgattctttaagcgtt

SEQ ID NO: 22136 - DNA, 391 bp, Glycine max
ggagaaggaaaaactattgtctctggcgctgggggtttttcccgctaatcttcaggaaccgctcaatcagtatatggataagaagatagatggagacaccttgaagtcttacacgttgcattggccgcctcaaagatggtaggagtatgaacctattctgagctactgtcgcgaaaatggaattcatcttgttgcttgtggtacaccactgaagatcttaagaactgtccaagcagaaagaattcgtgggcttacaaaggatgaacgtaaactatatgcacctccagctggttcaggcttcatatctggctttacttctatctcacgcagatcttctgttgatagtactcaaaatctgactattccttttggtgcaagctcatacctttct

SEQ ID NO: 22137 - DNA, 392 bp, Glycine max
gaagaccaagactcaagaggggggtgttggtgcccatttcttcagtcctgcacatgttatgccgcttctggaaattgtacgtaccaagcagacctctgcccaagtgatagttgacgtgttagatatttcaaagaagataaagaaaactccagtggtggttggaaactgcacaggatttgctgttaataggatgttcttcccatatacccaagcaggtctcttgcttgttgaacgcggtgcagatgtttatcaaattgatagagtaataaccaaatttggaatgcccatggggcctttcagattgatggacctccgtgggtttggtgtggcaattgctactggcatgcaatttattcagaattttcctgagcgaacatataaatcaatgctta

SEQ ID NO: 22138 - DNA, 192 bp, Glycine max
tgggtcaatatcgcattatgcatgcttgtttcccaaatgctattcctaatcatcaagaagcaatgtctcgctcgttttacaaattcactaatcagtaccattttgctctacttgattgtttgtcactttgggacttcacctttctttatataacgaaaaaaaaagtaaaggctaaatggtgaaattttggtt

SEQ ID NO: 22139 - DNA, 347 bp, Glycine max
atcaataaaaagctttaccaaagtaagtaacgtgcattttaatttaatttaatttctcttgggttaacctcttttcacacgtagcttgtgattaaagtgagcagtggtgatatatattttgaggttattttattttaaacatttcatcgataacttttatttatttttacttttttctttcaatcaaatcatatcctttatcatacttatatttctttctcattaaatatatactagcatttgggtgtcaaaatatatatatattttttcctgatggagaataactcgaacttacttgcagagaggaattatcttgtcctcaatgtcacgagtccataagggaccac

SEQ ID NO: 22140 - DNA, 394 bp, Glycine max
ccatttacgttgttaatgtgtgtagaaatctaggttaaagcctacttttatgctcttatatatgaaaatcataagaatattacgtgtttttaaattctaaatggtacttggtatcaagatggtggagatgaaagttatgatgagctacaaagcgtgtgagaagaaggtaaatgaggttaagggataagtatggaagtgagggtgaaaatggtgatgtttatgttaataatttttatgtaatgtgggacataattaaaaatttgaaagtacatccaaggactaaaatgacatatgacagtatgtgattaaattcagtaatcaaaatgacatcaaatagttaactttaaggactaagttaaaaatgatatatatgttgtaacatccaagtcttgat

SEQ ID NO: 22141 - DNA, 377 bp, Glycine max
ggcggcacaaagcattcactgtgtcggaaaaagaggaagagaaaaaagatgagcgacggaggaaaacgacaaggtggaagagcgttgccgccgccgccaagaggccctccgcctcctcccccctctcgccctcgcctcgaacccgtcgatcgcgaaaagacatgtccgttactgctgcgagtgttcactaagattgggagtcaccattccatggaagactttgccgtcagaggcaaagagcccaaagacgaggttcagatttacacctggaaggacgctactctccgagaactcaccgatcttgtcaaagaagttgctccggctgcaaggagaagaaacgccaaactctccttcgcctttgtattccccgacaaaaa

SEQ ID NO: 22142 - DNA, 382 bp, Glycine max
gggcggcagtttggccgaccatgccgtccgagagggcgcgtggctccagggaggagtcaaggccaaggccgcgaatatgggagtgcgcgcccacgcgctcaatgcgggtcaggtcgcggctctcagagagtttcagctccgccatgatagaaacggcgaagatggtgcgagggagaaagaggctttcggggtttgtttagggttttgatgaaggcttggacttcggagtgcgcttgtgcgacacttaagttactgcttcagcatgtaactatatcaatgccgggatcgctagactgcaaaattagatgtatagtaattatgtatgtttaattataatcttacaaaacttagtctaagaaaactaaaattaatataacatata

SEQ ID NO: 22143 - DNA, 141 bp, Glycine max
gatttttacagcctcaagtgactcaagaggggggcatgactcaagaagatggcacaagagatcaaagatttaataaagattctctggagaaagttagttatgtttctaaaactggagttctggatgacaaaaaaaaaataa

SEQ ID NO: 22144 - DNA, 236 bp, Glycine max
aactctcttctacctgggggttatttacttaactttgtctctcttatctgatctcacaacaatatactgtaacaacacgcgaatatgcctgtcttcttgtaatatttccttcacctctcaaaacccattgtgagaaccctaaattctacagagaggttccatttggcccgatgcgattctaccaccacattatgcaatacattaaaattgtactttacactttcttgaacatagac

SEQ ID NO: 22145 - DNA, 414 bp, Glycine max
gcatgatgtctcaatggtggctggaggtggcatggcttatattggagagaaaggagttaacttatcaagtggacagagagctcatcttgctttggcaaggtgctagcttcatgttctcttttcaatttgtgtagccaatcccattgacaataactttgtagttcacatttcatgatatatatgtatgtgaagaatgtatatatttcaaatcctactacatttattttcatgataagaaaaggtaggcaattcttatataaaaaaaattattatatatctcctttattattattgtaagttgtaaataaacatgttgtacatatacatatgtaatcctttattatatttataactttttaattatatttaaataaatttttaatttaatttgtatatatttataacgttttaatt

SEQ ID NO: 22146 - DNA, 395 bp, Glycine max
gatctctcaattcaattggatcttttgcattctagctctctggtgtctgatttcagggttgatcttctcttcactgggttcaagaagcttgtgatgatgcttgcagcatatgccttgaggatttttgcaaaagtgatcctgccactgtcactaattgcaagcatgagttccacctgcagtgcattcttgaatggtgtcagagaagctcccaatgtcctatgtgttggcaacctatcagcttgagggatactacaagtcaagaactgcttgaggcagtagagctggaaaggagcttgaaggataccccatctagaaatgctgcgatttttcatcatccagcacttggtgattttgaattgcagcatttacccatggctatgaatgaagctgatatt

SEQ ID NO: 22147 - DNA, 326 bp, Glycine max
gatagcttcatcatacaaagcattgaattcaaagggcgggagttcattccttgtggtcagctttcttcctcaaaaccaaacatgtcgaacacatgcggcaactgcgactgctctgacaagactagctgtaccaatggaaacagctatggtgttattgtagagactgagaagagttacatctatactgttgtcatggatgttccagcagctgagcatgatgggaagagcaagtgtggcactaactgcacttgcaccgactgcacctgtggccattaaggaatatgtatgaaaatgtaaatgccatgtgttttggcaatacaaatatt

SEQ ID NO: 22148 - DNA, 375 bp, Glycine max
gatgtttcaagggataattaagggtgtagaagagtgattttattggacagtggggcttcccataatttcatttcacaaaagctagttcaccacatggattggccaattgaacagacccaaaaaatgaaagtcaagttagggaatggggttcaaatagaagcacaggggaggtgtagggagctagagatgtacattggcagtcacaaattaaggccaaatcttcaactgtttgaattaagaagaattgatgtggtgttaggcatggaatggttgaaaacattgggagataccattattaattggaaataacatacactgagtttttgggaaaaaaggaagatgggttactcttggcaataaaggagggtgcaaaaa

SEQ ID NO: 22149 - DNA, 81 bp, Glycine max
aggactatctaaaaatgaagaattattcatgaagtacgtggtggatacgtgttccttctgttctataaatgtgtggatgtc

SEQ ID NO: 22150 - DNA, 318 bp, Glycine max
gacccccatctcgcgttggtgcggagcatccttcgcttcaatctctctctctttgcgctttctgcaaaccgaacatttcatctccaaagggatcaacaggtcgaaggaaaaatggggctgacattcacgaatcttttcaacccgcttttcccgaaaaaagaaatgccaattctgatggttggtcttgatgcttcctgtaaaaccactattctctacaagcttaagctcggaaaagatcgtactacaattcctaccattgggttcaatgttgagactgcggaatacaagaacattagcctcaactgttgggatgttggt

SEQ ID NO: 22151 - DNA, 406 bp, Glycine max
  modified_base (396)..(396): a, c, g, t, unknown, or other
agggtggagcacattacggtggataggggcaagcttgccaagatcatggcagacttcgaggcctggttgaaggagttagagtccaagctgaaggagttcgagcagcgggcgactagggagagagaggtcaggcagcaacttgaagaagagttgctgatctacaagaatgaggttttggagcagcatgagaaaggctttaaaaaggttgtcaagcaggccggattcttccaaaaggaccttgacttgggtctttttgaccctttcaattgtttttggaaggttattatgactgaatttgattgtcaatgtttttcaaaagacctagtcaattacccatgcatttagatttgtcgtgctcatctttatacatgttctaaaatcacttaataatatggntattagtttt

SEQ ID NO: 22152 - DNA, 350 bp, Glycine max
gaagtgcttatatctcttattagtactattgtatgtagaattggtttggggagaaggtatgaagaggagggatctgaaggtagcagattccataagttgttcaatgagtgtgaagctatgttgggtaacttctttgtttcagattatattcctttcatgggttggattgataaactcaggggactggatgcacgtcttgaacgcaatttcaaggagatggataagttctaccaagaagtcattgatgaacacgtgaattctaagaaaaagactccagaggaagaggatttagttgatgtcttacttcaactgaaagagaacaacacgtttcccatagatctcaccaatga

SEQ ID NO: 22153 - DNA, 412 bp, Glycine max
ggttctagtgtgtgattgtttgttggtgtaactggttcttcttcttttgttgttctgtgtttgtgtttgttttttctctcacctgaaaatgtcttgctgcggtggtaactgtggttgcggaagctcctgcaagtgcggcaacggctgcggaggctgcaagatgtacccagacttgagctacactgagtcaaccaccaccgagaccttggtcatgggagtggcacctgttaaggctcaatttgagggtgctgaaatgggtgtgcccgctgagaacgatggctgcaaatgtggaccaaactgctcctgcaacccctgcacttgcaagtgaggtgttgggagagcaagcttcaagcagagattgcccttaattaggaataatgataaactattaatgtgtagcttaaaacttatg

SEQ ID NO: 22154 - DNA, 404 bp, Glycine max
tttactgtcgttttaacaaaggtttttatttattaatttttcaactatacattttttataattctaagatatcacgcatagtttagttaatattataattttttataacttttcataatttataaaaaaaaataaaagttattttgtagaaaattatatataatttactgaaatagtaattttttatttcaacataattctaggagtaattttggttccaagcaatgctattatatcctcaacattaaaccaaatccttagttccaaacaatgcttatacagttgggataagatagtgtataacaaatatgctgaatataacgtggccaaaaatatatccagaaagattagtaatcatttttacgataaaccccaaaacataacaaaaacatgataaagcacgg

SEQ ID NO: 22155 - DNA, 412 bp, Glycine max
ttattgcttgtctctttgtttccttgtttgtgagggggcatacagggaattggaaaagaggattggtgtcatcctttgaagaatttgagtcaagaagcaaggggaaaaccaccttaaggactattgaactaagaagcactccaaattgagtgaatcaccaaagagagaacaaccaccaaaattgagtacctttttgtaattttttaattggcaatttacttactttcattgctttcaaattttgtaacaaaaaggcctttcattggaagtaagttgggagcctccaataggtcaccctacttctatttgtgtgtaataattttaggcaatttccccttaggattgtgagtgttttgctgggaaccataaatgtggtcattcaaacactcttaggattcacctagtttacatt

SEQ ID NO: 22156 - DNA, 90 bp, Glycine max
gagacctcaggtcaggcggggctaccctctgagtttaagcatatcaataaccggacgaatatagggcaaaataattatactcaaaatgcg

SEQ ID NO: 22157 - DNA, 392 bp, Glycine max
gacttgtggtagttgagtgacacagaaattaagaggaagctacataggggtgggcttttctcaccttccttctctcccttcagacaagggacgaaaaatcagagagagagagagagagagagagagaaattccaaaaccatgtcgtcccacagtcatctaagtttcgcctttggggttctaggtaacatcgcctccttcgtgtgctttctggcaccactaccgacattttatagagtttgtaagaagaaatcaaccgaagggttccaatcaattccatatgtggctgcactcttcagtgcaatgctttggatcttttatgcctatgtgaagacccgagaaatgcttctttataccatcaatgcattcggttgcgtgattgaaaccaattacc

SEQ ID NO: 22158 - DNA, 369 bp, Glycine max
gacatcacaagaagcacaatttctctctgggtttttgtgtccaaaatggctcctagttctactcacaatactgggttctatgtgcttatgctagttgggatagtgattagcactatggttgctacctgtgctggtagcttctaccaagactttgatctaacatggggtggtgaccgtgctaagatattcaatggtggccagcttctatctctttcccttgacaaagtctctggctctggcttcaaatcaaagaaagaatacctatttgggaggattgatatgcaactcaagctcgttgctggcaactctgctggcactgtcactgcttactacttgtcatcccaagggcccacacatgatgagattgat

SEQ ID NO: 22159 - DNA, 264 bp, Glycine max
atgataaaggaggacaggttgtgagattttactgtagatgttacggtcactgatgaagatgatgcttgttcttactgtcaaaccagctcctccgtcgtgccaagctttcaagccaccgcgaaagactttgtagtcgctgcgtttgtgaacgacgagcgagcgtttagatctaggttttttcaagtgggcgttcttgatgttttttttccttcctttagatcttatctaattattgttcattattgtattttcccctttcggtct

SEQ ID NO: 22160 - DNA, 441 bp, Glycine max
gattcatcttcaactcatcaattaatattctccagacacatcaaactagacatacactacctagcttgttcttaaattccacacaaacacaacaaaaactattagcatcatctactttctagcttattgttcaagagttgtgatcaagaatgagttcaacaagccgtgcttggacttggaccgtggcggcaagtgttggagtggtggaggccttgaaggaccaaggtatatgcaggtggaacagtgtgatgagatcagcacaacaacatgctaaacataatatgaagtctttgtctcagaccaagaagctttcttctcaatcatctgttatggcttcagccaaattgaaagatgagaaagctaagaaagcagaggagtccttgagaacccgtatgtacttgagttgctggggtcccaacttaatacagatgcatggatttt

SEQ ID NO: 22161 - DNA, 361 bp, Glycine max
taatgtgacttgagaagtacagcatttattaggggagaactgaattagagctgccgctatgagtgcgacaaaatgtctaatgagaggaatggaagtgatcgacacatgagctgccctaagtgttccactatgtggagcaactctaggacaaattttcaacgtgcttgcagagcccattgataatttatgtcctgtagatactcgcacaacatctcccattcatagatctgcgcctgcctttatacaattatgatacaaaattagccatttctgaaacacgaataaaagtagtagatcttttagctccttatcctcctgcaggaaaaataagacttttcggtggagctggagagggtaaaac

SEQ ID NO: 22162 - DNA, 405 bp, Glycine max
gagactcggtgagagttacgccatggacgattcgtggcaactcctccaagcagcttctgattttgttcactacccagggcctcacagcgatgattcctccagggactttctcaatcgtttccctctcccagtcatcatcaatgcattacagactcagttagatgtgcctggcctagaaaatactcttgttgcatgccttgaaaggttattcaatacgaagttgggtgcttctctgatcccacagtatatgccttttgttcaagttggtctgcaggcagattctcaagcagtcagatccttagcttgcaaaacagttacatcccttctggagaatctagacaatgatcacaaagttgctgctagtgcttgtctaattaaagacttcaacatatatcctcttttgct

SEQ ID NO: 22163 - DNA, 239 bp, Glycine max
gatactcaattcattttcttcttctgcttcaccggtctcttctcttctctcatagggttagggtttttttctcttcattgctctctctgtcggtttatttccatggctcaacaagatgctcaaaatggtgggtcggagaatgcccctgctgccgtgtcctttgtcgctttgaagccgcaactccttatcgaagctcccaaagcgaaccacgccgttctgttctacaaggccccgtttgc

SEQ ID NO: 22164 - DNA, 230 bp, Glycine max
tactacaaaaaaaacgacagagatctttttcacaacctatccatacatttactaggctgctttttctccattatacaaccaacatctccaacttaacttctcaacatagacatatctcacatacccattttaacattactcaacattccactgggggaacacccattcttctttacacacttaaatttactgtaagcacttgctttctactactccgataccaaaagcca

SEQ ID NO: 22165 - DNA, 403 bp, Glycine max
ggcacaagtgagtttgttgatcgagataactgtggacattgtgatgaaaatgaaggtccttgttttcttcgttgctacaattttggtagcatggcaatgccatgcgtacgatatgttccctctccgaatgaacactggctattgtgcccgtactccggaggtgaaatgcgcaagttggaggcttgctgtggaagcacacaacatctttggctttgagaccattcctgaagagtgcgttgaagcaacaaaggaatacatccatggcgaacaatatagatcagactccaaaacagttaaccaacaagcttacttttatgccacagacctcgaagtccattccaaggacacatttgcgttcagtatagatggcaccgtactcttttatattccatacttacaaaaa

SEQ ID NO: 22166 - DNA, 330 bp, Glycine max
gaagttttgtggtgtggtttagtgtcaaatggcggcgaggagaagctcttttcctctgatgaaatacttgagagtgcgcgtcgacgctcttccccgcaacactcccttaaccctcgctcccaactttttgattcgccgcttctgtgaagaggttaggggttgttttctcgacaagtctgaggtcacagatcgcgtcatttcctgcgtcaaaaacttccagaaagttgatccttcaaaggttaaccctaatgctcacttccagaatgaccttggattggatagtttagattcggtagaaattgtgatggctcttgaaggaagagttgggtt

SEQ ID NO: 22167 - DNA, 438 bp, Glycine max
gactaaacaaataaatgtaacggcggccacggggaggcttgaacttagaacctttgctgaccctcgtggagtgatccggtggacgcaataactgcaggcagctctgacttcagtgcaagcaagcatcaaaacattgctttaaaagcatcaattcagcgtttctgcaagttccaattttccaactatccacagaaacggtcgtttgaaaaaaagctgttaattcgggagcgatatggaggtcgaactcaaagagctgcacgccgatcttcaatctctgagccaatcgcttcccgatccatctcaccatgatttgctccgcaagattcaattgcgtgttggggaccttgcgaagcttgcagaggcagcacctgttcgacgctctaaagttgaggatatgagtgctgagggtgtagatagcaatccttatagtcggcttat

SEQ ID NO: 22168 - DNA, 353 bp, Glycine max
gtggtcttctacgagctgatatgctacaaggcaacaacaaaccaagaatgccaaggctattaatcgatggaccttatggagctccagcacaggactacaaaaattatgatgtaatccttctggtgggactaggaattggtgccacccctttgataagcatactcaaagacgtgctaaacaacatcaagcaacataaagatgtagaagaaggagaggtggaaaaggacaagagaaaaccttttgccactaaacgagcttatttctactggggtaccccggagggaaggtcctttggatgggttaaaagggggatgaatggagggggaaaaaatggcaagggaaggagtattgga

SEQ ID NO: 22169 - DNA, 439 bp, Glycine max
ctagcactcagtctcagccaaaagggtgtcaagaggctctgtcatctcggagcctggaactgatttcagctgaaatggttaccattttagtgcatggccttgtgtagcatcatatcagaatcctcaaggggcacagaacgagcatgatccaaataataccactatttttgttgggaatttggatcctaacgtcacggatgatcatctgagacaagtttttgggcagtatggggagttagttcatgtgaagattccagctggcaagagatgtggatttgtccaatttgcggacaggagctgtgcagaagaggcactgcgggttttgaatggcacacttttaagcggacaaaatgttcggctttcatggggccgaagtccttcaaacaaacaggctcaaccagatgcaaaccagtggaatggtagtggtggtggtggatac

SEQ ID NO: 22170 - DNA, 404 bp, Glycine max
gacaccaacaccaaaacaaacgcactaagatggcttcctttgtatccttcctagtgctgcttcttgcagcccttatcctcatgcctcaagggcttgctacttactacaaaccaattaagaagccaccagtgtacaagcctccagtgtacaagccaccagtgtacaaaccaccggtttataagccaaaaccaccggtttacaagccgaaaccaccggtttacaagccaccatataagaagccaccatacaagaaaccaccttatggaaagtaccctccagtagaggacaacacccatgcctaaagcaagcaatgaggtctattatctacttaataaataagaggaactgctttgtgttttctagcactgtgatttacaacttcgtagcaatgcatattcttgact

SEQ ID NO: 22171 - DNA, 425 bp, Glycine max
gactcttcaaattaaaccagcaaaatcttatcttagctgccccatcacaacaaccacgatactatttctcatactctattaggcaaaaacaccaccaaatgggagaggttagttttagtttcatcatcatgtatattcgtcattcattcattcctttttcagtagtatattcagattcttgcaattccctttaacacttatcatcacgcgtttctaattaaaactcgtgtcgtttatggcaggaaaaggagcagcctaagaatgacaccgagaaaaagcccgaggaggtagcccccaagaaagacgacggacccatccctgtcgtttacaaactcgacttgcattgcgagggatgcgtcaagaagatcaaacgcacctgtcgccacttcgaaagtaaatttaaatcaaatcataataattaatca

SEQ ID NO: 22172 - DNA, 387 bp, Glycine max
catgccaaatatagaggggagagaactggtgcggatattgcttgcagcaggagctgatccatctgctcaagattcccagaatgggaggacagctttgcatacagcagctatgactaatgacgtggacttggttaaggttattttaggtgctggggttgatgtgaacattcgcaatgtgcacaacagtatacctcttcacttggccttagctaggggtgcaaaggcatgtgttggactgcttcttgatgctggagcagattataattcgaaggatgatgatggtgacaatgcttttcatatagcagcagagacagcaaaaatgattcgtgaaaatcttgactggcttattgttatgctaatgaagcctgatgctgacattgaagttag

SEQ ID NO: 22173 - DNA, 396 bp, Glycine max
gaatcctcaaccagtaacctgggggtttctctctcttctgctctcactctctcacttgggggttgaagatgagaatttgtggagcagcaatcagcagcagctacaccaccacgtccaattcgcttttagtgtttgcttcctcttccctctccagtcctgccaaaaccaagttcctgccctcactttctagattttctgtcaagcgtctctgcttcctttcccaaactcgtccgcacatttccgtgaacaagccctccatgaacctgttgaacagactcgggtttggcagcgcaagagcaccagagaacatggattcatccattcctcagggtccagatgatgacataccaacaccaggccagcagtttgccgagtttggtgctggctgcttttggg

SEQ ID NO: 22174 - DNA, 412 bp, Glycine max
ttattgcttgtctctttgtttccttgtttgtgagtgggcatacatggaattggaaaagaggattggtgtcatcctttgaagaatttgagtcaagaagcaaggggaaaaccaccttaaggactattgaactaagaagcactccaaattgagtgaatcaccaaagagagaacaaccaccaaaattgagtacctttttgtaattttttaattggcaatttacttactttcattgctttcaaattttgtaacaaaatggcctttcattggaagtaagttgggagcctccaataggtcaccctacttctatttgtgtgtaataattttaagcaatttccccttatgattgtgagtgttttgttgggaaccataaatgtggtcattcaaacactcttatgattcacctagcttacatt

SEQ ID NO: 22175 - DNA, 273 bp, Glycine max
  modified_base (263)..(263): a, c, g, t, unknown, or other
gaacacaactccactcttagctgccattggtttttggggttccatttctcttcctttctaagcttttttcgattacccatttggagattctgtcctaatggctcttgctccttccaaagtttcctccttttccggattttctcccaaacccagtgttggggatgctctgaaaaacccaacttgctctgtttctctgagctttgcgaatgtgaaacttggaagcagaaaccttatggtttgtgcctcaactgtgcctctctcangggtgatttt

SEQ ID NO: 22176 - DNA, 276 bp, Glycine max
gagattgcttgccatttctgattcccactccgaggtctttcttttatgtggtgaccactgaactctacttgatagatcatacccacatggatgctaccaatctcaccttgcatcaagaatatcactcatctaacttttatctgaaaagattgtgcgcgcacatacactatctgctcatgctacacatgtgaaatctgtttgttcaacgcccttaccctgccacatcatgaccagtacatttactgatgatgctactctcaaactcttccaaagtta

SEQ ID NO: 22177 - DNA, 310 bp, Glycine max
gaaggtcacggcgagacgagccgtttctaattaagaataggtgtcaagtggaagtgcagtgatgtatgcagctgaggcatcctaacagaccagtagaattcacacttggaaaaatatgactagctttgtttacaatttagctagaagcaactgctataagatatgaagagggaagaagaatcaatttcaaagaaatagaaaattctcatatttcaggtatcaagatattgagtttctccaccttctagaagtctttcttgttttgtcaagtgaatctggaatcttaggagaatcattctgattttccact

SEQ ID NO: 22178 - DNA, 332 bp, Glycine max
gggcgttggttggggttctaacgtctaagattgttttgttagagttaaacacgacaaactcaaatacgtgtgcattacaactcctaacccctcatcctcttcttctctctaatacatacccctccgtttttggttggattctcggctttttaaattccgtttctggtttttcccatttccaaagtagtctgttatcatcgtcatccctttataggacagacaaagctgattcacttaggagcctcaaaagctatgtctacaacttctcgtgctctttccactcccttggaaaacaagtttatgaaacccccattattcttttcaactttcac

SEQ ID NO: 22179 - DNA, 395 bp, Glycine max
gccatattttagctcttcaagaagaaattgaggagctggaacgtgagaatcgtctccacagccaacaggaggcaatgttaaaggatgagcttcgcagtatggaaagatcaaagaaaagggaaggtgttgatatgacatatttgaaaaatgttatcttaaagctgcttgagactggtgaagttgaggtattgctaccagttattggaatgctgcttcagtttagtccagaagagatacagaagtgtcaacaggcatatcacaactccacagatgttccaccaccaaatcctgcaagcgatacttcaggatctggcctatcgcttttctcaagattcacattttcttaatggcataaatgggagtgctggcgaattttgttgttgctgttagaatgt

SEQ ID NO: 22180 - DNA, 410 bp, Glycine max
ggctataggagtagtcttcaatcttcttcatctggatctgtactagctataccgttccttctgccacaaattaactggaaaggatggtgctgcccaagttctctccgttctcacggcttctcctttcttcccttgtgattctcttaataagctatccagttaaatgtgacgatgatgaggaagacaatctttatcagggtatcaacaagtatcgagcatcgttaaacttgaaagctctaacaaggaatgacaatgcagattgccttgctgaaaaaatagctgaccaattcaagaaacaaccctgcacaaataccacaggtgctaacactgtacctggcacagagcctcagttttctaactatccagaccttttatctaagtgtgacttggctatttccaacacaagggat

SEQ ID NO: 22181 - DNA, 233 bp, Glycine max
gaccgaatcgacttaggtttccccgccgccgactacttcttcatcggacggagattctccgtcggatccgactaatccgacggatgacactctcactcgcacgctgtgattgacgacagtgtcctgaggttctgctctcattcctacaaatacttcaaccaaaactactactttgcgagcatccctctctgctgggacgcgctttaatttggtgacaacatcaataactacta

SEQ ID NO: 22182 - DNA, 324 bp, Glycine max
gccatattttagctcttcaagaagaaattgaggagcgggagcgtgagaatcgtctccacagccaacaggaggcaatgttaaaggatgagcttcgcagtatggaaagatcaaagaaaagggaaggtgttgatatgacatatttgaaaaatgttatcttaaagctgcttgagactggtgaagttgaggtattgctaccagttattggaatgctgcttcagtttagtccagaagagatacagaagtgtcaacaggcatatcacaactccacagatgttccaccaccaaatcctgcaagcgatacttcaagatctggcctatcgcttt

SEQ ID NO: 22183 - DNA, 276 bp, Glycine max
gtttccagtaaataatgttgatgagaaaaaaaatgcaaattggaacctacacaatattcatcactaaatgtttcattctttatcatgattttttcaggaaatgatcgttgctcaaagaaaagcaaaaacataagttgtgagaacctttgttgaagaatttctttcagaagctcattaaaatcagcttcacatgttcaacccataatcaacaaaaattaactattttgtaatattcaaactgaatgaaaaacattatcaatcaaatttaattaaata

SEQ ID NO: 22184 - DNA, 226 bp, Glycine max
ggatctagagtaaatgttaatgttgtagtctaacgataacctagtgaaaatttcatatacattcagattcaacatcctctcctaaccgcttgagtcaccctttcacatacaaattatctccaattaataatatatcgtttgaatgagcctcacgaaaactgtcatgttcacaaaatctgcgtgtgtagcaaatctctttgctttcaccatacataatgagtttgtc

SEQ ID NO: 22185 - DNA, 373 bp, Glycine max
  modified_base (344)..(344): a, c, g, t, unknown, or other
gttccttgaatctttggtcgtttatttaaatagtttaatatattttgtaaaattttcattttattatttgttccttcctcccttcagtgtggggatcaagagtgttgtggatgagaatgaaagaaaatcatcgggtggtcatcatggtgctgcttgtcctgcgtgtgagatggctgttgtttggatgcagaaccagctgagccgaaatcagacacaagatcagatactaagttacatcaaccagctttgcgataaaatgcctagcccgatgggagaatcagctgttgactgtgggaatatctcttcattacctgtagtgtcctttactattggtggaagaactnttgagcttagcccagaggagtacatactc

SEQ ID NO: 22186 - DNA, 273 bp, Glycine max
accacactcaaaagaacaaccaaagggagaccgggagtcttttttgctaccttctaacagaaaaatatactttcaagaatcaccattaccttatgggcgccttgcttccttcaacgggagcatcacaacatgcgtagatcaacataaaggaactatatgccaccaaccatgatggcgcccattctactgcctgtgatattgctatgaagctgatgcaggagcagatgagcactggtcaaactcttgatctcatcctgattttcgtcaacaacc

SEQ ID NO: 22187 - DNA, 360 bp, Glycine max
atccattgaagttgctgttgttgatatctgtgggtcccgcattgcagcctggaacagtgaccagcttcctatctatgaacctggccttgatggtgttgtgaagcaatgccgtggcaagaacctcttcttcagcactgatgttgaaaagcatgtctttgaggctgacatagtgtttgtctctgtcaacaccccaaccaaaactcagggtcttggagctggtaaagcagcagatttgacatattgggagagcgcagctcgcatgattgctgatgtttcgaagtctgacaagatcgttgtagagaaatccacagtcccggttaaaacagctgaagcaatagagaagattctgacccacaatag

SEQ ID NO: 22188 - DNA, 400 bp, Glycine max
ggcatagtggaaaaagaagaagttgctatataaggtggttaaagatctaatgttgggtgatgaagggaaagggattcaccaaagaattggaaagcttaaggatgctgctgctgatgctttgaaagaacatgggtcctctacaagagcactttcccaatttggcactgaattggagaactgaatttcaagatggccattcaagtaaattgattggttttcttaaatataagtagaataaaaagctaggaagcatcatcaaaagaaaaatattggttgaacttgctaagggtaatattttagttatgcacgaataagttggatgaataaaaatacagtatgatggtagaaagaattttaaaagttaactatcaatacacctattgatattcttgctaaaagc

SEQ ID NO: 22189 - DNA, 303 bp, Glycine max
acaacaatactttgctgcaggggtgagtcaagcacagcctcctccactaaagaaaaatagaaaccttcctggcaacccagacccggaagctgaagttgacgccttgactccaaagactctctaggcaactaataggttcatttgtgagatctgcaacaagggatttcaaagagaccagaatctccaacttcacacaagagggcacaatttaccatggaagctgaagcagagatcaagcaacgagattataaggaagaatgtgtatgtgtgcccacaagccagatgcgtgcaccactacccttc

SEQ ID NO: 22190 - DNA, 411 bp, Glycine max
gaaaatacacatgctgcaaattgctcacccaatcaccaggcatgggagaggttgacgcagcattcatccaagacccaccacacaggccaaagctctccaccatccaagccgaaggaattcccataattgatctctctccaataaccaaccacagagtttcagacccttctgctattgaaggcttagtgaaggagataggtagtgcatgcaacgagtggggtttcttccaagtaacaaaccatggagtgcccctcactctaaggcaaaacattgagaaaagcctaaaattgttctttgcacagagtgcggaggaaaagaaaaaggttagcaaaaatgagaagctttcaacgggttattatgacacaaaacacaccaaaaacgttagggactggaaaagtgtctttgattttc

SEQ ID NO: 22191 - DNA, 364 bp, Glycine max
ggagctttgttctcttttgggttagtgagagaaagttctctctgcttctctctctaagactcaaaaccctattgcgtgctttgcaatcgaccccgattatggccaacagtaacctccctcgaagaatcatcaaggaaacgcagcgtttgctcagtgagccagcacctggaattagtgcgtccccttcggaagacaatatgcggtatttcaatgtgatgatccttggcccaactcagtcgcctttatgaagggggagttttcaagttggaattatttttgccagaagaatatccaatggctgctccaaaggttaggtttctgacaaaatatatcatccaaacattgatacgcttggcaggatatg

SEQ ID NO: 22192 - DNA, 372 bp, Glycine max
gataccaaaaacacattctctctctctctctctctgtaaatactaaaaaagaaaagaagaaaaacaaataaacagtgatggaaattgaggcaagcaggccggtggtggcaaagaaggtatggaacatggtacgcgtgttgttcttcatgctgagaaagggcatagccaagagcaaaataatggtggagttccatctcatgctcaaacgtggcaaacttgcacttaacaacctcatcctcaaccatcactactacaacatgcagacctccttcttcacatgccgatcccaccaccacagcaccttcatctccccaagcgactacgagttcagctgcagcaacagccctgccatccccaccaaacgcaccaacc

SEQ ID NO: 22193 - DNA, 394 bp, Glycine max
tttacggtacacacatcttacttctctctctttgatcatacacttagatgcttacaaataagatcgttctgccagagaagctctgggatgatgttgtggctggccctcaacctgagcgtggccttggcaggctcagaaaactcaccaccctcaaaactatggatgaaggagaaagtagcaagctgcagaagacgttgtcgatgccgtcgacaccaacaaccccgatgactacgacgactccaacgacaccgggatcggcccgtaaagctgacaacgtttggaggagcgtcttccatcctgggagcaactccgacacaaagaccatcggagctcagatgtttgacaaaccacttcccaacactcccactgtctatgactggctgtacagtgggga

SEQ ID NO: 22194 - DNA, 184 bp, Glycine max
tgtaagataagaaaataaagaagtgaaataaataagtgttctaaattagttgaaatcaggttatgtgtaacctttgaagaagttagaagaggaaacttttaaagaaacctaggtgcataaattgactttaacttatgagagaagtttgattcattggaactccttattttcttcttctataaga

SEQ ID NO: 22195 - DNA, 240 bp, Glycine max
  modified_base (227)..(227): a, c, g, t, unknown, or other
agttctttatttgtttatgtacttagtgatttttatttgattggtcatcttatagatgaattcaggaattgacttgcgttttgacaagcctttttgaaacccaaacatgaattgagtacttaattaggattatctccaggaatagaataatcttggttaagtctcgctaattctcgaccattaatgttaattgcttgtgtcaatatgttcaagggattgagtatcangcaggtagtttgg

SEQ ID NO: 22196 - DNA, 367 bp, Glycine max
  modified_base (363)..(363): a, c, g, t, unknown, or other
tttgggttcaccaaaccaaagtaagagtgagcaacttccaacaccatagtgaaatggcttccaaggctgcacttctcttgtgtttcaatgttctcttcttcaccgtggttagctccacatatgtgccatgcaacccaccccccaaaactccaaaacacccacctgtcccaaagccaccttccccaaagcaagcaagttgccccaaagacactattaagtttggtgtgtgtgctgatgtgttaggtttgatcaacgtgcaacttgggaagccaccaaagaccccatgctgcaacctcattgagggtctcgctgatcttgaagctgcagtgtgcctctgcactgctctcaaagctaatgtgttgngcat

SEQ ID NO: 22197 - DNA, 295 bp, Glycine max
tgtttgtttctcataaccacaggggaagaacacaaaatgatctatcaacatgcaacctcactcaccacacaccttcatttgcattccaagatatggtccttgaccatgattccgaccgcacctacgagaagagaaaggaaggcgaaagattcacgctagccacatgtgcgaaggccacgtataagaagcaagggagtgtgcgcgacacaactaataggggtggggaccaagatagactagtatcactaatgaacgtggaacatgcaaggccgaagcaaataacgtgctaacatca

SEQ ID NO: 22198 - DNA, 386 bp, Glycine max
ctctgccataccatgtgctgaagcccttctttgtctattcatcagatgatcttatcatttgagcttccttttgctttggttccactcctcaagtttacaagcagcaaaaccaagatggggacacatgtcaactctaccatggtaaatttttttggtaacatgaaatttgtagttgtgcattgcaaccaaatagtaaattgattacatatttgacaaaaatcagtagagaggtgctgttagaactgtaaacataaaaagatgtgtctatattgagaacctggattccctgcagttcggaatttaacacacccacacagtcagctaattgcaatcatcagatgaagatcaaacgatcatattttatctcaaatcaaatttaaaatatg

SEQ ID NO: 22199 - DNA, 367 bp, Glycine max
  modified_base (322)..(322): a, c, g, t, unknown, or other
  modified_base (355)..(355): a, c, g, t, unknown, or other
aaaaagtttacttatggggacacttatcatacatgaattttctctacccttccatattaaatatatagaaatattgcatattgattgctagtgtgtccaagaataaacatgtcggccaagttcctgaccgtgccgccatttgagtgcgcctggagagaggatttgaaattccgggaggcaggccggggttgcgtcgcctttgaagcattcgcctgcaacgatgtcacactggttttccgggagaatgtgggaagccagggctaccattataaaagagatagcagtcctcactacacaatcatattggggagtcacaggaatncgcgactcagaattgaggtcaatggaaagctgntgtcgatgtggc

SEQ ID NO: 22200 - DNA, 407 bp, Glycine max
  modified_base (342)..(342): a, c, g, t, unknown, or other
gtttacataagggggttctagtgtgtgattgtttgttgttgtaactcgttcttcttcttttgttgttctgtgtttgtgtttgttttttctctcacctgaaaatgtcttgctgcggtggtaactgtggttgcggaagctcctgcaagtgcggcaacggctgcggaggctgcaagatgtacccagacttgagctacactgagtcaaccaccaccgagaccttggtcatgggagtggcacctgttaaagctcaatttgagggtgctgaaatgggtgtgcccgctgagaacgatggctgcaaatgtggaccaaactgctcctgcaacccctgcacttgcaagtgangtgttgggagagcaagcttcaagcagagatagccctttattaggaataatgataaactattaatg

SEQ ID NO: 22201 - DNA, 356 bp, Glycine max
gtaacataaacaagagtgttaacgttaaatctcacagtcccagccagagcagcaccgtggagtccgccaccccggagcgtgaagccacgcgccgctccacctccgccgcaatcgaccgtttcccgttcctacccatccagcagcaaatcctcatgacccaccccgtcgcagcacccatgcgcccggttttctttctcgaccgggcccacttcatgacccagtctttcccgctccggttcgaacccggtccggtccagagcgactccgactcctcctccgtcgtcgtcgattgtcaagccaaaagagagctcaatctcgatcttaacttggctccgcctaatgaatattaacccttt

SEQ ID NO: 22202 - DNA, 262 bp, Glycine max
  modified_base (13)..(13): a, c, g, t, unknown, or other
tatggtgtgacangacacagaaggaggaacatggactcactggggtgatgggcaatgttctggcccggcgcgcctccctgtttggggccggagggcatgcgcctgcgcggcgtctgcactggtaaccgtctcttgcttcttacctgccgggaattggcatctcttggcttgtgatgtcaacgcgtttgaaaggatacatcccttttctactgtgacaaggcgacggagactgacctgggctctcattgatatgatgcatcct

SEQ ID NO: 22203 - DNA, 349 bp, Glycine max
gacggtttgcaattagcactgatttttttcacactgccggtgcaacactggcttcagagaagaaactttcgaacccaatgagggggataaaagtgctaaagctcgatctgaatatctctgatgaagagagtggagatcgcctaaccagagccgccaaggagccggaacatacttgatggccaaacgcacacagatttccaaagcaagggacactgatcgatcctttgggattagaagaaatgaaaagattgcatgctatgtcactgacagaggtgacatggcgatgcaactttataagaatgactcgaatgctaaagaatatgaacttatcagaaagaattacaatgat

SEQ ID NO: 22204 - DNA, 364 bp, Glycine max
aaggacacggaggggacaacccaacgcaacccaacgggcactctctcttttctctcttaacacaaaaaccctatcgttcttcgcggtttcgccgattctcgccatgccgaaagccaaatccgacgccaaaaccgccgatagccggttgaagcgcaagggcgctggtgctggaaggaagcaatcgaagaaagctgctaaagatcctaacaagccaaagagacctccaagcgctttcttcgttttcatgtccgagttcagagagcagtttaagaaggagcatcctaacaacaaatccgtcgctgttgtcggtaaagctggtggtgacaaatggaaatcgctgtctgatgctgaaaaggcccccttc

SEQ ID NO: 22205 - DNA, 195 bp, Glycine max
tctgatagaaaggatagtcgcaaccgacctaccagcaagcgcacgttgaaatcccagaagaccaagaccaagcagaggagggtggaaactgatgtcaaaatcccttctggcaagactgagaatgatgaaaatattgatgagtctttcacgcacaatgttgggctttctaacaaggtagatagtatgaaaccccct

SEQ ID NO: 22206 - DNA, 228 bp, Glycine max
tttggttcttccaaaggaacgaaaaactggtctctttcctagaggtagaagagttgcaaatatgagactacgacatgtggagccggatgaagaagccctacaaaaggaactgttgggtactctacctgagtttcagatccaaaaggcagaaggctggaactgactgaggggactacagcagatcctgtgtctgggaactgaaaaggatgtgctagataatataactgg

SEQ ID NO: 22207 - DNA, 396 bp, Glycine max
  modified_base (213)..(213): a, c, g, t, unknown, or other
  modified_base (357)..(357): a, c, g, t, unknown, or other
  modified_base (361)..(361): a, c, g, t, unknown, or other
  modified_base (382)..(382): a, c, g, t, unknown, or other
ggtggcgccgtttacgatctcactctgcactctctccttctcatcctcttctcttcgcttctctgttcgtgccacttcttctcgagcaatggcatctcatattgttggttatccacgcatgggacccaagagagaacttaagtttgctttggaatctttttgggatggaaagagtagtgctgatgatctgcagaaggttgctgctgaccttangtcagccatctggaagcagatggctgatgctggaataaagtatattcctagcaacactttctcatactatgatcaagtactggacacaacagccatgcttggggcagttccatctagatataattggaatggtggggagattgngttngatgtttacttctcgatggcnagagggaattcatc

SEQ ID NO: 22208 - DNA, 337 bp, Glycine max
  modified_base (6)..(12): a, c, g, t, unknown, or other
  modified_base (14)..(14): a, c, g, t, unknown, or other
tttttnnnnnnngnccaattctattaattctttctaaaaataaaaaatattctaataactaataataaaaaggaaaataaagattcattagaatattataaaataacaaataatagaacaaaacaagattctttagttatatatgtaaaaaaaaaaaatggtttatttataagaatacatattccattctatatcaaaacaaaatataaaaatttggaatagattctatgaaatctcaaaaaatcccgctattcaattattcattaaacatatgaatattagtgcatattattttatcgattagattaaatagattatctatatatatagatagata

SEQ ID NO: 22209 - DNA, 264 bp, Glycine max
gacacacacacattccacttagttaaacatggagaaatcaggctctaacagtcctaaatctgctttgaagtttgtgaagaccacatctcagtctgcagctcaatggagcagtactaattcaagaggaatgacaaaagatgtactcaaagacaagttctatgacaagactaaagcttcacgaaggtctccacccaaagaaagttacatggcttcaagaaggtctccacccaaagaaagtaacatggctccaccaaggtctccacc

SEQ ID NO: 22210 - DNA, 351 bp, Glycine max
ccagacgacaacagacgggttcttgcttcaccaacacatccatggattgctatactggtaaccttcttctacaatcatctcatactagaattggtactttgattaatagcccgttttttacattgcagtggaatcatacctcaagattcgaaggaaggaatagatcaatatcatcttgggagatacaattctcacggcactgggcattgctatataaaactccaactgtgtgagttctaaaatacaagaaaatgccctaggtgatttttgaggcttaagctaaatgtataaccgatgaactaaatatgacgccacttatttttggcaatataagattaacgaatcattatt

SEQ ID NO: 22211 - DNA, 381 bp, Glycine max
  modified_base (214)..(214): a, c, g, t, unknown, or other
acacataaggggttctagtgtggattgttgtgtgtaactcgtcttcttcttttgtgtctggtttgtgttgtttttctctacctgaaaatgtcttgctgcggggaactgtggttgcggaagctcctgcaagtgcggaacggctgcggaggctgcaagatgtacccagacttgagctacactgagtcaaccaccaccgaaccttgtcatgggagtncacctgttaaggctcaatttgagggtgctgaaatgggtgtgcccgctgagaacgatggctgcaaatgtggaccaaactgctcctgcacccctgacttgcagtgaggtgttgggagacaagcttaaacagagtagcccttattaggaataatgataaactattatgtg

SEQ ID NO: 22212 - DNA, 383 bp, Glycine max
cggacgcgtgggctgggaaaaaacgaaagaaggggggtatgaatgggatttccaaaggattaaaaataaaaaaatgaattaaaagacacaacacagaatcggaagaaagacttcttctttcacattcacaattcacaagcaaagcaaagcaggcagcagcagcgtccagtatcttcttcttctgctgcttcctccatggacctctctcaccctcaatccaacctgtccctcggattctcttcctaccacgcctatacgcctcgccgctccgacccgccggtgccgctgcagctcatggaaccgcagacggagaacggcaacaacctagatgtcgaatcggacgacgacgacgacgacaaagaagtcgaggagtttcgcattct

SEQ ID NO: 22213 - DNA, 404 bp, Glycine max
gagagctcagaatcttcagctctacttcttcttccagaaaacaaagagatattcattcaaaaatcacctatctcatccctctcttgacccctccaacatgaagaacactaacagcaacacaaaactaatccttctccacccatatatccagaaacaaggaagctcaaaccgcttatggcttctagccttcatatccttcttcaccttagttttccttgccacactcatttacacaagagacacaacctcatctaccactaccactacctcttccacccctttatctagtttcaccaacacccttttatcatccactgtaataaacaccctcctccactatgcctcaaaatccaacgacacctttcacatgccccactcagacctcaaaaccatctccgacatgc

SEQ ID NO: 22214 - DNA, 348 bp, Glycine max
ttatgttttaatagtggatgtagagagagaaagaggcagagagagggttcttttcttcttctcgtccttccttcttcgttgttgctcttgttctagagagagaaagagagagtgaatcttggagagataagcgcctgctccttcggcatttccgtcagacaaagttaacacttccaagaccgacgtagctgctactgctattattaatcaattcaattcaattcaattcgcctcttcaccattccctattgtagtagatgaactctcccaagattttgattagtagcggaatttgaaggtgagagagaatgggagaaaatgaagaagctacgacgactgacatgttgc

SEQ ID NO: 22215 - DNA, 379 bp, Glycine max
ttttggttatcgcttgagcagacttaacaacagcacagagcgggttactgtctgttcaagctaccatctctctctctctttcttagtgcctccttgccagaagttaaaatggtccaagaaactttcctattcacatctgaatcagtgaacgaggggcaccctgacaagctctgtgaccagatctccgatgctgtgctcgatgcatgcttggagcaggaccctgacagcaaggttgcctgtgaaacctgcaccaagaccaacatggtgatggttttcggagagatcacaaccaaggccaacgtggactatgagaagattgtgcgtgacacatgcacgaacattggttttgtctctgatgatgttggtcttgatgctgaca

SEQ ID NO: 22216 - DNA, 382 bp, Glycine max
ggtgcttgcatccatctttcatcatccaacatcacacacaactacaagaaagaacttccttataaccaaaaccaacaacaactatggcaagttatcagaagcactacgatgatcagggtcgcaaggtcgacgagtatggcaatgttgagaggcaaactgacgaatatggcaacccggttcatgccactagtgtcacttatgtagccaccaaaagtgttggtggctacaatgatgacgctaataagcaacatgatattactggtgtctatcccgagaaagacaccggtagacatcattttggtcgtggttacgacggtgacactaacaagcaacatgatgctactggtgtttatcccggaatagacattggtagagatcatgg

SEQ ID NO: 22217 - DNA, 383 bp, Glycine max
ttttagtttttgaacccaagactaaagctagcttgcgttcaaaccttacactcttctatcctttaccaatcaagggaataatatttcttagagatattccgaaaccatggctcacgccaatcctatgataaccgtgttggaatgctaagtaaccttgtctccttatgatgctttctagcaccaccaccaacattctatcgagacggtcagaagaaaaccacgcgtggtttacaattacttgcttacgtgactgaactcttcacttcaatgctagagaaattttatgcgtacataaagacgggcaaaaaacttctcatcaccattaacgcattcgggtgtttcatagagacaagttaccttgtaatctatatcacttattggcc

SEQ ID NO: 22218 - DNA, 388 bp, Glycine max
  modified_base (325)..(325): a, c, g, t, unknown, or other
attaaccttgcattttgtgcattgtgtggcattgtagggggaattgttggaggcctacttggttctggaggtgggtttgttttaggacctcttcttctagagattggtgtcattcctcaggttgctagtgctacagcaacatttgtgatgatgttttcatcatctttgtcagtggttgaattctaccttctcaagaggttccccattccttatgcattatacctcacctcagtgtctgttttggctgggttctggggacagttctttgtaagaagattgattacatgtcttgggagggcatcaatcattgtattcatcctctcangtgtcatttttgctagcgccctcaccatgggtgtcgttggcattgaaaacagcattcaaatga

SEQ ID NO: 22219 - DNA, 397 bp, Glycine max
gtatgtgtttaaccttgcattttgtgcattgtgtggcattgcagggggaattgttggaggcctacttggttctggaggtgggtttgttttatgacctcttcttctagagattggtgtcattcctcaagttgctagtgctacaacaacatttgtgatgatgttttcatcatctttgtcagacgatgaattataccttctcaagaggttccccattccttatgcattatacctcacctcactgtctgttttggctgagttctgacgacaattctttgtaagaagattgattacatgtctagagagggcataaatcattgtattcatcctctcaggtgtcatttttgctagcgccctcaccatgcgtgtcgttggcattgataacagcattcatatgata

SEQ ID NO: 22220 - DNA, 380 bp, Glycine max
tgtgctcgggttaccgtgttttcttttccttcagtttcttccctcgccaaggagaaataaaacttcaagagctcaattttgtaatttgggaaacacataatacaagcgtcatttgactgtatgaccttgagtgggacttttcttttccccaggttctgatatgagaattctgattattcatcacttgcaaggttgacgcagatatagacttgtaaattctgattactcatgaagctatccttttgattactcaggaagctatccttagaatcctaacagaaaagtatttgcaattttttccgctgatttcatcatcatctttatttgctttgagtcaatagaaacaaggtgtctggtccttttatggatcaatgaatgat

SEQ ID NO: 22221 - DNA, 370 bp, Glycine max
ttgggaaagccatcagaaaaaaagagtcaagcggcgagcaatggcgacatcgctggtgcgatcgggtttttttcgaagcgccctatgaggaagcgctcgtggctcccaagttccgaagcgaaactttgcttcctctggtcatcacgatgatgcatatgagacggacaaatgggagaagattacatatctaggcattgttagttgcactggcttagccgtttataatctatcaaagggccacccacacttgaaagaacctgctgcttacccatatgtgcatatccgcaataaggaattcccctgtggtcccgatggactatttgaaacgaagcaccatgacgagcattagtggtttaatgaaggtatttgt

SEQ ID NO: 22222 - DNA, 387 bp, Glycine max
tttagatgtctacagaagggatacagaggatgttaatggttaaaagagtgtggaataaagaaaattgtaaacttcctcaaaagagggtatctgctgacctgctctatgactagtactgataaatacttcataatctgagcaagctcgttcacagattctcacaacctataaaagcaaacgaggaagttctaagtccatctataacaccacatagggtcaaacaagtcattaataacagggcataaatccaacttttgctaacctgctggattactttttctctttctattgagaatgcttcactttttttcagctgggccatttgttgctcattaaatacctacatataattaatgtgatagcatcagcattcaactgacttatatc

SEQ ID NO: 22223 - DNA, 372 bp, Glycine max
cttgtgtaagctttgctaattttttttatattctttattcagttagatagggagaaggaagggtctttgtgacaaacaattcacatggatagcatatatagcattattgggttcccttcaagtggctttcaattcccattgaaggacaattttttccacttaaaatcaacaaaaataacatagcatgaggttccttatttgtttttgcatacttgtatttcataataacattggctaccttggctcctacctgtcacatgaaggcatagatgcacatcactttcaccaataaattacccaacaatgcaaacccttttggaaaactgctctcaagtctattaccaaatatggacaaaactgactagactatgc

SEQ ID NO: 22224 - DNA, 415 bp, Glycine max
ggcgagaaagacgaacgaaagggtaaccggtttacaattaaataaacctaataatcaaaggtgaattttcaaatgctagctagacagcaataatcactacaacaattgtatgaaattgcaacactaatattgttacttctgacttcatatgtgcgcattagatgacagaggcaagaatttgtcattaaagaattcacagttaacgattctgtgagaaccttacttccctcacctctcaacgcaatcaattcgaattgaagataatagctagtaaactaagcttaaactatattgctgacatcgacattttttttcttttccttggagacaattatgtgttgaaatgagttagaccaaattacattaaaactccaaccttaatttttttcttgatccaattataatcattttttaa

SEQ ID NO: 22225 - DNA, 356 bp, Glycine max
ggcacataaatacaatacaaaacaaaacagagcaaagagagagtgtgtgaaaagtgaaacaaaaaacagaacaacaatggcgacacttaaggttcctcagcctcttccccccgttgcagatgattgtgagcagctccgaaaagccttctcaggttggggaactaacgaggagctgattgtatcgatcttggctcataggaatgctgctcagaggaagcttatcagagaaacttatgcccagacctatggagaagatctgctcaaggccttggacaaagaactcacgagtgattttgagaggctggttcatctttggacacttgattctgctgaacgtgatgcatttttggcaaacg

SEQ ID NO: 22226 - DNA, 397 bp, Glycine max
gacgacagatgttacctacactcactctttgactcttcttcgtctcaaatctcttcgttccttcgattcgttccatttcttccaaaatggccaaagacccagttcgcgttctcgtcactggagctgcagggcaaattgggtatgctcttgtccctatgattgctaggggagtgatgttgggtcccgaccagcccgtgatcctccacatgcttgacattcctccggcagcagagtcattgaatggggttaaaatggaattggtggatgctgcattccctcttcttaaaggtgttgttgccacaactgatgtggttgaggcatgcactggggtcaatattgccgtgatggttggtggattcccaagaaaagaaaggatggagaggaaggatgtgatgac

SEQ ID NO: 22227 - DNA, 399 bp, Glycine max
tttgggttacctcagcagatttttggaaatactcaagagaatcaacattccccacaatctcaggctcatcttcagcaacatctacaacatcaacactcgttcaatagtcagcatcatcatcaccaccagcaacaacaacagcgacagcaacatcaagtggtagataatcaacagatttctagtgcagtctctacaatgtctcagtttgtttcagctcctcaacctcaatcaccacctatgcaagttatctcttccatgtgccaacagcaaaacttttctgattcaaacgggaacactgtgactactattgtttctcccctgcacagtatcttggggtcttttccccaggatgaaacatctcacctcctgaacctttctagaacaagctcttggattcct

SEQ ID NO: 22228 - DNA, 299 bp, Glycine max
ggaagcccaaagtgcaacgtactttgcaaaaaccctaaaccctctctttctctctccgcgactctgtactcatcaatggcgacgcaatcgttagacgaagaaacaactaagaaagtcatacgacaggtcgagttttatttcggcgacagcaaccttctcaccgatggtttcatgaggaagagtatcactgaaagcgaagatggcacttggcgctgatttgctcgtttaatcgaatgcgaaaacaccttaatttgggtgatgttaagcccgatgaagtggcccaagaaaccgtgaatact

SEQ ID NO: 22229 - DNA, 366 bp, Glycine max
ttatggtttttccacaaactccacaagtgtcacaagtcataactcgttagagagagtttgtgtgtgtttttgtgtgtcaccttggtgcatacaacacaagatggaggaccaaaatggtagtggtaagttgagccaagggcttcgcaaggtgaagccttaccttgctatattgtcccttcagtttggctactcagggatgtatatcatcactatggtttctttcaagcatggcatgagtcattggatactctcagtgtaccgtcatgtagttgctgctattataatagtcccttttgcacttgtccttgaaagaaaaataagaccaaagatgactcttcccatcttcctgaggatagtggcacttgg

SEQ ID NO: 22230 - DNA, 419 bp, Glycine max
ttagggtaagtctaagataaaaaaaaggtgcagtgaagtggcggctgtggacattccctagggattttgattggggatggcttcgagcatccaacaagtggaaggggacgagtcagttgtgctgcgcgtgactcattccaatctcaaaaccttcgcctccgacatccgcttctcgcttcacctcaccgtcgaagccgtcaaagacaagctctggaaaaaatgcggcacctctgtcaactcaatgcacctccaactctacgacgacgctcgcaacaaaattgccgatctctctgatcattccaaaccccttgccttctattcccctcttgatgggtttcgtttgcatgttgtggatctggatccatcttccgtcacatctggtgggtggctcgaagatacttcgctggtcgaaaaataca

SEQ ID NO: 22231 - DNA, 375 bp, Glycine max
aagacgacagaaggggaaggtgtccactgaactgaaatggtgtccttcatgggatcttggaattgaaacgaacgggacgtgtctgtctccgatggcttcctcataccgtgaccgcacgtcggagttccggttattattggagactctgaagaagatcggaagtccggtgcaacccgagaatgctccttcgacctctcatggcgagtcgtattcgagatccgaattcaaccgaaaggcctcgcgtatcgggttggggatccacgagacctcgcagaagatcgcgaggctcacgcagctggcgaggaaatcgtccatgttcaacgatcccgcagtggagattcaagagctgactgttctgatcaagaacgagatcac

SEQ ID NO: 22232 - DNA, 416 bp, Glycine max
atcccctatctcccacttcacacctcggaacgcaccgttcttatagagagaggcgctttcacatcttcttaggctggggagaggaaatgttcccattttttaggatactccggggaacagatatccagtggagatgacggggtggggcctgtagctcagaggattagagcacgtggctacgaaccgcggtgtcgggggttcgaatccctcctcgcccacaaccggccaaaaaagggaaggatttttccctctgggggtaggaaaatcatgatcgggctagcggacccaaagctatggaacttgtgagtactttgtagaaatggaatggccttaccttactgttttctgtttattaaaaaaaagattcataaatcgtggatattattaaataaatccagtatgtcctaatcttttaa

SEQ ID NO: 22233 - DNA, 257 bp, Glycine max
gaaaaaaaccacaaagggggatcattcaccatcacacacaactactacaggtatttccttacaatcaaaaccaacaacaactatggcaagttatcaaaagcactacgatgatcagggtcgcaaggttgacgagtatggcaacgttgagaagcaaaccgacgaatacggcaaccctgttcatgctgctagtgtcacctatgtagccaccagaactgctgctggtggttacagtgatgacattaataagcaacatgata

SEQ ID NO: 22234 - DNA, 370 bp, Glycine max
ctgtattgttttttaagaataaatacaaagcttgaaggaaataggaaaataaaagctaatgtttcaatataaacaaattttaaggtgaaacataaaaggcagaggtagcagtaatgcaagaatccccttcaaacttattaacaaaggatgtcactacatctggaacttgcttggaccaaaaccattcatatgctttcggctgcttatttgatagttttttgctaattaaactctccagaggagcagatagctgaagtaaactagatcaataaaatatttaacaattttaaggcaactagggagtagaataaaatatcaaaactaaataaagaaagaaagaaataactagtaatgaaataaccatgaaaca

SEQ ID NO: 22235 - DNA, 319 bp, Glycine max
tttgggtgtgaagattttgataacaggatggtgaaccactttgttcaagagttcaagagaaagaacacgatggacattagtggaaaccccagagcacttataaggttgaggactgcttgtgagagggccaagagaacactttcatcgactgctcagaccaccattgaaattgattctctatacgagggaattgatttctactccactgttactcgtgccagatttgatgagctcaacatggatctcttcaggaaatgtatggagccggtggagaaatgtttgaaggatgctaagatggacaaaagacgtgttgatgatg

SEQ ID NO: 22236 - DNA, 142 bp, Glycine max
  modified_base (44)..(44): a, c, g, t, unknown, or other
ggttctagtgtatgtgattgttgtgactcgttcttcttcgtcgntatcttcttcttttgttgattgtgtgtttgttttttctctcacctgaaaatgtcttgctgcggtggtaactgtggttgcggaaacgcctgcaagtgcg

SEQ ID NO: 22237 - DNA, 124 bp, Glycine max
tggagagacgaataggtttgcgttgatcagcactgatcttttacacactgccgtgcacactggcttcagagaagaactatcgaacccatgagggggataaaagtgcaaactcgaactgaatatc

SEQ ID NO: 22238 - DNA, 351 bp, Glycine max
cgagaagacgacagacgggggttggttctgtgtccaaaactacaacctatggcaaaccctttcttggtcgactctgcttatttctccaacttcacacacacacacacacagaaaaaaaaaaacatggcacaggatagaacaattggagtggctctggattactccaaaagcagcaagaatgctctgaaatgggcacttgagaacttatccgataaaggggacaccatttatgtcattcacattaactccaactctctagacgaggcccgcaacaagctatgggcagaatctggttctcctgttattcctttggtagagttcagaaagcctgagattatgaaaaagtatgat

SEQ ID NO: 22239 - DNA, 384 bp, Glycine max
tttggtttgtcattgggagtcaaaatggttatctctggagaaggatctgatgaaatctttggagggtatctatatttccacaaggcacccaacaaagaagagtttcaccaagaaacgtgccgcaagattaaagcactccacaaatatgatttgcttgcgagccaataaatcgacctttgcctgggtctagaagccagagtaccatttttggacaaagagtttatcagagttcaatgccattgatcctgagtgtaaaatgataaaaaaggaagagggcgaattgagaaatggcactgagggggcctttgatgataaaacaccttatctgcaaagccattttatatggcagaaagacaattccatgtggagtggctatggtggatg

SEQ ID NO: 22240 - DNA, 404 bp, Glycine max
tttaagtttttcatcgggagacaaaacggggggctcgggagatggatctgatgaaatctttggagggtatctatatttccacaaggcacccaacaaagaagagtttcaccaagaaacgtgccgcaagattaaagcactccacaaatatgattgcttgcgagccaataaatcgacctttgcctggggtctagaagccagagtaccatttttggacaaagagtttatcagagttgcaatgaacattgatcctgagtgtaaaatgataaaaaaggaagaagggcgaattgagaaatgggcactgaggagggccttttgatgatgaagaacattcttatctgccaaagcacattttatataagccgaaaagaacaattcagtgatggagttggctatggttggattga

SEQ ID NO: 22241 - DNA, 394 bp, Glycine max
  modified_base (358)..(358): a, c, g, t, unknown, or other
ggttgcgagtagtgtttccatcacactgtgatgattaagcaattggcttgtttagtttagtgaggaggaacaacctattggcaaatctatgtatgcagattcaaaccgcgtcatcttcccatgtatatatttattactatgtctctaagtttaatttcatagttcctgctgggacctcaacgcactcactcaccacacccccactttattcttctctctacgcgttcgaatatgttcttcttcactttccacttttcaactccctccactcctttccttcctagacacaaaactcaaaacaaataaacaaaagggtcttctcttcttgtttgaatttgacttaaagccacttacttgncttctgtattctctatttttggtttcaacatgatca

SEQ ID NO: 22242 - DNA, 331 bp, Glycine max
tttgggcactattgatgaaaagaagttgtttcatcaacgggagctcttgctttgactgaaatccccaagagactcatagtcattggggcaggctacattgggctggaaatgggctcagtatggggccgacttggctccgagataacagttgttgagtttgcatcggagattgttccaaccatggatgcggaggtccggaagcagtttcagcgttctcttgagaagcaaggcatgaaattcaagctgaagactaacgtggttggagttgatacttctggggatggtgtgaagctaactcttgaaccagcagctggtggtgatcagactacac

SEQ ID NO: 22243 - DNA, 361 bp, Glycine max
ttatggtgttgcgaatgatgaccgagaacccagagaaatatcaacacatgcttcagaatcttgttgttaaggctcagcagagtaacaatgaaaaactgttagagaacccgtatcttcaaatgtgtggcatacttcaactggcaaatgatctggggattgacctgtgatcttcaaggcatgactttctgggaggctatattatttggggtaggacatctgcattggttagaggatttgtggctattgattctgaagaaaaacttccattattcgattgactcagattgaaatgcatatccaggacatactcttagttgaaatgttcattcctgcaacagaattgcgattgattgtcaacatt

SEQ ID NO: 22244 - DNA, 396 bp, Glycine max
ttgggttgctaagatggtctctggtaatcgagtaccaaaggggtgtaatcgattaccaggcttgaaaacgaggtcaggaagttatgagggcttctggtaatcgattaccaagggggtgtaatcgattaccaggcttagaaatgaaggcaacaggttgtggaggcctctggtaatcgattaccaatctgtgtaatcgattacacagaggaatgggtcactggtaatcgattaccaggtatgtgtaatcgattacacagtgcctttttcaggttatcatgtcctgaagctgtgtgattcaagtttggcctctggtaatcgattaccaaggttgtgtaatcgattaccagggaggaaaagccttgagatacccctttttacttgcatgtagtgggtatg

SEQ ID NO: 22245 - DNA, 348 bp, Glycine max
  modified_base (182)..(182): a, c, g, t, unknown, or other
gactcatagttagtagtaccaacaggtccatataccctctctttaacttccttcactcacttaattgggccatcccaattcaaatcccatcagaatgatgaaatttcaagcatgttcaaaccccatctcaaacttgttctatgcgtgttgtgtccttcttttaccaccaaccatggccttangagattgcacctgtgacacaaaagaggccaacaaagagtgactcaattgaagtcctccactacaaaattggctcaattgcttctgtgcttgttgctggggcacttggggtgagcctcccattgttaagcaagagaatcccaacacttaaccccaagaatgacatat

SEQ ID NO: 22246 - DNA, 345 bp, Glycine max
gataccaaaaacaaaacacaagccaagtgaaagtgagaaaaaataaaaatcaaagagcataatgtcagggatcattcacaagattggggagacccttcatgtgggagggcacaagaaggaggaggagcataagggtgagcaccatgctggagaatacaaaggggagcaccatggtgaacacagtagtgagtacaaaggagagcatcatggtgaacacaaagctggagagtaccatggtgagcacaagccagagcacaaagaggggttcctagacaaagtcaaggacaagatccatggtgagggcggcgccgccgagggcgagaagaagaagaaggagaagaagaa

SEQ ID NO: 22247 - DNA, 387 bp, Glycine max
  modified_base (378)..(378): a, c, g, t, unknown, or other
ggttgagttgacgattgaagaaggaaggagagagagtgtgtgtgtgtgtgattcacattctgatcttgaattgaattcatctccaactccatggctccggcgatgaggatcgttttcggtcttctcacttttgtcaccgtcggaatgattataggcgctctctctcaattggccatcatacgaagattggaagactcttacggcaccgattctttgccatttagaagattgcgtggactcgacactgatcgtcaccttcaattgccaagaggtgttcctttttggaataatgacaaggaagcagaaatcttacgccttggatatgtcaaacctgaagtgcttaactggtctccacgaattattgtacttcataacttnctgagcatg

SEQ ID NO: 22248 - DNA, 370 bp, Glycine max
cccacgcgtccggctatgaagtttacagttggggatagtagagtaaggaaaatgggagggtctcgactatccaagccaaagtctggctccgcttacggcagcacaaactgtttcatgctgtatgcgagagcactctcaattacctggggagacactccagaatattggatatgggtacaacagaaagaaacaagtggcacgatagtagagttggctaagttgaaaagggtttgctggctagaagtgcatggaaaatttgacacaagaaagctttcactaggaattctatatcaagtgtcatttctaattatgttggaagaatcatctaaagggtgggaagttccaataaatgttagattggtcctttctg

SEQ ID NO: 22249 - DNA, 347 bp, Glycine max
ttatggtatcgggaaatggctgatgtgcttccaaagagaaggatactgatgcggtatgaaaagtcgcatggggaccaggaaacggcggcgtacacgaccacacccgaccataacattcagtcaacggcgcaaagcatgattcaggcccttcgcgccagcgaacaccttcgtcacatgggtgcagttctacatatccccctatgctcgcatctaatcgacactccgggagctcacacggtatttcttgaagaagaggatcatcggcgtgagggaagagtcgcgagttcgaaaacgagatatcgagaactttcaggtgggagagaggatgaaggttataaaggaaatgc

SEQ ID NO: 22250 - DNA, 120 bp, Glycine max
aggtgtgaggacaagctaaggggtctgtatgcgagactgctcgtgaaggacacaacatttttttggtagatgaagctgcaatgatcaaagtggattatccaaataacaacgttttgacct

SEQ ID NO: 22251 - DNA, 331 bp, Glycine max
tgtcaccaacaccaaaacaaacccactaagatggcttcctttgtatccttcctagtgctgcttcttgcagcccttatcctcatgcctcaagggcttgctacttactacaaaccaattaagaagccaccagtgtacaagcctccagtgtacaagccaccagtgtacaaaccaccggtttataagccaaaaccaccggtttacaagccgaaaccaccggtttacaagccaccatataagaagccaccatacaagaaaccaccttatggaaagtaccctccaatagaagacaacacccatgcctaaagcaagcaatgaggtctattatctactt

SEQ ID NO: 22252 - DNA, 320 bp, Glycine max
tttgttctagtgtgtgattgtttgttgttgtaactcgttcttcttcttttgttgttctgtgtttgtgtttgttttttctctcacctgaaaatgtcttgctgcggtggtaactgtggttgcggaagctcctgcaagtgcggcaacggctgcggaggctgcaagatgtacccagacttgagctacactgagtcaaccaccaccgagaccttggtcatgggagtggcacctgttaaggctcaatttgagggtgctgaaatgggtgtgcccgctgagaacgatggctgcaaatgtggaccaaactgctcctgcaacccctgcac

SEQ ID NO: 22253 - DNA, 270 bp, Glycine max
gaaaatcaaatgagttctgaacgagagaatagatgttttacaaccaaccacaagtttcatattggatacagtactcatactggcaattatggtcaagaattattctatcaactgccatctacttcagagataccatctgacacatttttttaaagtacaataagaaatagcaattcctttttttttaatttcatcataatgtaaataggaaagactaataccaaattcattaaaaaattcaagagaagcaaaaaaatgcaagggccgttg

SEQ ID NO: 22254 - DNA, 314 bp, Glycine max
gtagcaatcttcaacccagacaggccgcgcgggagtgagtcatccaccatcatagacacgttgttcgtttcctttcctttctgcaatttctaccctaacacgccttcatttctgggcacatttttttacacgttccacatgcgttacgacacacatcttgtttgcttgctatcagacaacgcttatggattcaaccaaggacttagctctctgtacctctggctagacctagcctctctcatgacccaacattccagcgactgatttctgacttttcagcaacttggtttgattcactttaatggattgagtca

SEQ ID NO: 22255 - DNA, 176 bp, Glycine max
tgcgcattcctctcccaagacagaacaagcgggagacatgcatgaaccatcgaacacaccacggtctgttccatacctttttacatcattctaccgaaacacaccatcattattggacacactatagtacacgtagaacatgccgtaacacacacatttcgattgaatgctttcag

SEQ ID NO: 22256 - DNA, 194 bp, Glycine max
aggtgatcatccatgaccccacacatgccacgcgagcttgtttcagcttccagcggccacacccattacgataccaatactaaaacaaatttttacactaacacacctttatagatgggcacaatttacaacatgtcccaaatgcctcttttactcatatatagtcttatctcttttatacaactctttcgtat

SEQ ID NO: 22257 - DNA, 326 bp, Glycine max
gccaaattgtttttgccacacagaagcatgtcagagttgaaaaaacgtcatgctgaggatttcttagcttcagacaaaacaaaagcgccgagatcttattctgctcaatcacctgcccaatctgggatgggtgcatatccaaatgcacagaaccagtggtctaattatggagttcaacctcaaacttggcctccagttacacaagcacaagggcaacaatggactgctggctacacccaacaagcttcctacggggcttatgctggatatgggggcaactatgcgaattctcaattgcctacatcagttccacaaagtactgcata

SEQ ID NO: 22258 - DNA, 107 bp, Glycine max
tttgtgttcatatgcaatgatagcagtcccgtatttatgaaaggcccatcaactattgcacatttgtactctgatggcaaggcaagcggttctcctctttgggttct

SEQ ID NO: 22259 - DNA, 393 bp, Glycine max
tttacttcagaaggggacatgagaagtgttttttgtccattgtagattgtcacatatagagaaacagaattagaagaagggtagctgggaaactttggcaattgaaacctttttttccattgagtgatagagagcatggagaacatgaagatgaacaacgatgaaaggtttgcacaaaagggtgtcccagttcatagccaggttatgaagatcaagcaagagtcagagaaaattgttgattggtcccctggcaagccagagataagatctgttcttcgcgaaataagccggcaaatttcccgatcgccgttggggatctccggccaaccgatttcagttggtgagtcataggttcagtatatggttaaggggttttggattagtgtgttgatg

SEQ ID NO: 22260 - DNA, 403 bp, Glycine max
cgagaagacgacagcagggtttttctcttcaagctcttatccatggcttcctatggtggtgagcttcttctagattcatcttctacttgaagtggcatctccattcatctttctccttctccattccactgcaatcagacctcaagaagcaaaggaatccattgatgaagaagatccaaggtgatgcaatcctaccccgcaagggcattggatagaaaactccaagtagattgtgccagagatgcaagagaaggccctagggttcttatgagccttacggtagatttcgagcccatgggctaagtatgagcccacttatctttgtaaatattagattaaggtttcattatttttgggccttgtatttagggctccataatgtatgtagggtaccctagaaata

SEQ ID NO: 22261 - DNA, 382 bp, Glycine max
  modified_base (325)..(325): a, c, g, t, unknown, or other
gaatggtccggtgaagtgttcggattgcggcgacgtgagcggttcgctgcccgcgacgttgtgagaagtccactgaaccttatcatttagaggaaggagaagatggagagaaaaggaagaagaagaagaaggaaaagaaagggctgaaagagaagatcgaggagaaaatagagggtgatcatcatcatcacaaggatgaggacacaagtgtccctgttgagaaagttgaggttgttgaaacagcacatgctgaggaaaagaaggggttcctcgacaagattaaggagaagctaccagggcacaagaagacagaggaggccacagntactactccttcttcaccaccacctggtgcatcattggagcatggtgaaggtgctca

SEQ ID NO: 22262 - DNA, 276 bp, Glycine max
  modified_base (5)..(5): a, c, g, t, unknown, or other
gttgntgttgtaggaaatttaagtgaagagagaatgatgatgaagtctgctatgtgtgcattggtgcttgtggcactggttgtggttgaagtggggcccatggctgaggctgcggtgacttgcaacccaacacagttgactccttgtcttccggcaattaattcaggttctgcaccttcgagtgcttgttgccagaagctgaaggagcaaaagccatgcttctgtggctacctcaaaaaccctagcttgaagcagtatgttaactctcctaatgcc

SEQ ID NO: 22263 - DNA, 289 bp, Glycine max
gcgagaaaacaccacattgggtcttacttacaaacaaactaccagctgtacttgctcattttgaaagatacaagtgcttcaatacaaacaaaggctgttactcaggaagatgtgaacactttcgggcattgtaggaagcccatttgtgtgcacggtccagatcgcccttaagttgaagggagttgagtacaaatttttggaagaaaactggggccacaagagagattcgctgcttaaatacaaccctggccacaagatagttccagtgtttggtcacaatgagcaaacc

SEQ ID NO: 22264 - DNA, 343 bp, Glycine max
cggacgcgtgggcgagaagacaacagatgggctttaaacatggcaagccagtggaggtacaaaatccaagtggaaacacgtttcattatcaacagacgccgagagtttcctatcgacagaatattaatactgctatacacttgtcactgaggagagaagaacgtatctggagcgagcaacgttcaaacatgggaactagtatgacggagacacattctctcaaatgaacactgtattggctagcatccagaggggcttctgttcaaaaatatattgcatcaagaatctatgcgaaggaaatgatcttcagggcaccctcaaactctattgatgttagcatgtg

SEQ ID NO: 22265 - DNA, 343 bp, Glycine max
gcccactcataatctaagaatatcaatcactacgactcctgttggtcgacctatcgagtcacaactcccacccaccctctttgacttcactatcagaagagctcgttggagcggacaactgacaataaaacatgcacacacaacggccgggggtagtagcatcacttctaatttgctgtttcaacacacatcgctatgggaaggaccacttctcttccttgaaaagaaccctagaagacactgcttaccccaagcaggaacatgtactggaagctggattagacaaaatcacagctacaagggcattgaacaagaccttacccgcggtgacagactctgtcta

SEQ ID NO: 22266 - DNA, 319 bp, Glycine max
ttttgatctccgttctttaccttcctgaacgacaccgagaccagacacggtttggggcacagttaaagtggtagcagtagcattgttaggccatatcttcctttttttttttgcttggattgggggtaaactcacaaatattattactttgatctggggaagcaatggcatggagaggacatctttcgaaaaacataaaagaacctcggtttttgatgtgccaatcattttctggaagctcacctgcaagggctttttgggagaggaattataaggaactaaagacattgaacccaaaattgccaatattaattcgtga

SEQ ID NO: 22267 - DNA, 382 bp, Glycine max
ggtgacagaacagcagaagggaagaagatggacttactggagttatgggcaattttcggccccggcgtcgccggcgctgtcttcggcgccggatggtggatctggcttgacgcggtcgtctgcagcttggtcaccgttcccttccttcactaccttcccggaattttcgcatcttttgcggctttgatgttcaattgcgttagaaaagaagacatcgattattctccatatgacgaaggcgagtggagactgaagctgtggctcttcattgcatatgttgtatcctttgtttctttagctggatcagctggcctactgatccaagattcacttgataaatctgccccttcagtttggactggagttgcaggtgttttgcagt

SEQ ID NO: 22268 - DNA, 175 bp, Glycine max
gggggagacaatattagaattttagaggatccttataaaatatcaatataatcatcaggaacacattatgttagattatcaagaagagttttaggaatgtctggatccataatgtctaatcaaacaaatgcagcagaatctgaatcccgggtgatttttgatctatgtactcttc

SEQ ID NO: 22269 - DNA, 371 bp, Glycine max
gaggtttttagggtttacaccgagcagccacacctcccgcagcagccatggttctcaaaactgaactatgccgattcagtggtgccaagatctacccaggaaagggcatcagatttgttcgtggtgattctcaggttttcctgtttgcaaactcaaaatgtaagaggtatttccacaatcgcctgaagccttcaaagctcacctggactgcaatgtacagaaagcaacacaaaaaggacattgctcaagaagctgtgaggaagaggagacgtgctgccaaaaagccttactctatgtccattgttggtgcgaccttggaagtaatccagaaaaagagagctgagaagccagaagttcgagatgcagctagg

SEQ ID NO: 22270 - DNA, 310 bp, Glycine max
  modified_base (290)..(290): a, c, g, t, unknown, or other
ggtttccttctccggcttgttcagtctttcttggaactttgttactctcacacatgtctcgctccgtgcctttggtttcaaccatttttgtcttgcttctgcttctggtggccactgagatgatggggccaacaatggtggcagaagcaagaacttgtgagtctcagggccaccgtttcaaggggccatgtttgagtgacaccaactgtggctctgtttgccgaaccgaacgtttcactggaggacactgccgtggcttccgtcgcaaatgcttctgcaccaaacattgntaattttaaaaaattaatta

SEQ ID NO: 22271 - DNA, 113 bp, Glycine max
gggttacttcataatgacatgattggtgggctttatacctgataaactggaaaaaagtcatctatgtattggacctatatgtgacttaccaccataaaaaaatatattggggt

SEQ ID NO: 22272 - DNA, 380 bp, Glycine max
ctattccctttgtcccacaatcctctatactttttatttttaaaaccaagtatttctagacagaaagtaaaaaattaatcccttagaatattaaaattcattagggtatgaggacattgctacgtgcacctagcaaaattgctggcacacccaacaattgcatgattttcccgtgttgcccttctataaaaggaacacggattgactaatttgaagtgtttttttttcttcaaaaatatattttatgaattaatttaaaattaatggtccaagcaagagttaactttcgtgttattaacacgacactctaaccaattaagcaaataagttaattatgttataaaataaataatgttactatatataacactaaaatttct

SEQ ID NO: 22273 - DNA, 303 bp, Glycine max
ttagtctgagggggatttcttaatgagtgattagcacaacgtctcagtcccttcgatttcccaaattctgtatcattactcatcaccaccaagaatcgaatcagaatttggaacaatcagtgaattgagttttcatccctctcatctgcacctttctccgttgagtttagcaaaaagaaaaaaaaaaggcaggcacaaaaagcaacacgagcattattacacagtacttgcttgggtgcttcacactatcacagtctctctacttttctgttggctatatattataaaaacaaaagcaccctc

SEQ ID NO: 22274 - DNA, 393 bp, Glycine max
ttgtgactgacaaacaaacaatttaccagctatacttgttccttttgaaggttagaagtgctacaatacaaacaatggcagctactcaggaagatgtgaagcttttgggtattgtgggaagcccatttgtgtgcagggtccagattgcccttaagttgaagggagttgagtacaaatttttggaagaaaatttgggcaacaagagtgatttgcttctcaaatacaaccctgttcacaagaaggttccagtgtttgttcacaatgagcagcccatagcagagtctcttgtgattgttgaatacattgatgagacatggaagaacaaccccatcttaccttctgatccttaccaaagagccttggctcgtttctggtccaaattcattgatgata

SEQ ID NO: 22275 - DNA, 338 bp, Glycine max
accacagaggggcaaagtttccatacaaacacactaacgaggatccattcttgggcctgtctgatgccagaagccctactaatcacacgctgcctggcgcttatgtaaatgggtgccgtttaaaagctggtagttgcaccttggggtgcgtcgatcggaccgccttcagtgtgcaccgagcggatcacacattctggcaacaatacgctcctgtcacttaactggccgcttctagcctccggcgctgtcactttgaagaaattagagtgctcaacgctagcctacgctctgcatacattagcatgggatgacaccacatgatattgacactattgagc

SEQ ID NO: 22276 - DNA, 337 bp, Glycine max
ttctaccttcaagctcttatccatggcttcctatggtggtgagcttcttctagattcatcttctacttgaagtggcatctccattcatctttctccttctccattccactgcaatcagacctcacgaagcaaaggaatccattgatgaagaagatccaaggtgatgcaatcctaccccgcaagggcattggatagaaaactccaagtagattgggccagagatgcaagagaaggccctagggttcttatgaagccttaggtagatttcgagcccatgggctaagtatgagcccacttatcttctgtaatattaaattaaggtttcattatttttggg

SEQ ID NO: 22277 - DNA, 317 bp, Glycine max
ggtgagagagcgagcgagcgagcagtttcaaagagaggatttgggattgggaaggcgagggattgcgctgcgtctcttcctcttctctttcgattcatccctcattcataatcttccaatccaacaacctcagcctcacactcacacatacacacatctgaacgcgtatcgtccctcccatggcttcaaagcgcatcctcaaggagctcaaggacttgcagaaagacccaccaacttcttgcagcgctggtccagtagctgaggacatgttccattggcaagcaacgattatgggtcctgctgatagtccttatgct

SEQ ID NO: 22278 - DNA, 344 bp, Glycine max
  modified_base (229)..(229): a, c, g, t, unknown, or other
ggaggccaaaaatgcattggaaaattatgcctataacatgaggaacacaatcaaggatgacaagattgcttccaaactgtcttctgatgataagaagaaaattgaagatgcgattgagcaggctatccaacggctagatggaaaccaacttgctgaggctgacgaatttgaggataagatgaaggagttggagagcatttgtaatcccatcatagcaaagatgtaccanggtgctggtggtgatgcgggtggagccatggatgaggatggtcctgcagctggcagtggaagcggtgctggacccaaaattgaggaagtcgattaagcagaagattctcatgggt

SEQ ID NO: 22279 - DNA, 279 bp, Glycine max
gacgcattttctgttctgttttgttctcattctgtgactctgtgcttagttaacgttaacagtgacttaagatggcggattctgcagatgtcacccacgatgttgtgtccctcctctcttctcctcaaagggactttcttcttcgaaacaacggcgatcaggttaaaattgacagcttgaagggtaagaaacttgttttgtatttttcggcatcctggtgtggtccatgtcaaacatttatcgccactttgtgggatgtgtacaatgaggttgcaaaaa

SEQ ID NO: 22280 - DNA, 110 bp, Glycine max
tcgccttgaactggacgagaattataggagcttgaaggggtcgctcactttgaacacgcacgtagtcctccttactgctattaatgtatccatatcgttttgtgtccatc

SEQ ID NO: 22281 - DNA, 367 bp, Glycine max
gacagcagtaaagtgagttaaaagaaccgataatagttgttccttcactctccgctctctctgccactgagccaagaagatggcctcacaggtttgcaaatctgcttccagagccgcgaggtcccttctatcctctcgttttcactctcaaggacgtgcgcttggggctgctgcggctgtttcattgagcagcaaagtgcctcttttttacggaaagaacggttctggaaatggatccgcttcttcatcatcatcatcatcatggatttcaggagctcttgctcttcctgccgcagcttacatgttccaagatcaggaggtgcaggcagctgagatttctgagattatatctcgttttgagcggaaa

SEQ ID NO: 22282 - DNA, 363 bp, Glycine max
tatgggggtggcaggggagtgacacagaaattaagctagagcgtcataggttcttcttcttttctcaccttccttctctcgcttcagacaaagggacaaaaaatcagtgcgtgagagagagagagagaaattccacatccatgtcccacagacatccaaggttcgcctgtgggattctagggaacattgcctccttcgtgtgctttctggcaccactaccaacattttatagagtgtggaagaagaaatcaaccggacggatacaatcaattccatatgtggctgcactcttcagagcaacgcttcggatcttttaagcctatgtgaagaccggagaaacgcttcttatcaccatcaatgcat

SEQ ID NO: 22283 - DNA, 316 bp, Glycine max
tgcctactttgttaggtattattgatcttttcccattttgctctatccaaatgagtgaagaatctatttttggtacttcccttgttaagcttgttggaagcagtatgatgaccctattctgatagcagagggatattatgagtccgtgactaaggaggtggaggtgactcttctctggtcgtggtgcaaactcccatccaaactagggatgctcatctcatctgaatattaaagataattataattcatatctaataaagtaatttatctagaatcataagtgaatattataattattacttacttttaaaatatg

SEQ ID NO: 22284 - DNA, 370 bp, Glycine max
atattgagaaaatttatctatgacttacattagaacaaactaatgaaataaaatatataacaaattacgttgcaggcaagatgtaaatgctttaaactttaaaaaggaataattaaaataaaaaattaaaataatttaaagacggggtactcttatttaataaagaattaatgaatctcacaagaatatttttaatgaattaaaaataaaattaattttataaattataatatttaatgctttaaaaaacatttacttaatatttaattttttaattattgatttttaacaaataccatttatactgaaataacatttatataatagcttttaagatttatttattttaaagctagtgagtttttttaat

SEQ ID NO: 22285 - DNA, 357 bp, Glycine max
cagaaaattgggagtggtggcattgtctgtgaaaactgtttctgatgatgacaaggctggcagtagtggtgctgctgctgctaattctccttctatggctagacaaaccaagaacagatatgcacctagcaacgctactgtggcaatcaacctcaaattgaagccggcatcaaatctgaaatggcatagagttttgtttaaaattagtggctctgcattggctggaaactgccagaacattgaccccaaggtggcaatgcagattgctagggaagtggcaacaacttgccgccttggggtggaagtggccattgttgttggtggtcgtaacttcttttgtggagatgcatgggtgtc

SEQ ID NO: 22286 - DNA, 375 bp, Glycine max
tgtggttttagtagtatttatcaggcaagtgggggttggtttgtgtttttttgttatatttgtatgttgttctgtgctgggtccttaatttgtggctgagaattaattattattatcaattatgggtctctcaaatttcccaagtgcatctgaaggggtgctacctgtgcttgtgataaacacggttctctcagtggcagtgttgaagaacatgtttagatccatgctccaagtagtacttggtggcagtgctgctgctaatggttcaaacattgaacatgatgaaagttcatcatcatcatgggaaaggagggtgtcaataactcaatacaagtcattgtgccacaaccacgacttatgaggaacaagtatggc

SEQ ID NO: 22287 - DNA, 334 bp, Glycine max
ggttggcgcgggtgaggtagaacccttccacggtggtgactgcgcgatgggtgcctacaagtatgtttcagagctatggcgcaagaagcagtctgatgtcatgcgcttcttgcagcgggtgaggtgctgggagtataggcagcaaccttccattgttcgcttgacaaggtcgacccgccctgacaaggctcgtcgcttgggcttcaaggctaagcagggctatgtgatataccgtgttcgtgttaggaggggtggccgaaagaggccagttcccaaaggtattgtttatgggaagcccacaaaccagggtgttacccaactgaaatttcagcgt

SEQ ID NO: 22288 - DNA, 281 bp, Glycine max
  modified_base (31)..(31): a, c, g, t, unknown, or other
gttattgttgtgactcgttcttcttcctcgntatcttcttcttttgtcgtctgcgtgtgtggtttttctctcacctgaaaatgtctcgctgcggtggtaactgtggttgctgacacgccttcaagtaccgcctcggctggcgacgctgcatgatgtacccacactttatctacaccgtgtcaaccaccaccgagaccttggtcatgggagtggcaccaggtaaggctcccttctagagcgctgaaatgggtgttcccgctgagaacgacggctgcaaatgt

SEQ ID NO: 22289 - DNA, 352 bp, Glycine max
gactcacttcttctcactcggtaaaattgaattagggtttcattttcttcttcttcaccccactgtcactgcgcaaatccagttctccccttaccctctccctcggtcctgatcttttcccgccatttcccgcgtttcttttacccagattttgaatactagccgttggatctgccatttttttcaatttttttcgaccgttgctctcgccggagtgaacgggaaatgtctgcgtccgaagcggagaagaaggtcgaggaggaagagaagaaggaagaggtcaaagggggagaactcctgttctgtggtgccacttgttgggatatcattggtcgtcgtaaaggccccgtcg

SEQ ID NO: 22290 - DNA, 364 bp, Glycine max
cgacagaagggctagtatcgttacgaaattcgtaagtttccgtaactttacgaaaaaagaatcaccaaaaaaagcagagggggtgtacttagtaaaaatgggggtgcaaatagcacccaggcccacttgggccctccagaatattcctccagaaggctgttgcttctggaggaagcaacctggctcgcctgggcgagctgggcggcaaccacctcccctattttgctataaataggggaggaagtgaagaagaaaagggttcagcgccttaggcacttctctctctttcgaatttgcttggaaaaattgtttccgtgaagaaaatgtaagccgaggcgcttccgaaacgtttccgtaacgtttt

SEQ ID NO: 22291 - DNA, 250 bp, Glycine max
tgtgcttttaccgggtttctagaaatgcagaacaaggatgtatttgaacgagttaatcaattaaattaatttaatatggttaaaattataaatacgcttacttgttctttctcattagtgacatttgattcattcttatcttttaaaaaacactttctgaaagtcatctaaaagaaccactctacattttaacaagatatttaaactcatcaagatttgtcataccctaatttcttccgggaatatttac

SEQ ID NO: 22292 - DNA, 300 bp, Glycine max
ttggggtcgtagtttattttcatccacaccacagagtaaaactacaacctcaggaggagaatgttcctctgaatccgaagtccgtgctctacccagcgactttgccagaaggggatatctggtgtaactgaaggtgtcccaatctcattttggagaacagtactatttgtgtgccactttctggattgattaaccatcttagtccaccatttcttgatttttggaggttaacagtgttcatattcaacactttgctatttcttaacttcaagtgcaagagaacaaagagcataaaatcct

SEQ ID NO: 22293 - DNA, 388 bp, Glycine max
tgttctagtgtgtgattgtttgttgttgtaactcgttcttcttcttttgttgttctgtgtttgtgtttgttttttctctcacctgaaaatgtcttgctgcggtggtaactgtggttgcggaagctcctgcaagtgcggcaacggctgcggaggctgcaagatgtacccagacttgagctacactgagtcaaccaccaccgagaccttggtcatgggagtggcacctgttaaggctcaatttgagggtgctgaaatgggtgtgcccgctgagaacgatggctgcaaatgtggaccaaactgctcctgcaacccctgcacttgcaagtgaggtgttgggagagcaagcttcaagcagagatagcccttaattaggaataatgattaacta

SEQ ID NO: 22294 - DNA, 384 bp, Glycine max
ggttctttgcgagatagaacagaaagccgtggctgtcctagtctcttctttccctctacccatttcagtttcaggatggaatctcacgtgaagcacgcccttgttgtcaaagttatgggtcgtactgggtctagggggcaggcgactcaagctagagtgaagtttttggatgatcaaaaccgacacatcatgaggaacgtgaagggacccgtgagaaaaggagacattctcaccctacttgagtctgtaagagaagcaagaaagttgcgctagaggatctcttcatggtttgacgcaagacttaaacaaaacatcgctggttttcgtgtaggtaaaggatgtcaaatgttaattgtcatggacctgaattatgcacctactatg

SEQ ID NO: 22295 - DNA, 388 bp, Glycine max
ttatatttgagattttttgcttatctgactctttttaatatttcaatgttgggattagttactagttcgaatttgatacaaatttatgttttttgggaattggttggaatgtgttcttatttattaataggcttttggttcacacgtcctattgcggcaaatgcttgtcaaaaagcatttgtaactaatcgtgtcggggattttggtttattattgggaattttaggtctttattggataacgggtagtttggaatttcgggatttgtttcaaataataaataacttgatttataaaaatgaagttaatattttttttcttactttggttgccctcttgctattttgtggctcagtcgctaaatccgcccaatttcctcttcatgtat

SEQ ID NO: 22296 - DNA, 316 bp, Glycine max
  modified_base (308)..(308): a, c, g, t, unknown, or other
  modified_base (310)..(310): a, c, g, t, unknown, or other
  modified_base (315)..(316): a, c, g, t, unknown, or other
ttcctcatgaaaggagcatgagaagccacacatgaatcgtcgttgaaattcaagttattgctattggtgatgaagaaaggcttgctatcactttgccttctctatttgcagaatagctgagattgagtttgatgtccttctgtgtatgcatgcgacaacagtggtcattttatctggaactctggatatatttagtcctaaactggcatatgtaggttttagtgtcgctttgcttttttttaaagaaaacattgctgcagtatctcagtttataatttagtatgatggaattcttcacttcacaaaananaaaann

SEQ ID NO: 22297 - DNA, 366 bp, Glycine max
gtgtgtttttcaggcaagtgggttggctggcgtttttttgttatatatgtggggttgtcctgtgctgggtctggtctcattctccttattaatttgtgttaagtagcaaaccaaaaccaaaccaattttgtggttgtgtgtgagtgagaaactgagaataattatcaattatgggcctctcaaatttcccaattagtgcatctgaaggggtgctacctgtgcttgtgataaacacggctttctcagtggctttgttgaagagcatgtttatatccatgctccaagtagtgtttggtggcagtgctgctagtagttcttcaaacattgaacatgatgatgaaattagttcatcatcatcatcacggg

SEQ ID NO: 22298 - DNA, 392 bp, Glycine max
ttggggtcatgtacaacacatatcaacatgagatgccaaaaatacaagcacacacggatagaaaatagccgaattggtttgtagtaactctggtagcttataagttatttgataaatttatgagctactttaactaggaattcatatacttattatgatacaaatttatcccgtgctttgcactatgtacaaacaaaatcaagtaaatattccaatacaaataacaataaatgaacagaaaaaagagagttgtaagcgggaaaataaattagactattagagacacctttcttattgttgaacaattcacaaacatcatgttttagaggccgtctttttctgttggcaaagacgctaaatcaaacgaaattatgtttgaagaactagcaatg

SEQ ID NO: 22299 - DNA, 386 bp, Glycine max
gatcgtctaacttgaaacactctctctctctcttcttcttcttcttcttcttgcacgtattgttctaatccacaaaaataatggccttaaattacaacattgccctcgccttctctacggttctcacgctgcttctccttcccttaccaacccttggggagctcgtgcaggagcagccactagtcctcaagtaccacaacggccaactcctgaaggggcgcatcaccgtcaatctcatctggtacggcaccttcaccccgatccaacggtccataatcgtggacttcataaactcactaagcagcgcgccaaacgcgccgcttccatcgactgccacgtggtggaaaaccacggagaagtacaaggggggaggatcctctgcgctc

SEQ ID NO: 22300 - DNA, 351 bp, Glycine max
tggatcattatatattatatttttattttctggatgtaattttttaatattagaggcaatccatacttatcagtattgctttatctgtaatacatcaacttcgaagttgataaggtgattaatcggcatttaatttcacgtacaatgatacatgataggtttgtaaacattactaatgtatctttcaccttctatatattagagtaccttatttttttttatttctatttttgaagcaaatttattttttattacatgagatttaaaattctagcattaattcatgggcaataaagaaatcctaacattagctattacgttttcaattatctaccatctactcttgtatta

SEQ ID NO: 22301 - DNA, 271 bp, Glycine max
ttatttcatgtctgttactcatttcttctcatcttctttttcttccctttaaaattattattccgtgcaaacacaacaacaacttcatcaccaacacgaagaacaagattagcgttatgggtctcttcctttctaggaatttggcttgcaaattcatatacccttttcttttttccaataaggtttcaaaggatttgttccccaagcagttggagaacatgatgtctctggtctctcctcgtactggcaggcatttgcagcgctatgacaa

SEQ ID NO: 22302 - DNA, 391 bp, Glycine max
aaaaaaacaccgtatggggtgttaataggcaacatggctgggtgaaattggcacagggaagtgagagtcactcatcggattgctgtgtgctcgtgctccatagaagcgctctcgagacaatccagttgacttgctgatagttggattcacctaagtcttagacatgtctctttattcaaactgcaggcagtatagaataagtcagaatcttcagaataaagaagatatgctgatgattgaaagagaaacatatatatagtttattaaaactgtaacacaaatacaaggcaaaaaacttgtgagaatgtgagctatcaaggttccactacttttcatgccaatgatttttaatcaggcatcgtggtgtacacgttgcttagacattaatatc

SEQ ID NO: 22303 - DNA, 311 bp, Glycine max
acagaaagggtaccttcacttgttgcgtacattgccttgcctttggaattattgattctcagtggagtaaaaatatgacacctttgaagcatccaaatcacaactaccgtcatgctcaaacttgatttcctattatctatgatgaatatatacgatacatgtatggaatacaatacgtatctatatgacgatatgattatttcaaaaatatatcaaattcgataatttagaaatattttaaacatcataccagttgcattctatctataattgcaaatcctttaagataccacaaaaaagattgaaacttt

SEQ ID NO: 22304 - DNA, 238 bp, Glycine max
ctttggggctttctttcccggggttgttgcggttgaggagaacaacaacaataacaagaacaagatgaagaggtccccggtggtttctcggagcagcattgacgatggaatgctttccttcacttccctgccggctgcaaatataaaatcagttaacggtgcttgtgtcggtaccggtgattcggatcactcggatctggaagcttccgtggcgaaacaggtggtggagcccgagaaa

SEQ ID NO: 22305 - DNA, 241 bp, Glycine max
ggaattaatatataaaaaaaaaatacttaccgtatttgcaaaacaatgttgaaggaggaaggatagtgttgttcaggttcacatagttcccagttacgatttgggtgccgcattttttcgcccttggaactccgattccaactccatcatcacaatgaattagagttctcttgactcaatcaaaccagcaaaggtcatcatagaaaaggaccgatgtgcttctgatgctacaatgttgtct

SEQ ID NO: 22306 - DNA, 396 bp, Glycine max
tttctgtataactgatgtcaacattcatcatgcatacacattttttgctgttgttcattgtgtttaacatcgggtatttagagaaccgatgttgtcatatatatgttaacatcggttttacaaaaccgatattaatattgatacattcaacatcggcactttcaacatcggttttagaaccgatgtagaatgttctaaataaccgatgttgaaagtgtattttctaatagtgaataccctatagtaaatcccctttattaattttaataaggttaaattactcatttgttcctatagtttcacgattcttacctttttggtctctatagtttgaaagtggtttttttagtccatatagtttacattttaattcttttttaatccatataattttaa

SEQ ID NO: 22307 - DNA, 277 bp, Glycine max
gtcctggttgcctacaggtccaattcataacccctcaatataacgtgcacgtgacgaacctaatatacttcggaggatcgaacaccaaatgcagtgaaaggagcgaaacctttcaggctacgtatgcggggaagatattgaacaagttggaagttgagaagttacactcggtggtgacaaagtatgggggcatggtggcttacaatttggtcaagatgttgggtgaagacaggatgcaaaaagaggatattgctagctccagtgtgaacatgatcaa

SEQ ID NO: 22308 - DNA, 369 bp, Glycine max
tttgactacagaaggggactctcaatctcccttaattatgttgcaacccttcactacttgcttcacctttcttcataggaagaccaaattcttcctcaataaaccaagaatcaaggacatgatgagtgcatgccgcaagaggagacaatccaacagaaaattcacttcaagttctgacttgtcaacctcttctttccttcacatggagctctctactcagtttcatcaagttttcaagcttatcgacactaatggggatgggaagatatcagctactgagctcagtgaagtgctctcatgccttggatacaacaagtgcactgctgacaaggaagctgaaggcatggtgagagtgttggacttcaatgg

SEQ ID NO: 22309 - DNA, 291 bp, Glycine max
ggatctgatgtagtgtacagtgagggggcagttgtggatctgctagaaacacttatgcagctctctggacctaatacaacaatatttttggctggagaactccgaaatgatgccattcttgagtacttcttagaagctgcaatggataatttcactattggccgcgtggaacaaacgctctggcaccctgattattgcagcaatcgggttgttatttatgttctagtgaagaaatgattgttgagaatatgatgtttaagtgtcttcaacgctaggaacatgatgtccata

SEQ ID NO: 22310 - DNA, 301 bp, Glycine max
ttatagagacagagggcacgatgtcaccgttaaggacgagaagacccttctcttcggtgacaaggcagtcactgtttttggacacagaaaccctgaagagatcccatgggggtcaactggagctgacatcattgttgagtccaccggagttttcaccgataaggacaaggctgccgcacatttgaagggtggtgccaagaaggttattatttctgcccccagtaaggatgcccccatgtttgttggtggtgttaatgagcacgagtacaagccagagcttgatattattttcaacgctagc

SEQ ID NO: 22311 - DNA, 364 bp, Glycine max
aaagattccggaagacggagggcggaatccacagggactttgttaatcctaaaatggaggcaaaccaaaataatgaccaggagataagacatttaaaatagaaaatatagacagatcaaagataagataaaaatttaaattaaaagatgatgaagataaaaaaaaaggagaagataaaacatataagaaatttcaaaatagacgagaagaaaaataaaggataaggatgattgtcataccctaatttcgtccggagattattacttgatgacatgcaacctttggttagccactttgagatacatggcatcctttgttgcacaataaatgaagtcccgacacatgtcagaaatcaaaagaaagc

SEQ ID NO: 22312 - DNA, 285 bp, Glycine max
acgtgggttaaagaacatgttaacaaccattcctcgtgggggtcattctaacttgtgtggctttaaacacgtgcgacgccctgcggaagtgagaatgacttcgcggacaacgtgggcggcgacgcatctgaggaatccttcttggaggtggagagagaacaaccggagagagagaggataaggagcacctcgtacccaatatatactccggtcttagggcgcaggcactactattgcccacacactgtacaacaatgtgtcttgaagctctctggcctaactggt

SEQ ID NO: 22313 - DNA, 290 bp, Glycine max
ttggggtattataaaaacatgttgaagcaacggggtgctcgtgaggtgtcgttgctaacttgccaggcttttaaatgcacgtgcgacgccctggcaggagtgagaatgacttccgacggagcaacgtcggcggcgtcgcatctgaggaaaccatctgggaaggagaaactgaacaacgcgttgagacagaggatagggagatccatcgtacccaagatatactacggtcttagggcgcatgggaactactatttgcccaaacactgctacaacaatgatgtcttgaatgc

SEQ ID NO: 22314 - DNA, 374 bp, Glycine max
gacattgtgtttagtggaggacacatgaatagagctaggcaataacattcaggggctccgaaaagggggagaatggaggattgccttgagggtccacacttagccaatcatgaaacacagctccaaactcgaaggtggaggacacatgaacagcgctaggtaataacattcatggggctccgaaaaagggggagaatggaggattgccttgagggtccgcacttaggcaatcatgaaacatagctccaaactcgaaggtggaggacacatgaacagcgttcggcaataacattcatggggctccgaaaaaagggggttggagagacctaacggtgcaccgggtttttccacctgaatggcaaacatgctttttg

SEQ ID NO: 22315 - DNA, 367 bp, Glycine max
cacggtgatgggaattttatgatgaacaacattagtgctcgtgcatctgtaggagccggtgttggtctttctggaaatacccctgaaattagttcacccaatttcagaatgatgtctctgcctaggcatggttccttgttccatggaaatagtttgtattctggacctggagcaactaacattgagggattagctgaacgtggacgaagtatacgacctgaaaatggtgggaaccaaattgatagttagaagctgtaccagcttgatcttgacaaaatcgtctgtggtgaagatacaaggactactttaatgattaaaaacattcctaacaagtatacgtcgaaaatgctgcttgctgcaattgatg

SEQ ID NO: 22316 - DNA, 380 bp, Glycine max
  modified_base (215)..(215): a, c, g, t, unknown, or other
  modified_base (306)..(306): a, c, g, t, unknown, or other
ggaggtgtcctgaatgatggagttggtgctgattatgtgcaaaaagagaaggttcttccaaacagctttggttctaaagacaccgggataaggtgtgttagtttggatggagatgctgatcggcttgtttattttattgtgccacctgaaagcagtggtaggattgaccttgttgatggggacaagatactatccctgtttgccttatttattanggagcaactaagctttcttaatgagaaagaagacatgaaaaattgccaccaagcccatcttggtgtcgtacagactgcttatgcaaatggngcatctactaattaccttaaactgttgggacttgaaagtcaatttactccaactggagtgaaatatctgcatga

SEQ ID NO: 22317 - DNA, 374 bp, Glycine max
gtcttacagttacaaacttacagttacccttgtgtgctctaaaacgaactctctgaacttcaccaacgtgattcgcatggcgatttccaattcaatggactttcttcaactcttcattgctgtcttcatcgcgttctcaatcgcattcagagctcaccgaaaaaaatccctcagcacttctggcgcaatcgctgggttcttcgttatggcccttcacatttttgtgggttacaggtttggggcgatgctgcttgcgttcttttactcttcgtccactctcacaaaggtaggagaggatataaagcgaatagttgatcctgaattcaaagaaggtggacaaagaaactggatacaagttctggccaatagtggca

SEQ ID NO: 22318 - DNA, 371 bp, Glycine max
attgacatccaagttatataatgcatgtttgatgtcttggtcttattttcaataagaacgactatttttctcttatgcgtatatagaataacttaggaacaagaaattagtattgaattagccgatcctagattaaaaaaaaaaactaacaaaattcgtcagaaattgacacggtatttaaaaattaagaagtttttttaaacaaaattggatcaataaattaaagttggctaagtcgactgaatttcaataactgaaattgtaattgtgacaatgatgacataatattgtatatgttacatcattacttaccagataaatattactggtgggtaactaggtatgaaaaaaaatattatatgtaccaacac

SEQ ID NO: 22319 - DNA, 407 bp, Glycine max
  modified_base (23)..(24): a, c, g, t, unknown, or other
  modified_base (49)..(49): a, c, g, t, unknown, or other
  modified_base (86)..(86): a, c, g, t, unknown, or other
  modified_base (102)..(102): a, c, g, t, unknown, or other
  modified_base (114)..(114): a, c, g, t, unknown, or other
tttggggtatatgtttatcaggnncaagtgggttggcttgtgttttttntgttatatatagttgggttagtcctgtgcctgggtcntggtcttcattctccnttattaatttgntgttaagtagccaaaccaaaaccaaatccaattttgtggtttgtgtgtgagtgagaaacctgagaataattatcaattatgggcctctcaaatttcccaattagtgcatctgaaggggtgctacctgtgcttgtgataaacacggttttctcagtggctttgttgaagagcatgtttagatccatgctccaagtagtgtttggtggcagtgctgctagtagttcttcaaacattgaacatgatgatgaaattagttcatcatcatcatcacgggaaaggagggtgtcaataac

SEQ ID NO: 22320 - DNA, 390 bp, Glycine max
caacctgcctgtgcagcaggctaatatgggtgagtctgcagggaacatcgcctctagccgaccacaaactccaccaaatccttctacattggttcaacaacctgctacttacaaccccatcagaaatgctcccatgcctaaaactgaaatgaatgcttacagagctgcaactgcaggcacccctcaacttgttcaagttcctacgagccaacatcagcagcagtatgtcacatactcacagattcaccatccttctcagtccatggctcccaattctgctgcccctgccaattatgcttttgattatgcggatcctgctcatgctcaaatatactactctcaacctatggcacccacaatgccttcacagtaccagactatgatgatgca

SEQ ID NO: 22321 - DNA, 385 bp, Glycine max
  modified_base (308)..(308): a, c, g, t, unknown, or other
  modified_base (313)..(313): a, c, g, t, unknown, or other
  modified_base (372)..(372): a, c, g, t, unknown, or other
gtgacttagattctgattctgggattggatggagctaggcctcatggataagaatccaacgaagctggaacactttgatgacatgtggaggcccgaatccactgccacactattatctcacttgaagggggatgatggtcgacatgtcttgacattggatcgtacaatattctatccgcaaggtggtggtcaacctgcggatactggctttgtactcattcatggctttgataacaacaaatttctggtttctgatgttcggtccaaagatggaattgtttttcactatggtttctttgagaacctgngcggngaatttgagcctacactcgagaaagggaaggaggtttcactctttgttgatcagcccangcgaaaactcaac

SEQ ID NO: 22322 - DNA, 422 bp, Glycine max
tcgcccacgcgtccgcccacgcgtccttctgtttataagacgacagaagggtatccgcgacccttttgtcatccagaggcggcgggcccgatgacaagcagagaccaagtttggtcattctgcacccttgtatcatccagaggcggcgggcccgatgatacgcggagataccttacggttatccgcacccttttgtcatccagaggcggcgggcccgatgacaagcagagaccaagtttggtcattctgcacccttgtatcatccagaggcggcgggcccgatgatacgcggaaatacccgagtggttatccgtataaacattcttttgctatctgtaagacagaacgcttgatagcatgcagaggctgatacagtcttctgcaccttttgttcctccgggaacaacaagtcatttacatgc

SEQ ID NO: 22323 - DNA, 342 bp, Glycine max
tatgcttattagggtaggagggttcttagaaacattatgtgctatttgtccaaagaaagtttatgtacgccaattgaggagaaattgcattgaagtggtgtactaacaaactacgaggcctaatctccataagtaagttgaattttggaaattagtaggatttagcaaaggagatagaatgaactgagttctattactttttaactaatgtttaacctttcattaggtgaggttaatgtaaaattgtccttgccaacatcttttacattccccacttcataatcaaagtggaattgttgggtttatgcccaaggaaaaagaagcgttccaaattttaaaatt

SEQ ID NO: 22324 - DNA, 360 bp, Glycine max
tttatagtctacagaagggttcctgtcttttcgaatgtgaaattattttttattgctaaaggaatatgttcaacattagcatttttattagccttttaaatgtgaccttccaacctaccaaactaaaactataaaagtcatataaaatatattttctatgattaaaagataattaattaaaaaatatcactaaatccttcgttagagtagatattatgtcaaaatataaatttagtgcacaaaattaatttttaacgctaaatcgtttataattttaaataataaaaagaaaatgggtaaaataaacttattctactctattagtaactaaacaatcataaattatttttctctatattc

SEQ ID NO: 22325 - DNA, 243 bp, Glycine max
ttggattgaggaacatctcacagttgagcccatcaatgaatatgtccagagttgtgacattgtggccttcaataaaatataaactacaattgtgggacttggagatcatggcaacgggaggaattgcaagttttaaaaactatgatattgggaaactaccctgaattgagaatttttgtctttagaaacccgcttgttatttgtttttatatatcagtctttgtgatgtcatcggctatttgg

SEQ ID NO: 22326 - DNA, 279 bp, Glycine max
ttgggtctcacacaacccttcaatgacgtccatggccactttcttcgcccaaacctccttcccctcccactctctctccaaaaccttcgatacccatttcgcccctgccccgaaagtcaacgtctttgtgaacttcagggcgaggaggcacgttggggtgcgagtttcgaacgcgctgatcgaaccagatggagggaagctcgtggagcttgtggtgacggattttgagagggatttgaagaagggtgaggctctttcgttgccgaggatcaagctctc

SEQ ID NO: 22327 - DNA, 397 bp, Glycine max
tgggggcattatggtctcatgaaataaggcggccaccgcagccgcccgtacattaaacggcaacacagatctcctctccatctcttttttatttttgttttattttttcccactctttctcctcgtttccgaaccggaccgaaccgagccggaaacatgggagttccagcgttctaccggtggctcgcggatcggtacccactctcgatcgccgacgtcgtggaggaggagccatctgtcggctccggcgccgttgatgtgtctaaacctaatccaaatggcgtggagttcgacaacttgtacttggacatgaacggcatcattcacccctgttttcaccctgatggcaagtcagcacctactacctacgaagatgtattcaaatcaatctttgact

SEQ ID NO: 22328 - DNA, 387 bp, Glycine max
  modified_base (336)..(336): a, c, g, t, unknown, or other
  modified_base (375)..(375): a, c, g, t, unknown, or other
tgttcaatcaagttagaccatcttgatttgtgtagtagttaatattataaagaatataagtaaaaaaataaaataattattttaaatttttttgtacgacagttattatggaagggagaaaatactaaaaattgcttcaatttttatgtaaatgtaaatcacatggactttaagtataattgaattttgggattcaatgctcttgtggtactttacatagcggcaccattattatttgcatgacaataatgtgctatgattgtactaaaagtttcggaatccaacaaacaactgccttaaacattaattattcaacggctccagcattcaacctanagaaattaatgcactattttaaaatttgttttttaaaanaagaacaaaatt

SEQ ID NO: 22329 - DNA, 396 bp, Glycine max
gaaacaatcatgagcttcattctgtgtccgattctctttgcatttacctttctgtcctcgcccgttctctctgcttcggatctggtcctcgccaaggttgaccgtcgcattgatctgacttcacagattgtgcgcatcactacttcactaaaggtgcagaatacgggatctgatgttgtgtctgagattttgctgtcctttcctgagaaccaggcaagtaacttggcatacttgaaggcaacacttggtgatgggaagggaaaatcaaaaccatcttctggtgttggtttacctgtcgaagttgtccggcctaaagatgtgccaccttccttgacaatttattccgtgtctttacctaaggggcttgggaagggagatagtctgacgttggatgtc

SEQ ID NO: 22330 - DNA, 389 bp, Glycine max
gaacgtgttcgtcggttgaagagcaggctggttgccctgaccaggagggttcagaaggttagagatgaaatagagcagcttatggatgatgatggagatatggccgaaatgtatcttaccgagaagaaaaggcgaatggagttgtcattttatggagaccagtctatggttggatataaatcagttgatggtgcatccatttctgctccagtctctcctgtttcatcacctcttgattctcggaagcttgaaaagtgtttcagcattgctaggagtcgacatgagagcatgatgagttctgaaagtactacggaaagtatagaggagcttgagatgttgctggaagcatactttgttgtcattgatagcactctaaataagttgacatc

SEQ ID NO: 22331 - DNA, 385 bp, Glycine max
gatgcatagcaattccgaagtcctaattgtttaaacctaattctcatttcttcatcgttcgattcttctcctcctaaagatgcagatcttcgtgaaaactttgaccggtaagaccatcacccttgaggtggagtcctccgacaccatcgataacgtgaaagctaagattcaagacaaggaagggatcccacctgaccagcagagacttatctttgcgggtaaacagcttgaggatggtcgaacccttgccgactacaacatccaaaaggaatccactctccacctcgtgcttcgcctcaggggtggcatgcaaatctttgtcaagactttgactggcaagaccatcaccctcgaggtcgaatcctcggacaccattgataatgtc

SEQ ID NO: 22332 - DNA, 338 bp, Glycine max
ggtaggtggccctattgagaggcagttccccttcgcgtctctcttcaaacaaaacagaactgaactcgctgactgaaactcgcaaaaattagggttttgcagtgatggcactgtccaaccgcgtccgatcgggaatctctctcttcaccaaatccacgttcctcacttgcgagcgatccactctccaacgattcctcgttgccccttccatttccttcgccttcagaaattacgccaacgtgccggggcaaaaggaaaacaaagttaaggtccctctggctttgtttggaggttcaggaaactatgcctctgctttggatattggatctgggaaaagc

SEQ ID NO: 22333 - DNA, 426 bp, Glycine max
gagggtgttgttacttcttctctggttgagtcggatctagagtcttcagtttctcctcgttgttcttcgctttcctgttttcaatttcgattctttcgttaatttaataagatgtttgggagggcaccgaagaagagcgataatacgaggtactacgaaatcctcggcgtctccaagaacgcttcgcaggatgatctgaagaaggcttacaagaaagccgccattaagaatcaccccgacaagggcggtgatcccgagaagtttaaagagctggcgcaagcttatgagggtcttagtgacccctgaaagcgtgagatatatgatcagtatggtgaagatgcgcttaaggaaggaatgggtggtggccggtgccatgatccatttgatatcttttcatctttctttggcggtggagttcctttggat

SEQ ID NO: 22334 - DNA, 387 bp, Glycine max
gggacttgtccttttcagacctgtctgtcgacgccactatttttccatcctcaccagaatatagagcgcagtcactcatctttctctctttttttttttttgccttcttttcattcctttcttttcttcaaatcaaggaactcagctatgactaccagagaaatccttcaaaagatgaaggtaaaagttggtttgggttcatcagaccctgactcagggaaaggaaagagcaagatgtcaaagaacataactcatgggtatcatttggtgaaagggaaatcatatcatgacatggaggattacgttggggctcaatttaagcaaatagataacaatgaattgggtttgtttgcaatattcgacggccatgcgggtcagaacgtacct

SEQ ID NO: 22335 - DNA, 337 bp, Glycine max
gatacaatacaacgattgaaagtccaagtcttggggaatttccaatttccagctccaccaagatccctcttttcctacaaacccatctctctttcatccctccaatcttcatcctgtgaaaaccgcgaacgaatcaacaaatgggtggttgcgtgttgaagctagtagattccgttctgttcctgttcttcctcctaatagcggtggtggctcctctgatcgacgctcaaacctgtcttcctctctcttacttccccgacatcctcgtccaactcaaggaacagtacaccaatgactacggcgattaccttgtcgcagaaaagccgcacttttttgt

SEQ ID NO: 22336 - DNA, 386 bp, Glycine max
  modified_base (292)..(292): a, c, g, t, unknown, or other
gtgataataagaaagaagacggtgttgatatatcgctgcctgacatcaacaacggtgtatatggaacagatgagtttaggatgtacaacttcaaggtgaagccttgctcaagggcttactcccacgactggactgagtgtccattcgttcatccaggggagaatgcgaggaggagagacccacggaaatacccttacagctgtgttccttgccctgagttccgcaaagggacctgccagaagggtgattcctgcgagtatgctcatggtgtttttgagtcctggctacatcnccgccaataccggacaaggctttgcaaggatgagacgggctgtgctagaaaagtatgcttctttgctcacaaacctgaagagctacgccctgtg

SEQ ID NO: 22337 - DNA, 370 bp, Glycine max
gaccgggtgctctgcatcgtgtgcgggaagagcgtcgagaaggaggagcagaggggaggctggcaccgcgtcgagctctccagtggacagttcgttcagcgcctcactttgcctgagaattccatggtggatcatgttaaggcctatatggataacggggtgctcactatcacggttcctaaacaccacagaggggtcaataaccgtgttagaaacattaacatctcttctcgtccgtgagtgttgttgttgtgtgtctcatgaaatgaaagaattgaaacctagctaaccgctatctttgcataagaaacacggttgtctagataaataaataatagtaacaaaagttatgcgtccaagtctagacttt

SEQ ID NO: 22338 - DNA, 393 bp, Glycine max
cctcctccttgttttacaacatagatggagcgatgaaattaaagccaagcatcagacttgcctagagtgcacatttcttcaggtttctttcttgctacctcttttcttgtggtattatatttggccatggctccaataaccgcagcgacatccccacaaacaaatacttgatcttgcaccaaactgatgttgttttcaaccttgagagtctcatcacgtttttcttcaaaaacactttgaagaccaagaagaaagttaggaaagaggggattagatttgttgagaatccggagattacaagttgtatttataaagagacatagatttcgaagtgagatataacattttttaaaattattttgcattttattagaataaactaataattaatat

SEQ ID NO: 22339 - DNA, 369 bp, Glycine max
gactcattctctctgcagattctaatcttcgcaaatcaacaacgtctctctctgttactctgaaaactgacttcaagttagtgtaactagctgccaagttgtgatggcattggtctctggaagaagttctgctctgaacccaaatgcacctatgttcatacctgctgcacttcgtcaggtggaggatttttcacctcaatggtgggatcttgtgaaatcttcaacatggtttcgtgactattggttgagccaacataaggaggaagaatttgaagaagttgccaatgactctactaatgatgatatggagaatatgctctcggaaacttttgatctaggcatggaagaagacttcaatgttctagaaaa

SEQ ID NO: 22340 - DNA, 371 bp, Glycine max
tgtacaagattggaggtggtggaactgtgccagtgggacgtgttgagaccggtgtcttgaagcctggaatggtggtgacttttgcaccaactggactgacaactgaagtcaagtctgtggagatgcaccatgaatctcttacagaggcacatcctggtgacaatgtgggattcaatgttaagaatgttgctgttaaggatttgaagcgtggttatgttgcctcaaactcaaaggatgaccctgcaaaggaggctgctaacttcacagcccaagtcatcatcatgaaccaccctggtcagattggaaatggctatgcccctgtcctcgactgccacacttctcacattgctgtcaagtttgctgaactcatg

SEQ ID NO: 22341 - DNA, 368 bp, Glycine max
gacagttaatttatcataacatttgtttttggtgcattcaaaaaatggctgggattgtagtgatttttgactttgactcaacaatcattgagtgtgatagtgataattgggtgcttgatgagaccggtttaactgaaaagttctatcagcttcttcctagcacgcattggaaccctctaatggataagatgatgaatgaacttcattcacaagggaaaaccattcaagacattgtacaaattctgagtaggacaccaatgcatcctcgcattgtccctgctattgaggcagcttattctcttgggtgtgacctgaagattgtgagtgacgcatatattttctttattgagacaattctgaagcatcat

SEQ ID NO: 22342 - DNA, 390 bp, Glycine max
  modified_base (9)..(9): a, c, g, t, unknown, or other
ggtgaccgnctttcaccgtccatgtgtgtgtaggcctgtggattataaaatctgtaaatgagtttatattcattcaaggttttgtttttcatcaatcatcatagcgaaagataagtcttgtaattgtcttttgggttatcattataatcgatctttcgctctccggtcaaattcagatatatttccacgatcctttaagtcggcgacttaatcaaatttaaaattctgtcttttttctctctgcaataacgtattctgaaagtatattcaaaccttctttcgcagacttagcgtgatccatcaggatttaatttgatttgcattgtattggaaagacaaatggcgatgttgagaagatatgttacagctagtactattgcattatttgca

SEQ ID NO: 22343 - DNA, 360 bp, Glycine max
gactctgtggttctcttccaattacaacacaatcagtctgagattcgccaccgaaaaacctctcaccatggtttctcgccatttggtttcgctcttcctctgtttcctctgtttcgagatctctgtttcatcaattcgattgcccggtttggaccaagacgccaaggccacgcatggatcggtgcttaggttgaacagaggaggctcttcagtgaagtttgatcccacacgggtcactcagctctcgtggagtcccagggcttttctctacaagggctttttatccgatgaagaatgtgatcatttgataactctggccaaagacaagctggagaagtctatggtggcagataacgagtc

SEQ ID NO: 22344 - DNA, 350 bp, Glycine max
gaatatctatatcttggtgcccgttgattatgtatccaagtgaggggaagctataaacacccctaagaatgatgccatggtagtgataaaattcttaaagtacagagagccctaatcagtgatgggggaacacacttctgcaatgcataattgaagaagtttctggagtattacaatgtcagacataaggtggccacaccttatcatccccagacaaatggctaggcaaaagtttcaaatagagaactaaagcgaatccttaagaagactgttgcatcatcaagaaaggattgagctttgaagctggatgatgctctctggcttacaagatacgaacttaataaatttgt

SEQ ID NO: 22345 - DNA, 382 bp, Glycine max
gatagagagagagagtttttagagagagaagggatgaagatcacggcattgttggtgcttaaatgcacaggtgagggttccgatcccgttattctggcgaacgcttccgacgtcagccacttcggttacttccagcgttccagcgtcaaggagttcatcgtcttcgtcggtcgcaccgtcgcccgtcgcacccctcagggccaacgccaatccgtacaacacgaagagtacaaggtgcacacatacaacagaaatggtctttgcgcgttgggatttatggatgatcattacccgattcggagtgcgttttctcttctcaaccaggtaatagatgaatatcaaaaaaactttggcgagtcatggagaaatgctcaggaagaca

SEQ ID NO: 22346 - DNA, 326 bp, Glycine max
  modified_base (3)..(3): a, c, g, t, unknown, or other
gtnaagtgacaaaaatacaatacaaaacaaaacagagcaaagagagagtgtgtgaaaagtgaaacaaaaaacagaacaacaatggcgacacttaaggttcctcagcctcttccccccgttgcagatgattgtgagcagctccgaaaagccttctcaggttggggaactaacgaggagctgattgtatcgatcttggctcataggaatgctgctcagaggaagcttatcagagaaacttatgcccagacctatggagaagatctcctcaaggccttggacaaagaactcacgagtgattttgagaggctggttcatctttggacact

SEQ ID NO: 22347 - DNA, 366 bp, Glycine max
tggtgactggacgtagggacaagggtgtagccgaaccagtataaaactgagtttacattttctcttcccttaatctcctttatttattattgctttatattcatattcaaattgttttatttgaattaatatttaagaagattttcattaagggaattcataacttaaataaaaagtgaaatagatttttaattagggcaagtagtttggaatatcttaattcaaccccccaccccttcttaagatatctgaggccacttgtctaacaagtggtatcaaagcttcattcttgtataaagtttagaagcttcaagaaaaagatggtctcagcaaattccttattttcagaagggaattctatcaata

SEQ ID NO: 22348 - DNA, 350 bp, Glycine max
ccggatgttgctgctgaagaaccctggtgtggtcttgagcaggaatatacattattgcagaaagatgtccaatggcctcttggatggcctcttggtgggtttcctgggccccagggaccatactattgtggaactggtgctaacaaggcttttgggcgtgatattgttgactcacattacaaagcatgtatttatgcgggaattaacataagtggaatcaatggagaagtgatgcccggtcagtgggaattccaagttggtccatcggttggcatctctgctgctgacgagttgtgggttgctcgttacattttggagaggatcaccgagattgctggagtggtgctttc

SEQ ID NO: 22349 - DNA, 398 bp, Glycine max
gatcgatttgattgtttctgagtaatggcgtcgtcgcgagtagatctggatgggaaccccataaagcccatcaccatttgcatgattggcgccggtggcttcattgggtcccacctgtgcgagaagctcatgtcggagacccctcacagtgtcctcgccttggatgtctacaatgacaagatcaaacacctcttggaaccccacacgctcccttgggcctctcgcattcagttccatcgcctcaacatcaagcacgattcccgtctcgaaggcctcatcaaaatgtcagatctgactattaatctggctgccatctgcaactccgcggattacaacacgcgccctcttgacacaatttacagcaacttcatcgacgcgctttctgtggtgaagtactg

SEQ ID NO: 22350 - DNA, 360 bp, Glycine max
acaagggctggatgtaacttcttccttacgaggaggacttcaaattccatgattatagagccgtcatcaaatgtgaagacccaaatgcaaatttgtattcatttgttgggagcatggagtttggagagcaaaaatatcctctttctgcccaacaacttcttctgagagactctaagcttcgtaatacagactatgtgtttggagcagtcatctttactggtcatgacacaaaggttatccaaaactccactgatcccccttcaaaaagaagcaaaattgagaagaagatggataagattatatacttcttgttttgtgttttatttctaattgcatttgttggatctattctctttggca

SEQ ID NO: 22351 - DNA, 390 bp, Glycine max
gtatttttaaaaatataaaattctcagtctggcgtgtttttatagagatttgcgttcgtttcactctctgtgtcaaggttggcttttttttttttctcttttctttttcttctggatttattgagcttgtttcacccaagtcacatgccagtgttttcgttagagcgataaaaactagtgttttgttgtacgggaagatacaatcttggccttagatttgtaatattttatctggggaactagaccagactgtttttgttttttggttatatatatcagtttctttcacctgttgatgctcttttctctcctgcttgtgcgattgaagaggtgagagagcagatcaaagcttgaggcttgatttctgcgtttcttggagaatttgtcttc

SEQ ID NO: 22352 - DNA, 347 bp, Glycine max
cccactcatcctcgcacacaaccccacacaactgtacttgtactaaaattaacttcttactcacgcacgtacttataaacacatgcatccacttccctcactcattcaaaatacccactttcatatttctattcattttttcttatcaattaattcaactagccaaactcatctctcattccccatacaacctctttagcgatactcacaacttcttaattcaccctatatatacaaagcagtcacttatacttctcattactcacacgtcataccatacttcactgattcccccttataaataaatatattattttctaacatctattaaaacatttacctctcca

SEQ ID NO: 22353 - DNA, 417 bp, Glycine max
agacgacagaaggggataatcattgatagcgatggtgaaaatctcacttggtggatgcgatgatggggaaggacccagcaaccgaacccataagcgacgcagggaagatgatgatgacgacgacgaagaagagcaacaacaacaacgaagctttgagatggtggacccttcaataggaactcaagagaacgaagatcatgctgctccatccaatgatggatcgaattctaacggaaatggggctggaaccagtacccgggataggtccgttcctatcttcgtttccgaccctgatgtccttgattgctgcatttgctatgaacccttgacttcccctgtgttccagtgtgagaatggacatattgcttgctctatttgctgtgtgagactcagtaacaagtgtcccatgtgttcaat

SEQ ID NO: 22354 - DNA, 346 bp, Glycine max
gactgcggtttttttctgctccataagaagaaagatccttaaatcaacattctctctccctcccttggttataatagcaagcttttcaagcatatttccggggtttgttcccttttccttgtttagggttttctttggaaaaaaaaggtaattaggtataataatataattaaagcaaaaaaaaaaaaaataacatgggaaggggtagggttcagctgaagaggatagagaacaagatcaatcggcaagtaactttctccaaaaggagagctgggttactcaagaaagcacatgagatctctgtgctctgtgatgctgaggtcgctctgattgtcttctcccacaa

SEQ ID NO: 22355 - DNA, 387 bp, Glycine max
gcagaaaaggaacagatgttggaagatatgagagggttgcttcaggctgctgaagaaaaaaggcaagctgctctagctgagctctcagctaaacatcaaaagaatatcgagagtttggaggctcaaattaatgatgcattgtccgacagaagtaaggcaactgaatccatttcttcactgcaggttctagttgcagaaaaagaatccagaattgcagagatggaagcagcatcaacaggagaagctgcacgactcagagcagctgtggaaagtgtgaaaggggagctttctcacataaaagaggagcatgaaaacgaaagggaaagctgggaaactgcttctcaggcacttaaagcaaaacttgaaattgcagagagcaactgcata

SEQ ID NO: 22356 - DNA, 316 bp, Glycine max
  modified_base (282)..(282): a, c, g, t, unknown, or other
ggtgtgagagaacaatggcaatggtgaagtctcccaagaagcaagtgaacctcttctattcccttgactgtgaagaccttgcccagaacgttgctcttcaatcaccccacatcgttctccagaacatcaaatggaggtcatttgctgatggatttccaaatatatatataaataatgcagaagaacttcgaggtcaacatgttgctttcttggcatctttcagctcccctgcacatgtcttgaacaactttctgtcatatatgcactccctcgtttatttgntgcttccttcacattggtattgcccttcttttca

SEQ ID NO: 22357 - DNA, 372 bp, Glycine max
  modified_base (306)..(306): a, c, g, t, unknown, or other
gacagttagaagcaacgagcagcggctaggaccggaatctgcaaactcaagagttccatctcttcttccacacatccatcgttaatcattttcccgcaaaatattttctttctctgttctgtgccttcttctccaccgttggttcaaaaatcgcagccgttgatcagattgagcctccgtgttgatcttcatcgccatcatggaggtccgttccaatcccgccttcgacaactcctccgaccaccttcgaccgcccgccgtttcgtccaagcagccgctgccttctcctaccgccgtcgacacctncgccgtttctcagagactccagaaggaattaatggctctcatgatgagtggaagagatctcggggt

SEQ ID NO: 22358 - DNA, 301 bp, Glycine max
aaaacccccaaagggttcttctgcatagaagacgacagattgctacggcggcttaacgactacggaagggactcattctgcttctctattgctggctcatcacgtatcccaattcatatcatgatcagactctgtgtgcacgtgtgtgcatatgagctctcattatatttcgatagatctagattcttgagtgatctcatttacttactgaaacatacttaatatttaccatgctgagataaaatagcaaaattctgtagaaaaatcatctgatgtagcactgacactaagttttttcaca

SEQ ID NO: 22359 - DNA, 144 bp, Glycine max
cggttcactccaacgagaaaatccacccactgtgatgcaactacatgctattggaccaatgatgcctcacaccgaatcgcccagtgcatacagtaaacagtgctcatctaatgacgatgccacactataccagctattctattg

SEQ ID NO: 22360 - DNA, 335 bp, Glycine max
caacgccatggccaatatggaatccaccacgcctatactcactcctctagtgctcctcctcctcttctctctagccaaagggcttcacaaccccaaatgtgatgctgcctatcaacatgaccatgatggctcaaccctacaagtgttccatgtgtacagcccttgttccccattcatgccctcaaaaccaatgtcatgggaagagagtgtcctacagctacaggccaacgaccaagccaggatgcagaacctttctaacttgttggctagaagatccattgtcccaattgtctcacggagacaaatcacacagaggcctacatacatagtgaggg

SEQ ID NO: 22361 - DNA, 347 bp, Glycine max
gataagcagcatcaactaagcctaaaatcttctgccccacccagcattgtagcagagtgattctgttcactacaatgccatcatcactatcctctttcctccgtatggctcctattctctcccttcttgtactctcatgtgtgatttgttctagtagtgctcagggaccaccttcacctggctactatcctagttctaaaattagacctggtagtttttatcaagggtttagaaacctctggggatctcatcatcagagactagaccagggctagatgacaatctggcttgactctaactcaagaaatggattcaagtcactttacttctatcgatctgggtacttt

SEQ ID NO: 22362 - DNA, 378 bp, Glycine max
gacggacgagggtttcgtttggggtttgacgttgttcacaatcactttctgcgcttcactcactcccttcgtgcggttttctttctttgtcgaactcgtgcgaaaatgcgtgagattcttcacatacagggagggcaatgcggaaaccagatcggagcgaagttctgggaggtggtgtgcgcggagcacgggatcgattccacggtgaggtaccagggggacaacgagttgcaactcgagcgagtcaacgtctattacaatgaagcgagttgctgaatgttcgtgccgagggcggtgctcatggatctagagccagggaccatggacagcgtcagatctggtccctacggtcatgatttccgacctgataacttcgtc

SEQ ID NO: 22363 - DNA, 401 bp, Glycine max
ttattatgctctatcaacacattaaaaagatgagtagtgatatatctgctgtggaagtaggtcaacatttctattggcaaatagggagtttccaagtacatgcccaagtacttattacttcttgggttgtaattgctctcttattggtttcagccattctaattattcgaaatctgcaaaccattcccgctttcggtcagaatttctttgaatatgttcttgaattcattcgagacgtgagcaaaactcaaattggagaagaatatggtccgtgggttccttttattggaactttggttctatttatttttggttctaattggtcgtgggctcttttaccttggaaaatcatacaattacctcacggggagttagctgcacccacaaatgatataaatact

SEQ ID NO: 22364 - DNA, 350 bp, Glycine max
cgtaagtgtcatagagaaggagctatcctagatccaagctgtttattaccttgcatcttccgcaatcaccttctctcttcactcttatctctttctctctaaaaatgtgactttgttgtacgtgtgagagtgagcctaaaacagtacggatacttgagcaaaggaacacatattgaagtgtccaatgcgtaccaacaataccctttagtttactctctctaaaaaaaacacacaattctctatcctctacactctagtctctcgcttgctgttctctacttaactcacatctctaagctgtgtgcgtgaaccagcggatagcaaggatgagtaaacaagacatgatgaaa

SEQ ID NO: 22365 - DNA, 372 bp, Glycine max
ccagaaaatgttgctaaagtaaaggcccggtacaatgagcttaatcttcagggtgtatttgaggagtacgagagtgggagctatgcgaagcttgtatcctccattgaagctcatcctatcaaagcagttcaagctgtattgaagtcctttttggctaaaatttacaaaaggcagaagtagagtcaacttaaggcgaggaccaaaattgtttaacatgcaatagaaactagagttctgatttctatctagtatctagagcagtatcatgtttcgtggcttggaatcttttaaaaattgattttcttcttgcctttggtttttctaattttggtttttcagtgttaagaatcttgtggaatttatcttgaaata

SEQ ID NO: 22366 - DNA, 398 bp, Glycine max
caacgggacacaatgatacatgttgctaattgattttttggttgtctcacatgattagttcactgataagactcgaatttgtttccgagatgccctttaccgtcttgctagaaatacaaaacaacatgtactagaggacctggatggagatcttaacatgcatcatgaaatgccagactcagtttacaatgataccatgaggtctgaggacagtaaaccaatggaatcagagaccaacagtattgacagagcaattgcaaatctcatgttcaacaagatgtaaattaacataatagatcttacccttacaacactagtaaacttgaataaagaagtaattggaagtgaaggtcttcaaggacatagctcaaaagcctaggatgtgacaaaaagatctt

SEQ ID NO: 22367 - DNA, 325 bp, Glycine max
ggaccaacacctgtgcagcaattctgtgcgccaaatttgatctttctttctttctttctttggcgggaatgacagaaacgggggtttctgataatttcaagggcttaatactggcgatgggttctagtgcattcatcggttccagtttcatcttgaagaagaagggtcttaagcgtgctgctgcacgcggtactcgtgcaggagttggtggctatacttatctactagagccgctttggtgggctggcatggtgacaatgattattggggagattgcaaactttgttgcttatatctatgctccggcagttctggttacttccct

SEQ ID NO: 22368 - DNA, 342 bp, Glycine max
gagaggagagagtaacgaaggttgcttctgactgttcagaatcatgtcttggtgcaccattgagtccgatcccggtgtgtttacagaacttattcagcaaatgcaagtgaaaggagtacaggttgaggaactttattcattggatcttgactctctcaacagccttaggcctgtttatgggttgatttttcttttcaaatggcgtccaggagaaaaggatgaccgagtggttatcaaagatcccaaccctaacttgttttttgctagtcaggtaattaataatgcttgtgcaacccaagcaatcttgtccattcttatgaattcaccagacattgacattgg

SEQ ID NO: 22369 - DNA, 373 bp, Glycine max
  modified_base (308)..(308): a, c, g, t, unknown, or other
gaaaagtaaaagcttttgtagattcagaaacccgcacttgttgttggtgtggttgtgtttttgcatgcttcggacatgtcgatggcgatggtccacccttcggttcacccaatcgaagccccacccatgactgagcatgcaattgcaattgcaatgcccagacacactctgaaggatacgcagggcatgcccggcaccctcggtggcttcctcttgcgcttcgcccagttctctttcgccctcgtttccctctccgtcatggctaccacctccgatttcccttctgttactgccttccgctaccttgntgctgctgtcagcctgcaaagcttgtggagcctctctttgggagttgctgatatgtatgccattt

SEQ ID NO: 22370 - DNA, 379 bp, Glycine max
ggtggcagagagcgaacccaaaactagagctgccttcccttcaaaccttccactcttctctccttttccaatcaagggaataatatttcttagagatattccgaaaccatggctcacgccaatcctatgatttttgttgttggaattctaggtaaccttgtctccttctgttgctttctagcaccagtaccaacattctatcgagtttgtaagaagaaaaccacggaaggtttccaatcacttccttacgtggctgcactcttcacttcaatgctttggatattttatgcttacataaagacgggcgaaatacttctcatcaccattaacgcattcggttgtttcatagagacagtttaccttgtcatctatatcactt

SEQ ID NO: 22371 - DNA, 338 bp, Glycine max
gaagtgaaatgcagattcatgctctttcaggacatgataacactgtctgctctgtgtttacgcggccgacggatccccaagttgttacgggttctcatgacactaccatcaagatgtgggaccttagatatggtaaaacaatgtcaactcttacaaaccataaaaaatctgttcgagcaatggcccagcatcccaaagagcaagcttttgcatctgcttcagctgacaatattaaaaagttcaaccttccaaaaggagaatttttgcacaacatgctctctcaacagaaaactatcatcaatgcaatggctgtcaatgaagagggtgtgatggttact

SEQ ID NO: 22372 - DNA, 306 bp, Glycine max
agaagacgacggcaggggatggaccactccggtattcctgatgtagcaaggggttggggcctatagataagaacggatgtacaactaactttcgagggcatataggactagcgtcttgactgtgatagcttgaaatgcaatgtgacctataacgtgattcgcgaaaccgaagttcaattgaaagaacaacattcaggccttaatgggctatatcatgctttacttctgcagtggaaaatacgctagtccataaatgattagtgagtttaaaaagagaggaataatttgagaagttgaaatgaacaa

SEQ ID NO: 22373 - DNA, 367 bp, Glycine max
ttaaaagtaaaagcttttgtagattcagaaggccgcacttgttgttggtgtggttgtgtttttgcatgcttcggacatgtcgatggcgatggtccacccttcggttcacccaatcgaagccccacccatgactgagcatgcaattgcaattgcaatgcccagacacactctgaaggatacgcagggcatgcccggcaccctcggtggcttcctcttgcgcttcgcccagttctctttcgccctcgtttccctctccgtcatggctaccaccttcgatttcccttctgttactgccttccgctaccttgttgctgctgtcagcctgcaaagcttgtggagcctctctatgggagttgctgatatgtat

SEQ ID NO: 22374 - DNA, 339 bp, Glycine max
  modified_base (32)..(32): a, c, g, t, unknown, or other
tatcccgcaccacatgttgaactattgtggcngggtgaacaaacggtgcatgttattatcttaaccagatagggctttgatgaaacaaatgtttcgtatcagaactataacaccctgtttctctgtaaaaccttaaatggcatcttcctatctccacacaactcatttccaatctatccaaatttgcaagccatcatcatgtctgccttcacactccaatactcagaccacatcaattccatttcctactactcattatctatacaaacactgcaacagctcccacatcccccttagttccattgttcccctcaaagcaacatccacttccatccattc

SEQ ID NO: 22375 - DNA, 323 bp, Glycine max
gattttagtacgatcagaatcaaacaacaccctgattgccaaacttcgcttaggcgaagacacttacttttcttcatgggttctatcggaattgagagctcgggacctgaggttgtcaccgcttatgtacatgcaaccaaggatctgatccagaccagtcatgtttatctggatatcaagacggtggaagagtttcataaagggcatgtggatacagagaggatcattaactgttcatacatgtttaatacaccataatgcacagtgaataattcacaatttctgtatgagttttcatatgcttgcaagaaagactatcatat

SEQ ID NO: 22376 - DNA, 364 bp, Glycine max
cggttgggtggattctgctgagaagtacaactcggaaggccggtgttgggagccgctcccaagaatgaacaagaatagaaagttttgctcaggttgtttcatggacaacaaattctatgtccttggagggcaagatgagcatggaaaggacctcacttgtggggaattctttgatggaaaggcaaatagttggaacttgattcctgacatgtggaaggatattgtttcacagtctccacctcttcttgctgttgtgaacaatgagttgtacacactggatgcttcttccaatgatctgaaagtgtatgtgaaaggaaccaacacatggaagactttgggaatggttccttgtatagcttattca

SEQ ID NO: 22377 - DNA, 393 bp, Glycine max
ggtctttcacccaggccaacaacatcaagaggaagaaggcaaggaggagaacatataatagcagagagaggaagcgccaagaacgaatacactgttactaattaccctatatttctctcgccagaaactgcacgtgtcgatcttccttcttctcacgctccaaattcaaaccttcagctacgctcttctctccgatctatcgtctttatttctctctttattttctcgggttttccattggaagcgagggttgaattgaggcgaagcatttgcagcatgagcatcgacagccccgagcaaggggacagctaggttttcgaggttccgactgtggagggcgagatttccatgggtgatggaggcgtcgcgtgcatgcatttgcagtatattatg

SEQ ID NO: 22378 - DNA, 330 bp, Glycine max
ttactttaaggcttttttctctacaattcttgctgtctgcttcttcttgcacgttgttttcgtgctcttgctcttcccttcttcttctttcccccctttttttctctttgtagctccgctacctatactttgtttattggctccatgttcttcttccctcactgatttatcttttgtcagattcgatttgtctcatttggtttgcataagaatctttggcaataagctggtgtggtgtttctttcatttcactttatatgagtacatataattttgaagggttttaaggatctgcatcatgttacgctcattacctatattgccactccc

SEQ ID NO: 22379 - DNA, 374 bp, Glycine max
tggttctagtgtgtgattgtttgttgttgtggctggttcttcttcttttgttgttgtgtgtttgtgtttgttttttctctcacctgaaaatgtcttgctgcggtggtaactgtggttgcggaagctcctgcaagtgctgcaacggctgcggaggctgcaagatgtacccagacttgagctacactgagtcaaccaccaccgagaccttggtcatgggagtggcacctgttaaggctcaatttgagggtgctgaaatgggtgtgcccgctgagaacgatggctgcaaatgtggaccaaactgctcctgcaacccctgcacttgcaagtgatgtgttggaaagccagcttcaagcatagatcgcccttaattagga

SEQ ID NO: 22380 - DNA, 384 bp, Glycine max
cactctccaaatacgtagttgagggaggatctgagaccgtgacagacaagtccaacaatagttgaaacaaaaccaacaaatctccataccgctacctgagtcagccatctagtcattttgatggccaaaagcgtcatgttttttatgtaatgagtaagagttgctttaacagataatatatacagactacagagcaatcatttctggcttaggatgagaaacccacctgtatcttcagatgaaatttcaaggaaagggacaaaaaccttatatgctataataaattataggataaagatccgtccacatccatgctattaattagacactctttaaactcatatgatatatgattagaagaaagatatataaaatgaacttaaa

SEQ ID NO: 22381 - DNA, 416 bp, Glycine max
ggcgagaaggaaaagttcggatattgatagaattcgtctaattcttctttgtaggggaagactttagtagattttgcttgatttataatagaatatttttcatttagtttagttttaattttgatttataagattttccattaaaaaaggagtctttatgtcacgttacagaggacctcgtttcaaaaaaatacgtcgtctggggtctttaccaggactaactagtaaaaggccaacagtcaaaagcgaacttagaaatcaatcgggcttcagtaaaaaatcttaatatcggattcggttaaaaggaaaaccaaaaatggggtttcattaagggcttaccggacggccattggttaaataccgtcgtattggcggaaaagcttaaggatcaactggtcaggttttattacaactac

SEQ ID NO: 22382 - DNA, 300 bp, Glycine max
acgcttccgactgctgctaaaagtctactaaatggtatcatgtttctcaaagaagttatgcttcaaggtagtttagcgactgcatataattaatttccaatttaattaactacaattacaactactaatatattttaaatatagtccgtaactaataagcttacttacaattttttgtctcacaatttgaatcagtcaattcaatatcaatacaagattaaattggaacaggaccagaatgattcatatattcttaatggaactctaattaaacaattctgatcatgttctatactatta

SEQ ID NO: 22383 - DNA, 454 bp, Glycine max
gacaccaacacatccattcattgtcttaatgttagcaatgtcttcctctttctccatccatggctgcctcctcctgtcaatagcccttttctcagattgttgcttaacagcatctcaagctcccaccaccaaatcacacccctatatccttcccattaacaaagaccccgcaacaaatttgtactacacttcaattggcattggaactcctaggcacaactttgatttagtcattgatctttctggtgaaaacttatggtacgattgtgacactcattacaactcatcatcctacagacctatagcttgcggctcaaagcaatgccccgaaattggatgcgttggttgcaatggcccctttaaaccaggttgcacatacaatacatgccctgcttatgtaatcaaccaattagccaaatttatttacagtggaggcttatgtgacgatttcata

SEQ ID NO: 22384 - DNA, 302 bp, Glycine max
gaggaggtatgcattcaatcatgctaacgtcaagagaggacatgctcaattggtgtatgagtccaaaatgtacacaattctccagggaggaactggaattccaaatgtcagatggattctagtcggatggagattacaacgtactagtgatcgatctgcttgaaccgagtcctgaaaatctttttaacttctgcgatatacagctatcactaaagacagctgatcatgcttgctaatcaaatgatcaaccgagttcatacattcattcacaatcgatgctgcatctgtatatcaaacccgat

SEQ ID NO: 22385 - DNA, 345 bp, Glycine max
tatggggagtttcagacacatatagagggggttgacattggacggatggacgctacgtctcttcctcttctctttcgatccatccctcattcctaatcctacaatccaaccacctcagcctcacactcacatatacacatatctgaacgcatatcgtacctcctatggcttcaaagctcatcctcaaggagctcaaggacttgcataaagacccaccaacttcttgcatcgctggtccagtagctgacgacatgttccattggcaaacaacaataatgggtcctgcttatagtccttatgctggacgtgtattcctagtcactattcacttacctccggattatc

SEQ ID NO: 22386 - DNA, 198 bp, Glycine max
ctccattgacgaactgtaattccaaataacatattcttttcactctaaggagattacaatcttttagtgatccatctacatttaccaacactttaacatctttttaacttctacattataactctatcactaaatacatctctcatactcgctaatcaaatgatcaaccttattgacttcattcattcatactctttt

SEQ ID NO: 22387 - DNA, 420 bp, Glycine max
  modified_base (396)..(396): a, c, g, t, unknown, or other
caaatatcttggagagttcaacgcctgtcgttgatgggaaacagtactacagtttggctgtgttgacaaggacagctgatggagatgaaggtggcaagcaccagctgattacagcaacagtgaaagatggcaaactatacatttgcaaggctcaagctggagacaagaggtggtttaagggagcaagaagatttgtggagagcacagcaagttctttcagtgttgcctaagaacttaattagtggagtgctattctgcatgtaaatcatcttgaaggggtgtgtatgtcttgaattatgtggcccctttttgtccacaagtttcattatttgaggcttgtggttggagtaagcacttcgattcttaatttttcatgtcttctaaggacttaccctnctctcttgtccccctttttctctc

SEQ ID NO: 22388 - DNA, 374 bp, Glycine max
gtacggccgcgcgaacacgaccgacagaaacccacatactgatacatctaaacacccctcgaggaggttaatatatcacggagagacgcaacgtctctcactttccccatcaaaaatcaccataactataacgacatatgatcaaccactatgaatctcacactcatatcttcttaatccaacgaatcctctacaatctaagtccctgattcctattctctgctgcatctcatacacaccgaatctcccaccatctctttttattcctcttctcatcatatatccctaaacatcaatgacaaaaatttataccccttcatcatataagcccttataacttataattatatcctaccactatctaattacctact

SEQ ID NO: 22389 - DNA, 205 bp, Glycine max
attccgcgctggacccactcatccgctaagcttttacttcttccgcattactttataaccaagacgaaaggccacttggtgtgtctttcttcagggacggcagcgtactattattttagccttcattatctcatcccgtttgacgctaattactcacataaatctctgcagataacttctataaacttccttaattccgtacaat

SEQ ID NO: 22390 - DNA, 372 bp, Glycine max
cttttaaattttagaaccctctcttctaccccgtggacgtaatcatactacatcgggggcaaataaaaacaaaaccctatgatccaacaaccgctcacatatccaccatcacaaatcaactacgcctgccttcaattccatatctctcttatcgtcacacctataaacaattcaatgtactccgatctccaacgctccgaatcccaaaactactctcttctacccatcttaatatccttctactaaattttactaattccacttaaactcttcacgaaaaaacccgaacactttaatttttccaacccacattcaatcttcattgataaacgaccaaaaccttaacaagcttcttaaacatcttaccatttc

SEQ ID NO: 22391 - DNA, 368 bp, Glycine max
gtgaactcaaagcgacagctgctgaataagtggagcagataacagcttctctagggagatcatcatctgatggcatcgcatcatcagaagcctcagacaggatcaaagctggtttcattcacttcaagaaggagaaatacgacaagaatccagctttgtatggtgaacttgccaaaggccagagccccaagttcatggtgtttgcttgctcagactcaagggtgtgcccatctcatgtgctagatttccaaccaggagaggcctttgtggtcagaaatgttgccaacattgtcccaccatatgaccagtcaaaatacgctggaactggggctgcaattgagtatgctggtttgcatcttaaggtgtcg

SEQ ID NO: 22392 - DNA, 212 bp, Glycine max
agatcagattagtattggtaatggtcagggattaaaatcaattcataaggtgtaacctccttttaattcgcaaactcctcttgttcttaagaaccggctatttgttccttctataaccaaaaacttgatgagtgtcagtcagttttgtagaaataactctatttttgagtttcattcttagttttgcttggtcaaatctcttgtctctaaag

SEQ ID NO: 22393 - DNA, 306 bp, Glycine max
cacaaaacaactttcaaactctgataaagaatggctgccaacacattgatgagtactgcgatctcagccttcccatgtctgctttcttcctcaaaatccagatttgccaccgcagttcctctttctagctttggtgtcaccaatgcctcttcttctcgcttttctatgagtgctgactggatgccaggccagcctagacctccttaccttgatggttcagcacctggtgactttggattcgaccctcttcgtcttggtgaagtaccagagaatcttgagaggttcaaagagtcaaaactcattcac

SEQ ID NO: 22394 - DNA, 236 bp, Glycine max
gtggttggtgggagaaattaatgatcgttgagggtgtgagacattggtacaaagctttcagtgtagttgacaactacttgggaggagggaagaagaggaatctttcttccgctgttgtcgtgtgccgtggttggtgttctgttgatgtctcggaaactcgacagccctgtgcagactcagatggctgtggcagtgataaggagcagtccctttggaagagagtatcatgggaagca

SEQ ID NO: 22395 - DNA, 375 bp, Glycine max
  modified_base (251)..(251): a, c, g, t, unknown, or other
ggcatctcttgagaccaatccccactcaaccgccagaccactctctctggtcttctgctacctttcaagtttttaaagtattaagatggcacagacattcctatttacctcagagtcagtgaacgagggacaccctgacaagctctgcgaccaaatctacgatgctgtcctcgactcttgccttgaacaggacccagacagcaaggttgcctgcgaaacatgcaccaagaccaacttggtcatagtcttcntagagatcaccaccaaagccaactttcactacgaaaagatcttgcgtgacacctgcaagaacatcttcttcctctcaaacgatctgcgacttgattcttacaactgcaaaggccttgtaaacat

SEQ ID NO: 22396 - DNA, 320 bp, Glycine max
tggatcgtgaggctgtttccggtaacctctgccggcgtcgctgagtggtgatcaaggaaatgggtcagacgctgagttgccgtgcaacagcacgaggaccatggtgtgctcttccctgcacttgcaagtggagaattgaaggttgttgaggccatgttggaggaagaccccactgtgttggaacacaccattggctgtaacaggctttctcctctgcatgtcgctgctgccaatggtcggatcgaggttctttccatgttgttggataggtctttcaatgttaactgattgaatcgacataaacagacctcgttgatgtt

SEQ ID NO: 22397 - DNA, 352 bp, Glycine max
gaaaccaaacattaatttccgtcccattgagttttctgatgagcaacatgagcaaccctaagatgcagcaaaggagggagcgacgcatgttctccacctctgatgacagtgccatgaccaagcaagttgaggccactcatgcccctgatggtcgtgaaattgatgtcaaacccattctccaaattgtggatgaaatcttggttcggttcattgctcgcaccgttgagggtcatgaagtaaagcgagatcaagatgcattggagatgactgctgctctgactgaatttgacatgcttgactcgctggcttatatcataaacaaaatttcctgcgagctatcatgcaagtgctc

SEQ ID NO: 22398 - DNA, 259 bp, Glycine max
ttaacaaatctagggttttagtctcttccttgagcgtatttactgtgagttgattcattctcttcctttatttttttctttgatttgtttttttctcgttaaaggaaaaagccactgcgaatgcattgcttgccgtgagagctcatcgcttttgattttcatatcagatatccatgatttgagctgagcttcttcggttagctcacgctcgtgtcttgtacttgttatgttttagggtctgttgtgttttttaggtttt

SEQ ID NO: 22399 - DNA, 209 bp, Glycine max
attcccgctggacgccactcatccctctaatataattctcactaacttttctttccagaaaactttatagatatacaggaatgtctcttcaacaagttgtttgttcaaaaacctttaatccttctttattactatttttataacattccaattccatacttacaatattttccctctcctaatttacactccctcattttcccttactt

SEQ ID NO: 22400 - DNA, 158 bp, Glycine max
tatgggggcgaagataggtaacctatggagtgggctgtggtggatagagggagaatgcgcagtgagctctttttgtggacccattttgattgtagagccctgcttgagtaggggtgtgcattgcatatgttgttgatgtggtattgtgccatgagggg

SEQ ID NO: 22401 - DNA, 402 bp, Glycine max
caacaggtcttattgattatgatatgctggagaaaactgctactctgtttcgtccaaaacgcattgttgctggtgctagtgcttatcctcgggacattgactaccctcgtatgagaaaaattgcagatgaagtaggtgcttttcttatgatggatatggctcatataagtgggcttgttgctgcatctgtactttctaatccctttgagtattgtgatattgtgaccaccacaacccacaagtctttacgaggtccaagaggtggtatgatattcttcaagaaagatactgtgcatggggttgatttggagcctgccattaacaatgctcgttttcctggtctacaggggggtcctcataaccacacaattggaggactagtagtttgcttgaagtatgctc

SEQ ID NO: 22402 - DNA, 331 bp, Glycine max
tggagttcccctaccgggaaactggattggggcgtaaatggagatgagctgaacaagctgaggaaatctgcttcctttggtttcagaaacagtggggtaactgcatcatcatcatcatcccccatagcacagccagaatttggcaccgagcaggatgtctcgtgggttcattcattggttaaagatgttccctccgagaggtctgagaagcaacaatatgatcatctcagcaaagagatgcttcttttaccatgggtagaaacaacaatatgatcttcttcagtaaagaaatgctgctttcaccatgggtggagcagctgtatatagagca

SEQ ID NO: 22403 - DNA, 423 bp, Glycine max
  modified_base (413)..(413): a, c, g, t, unknown, or other
gatgttgataattcagataaaagtcaaaagtctgaggacaagctttctattgataataattcagataaaagtcagaaatctgaggagaaacttactgatgataatgaacgccggtcaaaaagaaagtaccgttcaagatctagtagacatgaagaggaggaagaagaaaacaaagataggagggatcacaaaagatccaggaaaaaacatcactctcatcgcgcttcacaccacaatcgggacaggcataagcacaagagaagacattccttctccaaagacaaatattcttacagggggaccaagcacgatagctcctctgatgatgaacatcatcgctcaaggcatcatcgtcataaatatgatagctcctcctctgatgatgagcaccactcttccaaacaacgacatanggatgataac

SEQ ID NO: 22404 - DNA, 365 bp, Glycine max
cgatggagattgcttgtcagtgcgaagcgcaaattaaagcgcacggaccattctacttcggtgctcttgaaaacatgggaaaacagagcacagatttctctgccctcaactgcatcgacctctccaaccctgacatcaaccaatccgacaatttactcaaacaggcatgttaggattccggtttttactacgttgtcaatcatggaataagccaagaattcatggaagaggtttttgcacagagcaagaaattcttatctctttctcacaaggagtagatgaagattctcaggaatgaaaaacacaagggatacacccatgttcttgatgaagtgcttgatcctgaagaccaagtgcatcgagac

SEQ ID NO: 22405 - DNA, 143 bp, Glycine max
actataataagatccgtcgaattacatatcttttaagattcgatttagtgtctaataatcaccgaatcaaatcaaattctcgattggaattttaggaattgatgaacgaaggcttaagattagcgtaacgatttcgaaaccat

SEQ ID NO: 22406 - DNA, 358 bp, Glycine max
taccgacggagaatgttgctgagtaggcagtttatccatttaggggggcgttctagctacccatagtctgatagtgatatactgctacacatatcaatgggatcccacatggcatgatgggactctacccacatagatgctcaatcaaccacacttaaaaggtaccgatcactcaccacagatcaaatagatgcttactggcaatcaatgcagaagatagcataagaacaccttagagctatatccaacttgtcacagactattcacgctagcaaaagcacataacctgagaacaagttgcataactcaatgaccatgcctgagacctgttcacaggactaccataatatgttcatat

SEQ ID NO: 22407 - DNA, 354 bp, Glycine max
tcgactagcgctagatattactagtagtatgaccggacagagtgaaggtcacagtctgtgctgacacctctgaaaattaacaacgttgccttgtcctacatgagtttcctccgcaggttgtgcccctgtttgcacaagggcggcgcatccttccacgacggcgatgacgacgacatagatcgcaaccaccctggcgactccttcgacctaatcttcggcctccacactctccaactcgacaccaacttcttctccgacatcaaccggctatgtcatggaggctgtggtcctgttttcaggggattgatgccaaatggtcaagaagtggcggttaataagctgtcattggaatct

SEQ ID NO: 22408 - DNA, 402 bp, Glycine max
ggatgcgaagaaaaactggtgagaaaaagagagacaggaagagataactgtttgaatcagacttagactgtggtttgcaatttgcattgtgacatacatactcttatctattttggtttgcaatcactttgtgcgatcaccatggtcatcgatattgaaaccttggaagacaggtatattgattcttgcaggagacatgacgtttttcctaattcttctattttgtcaagccttttcaaggctgaggtaaaaaagtccaaccatgagctgtgcatcctggagattttaattgatgacctaaaggatgctgatattgctccactttttgacttgtgcatgaactttgacgcttctgaaatagaggctgttgatgtacgtaatgaatcatcatgtgatttaaat

SEQ ID NO: 22409 - DNA, 207 bp, Glycine max
tactcatgggggggcttatcacaacacatggttgggtatctactataatcaacttaatgtatttgttactcaaagatctaatcctgcatcttataactgtttgatcagaaactaactattatagcacatattctcacgataccatttttacttatgctactacaagactgaccataatgcttgtccttgaatcaattactttactat

SEQ ID NO: 22410 - DNA, 421 bp, Glycine max
aaacaagtagttgagaactaagaagaaggaaatggcttcctcaatgatctcctccccagctgttaccaccgtcaaccgtgccggtgccggcatggttgctccattcaccggcctcaaatccatggctggcttccccacgaggaagaccaacaatgacattacctccattgctagcaacggtggaagagtacaatgcatgcacgtgtggccaccaattggcaagaagaagttcgagactctttcctacttgccagacctcgatgatgcccaattggcaaaggaagtcgaataccttctaaagaaaggatggattccttgcttggaattcgagttggagcacggtttcgtgtaccgtgagcacaacaggtcacctggatactatgatggacgctactggaccatgtggaagctgcctatgttt

SEQ ID NO: 22411 - DNA, 355 bp, Glycine max
ggaaacaaagagaacccaggacagacatatccactgcatgagatgcccaaagcaaatgcatcatactataattaatactacaacattcacttacttcactctgtttccatgcttccgatcctagaaaccgctactttctctattattatcatcaagtgtgagatgcatgctcctgacaaattcccaaccccttttgtgcgagtgagacccatctaatcaaattaattaactcctaaacccggttcattaaccaaaattgagtacttgaccaaatttcacaagcttcaaaccaaggaacccaccaaacctaagaaacatcatcgtcagctccgaaagatcgcaagcttgttgcggt

SEQ ID NO: 22412 - DNA, 138 bp, Glycine max
gattggcttctggaagtggactgtacatcaagcggcgggattatcaatagcggcggccgcgattgaagcatcgtattatgcaaggttcctgagtgggttgatggaggaaagagttgacgctgcaaaggtctttaaatc

SEQ ID NO: 22413 - DNA, 398 bp, Glycine max
gaaggtgcaagagtttgttgtgagctataagctagtttagggtgaggagaatatgaaggtgggggttttctttgttgctgcagtagttttggtagcatggccatgccatggctcatgctaccaaaggttccctctccgaatgaaaactggctatggtgagcgttcttcggaggtaaaatgcacaagttttaggcttgctgtggaagcacacaacatccgagcctttaaaaccattcctgaagagtgcgttgaaccaacaaatgactacattaatggcgaacaatttagatcatactctaaaacagttaaccaacaagctgtcttttatgctagtgaacgcgaagtccatcacaacgacatattgatattgcgcatagataacaccgtactctctaata

SEQ ID NO: 22414 - DNA, 451 bp, Glycine max
gacgcacttatcaatcaatcaaaacattcccaataacgatggtatacacatcttcaattaagctccttctcctatagccatggctctttctaagcttataattgcttcccttcttgcgtcgcttctccttcttcatttcgttgatgctgatcaatcggcacatgcacaaacgcaggggtctcttcttcagcagatagattgtaacggagcatgtgctgcgaggtgccgtttatcatctcgttcacgcctctgccaaagagcttgtggaacttgttgtagacgctgtaactgcgtgccacctggcactgctggaaaccaagaagtgtgtccctgctatgcaagtttgactactcatggtggcaaacgcaagtgcccttagacttaattggaccactatcctatgcatgcctttgatttatattataaaataaaaataatactatatataaca

SEQ ID NO: 22415 - DNA, 379 bp, Glycine max
gcagttttagatatggaagcaggagtacttggttcaaattcgtgacttagtgggtctgcaaagaagcgccgatcgatgcagtctgctcctattcaggagcaagtaatagcagatggactcaggctaattactaagttctactcatcatgtaagcaacaggatatctcaaggtttgaggaagcaaggacagaacttggaaaactcaagtgcaagccaatactagaaacgatattcgagtgtgatagggaaccaattctgcaggcttctgctagtcgtgtcttacaagcagtttttcccaagaaagagatatatcatcaagttaaggatactatgcaacttcttggagttgtaaaatcctcatcactactatcatcaaggc

SEQ ID NO: 22416 - DNA, 193 bp, Glycine max
agtccgtgagtcattcctttctctcactcttcgggcaggcttagatcaactgcgggcacagcacgtgactaaaaactatggtgtccaaacctaccgactctgcttccaaacttcgtaaacaacatgtacagccagcaaatgatgcaattggaaacttgtccctcaagataaatcacgtgataaagcaaatcca

SEQ ID NO: 22417 - DNA, 272 bp, Glycine max
tccacaacatgtgttggaggggcagagggagtgacattggtggccatggcaacacaaacgtggctgaatgggaattaaggccaggaggaatggtcgtgcagaaacgtaactcggatttgaatcaaaattctgcatctaaattcaccatcaaagtcaaagtgaagtatggctcatcctatcaccaaattcaaatcagttctcatgcaagtttcggtaattccatccttgggcatttctctcttcattttatttaaaaatttaatctttacact

SEQ ID NO: 22418 - DNA, 332 bp, Glycine max
agacttcttatcttataaaaaatttgtcctatagggagctccattcttattgctaggcctactatttatatatttatcattatatatggtattcgcaagtttataacatatattaactcatatatcgttttcggtcgtatctattttaatttcaattcatatgataaccttattattattcaaagaaatcataggattatctgattcctccaaaaaaggcatgataataacttttctttgctatcaatatatttagttactcgatgactttaattcaagccatttaccttttatggatttatatgaatcatcaaaaattctttcatggactt

SEQ ID NO: 22419 - DNA, 248 bp, Glycine max
cccacgcgtccgattattactgcggatgggggttacataatttaaagtgtaatgcgcggatataattataacataaaatggatgcccaaaacataaatctcaagatcaactaagtttttaagaaggacccactctaatgattatctgtagatgatttaagtacaaataacacatacaaaagatcacaattagagcacaacaacaacaaatgaatggaaaagatacaaagcaaacaaaaggcaaagctt

SEQ ID NO: 22420 - DNA, 223 bp, Glycine max
cccacgcgtcctcccactcgtccacccacgccttccaattcgagccaccactttttttgtcattcatttttatttttttttcgtactcaataacccttatcaatcattaatcaaccatattcttatacaacactataataacacacctccctctaatatacccacattcatacatttaccatctattctacaacaatcgccttatattaaatactcaaattaa

SEQ ID NO: 22421 - DNA, 399 bp, Glycine max
gcaagcaacattagcagctgaagcaaatgctcaatcccttgcgttaatggtggattggcagatttaattcgattgtgggaacaacttatcgatcccccaatccgctgtgaacagatcgagggcgtggcctgtttgatttgaactgaatttcggattgaaggatctcattttcttggagcattaaagcagaaatttctagttaaggatgccccgaggcctgagggaattttaatgacttgagagaggcagaaaagtgtgtaccttgctaaagaagtgcattagaaaaaaggaagcaggaaattatttctttgttttgcattaatgtgccatataaatttaactgctcaagcttgacatttttttataaacataaaagattaaaatgttatatctcaaaat

SEQ ID NO: 22422 - DNA, 394 bp, Glycine max
gtccctaattctcaatttcttggcggctctcacagtacgacacttcacatgtgacagtttactcaactccttgtttggttagaaccctctatcagtcaaaatcctatgtaggtagctcttttcgagacctcgacaatttgcttcagttgctttcaagatcaatgattgtttccataaaccatgaaaattaagttgctttctagaatttcttaaaagtaaaagtatggaaactattttcaagacatttacttatatctaaacatgaaaatgttaacaacacttttttttactctctctttctaagattctccctatattttggtgaagcgtaatggaagttaccaattttggtggcctcacttttaaatttggtgagaaaatttttaaatgaaaa

SEQ ID NO: 22423 - DNA, 305 bp, Glycine max
gatctctcattctctcgtgcctcaacgctttttggacggctttcgcttttccattggaacctctttcacacttcagatctgtttcttcatcggttgttcaagtaaatggcctttgtcaccactgctgaagtgtgtgatgctaacccacagttaattttgagtggggagcttcgtgcccttcagccattttttcatatatatggccgtcgacaggttttctctggacctatagttaccttgaatgtgtttgaagacaatgttttggttcgtgagttccttgaatataaatgctatcgaagagttct

SEQ ID NO: 22424 - DNA, 90 bp, Glycine max
tgggtacacaaacaacgattcgcacgaatcaagttgttggtttggtagagaatataagcaataaatcaatcaatcaaatcattcttacat

SEQ ID NO: 22425 - DNA, 337 bp, Glycine max
cccacgcgtccgaagactacagaagggggttttgcatgagaacgatgaacattacccgcacattgttgccttagagcaggtgacacacggtgcagattaagaccactttgatcatgagaagaagtctgttctgaataaggtcaaggcaaaggctaagaaaattaatgacacgattaagaagcatggccatcaagtgcttgatcgtggtcatgagtataacaatgaagatcagcatacccttgatgatcatgacttatactaggatgatgaaatggctgaagacccacaagttcataaaacacctattcacgaatttgaatatgttaaaactgcaaca

SEQ ID NO: 22426 - DNA, 77 bp, Glycine max
atatatatatatatatagacaggaaaaattatcagtacttgaatatgtagttagactttcatatgaatatttcttcc

SEQ ID NO: 22427 - DNA, 317 bp, Glycine max
taaatggaggacatattccaaatcagctgtggcagttttaaaaatagctatgaccactgttccagtcttgcagcttccttaatttgctcttccttttgatgacgaaacagatgtgttcaccactgctattggtgtcatcctttctcaactaggtcacccaacttctccggtaagaaactttgcctgcgcatgcaactagcttctacatacgcaaggggaatgccttccattacagatgctgtaagaaaatggcaccattatctaatttgcaacaaatttagaatattcacaaatcaccaaaatttgaacgcccttac

SEQ ID NO: 22428 - DNA, 357 bp, Glycine max
aaaaaaaaaaaaaaaaaaaaaaaaaaaataaaaaaaaaaaaaaaaaaaaaaaaaataagggatattaaaaaaaaaaaaaaaaaaaaaaaaaaaaaaaaaaaaaaaaaaaaaaaaaaaaaaaaaaaaaaaaaaatgggttccctttttaaagaatccatttttacttacccttcattgcaacctattactttttttttaggttaccttaatttaattttattggccgtttttttaaaactttatatttgtaaaaaccttgattttacccaatttaatcgcttttaaataaatcccctttttacaaatttgcgaaataccaaaaagcccctaacctaactcctttccaaaaattttacc

SEQ ID NO: 22429 - DNA, 395 bp, Glycine max
ttaattatcatactctttatgttacattgctgggaagtataacataacgttttgattgcaaaaaacactaaaatataatcttaatgttggggtctttacttcatatgcgaacgatcgatatttggtaaatattcttagacctcaaatgtgatggattgacttggcgtaacttaatgtgtacattagtaatactcaaaaatgatccatatatctcggtcttattatgatattaatggtacaaatgatgaaattcaatcttatgctttcttgaattaattaaatttcttttcataatcttatatatttctgacgcactaaatactattattcctgttatttcaatatttcattatttttgtcatttaagtaaatccattattttcactattctttta

SEQ ID NO: 22430 - DNA, 59 bp, Glycine max
acgcgagaacacacgatttagagcagattgaagagaatatcggggggggatttttgaaa

SEQ ID NO: 22431 - DNA, 189 bp, Glycine max
aaactgtggtttgcaatttgcaaatttacatacatactcttatctattttgcatagctatcactttgtgcgatcaccatgatcatctatttgtaaaccatttaatacaagtatattgtttcttgcatgatacatgacttgtatcctaatacttttaataagttaatccttatcaaggcttacgtaaaaa

SEQ ID NO: 22432 - DNA, 395 bp, Glycine max
gttcatcgtcggcagaagcatgtcattgtgatgatcaagcaatgcctacaacgtgccatgggtagaaaagtatcgtcccatcaaggtcgccgacattgtcgtcaacgaggacgccatctccaggaaactgttctcaaactaaacgcttccgatgataggtacgtttttgttatttctcgattcagttttcaattctgcacgattttctgttaatttatcctttcacttttggttatagatgatttgctccatggttgaactaacaggtggagaagttgagggaaatgagtccactttatgaatttgtcaaggaaggtatcaacatcaaggacattcaatgggcacagcactgattattatcaagctctcagattgcaatgcaagtgatgggaaga

SEQ ID NO: 22433 - DNA, 302 bp, Glycine max
gttacacatgactattcagaagtacgtccgagcccatggatcgtacctaatgcataatcggatattaattggccatatctttatggtatggacgcaacttctataaatcattgtggttgcactggtaggacctggtatacatattttgacgcatttaaactacgatgtagactaattgtatatagactatgatcgtgtgcatgtacaatgctatgctcaattcatttctaacagatttaggatgatcgttaggagattctacttgttgtgagatcattcttatactcgctacatgacatcac

SEQ ID NO: 22434 - DNA, 381 bp, Glycine max
atatcagtatgcacaatgtcgagaagctgagtgtttcttgtagctcctttctttgtatgttttgcttgttttcccttaatacaacccacacaaatatttagatccgtaaaatctagatcaggaagaatttcattatttattaatttttccatcctttctctagaaatgtgacataaacgtttatgccacaagaaagcagatcgttcattcactaaactacatttagtgccaacattatgatgcagagttaaaacagtcagcatacaaactgtctattttcaatttatataaactatcacaagaatatcagtaccaatgagatgattatgcttaaataaattgaaacatccattatcaaaattaatagagtatccagtaaca

SEQ ID NO: 22435 - DNA, 393 bp, Glycine max
caatatctaagcaacagcatttcaaggaatagtatgtatactctgctgcaaccacggcttgatgtccttctttttgaaatagtgttcccccttatgtgcttcaatgataatgatcaaaagctttgggatgaagatccacatgaatatgtaaggaaaggctatgacattattgaagatttgtatagtcctaggactgcttccatggattttgtgagtgagttggttcgaaaacgtgggaaagaaaatcttcaaaaatttattcaattcattgttgaaattttcagaaggtatgatgaagtttctgcagaacacaagccctatagacagaaagatggtgcgcttcttgctatcggggcactttgtgacaaattgaagcagaccgagccatacaaa

SEQ ID NO: 22436 - DNA, 391 bp, Glycine max
ggttcaccacatatagtgtgggggggggttagcttcgcgattcttatttctctctttaactctctctctctctcgtcctcgcggatggagagagagaaagtaagagagaaagagcggtggttggtggttttggtttggtgaagttcgattcgatgcgatgcgattgcgttggggattttgattctctctctctcactgtgcggtctctaattcgcttgctgcaggtcgggaaccggttttcgcgcggaatggaggaacggtcgccggcggcgaattggatcccgccttgcatcaactgaatcggaggccgcggtgaagctttgcctcgttttccgctcagatctcatctccgagattctaccaccagtattttttaaatttattttaatct

SEQ ID NO: 22437 - DNA, 404 bp, Glycine max
tggtttcctggtttggtcatagagaaggagggagtatcaatgttccccaaaagaaaatcaaatagtatatggttttgtgaaattccatcatttttcagaccatgtatcgatgggtttcaatattgcaagctcgttgttcaagtcgacaaaacatggttgtacaaaaagtaaaataggatctttcttatggcagttgcacacgatgacaacaataaaatccttttaatagcctatgttgtgctcgaaggtgaaacaacaaaagtatgactctttcttcctcaaaattttaaaaagacatctcaccccataagatggtctatgtttgatttcaaacaagcatgtgtcaataaaaagtgcctacaaaaggtgtgatagtggatgaatgacacataattctatgcatg

SEQ ID NO: 22438 - DNA, 386 bp, Glycine max
gataatgaaagtcaggagggagcagatgttgaaacagatgatgaggatagaacatattttgacacaaatgaatttttgtattctgatgccctaagaagtgcttcctatcgaagtagggaaggtatgggcaatgctagtatattcgatagagattatatttgttatgatggtgtgcatgggtttgacaaggagatcaaagatgtaagttatccatatgtcaaaagaagggataacctaccagagccaaaagaaaaagagaagcctgttggtttgtggtcaattattaaagacaatattgggaaggatctttctggagtttgtctccctgtttattttaacgaaccactgtcttcattgcataagtgttttgaagacctacagtattt

SEQ ID NO: 22439 - DNA, 363 bp, Glycine max
aaggattcaaagtgaagggaagtgccccctgtcctacttcacttttagttttctctctcctctctctctttctctctccttggaccttggagttacaagaagttgattgttcctggccttaatttcttcaaccttctcaacacgtttaatatcactaaccacttcctcgttgaatcataacataaccacttgctctgtgtttgttcttgcaacttcatattgtacataaaaacatggatcatcaatatgctaagcttattagaaggatgaacccaccaaaggttgtgattgacaacaatgcctgtgaaaacgcaactgctattcaggttgacagtgtcaacacacatgggattctccttgatg

SEQ ID NO: 22440 - DNA, 348 bp, Glycine max
gcgacgatggtcgtttctgcgccgattgcttgaaaaccaacttgttcggcaagtttcgtttcgccgtcacttcaaatgccatgataactcccacggacaaggtcctcgttgccttctctggtggcccttcatccagggtagctttgcaatttgttcatgacatgcaagagagggctcagaggaacttcgatgcgagtagggaccggtcgttgccggtgtctggtgttggagttgtgtttattgatgagagtgccgtgttgccgattccttctaatgaaatggaggaagcggttgaggttgttagtgaggttgtgtcgagtttggccccaccaagggaaggagtgcata

SEQ ID NO: 22441 - DNA, 363 bp, Glycine max
gggctcctccttagactgccagcccaatatagccattggatcgaattcagtctgaattcggtctaatggtttgggagttctaattaagtctaagaattctgtacatatatatatttagaagatcacagggtgcttgatcagtggtgtatcaggatggacaaggtgacgaggttggcttctgaaaagggtgtggtgattttcacaaagagctcttgttgcctctgctatgcagtcaacattctgtttcaagaacttggtgtgaatcctgtggttcatgagattgatcatgaccctgaaggcagagaaatggagaaagctctattggggcaaagcttcactgctccagttccagctgtattcata

SEQ ID NO: 22442 - DNA, 371 bp, Glycine max
  modified_base (325)..(325): a, c, g, t, unknown, or other
  modified_base (340)..(340): a, c, g, t, unknown, or other
gagggaaacaaggaagcgaaatgacacaatagtccttcttccctgtttccactttccaggttttctccttctcgtttgttgagcgcttttctctccctctccctcttcttcactcagtcagctgccgtagaaattcattatggtggcaacagctgcaacttcatcatttttccctgttacttcaccctcgccggactctggtggagcaagcagcaaacttggtggtgggcctgcgaaccttggaggtctaaaatccaaatctgtgtcttctggtggcttgaatgcaaaggcacaagccccttttgaaattaatggaaccccagtntgtacatctaaaganatcttgaagcatgaggatgatctacctttac

SEQ ID NO: 22443 - DNA, 374 bp, Glycine max
tcaggggaaaatcatcaaagctcaagccggtctactcaaaccactctgattctcttgctctgctattaccctgcttcctgtggaacaaatttccatctagctctcctacgaattaggttttgttctggagaaatgtatgcagagactggtcttctcttcccatatttgaacaacatctctcacggtcttcatcagctcgaggagtactgcaaaacccagaagtccaatgcttcaatggatgaccttgttcagacttctgtcatgtcagagtatgatttggcagcagagggagatctgttcaaagctcctgaacctattattgaagagccaatcatggatatggatcccatgacagccaccatctccatgatatc

SEQ ID NO: 22444 - DNA, 376 bp, Glycine max
ggcacatttggaattggagcaagatgttgccacggaggatgagcctaatcaggtcattgattttcctggagggaaagtgggatttacttctgaaatgagattcatttctgagtctcctgagaaaagggtgccctgttatcgtgttcttgatgacaatggtgagatcgttaaatacagcaactatgtacaggttagcaaggaaatgggtgtgaagatgtattctgacatggtcactcttcaaactatggacaacatattctatgaagtgcatatgcaaggtagaatttccttctacctcacccaaatgggggaaagaagcagttaacattgcatctgctgctgcacttgcttctgatgatataatattgcctcagta

SEQ ID NO: 22445 - DNA, 369 bp, Glycine max
ggttcgagtgtgtgattgtttgttgttgtaactcgttcttcttcttttgttgttctgtgtttgtgtttgttttttctctcacctgaaaatgtcttgctgcggtggtaactgtggttgcggaagctcctacaagtgcggcaacggctgcagaggctgcaagatgtacccagacttgagctacactgagtcaaccaccaccgagaccttggtcatgggagtggcacctgttaaggctcaatttgagggtgctgaaatgggtgtgcccgctgagaacgatggctgcaaatgtggaccaaactgctcctgcaacccctgcacttgcaagtgaggtgttgggagagcaagcttcaagcagagatagcccttaat

SEQ ID NO: 22446 - DNA, 399 bp, Glycine max
gaatcaatgttgtgagatctgtgtgggagacagtggggagcgtttcgtccgaagatgcttcagaccacatgagcaaccgttgtgggagttatagtctcagtgctgatgtcagcgagtcggagagctgcagcagcttctccgcccgccgcttcgacgccgagggagcttccagttcagccaacctctcaccgcgccccgtcgctgctcactttaacttcccgccggcgcaggtcttgcttcccgtcattggcggcaaagacgtcttcgtttgggatcacaagcgtgatctcgatttgtctggtactctttctctcgccttccgttttgctgatatcttttaactgagaatgttatgttgaatttgaagagcaattacattttttcttttttgcagaagtg

SEQ ID NO: 22447 - DNA, 303 bp, Glycine max
tcccgctcgacccactcatccgcccactcaaccatacaaccgctcttatatcactgacaacacaacttcatcagcgcaggttttactaatcaggtcattgattttcctttacacaaaatcagatttacttctaaaataaaattcatttcttaatctcccgataaaacagatccctattatctccttcttcatcacaattcattacaactctaaatacatcaactatatacactctaccaacacaatctctgttaacatttattctcacactaccaatcttttaactatctacaacatattcta

SEQ ID NO: 22448 - DNA, 337 bp, Glycine max
acatgcccaatggaaacttggatgattgggtgcatggcaaaaataaaggagataatttggtcgccgattggttcactaggtataagatcgccttgggcgtggctcagggaatctgctatcttcaccacgactgtgatcccgtcatcgtgcatcgcgatctcaaacctagtaacatattattggacgctgagatggaggccagagtcgcagattttggtgtcgccaagttgattcagaccgacgagtccatgtctgtcattgccggttcctatggctacattgctccagaatatgcttacacccttcaagtcggtgaaaagagtgacatttacagcta

SEQ ID NO: 22449 - DNA, 346 bp, Glycine max
gatgaggtctaatatatcattcaaaagtttttgaaatgttgtcaccccttcttctatttctatgcctaactcttcctttgtttttgttgtccttcttcaaataccgtaaaaccttcaagaatccaccacttccaccaggtcctagaggccttcccataatagggaatcttcatcaactagatagtccttctcttcatgagcagctatggcatctctcaaagaaatatggtcctttattttcccttcaatttggattaaggccagccatagttgtttcctctccaaaattggccaaagaggtaatgaaagacaatgaccttgagtgctgtggacgacctaaattact

SEQ ID NO: 22450 - DNA, 378 bp, Glycine max
cccacgcgtccgagacgacagaagggggggttaacaagcaaactaaacgtacttcggaggtcgcactctgcgaaacccaaacactgtctccgtcttgatggctgcgtcgcgaatcgtggcccatcctccgccctatctccaccgtcaatctccgccatcagacgccgcgccttccctcaaccttacactcctcccaaaacggtaccgtaacctcggcatttgcgcttcccttcgcggcgataagccccactccgtcgaactgcgagccaccacctccgacgtcgtcgtttcccgagatcttctctctcttccgcggcctttgtcttcgactcagttatctgcttcagtttccgatggctcttgcctttcgggtgcata

SEQ ID NO: 22451 - DNA, 340 bp, Glycine max
aacatatacttggattacatgtaaataacgaaggaatagaaaataattttcctgtagaagcagctgcattgaataatttgattcaaatactaactgttgatttttcatgacatttaccatagatgttcaatacctggggtcacactgtatgttttgatttagtaatatttcattttaatgactgcactaagtattggatgctggatggaatgaattctatatttggtactggtaatgctaaatgctcaagtctagttcatttgtgtgaccaacaacaatggctcccaggttccgcctcaaagtgtagctggttatgccacagttgctactacagaggatg

SEQ ID NO: 22452 - DNA, 245 bp, Glycine max
atatatcaaacatgaggccttgcaatgttgacaccccttcttctatttctatgcctaactcttcctttgtttttgttgtccttcttcaaataccgtaaaaccttcaagaatccaccacttccaccaggtcctataggccttcccataatacggaatcttcatcaactagatagtccttctcttcatgagcagctatggcatctctcaaagaaatatggtcctttattttcccttcaatttggatt

SEQ ID NO: 22453 - DNA, 162 bp, Glycine max
cttaaatccaacttatataagtttcacagatgtaatctataatcattaggtcaattatatttcaccatccctacttctctttctattaccatctattcctttgaatcacttcacctttttcacatacttctactactacattaatacttcaatcccaccaat

SEQ ID NO: 22454 - DNA, 274 bp, Glycine max
ctatcattcaaaaggccgcgacatttctacaccccttcttatatctctatgcctcgatacaaactataattattccactctactacaaatacctaataaccttcatgaatccaccacttacacccattcctacattccttccataataggtaatcttcataaactagatattccttctcttcatgatcaactatggcatctaccatagaaatatggtcctttatttccccttcaatttaaattaacgccagccatagtcgtttcctctccaaaa

SEQ ID NO: 22455 - DNA, 403 bp, Glycine max
gacgacagaagggggaagaagggatggtagaaggagcagagctgatgtggttgagcagttcctcccagaccacaatgagtccatttctgcagttcttgacaagtttggtgccatgggaattgacacccctggcgtcgttgcactgcttggagcacacagtgttggtcgaacccattgtgtgaagttggtgcaccgtttgtacccagagattgatccagctctgaaccctgaccacgtccctcacattctgaagaagtgccctgatgccattccagaccctaaggcggtgcagtacgtgagaaacgaccgtggcactcccatgattctagacaacaactactacagaaacatattagacagcaagggtctcttgatagtggatcaccaactagccaatgacaag

SEQ ID NO: 22456 - DNA, 414 bp, Glycine max
aagacgacagaaggggaactacttaaagccaacttatatgagtttcacagattgaatcgagaatcagggggtgaagtgtatttcacgatgccaaggttgcagtcaattaccattcagtgtttggaagcacttcagtttttgcacagtcttggactaatacattgtgacttgaagccggagaatattttggttaagagctatagcagatgtgaggttaaagtcattgatctcggaagtagctgttttgagacagatcacctttgctcgtatgttcagtccaagtcttatcgtgctcctgaggttattttggggctttcatatgacaagaagattgacatctggtcacttggatgcatcttggcagaactttgtactggcaatgttctcttccaaaatgattcccctgcgacatta

SEQ ID NO: 22457 - DNA, 383 bp, Glycine max
ttggccgcgcgtgggttctggagcgggatttgagaattgagaaagattctcaatcctcttcctcaattcaattcaagctgtgtgaacatgaaattgaaacttggacaagaaaaattcaattaaaattccccccaaattaccgtgcatgtgtcgtcgcctggacccaaatcactctctctctctctgagcataatattagggttcaacaaggagttttcttcactctggcaataacactcacaacacagcgatgtcattttcgttgttcgccactccgcagcaacagcaaccgcagcagcagtctccttttcagccacagcaaactagtttgttcctttcgcaacagcagcaacaatttcaacaacagcaacaacaaccacaac

SEQ ID NO: 22458 - DNA, 357 bp, Glycine max
  modified_base (312)..(312): a, c, g, t, unknown, or other
  modified_base (326)..(326): a, c, g, t, unknown, or other
acgaggggggcttggatttcgcaatagccgaagcaagaaaatatgggatcaagatggtgttgagtttggtgaataactatgagaacatgggtggaaagaaacagtatgtggaatgggcaaggagtcagggacagtccataaattctgaggatgacttttttacaaatcctgtggtgaagggatactacaaaaaccacatcaaggctgtacttacaagacgtaatagcatcactggagttgcttacaaagacgacccaactataatggcttgggaacttatgaatgagattaggtgcccttctgatcaatcangaaggacagttcangcttggatcactgagatggcatcttacctga

SEQ ID NO: 22459 - DNA, 315 bp, Glycine max
tgttcaattcgacagtgaagagtctgcacagaatgcgtattgagaagttaaatggcatgttgatcaatgataagcaggtctatgtaggccattttctgcgaaagcaagatagagagaatgctctcagtaagacaaaatttaataatgtctatgtgaaaaacttatcagagtcaaccacggatgaagagttgatgaaattttttggagaatatggtaccattactagtgctgtaataatgagggacgcagacggtaaatcaaagtgttttggctttgtcaattttgaaaacccagatgatgctgccaaagctgttg

SEQ ID NO: 22460 - DNA, 348 bp, Glycine max
gaagctgaatcttccaatgttggagtggagggtgaagctgaatgttccaatggtgcagttgagagtgtggctgagccttcaaatgatgcagtggagagtggagctgaaccttcacaaggtgcagtggagagtgaagctgaaccttcaaatggtgcagtggagagtgaagctgatccttcaaatggtgtatctgagagtgaaaatgaaccttctgtggatgtgtgtgagacaaaaaacgatgcagtgaatagtgaagctgaaacttcaagcggtggactgcatagtgaaaaagaggcttctgttgtgtctgagatggaaaacaattcattgtagagtgaagcttaacac

SEQ ID NO: 22461 - DNA, 132 bp, Glycine max
tcctcatgcgataagactacagaatgctacgactgctagaatgctacttaagggtacggctgtgacacgactacagatgtgtacgggtgctataatactacagaagggtacggatcctacactaccacagac

SEQ ID NO: 22462 - DNA, 427 bp, Glycine max
ggaagcatcgagaacatcgcagcgatggcgagagtgggtagaatgaagttgggttcacaaggcatggaggtgtctttgcagggacttgggtgcatgggcatgtctgcgttctatggtcctcccaagcctgaccccgatatgattgctctcatccaccacgctgttcaaactggtgtcacttttcttgacacttctgacgtctatggtcctcacaccaacgaactccttctaggaaaggctctgaagggaggggtgagagatgaggttgaattggctacaaagtttggaatcaacgttgctgaagggaagagagagatccgtggtgatccggcatatgtgagggctgcttgtgagggaagcttaaagagacttggcatcgattgcatagatctctattaccaacatcggattgatactcgtgtgccta

SEQ ID NO: 22463 - DNA, 259 bp, Glycine max
ggacccagtctcttttctctctctatgggttctctctgtaaaagactcaatgcagcaagtgcgtcgtcgtggtgattgaggagtgctgagcgaaatgcggggtggtgtttccctgttgttggcgttagcctccgtggcggcggcggcgacagtgtcgtgcggtggtttggcggggacttttcttcctctggaacgggccattcctctgaaccagcaagtggagctggaggcgctgagagctcgcgacagagcacgccac

SEQ ID NO: 22464 - DNA, 404 bp, Glycine max
gatatatgtaggagaaggtgtcaaaacacttcaactttaggctccatctcaaaaaaatgggtggtttagctagcaatcttcctctaattgttatggtgggtctgcaaattcattatgcagcacttgctatattcacaagagccgctttgttagatggattgagtacgacggtctttgtagtgtacaggcaaggcatagccactttggctttggcgcctatgtttttctctcctaagcggagacaatcagtgaaagattctttgggattcaggagcttctttttgatgtttgtgaccgctcttgttggagtcacagcaaatcagaatgcatactttaaaggtttattttatgcatcctctactgcagctaccgctatgagtaatctgataccagcattaacgttt

SEQ ID NO: 22465 - DNA, 369 bp, Glycine max
ggtcctaaatcctcattccagccacacgcttcagaggacatgggctcattgggcgggttacaaaatgtgagcggcatcaattttcttatcaaagagggtccaaaagtcaatgcaaagttcgagctgaagccgccaccatatccactgaatggtttggagccggtgatgagccagcagacacttgagtttcactgggggaagcaccacaagacttatgtggaaaatctgaaaaaacaagttgttgggacagagcttgatgggaagtcactagaagagattattgtcacatcatacaataagggtgacattcttccagctttcaacaatgcagcacaggtatggaaccatgacttcttctgggagtgcatg

SEQ ID NO: 22466 - DNA, 330 bp, Glycine max
tggaagaccatatgccaacttttttctccagacagcgcatagattaaacgttactacaataacaacactatgcacgtcacatccactattacttctcctatttcatactttaggaattataataataccaatcatgtggctcacatactttctacgcaactccctttactcccagttttgtcctttaaagctcccattatagcttccaatttctctgtgatccatattgctcttgaacctctcatgttttagaagctcagctaagcacaatagagagtttaattatgccactaacatatcatatgggtgtgactaagcctcatgtgctta

SEQ ID NO: 22467 - DNA, 423 bp, Glycine max
  modified_base (329)..(329): a, c, g, t, unknown, or other
tattcatgaagtaaatattttggttttatgtttgggtacaaggttgcatgttcctgtttgaattttgggttatgtacaggtaatgggtaattgtttttgaaataggagtttcttggcattttgtgaattgaaacccttatttttctccacatgtcaagttagttttgaaggttcgaattgaaagtgatagatttactcttggtgagaatttgagccatcatcatctattttattcggtgtattttgccccattgattgcttgcacaatagccttggcttgactcttgatgatacttcttgcttcacatgcatgttgggagatgatttangcattttgttcgtataagcctctagccaaatgagcctacctttgattaattcctttgatagcccctttgagcctatgttcccctttctttggtt

SEQ ID NO: 22468 - DNA, 301 bp, Glycine max
ggaaaccagagagtagtaagtggtgatgaagagatgccttcaccccaaaaccagaagcattgaatgaacagaaggcattttcagcatcagcatcaacatgggtggggattctattgtttctcatggtacagacgaaggttcttgtttggaggagaattttcccttgctttcatctcactcctcacctgctctcagggataatttgggcttgcaagatgaagacaacagaatgaaagcggagaatgggttaacttgtaatgaaactgatgaagaaatcatacatccttctagagttgatttt

SEQ ID NO: 22469 - DNA, 253 bp, Glycine max
taacatattcacaaagaatcaaacttttctgctctctatagtaacgttctgtgctaacaatatctggctttggtttaagtcctaatggttggcaaggatagtttgagaactcattacgtcttgaactttagctttaataagcttattatggtcaactgtggtgtaaatactttgaaatgagtcaactttaaagccgtggttatcacaaaatgtaacgatattccactttagctttttatgcacattttttcac

SEQ ID NO: 22470 - DNA, 397 bp, Glycine max
ggcacgcagttcctggaaagtagcaaagtaaagctgtcttggttttgggaaccgaaacctaagaaaaacgcagaatctgtttcggaaagcgaaggaggcatggcatttgagtccaacgaagttgcagccacaacgctccaagccatatgctacaagcgcggttccctccagcttctcgatcagagaaagctccctctggagacagtttacttggaaattcgggattcaacggatggctggaatgccatacgggaaatggtggtccggggagcacctgctattgcaattgcagcggcactctctttggctgtggaagtgttcaatttagattttaatgggtcagctactgatgctgtatccttgctgcagaagaaattagaatatcttgtcacaagtc

SEQ ID NO: 22471 - DNA, 364 bp, Glycine max
gactcctcaacgctttctcatcgcttgatcaaacttcaaaccctagctaggatttcaaggtacgcttaacggtggcttcaaaacgcattactaaggagttgaaggatctgcagcaggaccctcctgtttcctgcagtgctggccctgttggtgatgacatgtttcattggcaagctacaattatgggtccaactgacagtccttatgctggtggtgtattcctggtgaccattcacttcccaccagattatccatttaagccaccaaaggtttccttccgaaccaaggtatttcaccctaacataaacagcaatggaagtatctgtctggacattctgaaagagcagtggagtcctgcccttac

SEQ ID NO: 22472 - DNA, 305 bp, Glycine max
  modified_base (267)..(267): a, c, g, t, unknown, or other
cttattaaactatgatattaccatgaattggcattaatcaaaattatcttcgtgtgcaatcatatttatcaaagtacattaccaaaaattatgcatcaggatccattaccaaagttagaaagtttattagtgtagctaagagtagcagttctcattgcccagctggcagatgttaatacacgtggcaaacaattattagatagattcattttgataagtgatgttcagttagttataactaatgcagagttatgctattgtaacagntacagacttgtgataagataaccccctctctctttata

SEQ ID NO: 22473 - DNA, 421 bp, Glycine max
ggttgcacccaaacaaaaaactaaatgtggcaactgcgattaaggtcatgaaggggtttttttgtacaccaattcgccacggcaaccccgaaacagcagtcagcagcagaaaccatcaaaataaaatgaaccccaacgatttccccctccgaagagaggcttgtcgaggcctctgctgaatcggtgaagaggtgagcgaaggagtggttgggattttgaagaaagcggagagtgtgtgtaagttgaaaaggttgatctctctgggtcccactcgaggattctcccccaggcgttcgggaagattcgtgccctcgttgtgcttgatttgtctcagaatcagttaagggtatacacggttttctatttatctttgtgtgtttattttaattattagtctcgagttcgagcttttgcagaaata

SEQ ID NO: 22474 - DNA, 271 bp, Glycine max
gaaatctaattcgaatcttcgccagtggatagaaggtcaactttgagtagataatactgctggatgtctcgtctctaattattgtatttggaaaatagttttgagttgaggatctaatcattaccagatttaatatacttggcaaatggggtctgaaagtcctacgacaccgacaacaacaattcatgtgacaggatttaagaaattccatggagtttcagagaatccaacagaaacaattgccaataatttgacggagtacatgaattag

SEQ ID NO: 22475 - DNA, 262 bp, Glycine max
cagaagggggggggtggggttggagcatccatttgtggatgtgaaggaataggaggttgttggggactggaatgagggatgctgtcaagggtgatggactttctgactgcctgctggcggcgaaaatccttctccgacggcaagggtggttccgaggttacggggcggaaggaagggctgctgtggtacaaggatgcggcgcagcacttgtttggtgaatactcaatggctgttgtcccagccaactaacctgctcgaggac

SEQ ID NO: 22476 - DNA, 319 bp, Glycine max
ggttgcagttgcagctctgttggtaggatagagaatctcttacttcattcaattcagtttcaatgtctatctctccctccctcactcctcttctctgaactcaaccatgtctttttctcctctccactcaccacttcattttccccagcgcccacttttcacttccattcgccccattccaaaccgaacattcatctccaacccccgccgaacgccacgaaccccactctcactcgctcctatcaccttcgccgccaagtccacaccctccccgaacgacgacgttttgttcaaacgcctcgttcgcgcgctgttctgc

SEQ ID NO: 22477 - DNA, 411 bp, Glycine max
gattcaatgtaaaaattgaaagtggtgagtgtcgagtccactcgagcgccttagctagtctcaaacactgtcgtccctttacctctgttgcttgtgttatccctttagctctattgcttgtgtcatggtggtggtttcatcgtcatcgtggtccgttcatcaccgtagtgttgttagaaaccctcgtgttgctgtccacgtcgatctgtgaaccatactcctccaccactgtgttgagaaatgtgtcaacaacctcagtattgagttcattggagatctcacgtgccttgcccttaccctagaaccccccctgtgccttgcccttacctctcttgctcttccgttccctttacctcttgtgtagttgtcgtcatggtgcttttatagtcagcgcttaacaacatggcggac

SEQ ID NO: 22478 - DNA, 348 bp, Glycine max
aagaataaaaaaataaaaaaaaaaaaaaagaatctgtataaatagaaaaataatatatataaggtacaaatagtaaatcgaggtacccattttatgataaactttccttccatttttgttcctctagtaggcctagtatttccggcaattgcaatggcttctttatttctttatgttcaaaaaaacaagattttttagatacagaaaacaaagtaaaattctggggttttttattccccaattataatactaaattcaaaaaaaggagagtaatgagtataatctttcgctcagacgatgtactgatatattctatggcggaggttcgaagaacaagcaatttatttt

SEQ ID NO: 22479 - DNA, 398 bp, Glycine max
gggaaacgtgtgcacattctgcctattgatgatacgattgaaggtgtcactggcaatctgtttgatgctttcttgaaaccctatttcttggaagcttaccgtcctgtcagaaaaggagatctatttcttgtccggggagggatgagaagtgtagagttcaaggtggttgaaaccgatcctggagaatattgtgttgttgctccagacactgaaattttctgtgagggggagcctttgaaaagagaagatgaagagagactggatgaagtcgggtatgatgatgtgggtggtgtcaggaaacaaatggctcaaattcgtgagttggttgagcttccattgaggcattcacagctttttaaatcaattggtgtgaaaccacccaaaggaattttacttta

SEQ ID NO: 22480 - DNA, 351 bp, Glycine max
  modified_base (186)..(186): a, c, g, t, unknown, or other
  modified_base (281)..(281): a, c, g, t, unknown, or other
gatctatctgtcctgcataattttactacctcagcgcgaccagtgcttcttattatacatcacatctattgtatggccactgaaatattatagactgcgtactcattcataacatatcagctgtacgtgtttctgatatatatttgcctcttagtgggtcgatattaattgaagatcatggctganggaaaaacagcaactcaaaaatctcttcaagattttgatcctcaaaagacacccagaaggaacaagtatgctttcgcctgtgccattttggcttncatgacttccatattacttggctatgatgttggggtgatgagtggagcgattatatacataaagagagac

SEQ ID NO: 22481 - DNA, 382 bp, Glycine max
ggatcgtgttgttgtgtttgctttggagaaacgaggtggtgttcgttgttggcgaatactcactcacgcgtttgtagttgcaggctctaatcagatcccaaatggtaatccgtgagctcagtggaatgattctttcccgtgcgctcaagcaatgtaattttgtggaatggcgaggacataaagttgtttataaaaggtatgctagtctctatttctgcatgtgcattgatcaagatgacaatgaattagaagtccttgaaatgattcatcattttgtggagattcttgaccggtattttggcagtgtctgtgaactggacttaatattcaactttcacaaggcctactatatactagatgaaattctaattgcccgtgagct

SEQ ID NO: 22482 - DNA, 288 bp, Glycine max
gggcgaggatggcaaacacaaacagcgacaccaaagaagaaagcaaaaaaatggatgaaggagagacaatacctctcctcacctcatacaagatgggaaattttaatctatcccacaggattgtgttggcaccgttaacacgatcaaagtcttacaacttcgttcctcagccgcatgctgctctgtattattctcaaagaactactaatggtggcttcttgatcggggaagctactggtgtatctgatacggcaaaggatgggtaccctaatacacctggcatttgga

SEQ ID NO: 22483 - DNA, 128 bp, Glycine max
ggagagtggaggcagccaagaagcagatcgagtagcaaaatgtgcattattgaattgaattcctctgttctattcgattccatgccagacagagacagaagaaaagaatttattattaaaacaacagc

SEQ ID NO: 22484 - DNA, 430 bp, Glycine max
ctataggctggaccctggcagacattcctggtattagccgatccacatgtatgcatcggataaatttagaagatagggctaaaccaataagacaaccacagagaagactcaactcgatgattcttgatgtagtgaagaatgaggtaaccaagcttttgcaagctagaatcatttatcctgtctccgacagccaatgggtgagtcccgtctaggtagtctcgaagaaaaccggcctcaccgtgataaaaaatgagaaggaggagctgatttctactcgggtgccgaacaattgaagagtctgcatcgactataggaagctgaaccaagttaccaaaaaagaccattttccactgccattcattgaccaaatgcttgagcgcctggtaggtaaatctcactactggttccttgatgggttttctggttatat

SEQ ID NO: 22485 - DNA, 451 bp, Glycine max
  modified_base (14)..(15): a, c, g, t, unknown, or other
  modified_base (39)..(39): a, c, g, t, unknown, or other
  modified_base (76)..(76): a, c, g, t, unknown, or other
  modified_base (149)..(149): a, c, g, t, unknown, or other
  modified_base (189)..(189): a, c, g, t, unknown, or other
  modified_base (262)..(262): a, c, g, t, unknown, or other
agacacatgaaggnngattttgtgcatgtgcaacttctncgagtttacgtgtggactgatggttaggactctgtangctgataaagacaacactcataccgttggaaagaaggatgctgctggccatgttgcttaaattagttcttgcnttccttgtcttcttgagttttatcagagacgggagtgcanggatcactagctctttcattcggtcagagtggccggcagttgacatcccccttgatcatgaagcatttgcagntccaaagggttataatgcacctcaacaagtgcacatcacgcaaggtgactatgatggaaaagcagtaatcatctcatgggtgaccacagaagagccagggcacaagcatatacagtatggcacatcagagaataaaattcaaactagtggagaaggcacaagtacaaactatactttccacaaatacaa

SEQ ID NO: 22486 - DNA, 410 bp, Glycine max
tatagtatttggaagactctacttcaagcaagttttaaaacaccagtttcaaagtttatattttatttttcttttattcttaaagtttttgttgaattttacccttttctagacaatgtaagaatttatatattgcttcccttctacttatagtgtgtaaataatgtgttaataactcttgtctcactagctttgttttgtgcttatttttttaataggacaaaggaatttgtccagtatagttatgtggcactgtcatttagtagttgaaggactttgtgcttatcccatattttgtctcttttttttcttgattatctcatatcagctcttattcctgaaactatgttttaatcattcctccaatgtaaaccacttgaacttagatttgacaatttcacaactttaat

SEQ ID NO: 22487 - DNA, 423 bp, Glycine max
gacggctaggaatccccctcccatccctaaactatatagagggaggtggatgattaactttacactgcatttggtaaggatgtgtgaaacgaaatgaaaagtaaggttgtttaactgagatgaaaaatagtgtagaaaatatgaaatacttgaattgaagtgattaagtaagtaagaatctttggtgaaggtgttgttatactgtttatacaatgtccttttctactcggatttggaattggctggaaagcaaaatccttgatcattcttttgatccctcttcttaatatctgctataactagctagtgaagcccgcatctgaaagtgacaggacttggtgtgatcttaaacacttttgggatgatcaaatgaggtttcagaataaattaaagttatatcttttcagcaagtcacaaattaac

SEQ ID NO: 22488 - DNA, 376 bp, Glycine max
  modified_base (333)..(333): a, c, g, t, unknown, or other
gaggagaaggaaataatcatcaaccatggcagggagattgacgaacgcagcatcgaggatcttaggcggaaacggcgtcgtttaccgatccgttgcttcctctcttcgcctccgctccggcatgggcctccccgtcggcaaacactatgttcccgacaaaccccttcccatgaatgaggaactcctgtgggacaacggcactgcatttcccgaaccgtgtatagatcgtattgctgacactgtcggaaagtatgaagcattggcctggctgtgtgggggattgagttttttcgcgtcgctgggattgttggctgtgtggaatgacaaagcctncaagacaccgtttgcacccaaagtatatccatatgacaatctg

SEQ ID NO: 22489 - DNA, 311 bp, Glycine max
gtacacaaaagcacttgcaaacgggttttggtttgggaacatcatcacattacattagattggtggtaatggcagcgtcactacaagcagcagctactttcatgcaacccaccaagttgagcaggagcaacactttgcagcaaaagtctactcagtccattttcaaggcttttggtttggaacctgttggagctaaaaaggtcacatgctcccttcaagctgatcttaatgacttggctcacaagtgtgttgatgctaccaaaattgcatgattcgcccttgccacctttgccctcgttgtctctggggca

SEQ ID NO: 22490 - DNA, 405 bp, Glycine max
ggcagcgcttgatttgaggccaggcaagccccactcagccaccacagctctcctcgttcacgctacccctttctgctcttcttctacctttcaagttttaaaagtataaagatggcagagacattcctatttacctcagagtcggtgaacgagggacaccctgacaagctctgcgaccaaatctccgatgctgtcctcgacgcttgcctcgagcaggacccagacagcaaagttgcctgcgaaacatgcaccaaaaccaacttggtcatggtcttcggagaaatcacgaccaaggccagcgttgactacgagaagatagtgcgtgacacctgcaggaacatcggcttcgtctcaaatgatgtgggactggatgccgacaactgcaaggtcctcgtcaacattgag

SEQ ID NO: 22491 - DNA, 340 bp, Glycine max
  modified_base (120)..(120): a, c, g, t, unknown, or other
gacactaaacaagtggaaagaagagcatcactgaactaacaaagcaaccctatgtcgaaggtggtttgtgtcaccggagccagcggcgccatcggatcatgggtggtcctactcctcctncagcgtggttacaccgtccatgccaccgtccaagatatcaaggatgaaaatgagacgaaacatttggaggaaatggaaagaaccaagaagcatcttcaattttttggaatgggtcctcttggaattcaattcattggcggtggcataaaaggttggtccggcgtaatccaacttgcatggtctaacatcattggtcaagtcgaagataccgagaaacaga

SEQ ID NO: 22492 - DNA, 406 bp, Glycine max
gatatcaaggaaggtgccatactcaagcttttgaattgtcctgtggataattataccatcatgtatagcacccagaactgtggcattcatctgtgggatactaggtccaattccaatacctggactcttcaagctactcctaaggagggctatgcttcttctctggcatcaggtccttgtggtaattggtttgtatcggggtcatcccggggggttattacactttgggacctgaggtttcttatacctgtgaattcttggcagtattctcttgcttgccctatagaaaagatgtgcctctttctgcccccttcaaatgcttctgtctcttcagctgctaggccccttgtttatgtggctgctggttgcaatgaaatttctctttggaatgcagagaatgctagct

SEQ ID NO: 22493 - DNA, 248 bp, Glycine max
gtatgcaagaattgtgtgtacctatgagagttacggtagatatttataagtattaagtaacgtgttttatgaatctctcatcactttgtcacgtctgttcaaaagatcatttatagattatgttaagtgtgctccatgcatgatgttcatgtttgtgatagcggtagttgtatgatttcaggaattgaatgccgaataataattactttaagaaacaacatcttggtagaacaaactcatcatgtgat

SEQ ID NO: 22494 - DNA, 417 bp, Glycine max
gagggtgcaagagtttgttgtgagctataagctagtttatcgggaggagaatatgaagttgtttgttttctttgttgctgcagtagttttggtagcatggccatgccatggcgcaggctaccaaaggttccctctccgaatgaaaactggctatggtgagcgttcttcggaggtaaaatgcgcaagttttaggcttgctgtggaagcacacaacatccgagcctttaaaaccattcctgaagagtgcgttgaaccaacaaaggactacattaatggcgaacaatttagatcagactctaaaacagttaaccaacaagctttcttttatgctagtgaacgcgaagtccatcacaacgacatatttatattcggcatagataacaccgtactctctaatatcccatactatgaaaaaca

SEQ ID NO: 22495 - DNA, 380 bp, Glycine max
gaagaaccttccttcgttagttcccatcatccttcgcttcaccggtttacttccccaactcatacaacaacaccccactttttttttttctttcgcaactagcttctcttcatttgaccatattaatcttactatatttaatatttctctctctttcttcaatttctgagtttttgttccagcagctgagtcgtaagaagctggagttggaagtttgctcgcgatcatgcaaaactccgtgctcgatccgcaagatcagagggttacttcctgcatggaagattccactgcaatgactattgaattcctgcgggcaaggttgctttctgaaaagtccatcttaagaagtgctaaacagaaagcttattaactggccaaaa

SEQ ID NO: 22496 - DNA, 349 bp, Glycine max
gatgtttgtgagcgctccggttggagtcacggcaaatcagaatgcatacttcaaaggattattttatgcatcttctactgcagctaccgctatgagtaatctgataccggcattaacgtttgtaattgcagcaattgcgggatttgagaaagttgacataagcttaagaagcacggccaagatattagggacagtttgttgcgtggctggagccttaaccatggcattggtcaaaggacagaagctgttacacacggagttccttccttctatacatctcaccggcagtcaaggtgatgattggctgctgggttgcctattgctcttagcaagcagtgttttttggtca

SEQ ID NO: 22497 - DNA, 415 bp, Glycine max
  modified_base (337)..(337): a, c, g, t, unknown, or other
  modified_base (400)..(400): a, c, g, t, unknown, or other
gggtatcaaattcagagtgttcttctggatttgatgggtagaaggacagtcccgcaagtatttgtgaatggcaaacatattggtggatcagatgatctcagtgctgccgtccaaagtggtgaattgcagaaacttctcagtgcaagttgatggtgtactagagatttacgagcactgacatccttcatggataatgaagttgtcaagcttttagaagcataatatgttttgatgcctttttagttttctgggtatttaggtgacagcgcgtattctttagaggaataggatgtcattctgcttaaaatcagcttgaattcttcacatggaaatgtangactcttgaaaagttgagctctaaaacatagaatccgagctctaattggtatattctacttgnttttatatttttttc

SEQ ID NO: 22498 - DNA, 305 bp, Glycine max
gacccaactcttattcaaagcccatctacacactccgctcctttcgttttgtgttttgagtttgagaaatgaatttattagtaccatgtctgtgcattgggtgtacgatggaaggggacatatgactattaccagagctcctaggaataccggatccaagcaatcttttactagacttgaaggaggtcataataatcagtttagggagtgggggtacagacgggcatgcagaaagaattgtttcgaaaggaagtcgcgagagaaatatagtcaaaggtaacaatgatattgctgagacgggagaa

SEQ ID NO: 22499 - DNA, 407 bp, Glycine max
aacaccaagtgttatttttacccgaggctttgcgacttcggggcttttaacgaaatgcatgaatcgttaatattagtacctgctttacagtcccattggttaatgatgcacgtaagtatgatgatattgggttatgcaactcttttatgcggatcattattatcagtggctattttagtcattacatttcaagaactcatacaaattattggtaaaaagcaagaatttctattttttaaatgaatcattttcttttgccgaaaatcaatacatgaatatgactgttaaaaatatggtttacaaaaaacttcttttttgtcttaatgaaattaatatagatctcaatttcttcaacaaattggatcggtggggttaccgtactattaagcttaggtttatctttttaa

SEQ ID NO: 22500 - DNA, 371 bp, Glycine max
gtccagttctgaagagagaatctcccgtctttcactagtaaaattttcagatattcaaatagatcccgttgctgcattcagtaatcacaaccacctggaacgccattattcaattcaattggaaataaatcatgggtcgacctagaggtgatgaaaagtactggaatgaagtaacgagttttgaagagaacgggaagcagaagtggaagtgcaagcattgtgaaaaaacgtatggtggaggttattcaagaattaaactgcatttagataaagaacaaaaaggacaaggcattactaaatgccccgtttattgtagcaatgaagaagttctcaacatcattgcttccacttcaatccatccacaagaaact

SEQ ID NO: 22501 - DNA, 431 bp, Glycine max
ggatgcccccggagcaaaggagtatgtgcatattggaattcagcagaggaatgggaagaagagtctgaccacagtgcaagggctgaagaaggagttcagctacgagaagatcctcaaggacctcaagaaggagttctgctgcaacggaaccgtggtgcaggacaaggagcttggcaagatcatccaactccaaggcgaccagcgtaagaacgtctcccacttcctcgttcaggctggccttgtcaggaaggaccagatcaagattcatggtttttgaccaattggtcttggttttgttagtagtaatttcaagttgttcttgagtttgtgagttttgaaaagttggattggttttctgtttgatgagtggtgttggaataagtttggtttggtttggttggtttgggtttccaatttttaatgattggatt

SEQ ID NO: 22502 - DNA, 233 bp, Glycine max
gaaggtgcaagagtttgttgtgagctataagctaggttatcgtgaggagaatatgaagttgtttgttttctttgctgctgcagtagttttggtagcatggccatgccatggcgcaggctaccaaaggttccctctccgaatgaaaactggctatggtgagcgttcttcggaggtaaaatgcgcaagttttaggcttgctgtggaagcacacaacatccgagcctttaaaacca

SEQ ID NO: 22503 - DNA, 368 bp, Glycine max
gatcccttccttgagccacatagggatgcttggaggctctaggctattaacaaggtggctgagcttgcatttagatgccttgcttttcatagtgacatgaggcctaccatgattgaagtggctgaggagctagatcttatcaggcgcagtgggtgggcgaccatggaggaaaccatatgcatggcttcttcggttgggtccgtgtgttcatcgcctcgaaatggaagtgttaattcacttagaggtgttagttttgagagagctgcaggacttgggagtgagacattgattgttccccacaagactgatgtttttttgcaatcaattgaggaggtgaaggacagctcttctgtgtctgtgcatgatag

SEQ ID NO: 22504 - DNA, 309 bp, Glycine max
gaagccccttataagtttacaaatgctcttgaagctgtcaagaagctgagggcagaaccaaaggccaatgaccaatatttgcctccttttgttattgttgacgagagtgggaaacctgttggtccgatagttgatggtgatgctgttgttacattcaacttccgagctgatcgtatgacaatgattgctaaagctcttgagtatgaaaattttgacaaatttgatagagttcgttacccaaaaatccgctatgctggaatgcttgaatatgatggtgaattgaaacttccaagtcattaccttgtttct

SEQ ID NO: 22505 - DNA, 366 bp, Glycine max
ggcagttcaattccaatatattccattctctctgtgtatttggctacctctcccttcaagatgcagatcttcgtcaagaccctcaccggcaagaccatcacccttgaggtggaaagctctgacaccatcgacaacgtcaaggccaagatccaggacaaggaaggaatccccccggaccagcaacgtctcattttcgccggaaagcaacttgaggacggccgtacccttgctgactacaacattcagaaggagagtactcttcacctcgtcctccgtctccgtggtggcatgcagatcttcgttaagacactcaccggcaagaccataaccctagaggttgaaagctccgacaccatcgaatacgtc

SEQ ID NO: 22506 - DNA, 278 bp, Glycine max
  modified_base (39)..(39): a, c, g, t, unknown, or other
  modified_base (237)..(237): a, c, g, t, unknown, or other
ggagtgagatagagagagacgcttcgcaaatctcgatcnaatctcagaaaaatgagagaaatcatcagcattcacataggtcaggccgggatccaggtcggaaactcctgctgggaactctactgcctcgaacatggcatccagcccgacggcatgatgccttctgactccaccttcggtgtagcccacgacgccttcaacaccttcttcagcgaaaccggatctggcaagcacgtnccccgtgctgtcttcgtcgacctcgaacccaccgtcatcga

SEQ ID NO: 22507 - DNA, 402 bp, Glycine max
gggtgaagcaagtaaccctaatgctatgctatatgagtttctgagcgttctcacgacacgcctactcattgcactcttcgatcgcaactctctttttcttccaaaagggaaaacgaatctcaaacttcacaagtgtttgaggcgccatggcggatcggttgacgcgtattgccatcgtcagcaacgacaggtgcaagcccaaaaagtgccgccaggagtgcaagaagagttgccccgtcgtcagaaccgggaggttgtgtattgaggttacttcctcgtccaagattgctttcatttcggaggaattgtgtattggatgcggtatttgtgttaagaaatgtccttttgaagctattcagattatcaacttgccgaaggacttggacagggatactactcata

SEQ ID NO: 22508 - DNA, 111 bp, Glycine max
ggaattgttgtgttggagatgataactgggaggagtccaatgattggtgtccaagtcactgaattaggagctgatcaatctcataatgagaggttggcaacatgggtgagg

SEQ ID NO: 22509 - DNA, 361 bp, Glycine max
gactttccattctcttcaaacctaacgcagggtcgctatgctcttcattccatggctttgcccaaccagcaaaccgtggattaccctagtttcaaactcgttatcgtcggcgatggtggcacaggaaagacaacctttgtgaaaaggcatctcaccggagaattcgagaagaaatatgagccaaccatcggtgtggaagttcacccattggattttttcacaaactgtggaaagattcggttttactgcttggatactgcttgacaggagaaatttggtggcctcagagatggatactatatccatggacaatgtgctattatcaatgttgatgttactgcccggctaacatacaaaaatg

SEQ ID NO: 22510 - DNA, 363 bp, Glycine max
  modified_base (356)..(356): a, c, g, t, unknown, or other
tatggggaccctggtggcaacgtattttcaagggatacactatcactacctggatggtggtattgaatctagggtctactggtcttttggtttcatggttaatgaaacatgctgataatattgtagaggtctattccacatcaatggcgatgctgctgacgatgatactttcactatttctcttcaacttcaaacctacactgcagcttttcttgggcattattatttgtatgatgtctctacacatgtattttgccccaccaaatatgctcttagatatgccattaacagttaagccagatgaagagaagctcattgaagtttctggtgatcgaagaacactttcatgatgttgnattgaca

SEQ ID NO: 22511 - DNA, 62 bp, Glycine max
ctttcgattgttgtcagacattcaacatgaaaatgatagtttgctgaactggttatgatttc

SEQ ID NO: 22512 - DNA, 403 bp, Glycine max
caaatgcatgtcacgaaatggaggtctagatatcaggcattgaataatgttggactgtgtatttaaactttgaagtttaatttcctgaactcctatcgaattatttgctaatgaaagtattgaaataagagcaaatataaagctagcaattaataaagtaaagtaaaataagatttttgaagttaaatcttttctttaaatactaaagtgaaaagtttcagtgattttcatgtgcatgtacttatggtattttattaaatgttaatttttttataagaaaagaatcattttaaaaataatagtcaaataaaaatgcattgcgtgtggatatgtatcaattttcactcctatcattttgcgtctgctgatgaaacacacccattgagtcacccactaatatgtc

SEQ ID NO: 22513 - DNA, 414 bp, Glycine max
  modified_base (336)..(336): a, c, g, t, unknown, or other
  modified_base (347)..(347): a, c, g, t, unknown, or other
ggcatatccaaaggaacaaaaatattattaagatgagcaacattgttggagcacttgttctactctttgcatttctcttcctcagttgtgtgtatgcacaagacacaacaacccttgtgcctgcaatcataacttttggtgattctgctgtggatgtagggaacaatgactatcttcccacccttttcaaggctgattaccctccttatgggagggactttgttaaccaccaacctactgggaggttttgcaatggcaaattagctactgatttcactgctgacacattgggtttcaagacctatgctccagcatatcttagcccacatgcatcanggaaaaacctncttattggagcaaactttgcttcagctgcatctggttatgatgaaaatgctgctactttgaatcacg

SEQ ID NO: 22514 - DNA, 387 bp, Glycine max
cctatgtcagatttaaaaagtcttattttgagttgttttttggctttagttccacaatgttttaacagtttgacaatgatttccaacaggaaagactgattgttctgtctgtcactctagcactggtgtattttgtagagcctgtctcaagattcgatatggtgaatgtgagaaaaaatagttcagccaacgataaggggcatctaaacaaggcaaacaaattaaaattgcattaagaaaaatccttggtttcacattaactttggttgtacagtaagggtattcatgacttagcttttgttaacttatattgagtccacccctggccaatctttacagcttgggtttatatatgcttgatatatagtagtataatatatgtaattg

SEQ ID NO: 22515 - DNA, 418 bp, Glycine max
atattacataatttttagaatataggaaaatatctgatcatatgttagcttatcctcttggaatagttttcttatgtctccattatatcttagaattagttaccatgtttccttatcatgatttgcttccctaattagttaggattattatttgtataaacaatggtttgtactctaggtttttgaacttatcaatacattgtaatccatctcagttaatacttaatatcaattcagtattttattctcttttatctctcttcctccttctataccttaaaaccataatttcaacaataatgatatgttttctattgacacactgaaagaatacatgtaattttcatgttcaggccaaggaactcactctcctaatgattgatgtcaatccatactacaatcaactaaggattctttt

SEQ ID NO: 22516 - DNA, 445 bp, Glycine max
ccccggactgacccactcgtaccgaccgttgcgagaagacaccaaacggatattacataatctttacaacataggatcatatctgataatgtgcgagcttctcatattcgaatagccttcttatgtctacattctatcacagaaatccgatacatgtatcctcatcatgattcgttcaaatcattccttcagattattatttgtataaacaatggttagtactctacgttcatgaacttatcaatacattctactgcatctcagttaatacctaatatcatctcaataccttactctctaagatctctatctctccttctataccttaaaaccatactttcaacactagtgatctgctatgtatagacacactgaaagaatacacgttcttgtcatgttcaagccaaagaactcactctcctaatgctagatgtcaattcatact

SEQ ID NO: 22517 - DNA, 435 bp, Glycine max
  modified_base (423)..(423): a, c, g, t, unknown, or other
gattgggtggaagagaaaagcagctcagtgcatgttggaggtggaggcgtgaacgtgcatacaggaaaaggaggtggcagtggcaccactgtcaacgttggtggaaaaggaggcggaggcgtaaacgtgcatgcaggccacaagggaaagccagtgcatgtttcagttggctcaaagtctccatttgattacgtctacgccgccacggaaactcaattacacgatgaccccaacgtggcactcttcttcttggaaaaggacttgcattctggaacaaagttggacttgcacttcaccaggagtacatctaatcaagccacgttcttgtcacgccaagttgcggattcgatacccttttcatccaacaaggtggactttatattcaacaagttttctgtcaaaccccggtcagaggaggctcanatcatgaagaat

SEQ ID NO: 22518 - DNA, 404 bp, Glycine max
gaaaggcagtagtagcgttactttccaatttgaattgttccatgggcatttctttcgcaaaagttgcaactacttcctcagaaaaaaagtttctaaggtaaggaaatccagcgagacaaaaatggcccgtgacggtgcagctacatgcatagacatcctccttgccatcattctccctcctcttggagtctttctcaaatatggctgccaagtggagttctggatttgttcggagctgaccctttttggttatatacctggaattatctatgctgtctatgctatcaccaagtgatcaccctttaactttgtgtggacaataaacaaatgtcatgggcctttctggctctcaactcagatattagtgtttctttaatatatcggcaatgatgtcatattcctat

SEQ ID NO: 22519 - DNA, 431 bp, Glycine max
  modified_base (290)..(290): a, c, g, t, unknown, or other
gaactacacagtaaactctagttatagggcgttgtgtagattgaagagggggagccattttgatgagatgagaagtttcatgattatggagggcaaaaataccaacaaaagtggcacaatttgcttggagattacttaaaaacaggctgactgctaaagataatttgaagaatacctatgccctttttgcagacaaatggagatgactagttcacatctctttctctcgtgctcaaagatccaaaagttgtgggtagagtactatgcatcatggctcgtctaaatgctgnttttcaaaatgatgcagtgactcaagaaagagagatgagagaaatgcatgcgtgtttaaggaagtcattgatacaacaagaattatgctcacatatatcttggacatggtttagaagcctggaggcagattttagcaacag

SEQ ID NO: 22520 - DNA, 401 bp, Glycine max
  modified_base (368)..(368): a, c, g, t, unknown, or other
taatggtcaggtatatatatgtggattgagaagtgtacttactggctttgttgataatttcctattctaggtgcaaatggaggctaatgactcttctagtcagaaagaagagcagatgaaacctatgcgaaataaggtaatggggttgtgtgaataaagcttcaaataaggagttaaacttcacgtaaataatatcctgccaatgtatactaaggatggaattaatacttcatattagctatttatacttggcattagctcaagcatttcatcaaatgggttgtaggcaagtaggcaagttgaaaacaaaaacactacaggaccacatcacgagatcacatcatgttatcaacacaacatgaactatntatacttcgcttagctcaagcatttcatcaaat

SEQ ID NO: 22521 - DNA, 416 bp, Glycine max
acacggatgtcccattgagtcccatgatatatcgggacgctcgtaattgaaaacagaagcgctgaccaaattcaaacgacaataacttttgactcagatatccgattgtgtcccgtaatatatcgagacgctcgaaattcagaacaaagctattagaaaaatcaaacgacgataactttttacacggatgtccgattgagtcccataatatgtcgagacgtttgaaattgaaaactgaagctctgagaaaaatcaaacgacaataacttttaactcggatgtccgattgtgtcccgtaatatatcgagatgctagaaattcagaacagaagctattagaaaaatcaaacgacgataacgttttacacggatgtccgattgagtcccataatatgtcgagacgttcgaatttgaaaa

SEQ ID NO: 22522 - DNA, 302 bp, Glycine max
acgacagaagtggcacaagtgagtttgttgatcgagataactagaaacagtgtgatgaaaaggaaggtccttgttttcttcgttgctacaattttggtagcatggcaatgccatgcgtacgatatgttccctctccgaatgaacactggctatggtgcccgtactccggaagtgaaatgcgcaagttggaagcttgctgtggaagcacacaacatctttggctttgagaccattcctgaagagtgcgttgaagcaacaaaggaatacattcattgcgaacaatatagatcagacttccaaac

SEQ ID NO: 22523 - DNA, 354 bp, Glycine max
gacatcacaaactgcttatcctgctcttctgccaacttcaacaacacagacactacctcctctcctctcctcgctcttccaatgccgtcttctcagatctagttactttctattctgcgagctttcactactgcttcattcggaaaacgacagcgtttttggtagggttgttgtattccattggacatgcggccgagagtaaattactccttccccgaggaggtgctggagcacgtgttctccttcatcgagtgcgacaaggaccgaggctcgatctccctcgtctgcaagtcctggtacgagatcgagcgctggtgtcgccggagagtcttcgtcggaaactgctacgccgtc

SEQ ID NO: 22524 - DNA, 380 bp, Glycine max
  modified_base (302)..(302): a, c, g, t, unknown, or other
tccctgatggtcgtgaaattgaccgaatagataagccacagtgtgagggctacaaattcgacccaaatggagaatacgtgcgacgctggcttccagaactttcaagattacccactgagtggatacatcatccttggaatgcaccagagtcagtgctacaagctgctggaattgagctaggatcgaactatcctcttccaattgtgggaatagatgcagcaaaaaacagattactagaagcactatcaaaaatgtggcaacaagaggcagcttcaagagctgcaatggaaaatggaacggangaaggacttggagactcttctgaatcagttcctgctgcttttcctcaagacacgcgaatggaggaaactcatgaacct

SEQ ID NO: 22525 - DNA, 428 bp, Glycine max
ggagcacccagactgggttgtgaggacttgcgaacactcactcgccactgctcacgaaacgtcgaaaccctaaaacctcgatttttcccaatccattccacacacaatatggcttcagatgctgacatggaggactatggcttcgagtactctgatgaggagcaagaagagcaagacgttgatatcgagaatcaatattacaattcaaaaggtatggttgaaagtgatcccgaaggtgcgcttgctggttttgctcaggtagtgcaaatggaacaagaaaaagcagaatggggatttaaagctctaaaacagactgtcaagctacattatcgactgggaaggcataaagagatgatgaaagcctatagggagatgctgacatatattaagtcagcagtgactcgtaactatagtgaaaaatgcataaa

SEQ ID NO: 22526 - DNA, 51 bp, Glycine max
tcgcccacgcgttcgcccacgcgttcgtccacgcgttcgcccacgcgttcg

SEQ ID NO: 22527 - DNA, 336 bp, Glycine max
ggagtaaacgagctttgcactttgattctttccgaaatcgaagctgtaacgaaatctctgccacgggacagcgacaccgtacgaccttcccattgtttcctcaacgtgaacaatacaacaccacaccaccacccactaacaatacctaaagcctaacgaaccctaattcttgatcattgctcaattctttgttcccttcccatctcggagacacgaattcgccttcttcctcatttcccaaacaaatttcccctccgcactcccccaatttattctttttttcgcattttattttacccttttgaacctgtggcttcttttcgacgccccccatgt

SEQ ID NO: 22528 - DNA, 412 bp, Glycine max
  modified_base (388)..(388): a, c, g, t, unknown, or other
  modified_base (405)..(405): a, c, g, t, unknown, or other
tccctttttagttttttttaaccttagacgctgcgtttcgctctctctgagttgaagaggatgaggctattgccttgcctcgctcgttgaattgatggtggacaccctaataatattattgcgtttctgccttgggtttgttcctcgccgtttgatttattgtggttattaaaatgcatgtgccagtctcgcccctaactctttttccctatttgtccttgctccattcttaagataatactgtatttcgtctttttctaaccataaagactgaaattcaataagcttatcatatttttttcaatttcttttatcagtttttttaagatatttttttaaattttacaaacttaattaactgcatacaattttactttaagatccttanataatacatatcatgangtcatga

SEQ ID NO: 22529 - DNA, 421 bp, Glycine max
  modified_base (384)..(384): a, c, g, t, unknown, or other
gggcgcgggtgaggtagaacccttccacggtggtgactgcgcgatgggtgcctacaagtatgtttcagagctatggcgcaagaagcagtctgatgtcatgcgcttcttgcagcgggtgaggtgctgggagtataggcagcaaccttccattgttcgcttgacaaggtcgacccgccctgacaaggctcgtcgcttgggcttcaaggctaagcagggctatgtgatataccgtgttcgtgttaggaggggtggccgaaagaggccagttcccaaaggtattgtttatgggaagcccacaaaccagggtgttacccaactgaaatttcagcgtagcaagaggtcagttgctgaggagcgagctggacggaagctgggtggacttanggtcctcaattcttactgggtgaatgaggactctact

SEQ ID NO: 22530 - DNA, 345 bp, Glycine max
agagaagggtctgagtgatttggcaacccattatctcagcaagcatggagttagtgcaatcaggaggctgaggaaaactgataataatagaattgcaaaggcttgtggtgctgttattgtgaacagaccagatgaattgcaggagtctgatgttggtactggtgctgggttatttgaggttaagaaaattggagatgagtactttgcatatattgttgattgcaaagaacccaaggcttgtactgttctactaaggggtgctagtaaggatctattaaatgaagttgaaagaaacctacaggatgccatgtctgttgcaaggaacattataaaaaatcctaaact

SEQ ID NO: 22531 - DNA, 358 bp, Glycine max
gatacggaggctgctgctatcgaatactcggataaggagggtaagggcggtgaagtgcggtacttcaatccccttttctctcttctccttttatttcatcactctcttcgttcctttcttcttctccaaagttttcaattttcacacttttcgaaacatcttttcaatggcgtcccaaattacccgtgagtggtctggaatcaatacattcgcacctgctacccagactaagttgcttgaactcttgggaaaacttaaacaagagaatgtgaactccttaactatacttgtgatgggaaaaggtggtgttggaaaatcttcaactgtgaactccatcattggggatagagtggtttcg

SEQ ID NO: 22532 - DNA, 186 bp, Glycine max
  modified_base (23)..(23): a, c, g, t, unknown, or other
aagaataaggaccatctacaaanaacgagagcgagtttttctttcttttttcgcttccaaatcatacgatcttaatcgaatcaactacattctccataaccacttttaacgaccctctccttccacttttccccccatcacctccttctccaacaattccaacctccaattctaataatctcaaac

SEQ ID NO: 22533 - DNA, 358 bp, Glycine max
  modified_base (305)..(305): a, c, g, t, unknown, or other
agggacacacaccacaatctttttgttctgaaccctttctgatggttcctcaggttcatcgatggagagtgaagccttaactcttctgcctcttccgggttcagatctcgttgttgttgcttccgattctttgattcttcgcttttttcttctcacttcacattccgattcgtcgcagattctttcagtttctaaacttgatgatcgccactgcctccacctgtaatcgttagttgaagtcacgtgaggtggtccagagaaatcaaaatctccttcaacttcgtcttccctttaggtggtaaagncagctaacgataaagaaatgaaatcgcttactgttaatactgaagattctttt

SEQ ID NO: 22534 - DNA, 137 bp, Glycine max
gtttctatgtgtgttcagttgaagaagggataaataaatctttttagcttccaataaatctcacactcttattcttaaaaccatgggcctggattccatggcccgttccatcggagtctcgggccccgggctacgct

SEQ ID NO: 22535 - DNA, 323 bp, Glycine max
gatggttttgcctatttgtgggggccgggggggctttggatttccttggggcctaattcaatttcatatgccgggggggggatttggtcaactggattttggtggttattagcatgatgaggaggatccgcctttgtgctatcattatttctctaaaacggatgtttttgttttagggttttgagttcacaatactagattgctgtgcaatttttcttgaagtttgagattacttttcttacatcttatctttaagttgaagcttaagtgcttggattgcctcgggttttgtagtctgagcatgttggtttaaggtatttttg

SEQ ID NO: 22536 - DNA, 352 bp, Glycine max
gacttgaacaagaggtataagagggtgaatgatattctgggcaagggaactgcttgcagggttgtggagaatcagaacttgttggattcaatggacttgtctccaaagatgaaagaagaggttaagaagttgctcaattccaggcacttgttcttcagggaaatgtgtgcttaccataatagttgtggaaatgggaataacaatgctccacagcaaggagagtctggtggtgaagtgtctcagcctcagtctcagtctcaagctcaacctcatcatcaacagcagcagcaaccgcagcaacaacgatgttttcattcatcagaggtggcaaattttgggggttcaagtgtgg

SEQ ID NO: 22537 - DNA, 421 bp, Glycine max
tctccagaagaataatactcagttgatgattcgttcatatgagctgggagtactatttttaccatcattattcaaacgacacgaatctgtattttcctgtaccagtaatgttacagtatctgaggataaatgcccagcccgagaatcttctgagatgaagaaaacaaaactagtaaccctgactgggattaaaaaggagagtatgcattcatcatctgaagttattatccctttacctttgccttacgagctccctcccctgccttattcttcccaagatatcccctggtcttgggaccggcaatataacaagaaagatgtctatggtcatgtttggccacggatgtgagcatatcaaatgacatgattgtttctgcaaccaagtttgcctgtgcatgtatatatgtgttttacatgggac

SEQ ID NO: 22538 - DNA, 415 bp, Glycine max
tgattgaatattttgtgtacaagagatgcagaaacatagcttgccaaaaccaacttcctgttgaagattgtacctgtgagacatgcactaatggcaatggtttctgcaatctttgcatgtgtgttatctgcagcaagtttgactttgaagtaaatacatgccgctggattggatgtgatttgtgttctcattggactcacacagactgtgccatacgtgagcaacttatttgtatgggcccttctgcaaagaatggagcagggccaagtgaaatggttttcaggtgtcaagcatgcaacaggacttcagaacttctgggttgggttaaagatgtcttccagcattgtgcaccatcatgggatggagaggccttgatgagggaacttgattttgtcagtaggatctttcatggtag

SEQ ID NO: 22539 - DNA, 348 bp, Glycine max
ggttctagtgtgtgattgtttgttgttgtaacgcgttcttcttcttttgttgttctgtgtttgtgtttgttttttctctcacctgaaaatgtcttgctgcggtggtaactgtggttgcggaagctcctgcaagtgcggcaactgctgcggaggctgcaagatgtacccagacttgagctacactgagtcaaccaccaccgagaccttggtcatgggagtggcacctgttaaggctcaatttgagggtgctgaaatgggtgtgcccgctgagaacgatggctgcaaatgtggaccaaactgctcctgcaacccctgcacttgcaagtgaggtgttgggagagcaagctt

SEQ ID NO: 22540 - DNA, 293 bp, Glycine max
tctactacagcttaaggttgataagctttgcaagaatgaccatataagtggaaggaaaatacacgtgctgtgataaagtggagggaagatttctgagttagagttacctaacatggtcacaggggggatgctaactccctgtacaggcaaaataaaagaatcaaatattcttaatgatgctttgcagcatcgggttctataactcaacgaccagaaacaaataatgaattggatatctggctcccttcagcttggagtcttctcatctttgccttgtctagtcgggctcttcg

SEQ ID NO: 22541 - DNA, 407 bp, Glycine max
ttgggggtttgggggcggactttcactgctgcaagcacaagattgagccaaagtgggaggaccctatctgcgccaatgggggaaagtggactatgaccttcccaaggggaaaatctgataccagttggttgtatacgttgttggcgatgattggagaacagtttgatcacggagatgaaatatgtggagctgttgtgaatgtcagaagtaggcaggataaaattgctatttggactaagaacgcttcaaatgaagctgctcaggtgagcattggaaagcagtggaaggagtttcttgattacaatgacacaattggctttatatttcatgaggatgcaaagaagctggacagaggtgctaaaaataaatacgttgtatgaagtgtatagcgtttttaactgggtagc

SEQ ID NO: 22542 - DNA, 322 bp, Glycine max
ataggccctgtctctgtctcgattgataatagggctgcataattgtttatcattcgcaagcacattttggtccaatatgtaactgctacgtttcatgagggactctgaaatgatccctgtcgttcatggaacatatctactttttaagggtgatattatatatatgggaaacacgcttcacaatgatctaattaatggcttgtatttttttttatttttttttggaaatctttgtatacttgtcgtgggggaagtttttttgtcaaattttcgtaagtgtaagatgtagtatagccttggattattttactcaacttatgta

SEQ ID NO: 22543 - DNA, 294 bp, Glycine max
tatatgtcacatggagattattcagatcaatcttgatatgacaccttattaactctttttttagcttttaaaaaatcttgtaaattaaaaaatatgattatttatcacatggagattgattggatcatatggtttgaggaatcatgtaataatttctcatcaaattgggtataatctgctgattttaatgcaacatatgattgtttacagggcacttgaccaccaaaagttatgtctatagcttcggggtagtcctgctagaactgcttacaggaaggagagccacagaccaaa

SEQ ID NO: 22544 - DNA, 387 bp, Glycine max
ttttgagaccgaaagaccggaacatgaggcgggcaagagagtttgtttcttctctcttcaatggaaagcggcgaacaagttctcccttcggccaccaccgtcgccgccgccggctatcccaacgtctctcctcctccgctcgctgatcctgtcggtgcttccgatctcgctgctgctgcctcggacgacgttgttgcggaacctgaaattcacgcgctgatttcagacgaagagcacgatcacgatcacgatcacgagcatgagcatgagcatgaccatgacctcgagcacgatcacgagcatgagcatgaccaccacgaggaccgcgatgatcacgccgccgtggcagctgtctccttggaagatctcaaactcaagatcattaag

SEQ ID NO: 22545 - DNA, 332 bp, Glycine max
ggcagttcaattccaatatattccattctctcggtgtaggtccctacctctcccttcaagatgcagatcttcgtcaagaccctcaccggcaagaccatcacccttgaggtggaaagctctgacaccatcgacaacgtcaaggccaagatccaggacaaggaaggaatccccccggaccagcaacgtctcattttcgccggaaagcaacttgaggacggccgtacccttgctgactacaacattcagaaggagagtactcttcacctcgtcctccgtctccgtggtggcatgcagatcttcgttaagacactcaccggcaagaccataaccct

SEQ ID NO: 22546 - DNA, 424 bp, Glycine max
gtgccttgcagaaacaacgagatcactgcatttgtggcagagtttcatccatggcctttggagcggagtgataacagctagaagtgatacagattgataaattaaggtatcaagatgtcttatcgaagggggtcggatcagccaccgctaaggtgtggatactgcggactcagactgctgggaatttaggagccaattaaagagtatgaaaggatacattatacttggagaacatggaggaaagggaaactgggggcacacctccaataatccagacagtgagagcatgggacctggtattagttgtccaggtgaagtccacaccaaaggaaaagcagaagaagcaagagagagatgatggtatgaataatggatttgaacaagttcttttggtattagtggtgcaagctacttcactggaact

SEQ ID NO: 22547 - DNA, 312 bp, Glycine max
gactggttttcatgggcaaaaaaattcgccatggtgttaaaccggagggtgccgattttcgtccttgaaaggaaaaaaccttttttttaaatgttcattttttgcttaaaattggtcaaccattgtgaccccaaaaaacttcttcttattcttaggaccaggatttggtcactgattccaggttttaggtggtttcctaatccaagataaagtttttttaattaatttttggctaggcaatccaaggtagtttcctaattaagattaataaatttagcttaatacttgccttgttttcagtacctttgttcc

SEQ ID NO: 22548 - DNA, 422 bp, Glycine max
ggtcctagtgtgtgattgtttgttgttgtaacgcgttcttcttcttttgttgttctgtgtttgtgtttgttttttctctcacctgaaaatgtcttgctgcggtggtaactgtggttgcggaagctcctgcaagtgcggcaacggctgcggaggctgcaagatgtacccagacttgagctacactgagtcaaccaccaccgagaccttggtcatgggagtggcacctgttaaggctcaatttgagggtgctgaaatgggtgtgcccgctgagaacgatggctgcaaatgtggaccaaactgctcctgcaacccctgcacttgcaagtgaggtgttgggagagcaagcttcaagcagagatagcccttaattaggaataatgataaactattaatgtgtagctaaaaacttatgtattatgtct

SEQ ID NO: 22549 - DNA, 376 bp, Glycine max
ggaaaagaaaagggtggtgaatgtgaagatagagggagcatgtggaatggttgtggtcactattatatatgttgtctcttacgctttgcatgtgactttctttctttctttatatcctttatatattaagtatatgctgcaatatatttaattaaagagagaagtaacatcaaggtgcagagagaggaattgaagcatgggaagagggaaggtggttctggagagaatacagaacaagatcaatcgccaagtaaccttctcaaagcgcagaaatggtttgctcaagaaagctttcgagctatctgttctatgcgatgctgaaatcgctctcgtcatcttcttcaacccgggcaagctttttcagtatagtagcact

SEQ ID NO: 22550 - DNA, 317 bp, Glycine max
gttattgtagagactgagaagagttacatcgagactgttgtcatggatgttccagcagctgagcatgatgggaagtgcaagtgtggcactaactgcacttgcacggactgcacctgtggccattaaggaatatgtatgaaaatgtaattgccatgtgtttggcaatacaaatatccaaataatgtaatcttcgtatgaataaatgtgtgtgctgttatcctacttcaggtctgtgtagtcatgcagtctgaatcatttcaagttcctgtcttagttaatataacagccatggttgtggcattctatggtttattaga

SEQ ID NO: 22551 - DNA, 459 bp, Glycine max
  modified_base (351)..(351): a, c, g, t, unknown, or other
  modified_base (359)..(359): a, c, g, t, unknown, or other
  modified_base (451)..(451): a, c, g, t, unknown, or other
cggacgcgtgggatatttccacattcataaaagcttgaggtgtccattccttcctgaaagtgcattttatatttcctaatcatggtttctatggcaccgcaagagctcatccactcaactattagatgttctatccattggtcacatccttcaattttgagacaattctggtaacttagaacatgcaaaacccacaaaaatcacggatgaaataagaatttagggctctaaatgcgatcacattcacataggcaggtagtacttctcgtcaattgctgacagaaaacaagaaataggcttgcgccagttagttatactcgcataggaatcacaaggattgaacaggctctntgcctctngtgccttctttttggtgctttttcctttggtggttgaaagaaccccttaacggcagtatcaaagacgtcttttacatttggttatcacagtnacacatgc

SEQ ID NO: 22552 - DNA, 272 bp, Glycine max
agggactcattcacatactataatactacgataggcgggactcttcccaattctgttgtgtgagtctgtgagtctttcttagctgatatggcggttgatcgctcccttacgaggtgctgtagcctcgtactgtggtcgtggatgttgctgaagatgatgatggcgcaaggtgcaaccgcgagggccaaccggaaggagtgggactcggtcataaagttaccggctgaaccggtcgatgctgactcggatcatgaagtgggaacacgatgggc

SEQ ID NO: 22553 - DNA, 319 bp, Glycine max
ggtgtgtgtttaaattcaatgagagactaagttgaagacttgaagccatgagatgaatcacttatctcttgacactgaagattctcttgcaagcttgctgctggagcttgcagccaacaacgatgtttcgggtttcaaaagattaatcgagtgtgaaccttcctccatagacgaagttgggttgtggtatggccgccacaaagagtcaaagaagatggtcaacgagcaaagaactcctttgatggttgctgccacctacggtagcattgatgtcatgacgttgattctttctctatcagaagctgatgtgaaccgatca

SEQ ID NO: 22554 - DNA, 200 bp, Glycine max
gacgcatacatgagataaggcaattgtgataagccattcactcaggtgaaaagaaaaaaaaaaacatattgttacaaaaccatggtgattcacagactcgaattgtgcataaacatggttcaactcgccatagagttcgtcgtgagcgtcgcggaaacagtggtcatagttcagcaaagaaccgcggagcctttcggaat

SEQ ID NO: 22555 - DNA, 419 bp, Glycine max
atattgggacatttcatttatttattgtagactgtaattaacttataacaatgatgatttaattgagaaattaaatcaactttatataatttatcttgataatgattgttgttgataaaatgtgttatcaatagatttacaactttattgtgtatatcatgatatgacagtcaaatggaagctaccaaaaccaaacttctgttttaatttaatcatttttaaaatgcttcatttctcgcctctgactctgcctcaaagaattaagcttccttcaaataaaagactaattgaacaataatttagccttgtctaagaattgaagggtgaggaagtataggggttgggactacggcttcattgagtttcagtgttctgttattagaatgataaggttaattagctactcttttatgtgacac

SEQ ID NO: 22556 - DNA, 247 bp, Glycine max
  modified_base (200)..(200): a, c, g, t, unknown, or other
aggtaccgctgccaaaaaaccaccaaaagggtccggttccaaaaaaccaccgaaaggtaccggttccaaaaaaccaacaaaaggtaccggttccaaaaaaacaccaaaaggtaccggttgcaaaaaaacacaaaaaggtaccggttgcaaaaaaacacaaaaaggtactggttccaaaaaaacacaaaaagggacctcangtcaagccgggctacccgcctaatttaaacatattaataacggaagg

SEQ ID NO: 22557 - DNA, 422 bp, Glycine max
  modified_base (377)..(377): a, c, g, t, unknown, or other
gacttgacttttagatttctgcaagttgcattgtgtacatgcaattctcatcttttttttttatcatgtcttgaacaaataagtattatattgatattctaaactcataaattcattcttgataattttatttatcttacacattactactttaatttttgccaagataaattagagtcttttctcttcacaaattactcccagagtgttggaaaaggcaaaatgagtttggacacgataaagaaactcatcaaatccatacaaatatttactcattagatgaattttatctgctgatgagcgttgatctcttcatacttaactgtcctgtaaaaagatagttggacaaagaaaggtgtcagactactcaccatttnccataaggaaacaatttctttatttttctaataatattttttaat

SEQ ID NO: 22558 - DNA, 394 bp, Glycine max
cgttcccctcttagctggtggatcaccaacgctgagtgcccgtacaccttgagtagcttgacattggagtcaatcgccgcctggacggccagggcacatgcttcatactcagccatattgttggtgcaatcaaaccccagcctggctatgataggcatacattgattgtctggagagaccaatactgctccaatgccatggcctagaatgtttgacgctccatcaaaccatacggtccatttgtcccggtcctcatctagtttttcctcaaacaaggccatgatgtcgtcatccgggaattcgggatgcatgggctgatagtcgttgagaggctgctaagccaaataatctgctaagatgcacgagaaatgcaatatgtattgggtatatatat

SEQ ID NO: 22559 - DNA, 329 bp, Glycine max
ggatgcattggggcatgcttttaattgcctagatctcccaaacaaattgtagcataagtcccatggccaaagagactagtgttgtttatctatatcccagcaaatcacaagtttggggtgagaattttgatcataaaaaacttgtaataacaacactagctgctaatggaaagaaggaggagagtaatggagcacctaatgacacatatcctgcgtttcccgggtggtatgctgatgtttcctggccaggagaagcacacacatataaaatagaaaagattctattccacgggaaatcagaattccaagagcttcttgtatttgagtct

SEQ ID NO: 22560 - DNA, 215 bp, Glycine max
aattcgagcgggcgcttttttttttttttttttttttttttttttacccaatgcgggggattattaaaatcaatggtgaagtgccctttaaccaaaaaaagggggggggcccttacaaacccaaagtgttttattttaccaaaccaacttaaccttgaacttcgttaaaacccgtggccaaaataaccaccccttgtcccttaattaattccaaa

SEQ ID NO: 22561 - DNA, 391 bp, Glycine max
  modified_base (351)..(351): a, c, g, t, unknown, or other
tcatggatggttaagtattgaaatgttgttttgcttctgctcttgatggttaagcctcgttggttctgccaagtggttaaactttgaggtatagtttctacttggtggttaagctttgataatttcatggattaatagtttgattgagcttctgccaaatggttttgttgttgatttcgcttgatgattaagctttgatgcttgctttggactcttggaagaagattgagaaagtcaaagttagttgaagatttttagaagtttttgtttctgaccgatgtattttcagcatgtttaactatatttcaagttttcaaaattttttcatttcctttaatgttgatatattgntttctctaagttagaagtgttttcaacaccttccagctta

SEQ ID NO: 22562 - DNA, 330 bp, Glycine max
  modified_base (23)..(27): a, c, g, t, unknown, or other
  modified_base (38)..(39): a, c, g, t, unknown, or other
aattcgagcgggcgttttttttnnnnnttttttttttnnttttgggcccagaaataattatatggctttgtagattatttaagtgatctcatgaattattttttaaaaatattatattgaacgtgagtatttttatgattgcttaaatttggtacttaaaattatttaaaaagtaaaatggaaattaaaattatgttgctcctattagtatttaagttgataacttgtaaagaaaataaaaaatatgatactaatttttatgataaaaaattaagattcattttcaaattaattagaaatagacaatttacacaaccaatattttcaaat

SEQ ID NO: 22563 - DNA, 396 bp, Glycine max
tgatttcaaggactggccattcattttgaggactattgaatttagttttaccccagatgttataggctccatggcagcacaattgcactcagatacaggatttatcactctacttcaagatgatgaacatgttagtggtcttgagatgatagatgattttggcacatttaaggcagttcctcccataccaggggccttcctttgcattgttggagatgttggacatgtttggagcaatggaaatttttggaatgctagacatcgtgtaatatgcaaggaaacgggtactggttattcatttggtgcatatatgttatcaccaagggatggtaatgttgaggcgcctaaaaaattggtggaagttgaccatgtacaacgctatcgaccatttaagta

SEQ ID NO: 22564 - DNA, 184 bp, Glycine max
gagaagtggaagcaacgaagaggctgaacgaagtacaaaatttgcattattgaattggattcctctgttctattcgattccatgcgagacagagacagaagaaaagaattaattattaaagcagcagcaaagagtcttgatcttgatctggtggcaaacgatggcgtttcgtggtctcggtgtg

SEQ ID NO: 22565 - DNA, 109 bp, Glycine max
aggtgaagatcctgctacaaaaacatcaactccccaagggaagcgtgctgcctcttgaattgaatccaaaagtttcaattccaaacaagatgtttccaaaaaccaaaac

SEQ ID NO: 22566 - DNA, 367 bp, Glycine max
ggattgaaaaagattaactgcaagtagtactctcgacgcattgatcaaacattgatgataagttctgtcaaacaaagattgtttttgaacacttcattgctcacatgaaaaacttatatgatgattacttcagtcaaataatgattgttttttaacatttcattattcacatgaaaatcaatctgatgataattcctatcaaataatgattgtctttcgacgtttcattattcacatggaaaatcacattatttataatcaccatatgtttaccatcgcaaacatgtaattattctgccaaattgtgtcttcctttaggccgagcacaattcgcatgaataatttcatgcgacatttacgtaaattc

SEQ ID NO: 22567 - DNA, 325 bp, Glycine max
gaaagagagttggaaaacaaagtatagagtgagagaatgggtgagaaaagcaagattttgatcataggaggcaccggctacatcggcaaacatatagtggaagcaagcgcaaaggctggaaatcccacttttgctttggtgagggaatccacactctctgacccctccaaggcacaactcatccacaattttgaggctttgggcgttaatttggtccgcggggatctgtacgatcatgagaagttggtgaaagctatcaagcaagtagatgttgtcatatccacgctgggtcacctgcagcttgccgatcagctcaagatcatcg

SEQ ID NO: 22568 - DNA, 369 bp, Glycine max
ggtgtcatcgtgactgagattgaccccatttgtgccctgcaggctctcatggaaggccttcaagttctgaccttggaggatgttgtttctgaggctgatatctttgtcaccaccacgggtaacaaggacatcatcatggttgaccacatgaagaaaatgaagaacaatgccattgtttgcaacattggtcactttgacaatgagatcgacatgctggggctggagaactaccccggcgtgaagcgcatcaccatcaagccccaaaccgacagatgggtcttccccgagaccaatgtcggcatcattgtcttggccgagggtcgtttgatgaacttgggatgcgccacaggacaccctagttttgtgatg

SEQ ID NO: 22569 - DNA, 314 bp, Glycine max
  modified_base (32)..(32): a, c, g, t, unknown, or other
gactaccattcttattttctctctcgatacanagatacatagaaatggcctcttctcttgcatcctcatcaactgttctctggatcctttttctaaccattgcaactcttcatttgagttcaaccaggaagttgtcctggtcagacccgcagttgcagtttcaataccacagaggccctctcctcaaaggcaaaatctcagtaaacctcatttggtacggtcaattcaaaccttctaaaaagccatcgctgctgatttaatacctagctctcctttctcaaacccgtcaccgaccaaccatccgttgccacgtg

SEQ ID NO: 22570 - DNA, 381 bp, Glycine max
gaccataaccactttttgtctcttgaatttcttttggcttggtcctttttgttttttcattgacatgttgaaggggtcttctttatctagctggagaaacaataatggttgctgtctagttctgtgaaattcaaccccatcatggatcttgagtctgtgatccacaggaacacaattaaggaagaatcatggaagacagttttgactttggcctatcaaagcttgggggttgtgtatggagacttgagcacttccccactttacgtttacaaaagcgcttttgctgaggatattcagcattcagacaccaatgaagaaatctatggagtgttgtcttttgtgttctggacacttacactgatttcactgctcaagtatgtg

SEQ ID NO: 22571 - DNA, 414 bp, Glycine max
ggtgtgattgtttgttgttgtaactcgttcttgttcttgggttgttctgtgtttgtgtttgttttttctctcacctgaaaatgtcttgctgcggtggtaactgtggttgcggaagctcctgcaagtgcggcaacggctgcggaggctgcaagatgtacccagacttgagctacactgagtcaaccaccaccgagaccttggtcatgggagtggcacctgttaaggctcaatttgagggtgctgaaatgggtgtgcccgctgagaacgatggctgcaaatgtggaccaaactgctcctgcaacccctgcacttgcaagtgaggtgttgggagagcaagcttcaagcagagatagcccttaattaggaataatgataaactattaatgtgtagcttaaaacttatgtattatgtct

SEQ ID NO: 22572 - DNA, 321 bp, Glycine max
accatgatgacatttgcaggccatgttgtgtagtctaggtcttggaaaatacgagctgttagcaatttggagacttcttgccatactgcttgacacctttcttcctccatctttctttttctttgaactataggttttgcttctcagcatatggagagtttgtgacaatggaataaaatatcggtcaaactcccctaatcaataaatgtcttttgaaccacgcacttgttgatctcgacactgatcaccactggatcgtcctgaaccggatatatcgccttgaaatcagatgtggtaaaagtgattggtggcttttttggg

SEQ ID NO: 22573 - DNA, 357 bp, Glycine max
  modified_base (327)..(328): a, c, g, t, unknown, or other
  modified_base (330)..(333): a, c, g, t, unknown, or other
gatcctgcagaaattccagagggatatgaggagaagtggatggttaatatccacgccattgatacgcgcggcgtggtggataggatggggtgcactgagtgtaggtgtgacctttacaatgttacaaagaaagaacatggggagcctctaagttcagactataaaggaggttattattgttgttatgatcaaacccagtgcaggttgagggaaggctttgagggcccaaagaggagcctctacctaagatacacagtgaagtgggttgaatggaacaagttcattgtgcctgtaaagatttatatacttgatgtcactgatactttnnannnntcagatgattctagtggaatgatc

SEQ ID NO: 22574 - DNA, 417 bp, Glycine max
gtagtatagtctgaattatatcaggtgtgtttcagtaaacttaatagtatgacaacgcattcatttcctatgcattgattcgatttctgatactatcggagtgaaaaaagtagatctaaagaaaaacgcgggttggattatattagtaacaagtaaattctttgtacgtaaaaagttccaagattttgttggacagaataacaattgcaaagtttgagatcacccagaaagcattatcaattttaaaagcctactcgggtattgagcgtttatcaaagtttacttaataagaacttaatttttttttttttcaataaagaatagtttgtaacttcggaaaaagagaatctagtttattttcttacatagaatcctcatatatgtgtgaataacacatacattttttctatagataca

SEQ ID NO: 22575 - DNA, 105 bp, Glycine max
agggggtccatctcaaaagggcccctacaatacaaagtttaagggggtccttctttacagcttcattaattgggttttcccgtctcaagttttccttcctttctt

SEQ ID NO: 22576 - DNA, 309 bp, Glycine max
tgaaacagaaaattcaaatatagttccagaagcaattataaacccaattagttctaaacactggaaaaccccatctaaattataccaacgtccaactgcccctgaccttctactagaagaaagaggagaaaataatttcaagagtttttctacaaataacatctatgaatggaatatagatgcttaaacagaatacaatatcatgaatacactccaacatatgacaatggtagccacgacttaccaaacctcccatgaatgttcggaagaaaccattataaacattttagtggcaggattttccggaca

SEQ ID NO: 22577 - DNA, 274 bp, Glycine max
ggaaacaaccattgggtaatcctcacttggtgatactactaatcctgagaatgatacctccaacttcgcaataaccaccaaacttccctataaattaactttctctctttctttctttcttccctccctctcttctattctcttcttggctttacatcacaccctcttttccccttttgccaaagcttgatctttttcctcttccatccccgtttctccacttttcttgatcaaggtgccctcgtttcttcagttctgaatcatttttttgtct

SEQ ID NO: 22578 - DNA, 338 bp, Glycine max
gccccccggaaaactattattacctccactccggatgggactcaaagtggcctctgaaacatcaccgactcccactgcgtcggttggcttatatgtagattggggttcaatatacgagactccgataagttttggggctacacatctgctagaacgaatggctttcaagaccactagaaaccggagtcactttcgggttgttcgtgaggtaaaagcaattggtggcaatgtgcaggcctccgcttctagagagcagatgggttacacttttgatgccttgaaaacctatgttcctgaaatggtcgagctacttgttgattgtgtcaggaaccctgttt

SEQ ID NO: 22579 - DNA, 366 bp, Glycine max
ggagctggagcagcttctgcagtgcatgaagggccagaagaagagaacaaaggagggtagtggcttctctgactcttcacccttttctgagttcttcatgttcccccagtactcgacacgtgccacacagagcagcagcagcagcagcagcaaaggctaccctggcacgtgcgaggccaataacaacatggcacggaacccttcatcatgggccgtggcggacatagaagtgaccttggtggatggccatgccaacatgaagatactctgcaagaaacgaccagggatgcttttgaagatggttgttggtcttttaagtcttggtctcagcattctccaccttaatgttaccactgttgacgatat

SEQ ID NO: 22580 - DNA, 357 bp, Glycine max
gcacgcacttagcaatcaatcaaaacattcccaagaacagtaatatacacatcttcaattaagctccttctcctatagccatggctctttctaagcttataattgcttcccttcttgcgtcgcttctccttcttcatttcgttgatgctgatcaatcggcacatgcacaaacgcaggggtctcttcttcagcagatagattgtaacggagcatgtgctgcgaggtgccgtttatcatctcgtccacgcctctgccaaagagcttgtggaacttgttgtagacgctgtaactgcgtgccacctggcactgctggaaaccaagaagtgtgtccctgctatgcaagtttgactactcatg

SEQ ID NO: 22581 - DNA, 305 bp, Glycine max
gacacgcacctctttctgattgccttcgaatcacacactctcttcaatttctagggttttgctattgctttgcctccgttccccctttctcacaaaaacaacgccttttctcttctccttcgtatctattctttgcgtttggtttttggttgattgaaggcattcacagcgtaattcgttgctgcattttaatcgatttatctaaccaggactgaatgacctaatggagtctaaaggtgggaaaaagaagtctagtagtagtagtagtaaatcaattttttacgaagctcccctcggatacagca

SEQ ID NO: 22582 - DNA, 209 bp, Glycine max
  modified_base (10)..(10): a, c, g, t, unknown, or other
cccaaacacnacaacaggtgagagtaccgtcagaatgttacattcacaaatttggctagtcttaatcgttgtataagcaaaatccttaatcctgccatgcaacataatatctatcgacacataaacatccatcaaaaccatcatggtgacccatatcttatcaagattctctatatctcaagatatcactactctataactcctacctc

SEQ ID NO: 22583 - DNA, 324 bp, Glycine max
gacacacaccttccctttgattccatttctcatgctcacttccaaaactcctccattcatttctcgcatttctaccttccaaagctctttctctaagatcgagctttggaaaacttgaggaagcatttgagtaacaaccccttttcagatccctgaagggttgggttcatttgtcgaaataataacaacttgcttggaacaagcataataagcatggcaagcgcgttgcaacttcaaggggttcaagggaactacctttgtgtgagtgtgaagaggggcttgcatcattgcaagcctcaaattgggtttgcagcatttggtgct

SEQ ID NO: 22584 - DNA, 256 bp, Glycine max
  modified_base (9)..(10): a, c, g, t, unknown, or other
  modified_base (20)..(21): a, c, g, t, unknown, or other
  modified_base (30)..(31): a, c, g, t, unknown, or other
  modified_base (39)..(40): a, c, g, t, unknown, or other
  modified_base (48)..(48): a, c, g, t, unknown, or other
  modified_base (50)..(51): a, c, g, t, unknown, or other
  modified_base (64)..(65): a, c, g, t, unknown, or other
  modified_base (72)..(73): a, c, g, t, unknown, or other
  modified_base (102)..(103): a, c, g, t, unknown, or other
  modified_base (113)..(114): a, c, g, t, unknown, or other
  modified_base (124)..(125): a, c, g, t, unknown, or other
  modified_base (137)..(138): a, c, g, t, unknown, or other
  modified_base (146)..(147): a, c, g, t, unknown, or other
  modified_base (157)..(158): a, c, g, t, unknown, or other
  modified_base (179)..(180): a, c, g, t, unknown, or other
  modified_base (193)..(193): a, c, g, t, unknown, or other
  modified_base (195)..(196): a, c, g, t, unknown, or other
  modified_base (243)..(243): a, c, g, t, unknown, or other
  modified_base (245)..(247): a, c, g, t, unknown, or other
ttccttganntgggaacctnncttcaaatnngatgatgnnaacacgcncnnaatatcctagacnnagtccanngtcagaataaaccaaaaggggatgtggcnnacccaaaaanntgggatcctnngattgggctganntgtcaagnncttgcacaanngctaaatatttcttcttatcnnccggattagcaanannatttaaaaccactttgatatttcagatagaaatatgagtgcattacncnnngaagtcatt

SEQ ID NO: 22585 - DNA, 359 bp, Glycine max
ggatagcaacaacaatttaatacctcaaaaatggttcactctctgctcctacttcttctcctcctcactctcactgcaacctctgctcaacatgacggcccttcgatcacagccaccatggagcaattctccggttacaaaatccacgaacctcactctttccaaccctcttcactctccgttgatgctcaggctcttcagaaccagattgatgagcttgcggcgttttctgactcacctgctccatcagtaaccagggtcttgtatactgacaaggatgttttaggtcgcaggtatgtaaaaacccagatggaacttgctggcctatctgtgagagaggatgctgttggtaacatatt

SEQ ID NO: 22586 - DNA, 359 bp, Glycine max
aggtgtggcgttgagttaggcgttaaggctaaattgtgagagttttcatttttccacatcttttattaagtgttttctgtcatgaaaaaggaaaaaaaatgcaatccgttttagtaatgtccatattaattgttttggatgctttggtttgcattccttgtcccgtgactgcattgatgtttgtgattattgtctgttttggtgcttggttatgtgaaatgacaaatatattgtttgaagtttttctcaatctacttcactgtattgcaagttggacaattgagagaagtgtccaacaaggttcacaatgcagaactgaaattgttttttgaagtggagctggggatggtaacattttt

SEQ ID NO: 22587 - DNA, 316 bp, Glycine max
aattaccttcttgttttaatttgtttttcatatgtaagtaggaagctctaaatagctcaaactttgatcacgcatgagctagatttcataattattcattatttccaattagtgcttatacatggcaatacatatgaattggtttttttaagtttgatacagagaaaaatgttaaagttggaattgtatattatgtgccttcattgatagattctcatggaatcaaatttatggttggataatgcattgatcaagctgtttgttttaaattcttcgcttctattttccaggtctatgttgctgcaattcgcaacag

SEQ ID NO: 22588 - DNA, 361 bp, Glycine max
  modified_base (28)..(28): a, c, g, t, unknown, or other
gtgtagcctttgttgggccaaggcgaanaatttctttaatttcttagggataataaaaaagatgaagaaggatgttcatgcacttaagtgatcatatatccttcttaatctcttgaatatccatgaaaaatgaaagaaaaagatgggagtagctagagacctcgtttggttactggtgagaaagggtggttgagaattgaattgggaattaaattctcgggagagagaaaacgggagtgctatgactgtgagggtgacgagagattgaatgtgagtgatgattgcatggaacccccaagcttgggcatttattattgtggaaaattaatgagtgggaaagagagagagcgtggtgaatgtc

SEQ ID NO: 22589 - DNA, 362 bp, Glycine max
gaaagtacagtgaggtttttgaaggcataaatgttgatagcaatgagcgttgtataatcaagattcttaagcctgtcaagaaaaagaagattaaaagagagataaaaatacttcagaacctttgtggtggcccaaatattgtcaagcttcttgatattgtcagagatcagcactctaaaactcctagcttaatatttgagtatgtcaacagtacagattttaaagttttgtatccaaccttgactgattatgacatacgctattacatatatgagcttcttaaggccatagattactgccattctcaaggcataatgcatagagatgtcaagcctcataatgttatgatagatcatgaatta

SEQ ID NO: 22590 - DNA, 334 bp, Glycine max
tggatagtaggcggtgtccgaccattgcggcttcgacccctctttcactttgggtgacatcttttctcaaacgttgaagttgaattcttccacttattatacatattttccagtttgaaacaatagtttactcttacaatgtctttcgttgttttctttcttttagtgcaactggattggtccatgtttgacattttagttgtacgtgtgtatccgtgttggctaccctcgagctctaattaataattgtcttcttttattttaatttttaattggtattattttcaagagtcaaatacttcatgcaggtcctctctatattaacataggaaga

SEQ ID NO: 22591 - DNA, 371 bp, Glycine max
  modified_base (320)..(320): a, c, g, t, unknown, or other
gatagcagcatcatacaaagcattgaattcaaaagacttaagttcattccttgtgttttgctttcttcctcaaaaccaaacatgtcgaacacatgcggcaactgcgactgcgctgacaagactagctgcaccaagggaaacagctatggtgttattgtagagactgagaagagttacatcgagactgttgtcatggatgttccagcagctgagcatgatgggaagtgcaagtgtggcactaactgcacttgcacggactgcacctgtggccattaaggaatatgtatgaaaatgtaattgccatgtgtttggcaatacanatatccaaataatgtaatcttcgtatgaataaatgtgtgtgctggtatccc

SEQ ID NO: 22592 - DNA, 415 bp, Glycine max
gtctgacaaattgacataaaaatcattgaaaagctggcctttagagtgcgtaagtgggttataacaaaaagttttaggcctcttcttcttacatcctctaaatatcatttttcaccccctttaactttaaaataaaccttaacttccaaaatatccctcactcgttaacatcatccttcctctctttgaacccttcttcttcttcctcctcttccgtcattcaatcattgtttcaatagaaaggatcaacaacagagcctgtaaatcaccacacatgtaattcaaaatgaaaattttacattttggattacttgatccaaaatttatcgcaacaaacaatctaaatattttaccggatgtgttacggattagaaaacttgtaaagtttgcaattctatggaggttttggattata

SEQ ID NO: 22593 - DNA, 432 bp, Glycine max
gggggatttgaattaacgagagccaacaaaactggagaaaggttttggaactttctgatccgggttttgcatctttccatcatcgccaccatttacttccattatatgttactttcactttattttattttatatacatcttagggtagttagttttaatactagcttccatgccaatcatcaccaaaccaggtaaagccaagatcttcaacgacccattgccgagaagagtctcaaaacccagactctagccagacccagttatcagaatcgcttctttctcttaaacaagacacgcccatattgtatcatatgccccaacaccaaattagagagaacagtaatgggtatgggagctgagaggaaatggcttttcactctattcaatgcagtattcctatctctcatgcttcttttgatgtccctcttctc

SEQ ID NO: 22594 - DNA, 340 bp, Glycine max
  modified_base (315)..(315): a, c, g, t, unknown, or other
gatcttaacttttaattttataagagaagaaagagaggtaaatgagactggtatgccggtttccatcttgtttttgtcgggggttttggcagaattgggttcgactcccatagtcccgcggcattccccctgacctcgagataaaatgaaaaaacggacgataaacagtttgattgttaagggtaccattatttcattagtaagggactttttattggaacgggcttcgattccctttatacgcgatgtggcgaatcagactgatttaacgacgacgagatatgcgattcaaaactcgtcgtctacttttagganatgtttggaacagagaacttacaat

SEQ ID NO: 22595 - DNA, 428 bp, Glycine max
cgagccggatctggtgtatcataagggatttgctgtttctattgattcctccggattgggtcaaaaacatttcttgaatgagttattcaactccagggatgaatcgaaaaatcactctttattggttctacctcctcttttttatgaagagaatgaatctttttatcgaaggatcataaaaaaatgggtccagacctcttgcgggaataatttggaagatccaaaacctaaaatagttgtatttactagcaacaacataatggaggcagtcaatcaatatagattgatccgaaatctgattcaaatccaatatagcacccatggttacataagaaatgtattgaatcgattcaattgcaacttcgaatatggaattcaaaggtatcaaataggaaatgatactctgaatcatcgaactataatgaaat

SEQ ID NO: 22596 - DNA, 391 bp, Glycine max
  modified_base (281)..(281): a, c, g, t, unknown, or other
  modified_base (314)..(314): a, c, g, t, unknown, or other
caatccttagtgacaccctgatattcgaatatttgaaacgtgtaatttgctaagatgaaattcaatcgtcacgatatttcatctatgcagtagtttgtggtatgttatgactttggtgatttgatcggtaattacactaaaatgggggaggtttgttggacattttagtgtaattgatctctttattatgttaaaataagagtgcacgcttgttttaatgtaataacgagatgttcggtttaggcaaaagttggaagttacatggaagttactaaaacttncattaacggcaatttttaaaaataaataacttncatcaaccgccaaaaaccacctgttctttgattataaataatcatcctagttcagaaagcataacatgtgaaaaaca

SEQ ID NO: 22597 - DNA, 438 bp, Glycine max
ggattcgaaatgcatgctaaccccttacgtggagagcttctaccctgtatccatgagctactaccccatctctctccctttgccatctacttgtaagccttcatcaaacataactctcttactagagaaacatatatatctgtatagcataggacttattggattcttgttaatccacaccacaagggtaattgacatgggatcaagcttctctagttggtatgagggagaatctgtgtctgcttctccaaagccaaccaaagcggaggctactaagggcggttcttgttacaacagggtctctatcacggacttgagttttcctggctcaacgctttcagaggatctctccgattgtgtagcggggtctaacctgcatgtgatgcactcgctgagctcaagatataacgcacggtttctgttggagtaactttctcg

SEQ ID NO: 22598 - DNA, 255 bp, Glycine max
tccatctttccaaattggcctaaccgtccagacaagttcatcatgctgttgagaacataagtgtctagtttcagaccagatttacacatttggttaagaatctcctcacatttattcacacttgccattttggaataagcagacagaagaaccatgtgggacttcattggtggtggtattcccactcttttcatatctttaaaaacagcttcagcatctgaatttcattcataaagttgtgaaaggaaaaaaaca

SEQ ID NO: 22599 - DNA, 363 bp, Glycine max
attctttctcaaattgaccttaaccgtccatgacaagtgtcaacatgctaggtgagaacatatattatctagtgttcagaccagtatttacacatttatcttaattaatctcactcacactttattcacacttgcccattttgataataggtcatacactaataaccattgtctgtacttcattggtatatgtcatcttctacatctattcatatctcttaaatacatgctccatcatcatgcatttcattcataagcttttgaactactaatttcatatatcataccattaaattctattaataggctacattcacactatataatatacattgacttatcctataattatctttcatcctt

SEQ ID NO: 22600 - DNA, 81 bp, Glycine max
actacttgtcgcaagaaccatctaaagatgtattgtcagaggatgggggaatacgcaaaagatgaggaattgctgatacat

SEQ ID NO: 22601 - DNA, 99 bp, Glycine max
ggttctaagggattaattgttggtggtggaacctgctcctttttctttgggggtcctgggtttgtgttttgttttttctctcacctgaaaatgtcttgc

SEQ ID NO: 22602 - DNA, 414 bp, Glycine max
ggttggattttggtttgtatctgaagaggcattaacatgaaccgttgaattgaatttgtttgtgttgcagatttggctgtggacttgtgcaagcacccttggtgacaagctctggtcttcttactaaagtttggagtgttatctcttctcgtgatgaagacatagtttcatactcaggaaataatggactgtccttgaaagtttctgaggattcgggtttgacggttgttgcgtttgaggtcaacccggattttgatcttcaatctacagttgtttctttctctgatcccaaggagaataatttgaaccgctttgagtttctttgtaccaagaaacatccagatttctctgtcaacaagtctgtagttgatcttttttctaaaaatcttccgaggcttgatgagttgaagtcca

SEQ ID NO: 22603 - DNA, 401 bp, Glycine max
gaatcaaccaaacacaacacttcactctgaagcttcaagcatgactgcttggtacttcctcctatttgccttcatccttttcctctccataaacttcttgatccaaacaagaaggttcaaaaaccttcctccgggaccattttctttccctataatcggaaacctccaccaactcaagcaacccctccaccgcacgttccatgccttatcacaaaaatatggccctattttctccctctggttcggctcccgttttgtcgtcgtcgtttcgtcgccgctcgcggtgcaagaatgcttcaccaagaacgacatcgtcttggccaaccgccctcacttcctcaccggcaagtatatagggtacaacaacaccaccgtcgccgtttccccctacggcgaccact

SEQ ID NO: 22604 - DNA, 57 bp, Glycine max
gagacctcaggtcaggcggggctacccgcggagtttaagcatatcaataagcggagg

SEQ ID NO: 22605 - DNA, 252 bp, Glycine max
gaggagtgtcgcggatgagagatctctggtgaggtctgtggaaatggcatcatcggaggtgacgatgaagggaaattgcttgaaccacaacgacggcggagccacggagcctcattcgccgtccacggccaaagacgcagaagctgcacttttcagggaactatggcacgcatgtgccggtcctctagtcacggtaccgcgggaaaaagagcgcgtgttttatttccctcaaggacatattgagcaagtgga

SEQ ID NO: 22606 - DNA, 316 bp, Glycine max
gacaaccactctcttttattcttagctttgctttccagttcatacttcatcctattattactttccctctttgcattccaaatggccactgttgaggttgcacagcaaacaccaacaactgtgacagagaatgaaacaacgactgaggtaaccaagattgaggaaactaccccagaacagccagccaccgaggttactgccccagaaacagtcaacgaagaagcaaaagaggaagcagcagttgagactaatgaggcaacagaagttacagaggaagggaaggctgagaaaacagaagaagaagaagaagtgaaag

SEQ ID NO: 22607 - DNA, 437 bp, Glycine max
ggttctcatttctctttctgtagccctgggtcaccggagagagagtgagtgcaaagccatcgtcttcttctcagacaagtagtttggtaaaagatggctgatgctgaggatattcaaccccttgtctgtgacaatggaactggaatggtgaaggcaggatttgctggtgatgatgctcctagggctgtgtttcccagtattgttggccgacctcgtcatactggtgttatggttgggatgggtcaaaaggatgcctatgtaggtgatgaagcccagtcaaaaagaggtattcttactttgaagtacccaattgagcatggtatagttagtaactgggatgacatggaaaagatctggcatcacacattttacaatgaattgcgtgttgctcctgaggagcacccagtgcttctgactgaggctccactcaacccaaa

SEQ ID NO: 22608 - DNA, 327 bp, Glycine max
gatactcacagctactctatcacttttcggtttattttcttcttctgttcaatatagccactcatttttaggtagctgagtcttttttagagtgtgttttgtaattttgtttcagatttgcgttttgattcattgattccttcatttccttgctgagagtgcgtgtgatttctctcgtctcctttagaattccgattggtatttctaacactgtgaaagaaagagagatatggcaggaggtggtggagctccagcacctaagatcgatgagccacagccacatccaccgaaggattagctaccgaatgtttcttactgcattacgag

SEQ ID NO: 22609 - DNA, 328 bp, Glycine max
  modified_base (254)..(254): a, c, g, t, unknown, or other
gtcttgtgcttttgtgtaaaagcaatacttgttgatgtcgtatccttgcttagttataacatttcttttaagcccatcagcttgctttcttaatgtttcagaagcattttcatcaccaatgattgtatctttaaaccaatcagagaaagtcttgttatgcattttcaagacccagttctttgacatttttggttgactttggttgactaaaccttcatgctgaagtatgtatggcaaagcttcattactggtgntcaacacatacaagtgagcttgtaacaaatcttttagacttggagtgataacatgcaatccttttgaaccctta

SEQ ID NO: 22610 - DNA, 419 bp, Glycine max
gacactccctgaggagggaagagaatctctctccgttttataaacccataaatttagggcgcgctttttcccggcctcccctcgccaccgcatctccatccatctccgccacgtcgcctcctctctctctcgcttttcgtagttatacttcttctctcgttcctagaaatgagcttctcaacatgcgcagagctgtcgcgttgtttcgccgcagcatcggcgaaacctaattccggtcagtcaaacggcacttccacaacaagcctcagttttctcactccaatcggtcgttacggcgccgtttcatcagtatcgaggtcgaataagaccaacagaatagtcgcggaagctactcaaggtcttacttacagggacgccggcgtggacatcgacgccggctccgaactcgtgcgcaggat

SEQ ID NO: 22611 - DNA, 335 bp, Glycine max
accggaggggcgctacatacttagtttatcattaattgggtcatcacagctcgggacatacacaacgtaatcatgctactgaacatactagaccttcctatcactcacatccatatccatggggacgcagtaagcataagcaatcaaggaaccaccaagtgcgaggcccaaactggagaagccgatgatcgcactatatggctagctcatgctcatgcatctctgcattctcatgtgcacatgctgtacaatctaatggctactttgcatctaacttcttagaatatgcgtactgatataacatatcatcggcttgacgatcatatacttcgatg

SEQ ID NO: 22612 - DNA, 363 bp, Glycine max
gatcctcagcaagaacaagaagaagaagaagaaacaatgtcttgctccaatctgacaatgttggtgtcctcaaaaccttccctttccgacccctcgaacctctccttccgctctgtcctgaacccttttcagctccctacacaaaacccagcttcatgcaccccttcacgctcctcaagcacccaaattcagtgtggtctgagagaactgagaacccgcattgagtctgtgaagaacacgcagaaaatcacggaggcaatgaagcttgttgctgcagccaaagtgagaagagctcaagaagctgttgtgaacggaagacccttctcagagaccctggttgaagcctctacaacatcaacgagc

SEQ ID NO: 22613 - DNA, 450 bp, Glycine max
cccacgcgtccgaagacgacagaagggggtgaaggagtttaagatatctggagcagagtgtgttgttctctgggtcgaagcagcggaaacaaacatgtcgtggtgttactgcgctaagcctatgactttgcagttgccgttgcaatcaagagcagcatcatcgttccattcccacgttggaggagtaacagtaacattctcaacactgtctcttcgaccctcttctcctcttgttctgacccacaacctccacttccaacccaaactcaaacgcgcttccacaaccattcgctgctcctctgcgttgactcctcaattgaagtctaccttggatcaaggtatttgcttcaaataaagtagttgtgtttatgaagggaactaaagactgtccacagtgtggattctcaaacacagtggtgcaaatattgaagtctctaaatgtgccttttg

SEQ ID NO: 22614 - DNA, 338 bp, Glycine max
gctgcttttaatgcgtttgatgcgagttttggatttgatgatgtatttgtaccgtttctgtgcgcctaccacctgattgcgagttaacactgagctagactttttgataatagaattggcggcggcaagcttgatttggaaaaataattaaatcatgagatggatttcgtcgagaatattggctgtgtaagaggacttgctaaaagccgtagatgttgagatgtttttggctgtagggaataccatggttttaaattaatcccggttgcagttttgtcacgatccttgatattgggggaaattgcagttgatgtggccgcaactgcggtcgcggtgag

SEQ ID NO: 22615 - DNA, 329 bp, Glycine max
  modified_base (300)..(300): a, c, g, t, unknown, or other
gacacatgacaagacaacaaacccaacacgatcatcatcgttcacgccaagtaaacgattcctctcttctccacctcaccctttctctctctttttctctctgttgcttcacaataccaacaacaccacctggttccgggtcacactacttgcccaggatcaggacccttctcatgcaacaaccgattcaagtgtttttcgcctttcccaaacaacaactatagggaactaaaatcgaccctttggctagataatcacaccaacatcaaaaaaatcgttttttgctttgtgggtattggnttttttttttttttttgagttgggaccaa

SEQ ID NO: 22616 - DNA, 401 bp, Glycine max
gttggagggcttgatcgtttaagaaaggagtttgaacgggacattgtaagacgtataaaatatcctgaagattatgaggagcttggggtggatctcgagacgggatttttgctttatggacctcctgggtgtggtaaaacactgattgccaaagctgttgccaatgaggcaggggctacttttattcatattaagggacctgaacttttaaataaatatgttggagaaagtgagcttgcagttcgtacaatgtttagccgtgcaaggacatgtgcgccttgcatactcttttttgatgagattgatgctctgacaaccaaacgtggtaaagaaagtggttgggttgttgaacgactattgaaccagttgctcgttgagttagatggcgcttgacaacgaaa

SEQ ID NO: 22617 - DNA, 93 bp, Glycine max
gcttctcctttgtggtgtcgagctgagaataccagatgctccagtagccggcgctaaacaacatggcggacaacgcggtcaccatcctaacca

SEQ ID NO: 22618 - DNA, 463 bp, Glycine max
gaagacgacagaagggatcatttaaaaattatatttttactatctctttttctatgtaattgtttttattaatattttaaaaaataattaagtaaaaatatgtgagaaaaaataattaatatgtctaaaaattaaaaaataatcttataaaaaacaaataaatttatgaaaaaaatttataattaagattaaaggtattacactatcatgtattaagtcatgaatttaatttaatatttatagcttatttacttgcatggtttacatattagatcttggctttggatgtgaatcgcgaatactatgagttaggattgccaataattcaaaaagctggagtggctcacaagattgatttcagagaaggacctgctcttccgtttcttgacgagatgcttaaagatgtgggtgtacagtttctcaccatctcaagttttatccatgattttttgttaacattggg

SEQ ID NO: 22619 - DNA, 298 bp, Glycine max
aggtgggtatgagaggaacaagaatttggattgggggagtgacaagtttttgcatgtaaagaacgtgaagttaccgtagacaacctatgtgtttgtgaacaggagcatgaacccaagggagtgtcaggatttttgcctcagggattgttcttgcactgcttatgccaacattcagatcacaaacgaaggaagtggatgcgtgacgtggagtggtgaactcatagatatgaggctgtatagaagcggatgcgtgacgtggaatggtgatttgtagatatgaggttgtattggtacgtct

SEQ ID NO: 22620 - DNA, 428 bp, Glycine max
gttggagggcttgatcgtttaagaaaggagtttgaacgttacattgtaagacgtataaaatatcctgaagattatgaggagcttggggtggatctcgagacgggatttttgctttatggacctcctgggtgtggtaaaacactgattgccaaagctgttgccaatgaggcaggggctacttttattcatattaagggacctgaacttttaaataaatatgttggagaaagtgagcttgcagttcgtacaatgtttagccgtgcaaggacatgtgcgccttgcatacttttttttgatgagattgatgctttgacaaccaaacgtggtaaagaaggtggttgggttgttgaacgactattgaaccagttgcttgttgagttagatggcgctgaacaacgaaaaggtgtttttgtgattggtgctacaaa

SEQ ID NO: 22621 - DNA, 351 bp, Glycine max
gtctctgttcacaagtttcgttggcaggtttcggcgcaatcggcttctgcttcaaggaaggagagcttgttattctctatcaacaagtaaaatgtcaggtgaagagggtgtcattgcagttgagccagctgctgctgctgctgccatcccaggcgagccaatggatatcatgactgccttacaacttgtgctcagaaaatctctggcttatggtggtttgtcgcgtggccttcatgaaggtgcaaaagtgattgagaagcatgctgcacaactttgtgttcttgcagaagactgtgaccagcctgactatgttaaactggttaaggccctttgtgcagagcacaatgttag

SEQ ID NO: 22622 - DNA, 394 bp, Glycine max
gtcggatgattttgatgttttgatggtaaccaaggacatggttaacaaaatcactaactcaaaagatgacagtggagacgacctagaaatggttcatggaagattgaaagaaaagttgtcggggaaaaaatatcttctcgttctggatgatgtttggaacgaacatcgagatcaatggaaggctttacaaactcctcttaaatatggggctaagggaagtaaaattcttgtcacgactcgcagtaacaaggttgcttcaatcatgcattcaaacgaagtacgtggactaaagcaattacgagaagatcacagctggcaagttttctctcagcatgcattccaagatgattattctgagttgaatgctgaacttgaagatattgggaataagata

SEQ ID NO: 22623 - DNA, 396 bp, Glycine max
gaaggccactccttttagcaagttaacaacactggggtcggcgttccattatctagggctcaattctcttcaccctttgcctctgaaagaaatgggtagtcttgaagcggaaagaacaacagtaggattggcagcaagagacccttcagggattctctccccatacacctacaatctaagaaacacaggccctgatgatgtttacattaaagttcactactgtggaatttgccattctgatctccaccagattaaaaatgatcttggcatgtccaactatcccatggtcccaggacatgaagtggttggtgaggtactggaagtgggatcaaacgttagcaagttcagagtgggagaattggtgggagttggactcctcgtaagttgctgaaaaac

SEQ ID NO: 22624 - DNA, 335 bp, Glycine max
gagttctattaattttaattctgcaatgattagaggcttcatgtttctaacttcctttttttttccccttacccgtgctctttagatatgcaaggtctaaaatgaggaagcgttaggagaaacgggagctagacagtttccggataatttggttgttcgatacagaagattcgcaacatgtaagaaagattgggaatttggccaattttgcaaaatggtggtttggttattcctaaaaggctagaaccatgaattgggtaggaatttaaaattttcataaggttgcaaaaaggttggccctattggcagtaaaacttcttggcatatatttttaa

SEQ ID NO: 22625 - DNA, 434 bp, Glycine max
gagttctattaattttaattctgcaatgattagatacttcatctttctaacttcctttttttttccccttacccgtgctctttagatatgcaaggtctaaaatgaggaagcgttaggagaaacgggagctagacagtttccggataatttggttgttcgatacagaggattcgcaacatgtaggaaagattgggaatttggccaattttgcaaaatgttgttctggttatgcctagaaggctagaaccatgaattgtgtaggaattaaaaatattcagaaggttgcataatgtttgtccctatcggcagtaaaacttctcggcatatatttttatggtaaatggtaaccacatcagttaataatatagtttttaaagggaaaattacacttagacgcttgattatgttggtctttggctttaaacaattacact

SEQ ID NO: 22626 - DNA, 420 bp, Glycine max
  modified_base (366)..(366): a, c, g, t, unknown, or other
tatcacaaagttattagttagatggattaaacttggatgaatgcaagtcgcatgagccctgcatatgaggaaggcattgaagagttcttgtcatttgcctctgaaagaagtcgactcgataaggatggaaaatatttttgtccttgtataaactgtttgaatgcgagacggcaagtactagacgacatatgggaacatcttctgtgtgaagggattaagaagaattatacaacatggataaggcatggtgaattgatagacatgaatatggggtctaaaactaaaccgattgatgtagaaatgggagatcgattagaggatatgatttgtgatcttggacaagattcatttgagcaagaacacgcncttatgtgtgatacattggaaagtgattcgaaagagcctttgtatcaggaatgc

SEQ ID NO: 22627 - DNA, 148 bp, Glycine max
tggtctgccctagtctttttatttccaaggggggtaattcaaccaatcgcgggttaaccgctggaggtaccttttcttttttaatgtaaccaaattccttgattttcaatttgtgacccgccttaattgatttaccggatatccactt

SEQ ID NO: 22628 - DNA, 380 bp, Glycine max
ctgggggctttacagagagtgatttcagtgagtgatcggcgttcactggatctcatcatcatgagccctgcctattgaggaagattccgatcagaaacatcatctgcctatggcctgaataggctacttaccgctacacattgaatgcggccttggctgaactgatctcaagctacatcttcatgttctacacctcatactccaacatcttctacgtcaagctaaccgacagcagcactcacatccattacggcctgatgtactgatatatatgccattcgtttgtactactaaaccccgtgttcgacaactccaacatctactgcaggctcttaaaccccatcgtcaacttcagtgccttcatcaacaacaccatcatc

SEQ ID NO: 22629 - DNA, 305 bp, Glycine max
atattatactacctatgttcctacagtgattttgacgaacactatgaataatcctgcttcgtatacgtgaaattactcgagatgaagcatgtgattacacatggacgtatagaatcagtgcttaattatcacactttaatgacagatctgactggtctgcctaagcacaatgcttaatcgcttgattaaagaactgcatctgctgaatctctggcaatgtgtaataatatactaatggggaactagaaatctgttgttattttcaaataattgccacctgcaaactattgatatttcatgttact

SEQ ID NO: 22630 - DNA, 405 bp, Glycine max
cgatcgcaatgttaataatatggattgatgcttggtatctcttcctctcatgtatgtcttttgcacttttatattttgcttcattggatatgaatgtacgctctcgctttgcttgttcacatgacctgcactccagagctgacagtagagtctgccagattgaaaatcgcacattctgcatgattggtgggggtgccataaccgttgagtaaaattgaacaaaaacacttgactgattgtttcgctgaatgaaagttaaatacaaacatgcatgcaacctcctgttatcatcttcagaagttttgcgaaaaatggacagtcattttggttatgataggcaccatgagcgagccttgagcaaacctagaggaagatgggaaatgctcgcccggtaggttggaaacc

SEQ ID NO: 22631 - DNA, 334 bp, Glycine max
tggggacacatccaattccattatggaacggttaagcctcaaggttgcaacccaacacaaccaaaattcgctacttgttaacggctgcactataccataatgtctcagggaagacgcagtgcatctttagcctattgtggtcactgcggtttcactactgtaccttttggaacatgctaacgcagcaacttactccgttacaggacctgcgggatggaccttcaacactaatgcttgacccaatggaaaaagattcagagctggtgatatcctaatcttcaactatgactcatcgacccacaatgtggttgctgtggacagaagtggatacaac

SEQ ID NO: 22632 - DNA, 433 bp, Glycine max
gagttctattaattttaattctgcaatgattagagacttcaggtttctaacttcctttttttttccccttacccgtgctctttagatatgcaaggtctaaaatgaggaagcgttaggagaaacggtagctagacagtttccggataatttggttgttcgatacagatgattcgcatcatgtaagaaagattgggaatttgtccaattttgcaaaatgttgttttggttatgcctagaatgctagaaccatgaattgtgtaggaatttaatttattcatatttttgcaatatgtttgtccctatctgcagttaaacttctcggcatatatttctatggtaaatggtaaccacatcatttaatattttatgttttaaagggtaaattactcttagactcttgattatgttgtctcttgctcttaaacaattacac

SEQ ID NO: 22633 - DNA, 428 bp, Glycine max
gaaattcaagaaattttttaaacttgacatatctgctatcaccttttccgtttcttgcgattcgacgatggccgatcaaaagctttcagaaccggcgcttaaacgtgagcagcttgatgaattcgtgagtagtctatattttgaacaacgaattcttgaactccgacttcttcaagacctcgagaacaatgatgaatgtaggaaaaatgggagcctgaaaaggttaaatgaccagagtgatgtctgtggatttagaagttgcttcaaaaatcattatgattcgcttccgaatcagaggtgcttgaggaatcgagaagaagtgattcaggagacgatggaaatggagttggaaaatatgatggaactgggcaccctcaagggcaagaaaacatattcttttaagaatggtgcaagaagtgcgttgaacc

SEQ ID NO: 22634 - DNA, 189 bp, Glycine max
gactcactgactcggtgactgactcgctcgctcgtcgttgacactattcaaattaaaaacctcttcctttcactctctccatcctcttcatctttctccttctctttttcactttgacggtttctagagagagatagtttgttatctacagataatgctcccttctccttttcatgactcttgcttaca

SEQ ID NO: 22635 - DNA, 423 bp, Glycine max
  modified_base (301)..(301): a, c, g, t, unknown, or other
ggcgagggtaaggtcgcgttgtgttgcgtcgtgtcgtgcgctgttcctctgtttgtggtttttgtgttcagaccgaaccctaactccgcatcgcaaccatgtcgaccaagcaaggtggaaaagctaagcctttgaagaaacccaagtctgataagaaggattacgacgagattgatgtggctaacattcagaagaaaaaggaagaggagaaggcgctaaaggagttgaaagccaaggcgcaacagaagggaagctttggaagttctgggctcaagaaaagtggaaagaaataagggctctntatcatgattgtatgcattcaatattgagccctgtaattacagttgctaccatgataacttctcttattattgtggcctaacttattgctaatgtgtactgaactgaagtatgtcgtgatgt

SEQ ID NO: 22636 - DNA, 332 bp, Glycine max
gatcgttttgcatcgcgttagggtttgcagattgtcaatttcgcttcttttcgctacctttctcgcatagaatctcgcaattcctccgttgttccgtttccgcaactcatcaattcgaaagttattgcttcacaaggaggtagagcatgtaataaaggaaaaaaatggaggtcgaggtgccaatctcgcttgatttgaataatcaacttcagccagagaccgtagtttcagttcaaaatggggatcctggtgtttcctcttctgttgcaaatgctgttaacccgcagcagccagctacaaaaaaaccgaccaggcagtgggctgcatggact

SEQ ID NO: 22637 - DNA, 281 bp, Glycine max
gatatgtttatataatttcaaagaccccatattcatgcgggtgctttgcatattatggttgctattaataattgcaacagcaatctgataggtagatgcccctttgggaaatagttgccgttgattgagaaaaggctgtagaccaatcctgttgttgaaagttagttccactctaaacaagccttgatcgatagtagaaaacaatgaagaacttatgtgagaatggctcttgtcctacccatttaacatcttatgctcttggatgctcatcatgggggact

SEQ ID NO: 22638 - DNA, 330 bp, Glycine max
gaagaggatacttgttggtgcggcgcacctaaaaagtatgcctcttcctctgcgtcgtcgtcttcaaactcgtcttcctcgtcataataatcctcctcatctccaaactcaaaccctccaaagcactcttcttccaactcctccacatgatcatcattatcttcttcttcttcttcttggtgattggagaaagtgaggacaaggcgaccatcttggcgctgaatgctgaaattgttgtgagaaggaacagaaacagcttcgagaaccaaccttccattgtcacggtgggaacgcatgtgagttactgaagaacttgcttggtgatgaaag

SEQ ID NO: 22639 - DNA, 465 bp, Glycine max
cccacgcgttcgcgacagaagggtcagctgctcgagtcaaggtctcttctatcaaagcaatgggaaagtgccaaagctcaacaggaccaaattaatttgaaagtctcagaaggtaagacacaatttgaaaagatcaattctgagattgatgaactagagcacaagttatgtgctttggttgtgactagagacaagctaaagagggccttggactcttgtgatgctgaaaataacaagctaaagactcaggttgcaaaatgggtgccagaatgcaagagtatcatcacagctttgaaggagtctgagacttattacaaagtggccctaaccgatcagaggaaaaccgatgatgaatgggctgatctgaataagacctttgtagctaataagaattgaatcatcttaatctatgcatatcttgacattacgtcttagccatatgctcttgtttcaccattttcatta

SEQ ID NO: 22640 - DNA, 439 bp, Glycine max
gaatatgggaatacctcaaacgcgtgagaagaagcgtggaagaatgaattgcggagaagaggaggaagtggaaggagacatggtgggagaaaagggttgcgcagtgcgaaatcggacaatggcttttggaaaccctaagggggtgaaaaaattgttatatagtgagaagagggagaggaagaaaggaaggtggggagggtacgatacgaagaagacgtagatgacgtggatggagagggaccgtgtgataatggggggcagcgaatagacctgaaactcccatcgtaccaaacagggatgaacgcaacacaacgcagagaaagaggccgcaaggaagaaaagtgagaaaaaaagggtttggttttagagagagagagacgatgactgagtgagagtgagtgagccaaggaacgagcgatgcaagtgagccagaccgttg

SEQ ID NO: 22641 - DNA, 422 bp, Glycine max
atcaaaacctgtggtactacaaagctactgcttgcaatcccacccatattgaaatttgctgaaatgctttccctcaatgttagatctgtgaattacaccaggggaagtttcatctttcccggtgctcagccctatccccatcgcaacttttctgaggaagttgctattcttgatggctactttggcaagcttagtgcaggaagcaatgcttatattttgggtggccaagacaaatcacagaactggcatgtctactctgtgtctgcagattctgtaactccatgcgacaatgtttacactctagagatgtgcatgactggcctggatagagagaaagcacaggttttctacaaagaacaatctgcttcagctgccattatgactgttaattctggcattagaaaaattctttcagattctga

SEQ ID NO: 22642 - DNA, 336 bp, Glycine max
atactaagaacacaatcatcaggaacggactctggataaactcagtcacttatgctcgcattctactggtgctggtgctggtgctggtgctggcattagcgttatcgtcagtactaatgtgggtcgtgatgctggtgctcattctagtgctaatggtagtactggcgctggtacttcacatagcgttcacattcttatcttgattaaaccaatccttttgaacttgatatcacgttaaatgactcattgcccgaaggttcaatatgtaacctgttattgattagttgttgttcaatgttcacttctcaacttttgttaactgatttgtagtgattt

SEQ ID NO: 22643 - DNA, 125 bp, Glycine max
ggaacctttgcattctattcattcaagattcaggaagtgcgttttggaagcagagaccgaaatacttcgagatggcccgtccaaagcaaactgctcgtaagtcaactggaggaaaagctcccagg

SEQ ID NO: 22644 - DNA, 204 bp, Glycine max
tatgggggaaccttagcattctattcattcagggttcagggagtactttgggtaagcagataccaatatacttcgacatggcccgtgcaaagcaaactgctcgtcagtcaactgcaggaaaatctgccaacccgcagcttgcaaccaaagctgcacgtaagtctacaccaacaactgataaagtgaagaagcctcatctctatc

SEQ ID NO: 22645 - DNA, 396 bp, Glycine max
gcgagaatacgacaaaacgggaataatacaacagaaaataatatactacagaggtttgtggtataattaaaaaattagttgatattttcagagataggagacaaaatttacatggatggtaagtactgcttgggctgctttaatggtagttgtgccattttctatttccatcgtaacatgggtaagaaatgtactatacggatactcaaaattgacttaacggatcaaagtacccattctgatatctacttgggtcattcaatatcttaactctaactattgtattaaaatatttcatttatactaattaattgagtccaaatatacactattataatatacatctgcattttaggttgctattatattctagtagtgtaataataacctatgtat

SEQ ID NO: 22646 - DNA, 459 bp, Glycine max
cagacgacagatgggggaatcggcggaagaatacttgtgaggcgagggtaaggtcccgtagtgttgcgtcgtgtcctgcgctgatcctctgtttctcgtttttgtgttcagaccgaaccctagctccgcatcgcaaccatgtcgaccaagcaaggtggaaaagctaagcctttgaagaaacccaagtctgataagaaggattacgacgaggtatctcgttgaaatcccctttggagttatcttgttttttttaatattctatttatcgtggtcaaagattagaatttccatgcttgatggacttcggttttagaattggcaatcagtttaaggaagagataacacaggattgagatctttaggctcggttgaattattaggtgttttcaatatgaagctttgcaaaggtttactacataatcatttaatgtatattgctactattcttgctgctgcaat

SEQ ID NO: 22647 - DNA, 415 bp, Glycine max
ggttggcatttggcattgcgtacttttttaatccaagttccacagacaccaacaacgctttagctctctcgttctatccgtcaccgctaccggcgatatacatctgaacccgttccagacactagatctcatatatccaaatggataacctaatctattaggtcaacaaagtgcagagacgcttgtaccgtcttatgcgaccacggtgaaaacagtgcactccccacactatgggactctgttaccgacattgacgttatcagaggtcaatactcatgaaagtacctcgtcttggatagcactgtccttaaatatttcttacgttgtggatcaagccttgttgcgctacaaccttttgtgttgcaaatgaacatgatttactggggaagcaacgtgtacgcagagttactgcatc

SEQ ID NO: 22648 - DNA, 394 bp, Glycine max
gatggacaatctttgtatgtgcggccatcaacactgctttgatcatacttcactttgtaacgtgacgctccacatgtagggcagctgcgcatttcagcaaattgatgtctatacaaaatacaatcattagggcaagcatgtattttgtggtattccatacccacagggcataatatcttttttgcctcataatggttcttgggtaatgtgttatctacaggaagcatattcttcaataacaaaagtaattcgttgaagcttttgtcactccacccaaatcttgctttcaaattcaccaaacctaagaccgctgataaccgtgtgtactttgtgcatcccatatacaatggagtcgtagaatcaatatctaagctttcatagtaaggtgaatgtg

SEQ ID NO: 22649 - DNA, 226 bp, Glycine max
ccaaatccatcatcatcttaaccactaatcaaatcacttaaaccacatccacacatatccaccaccctcattctccttcctcacccaaatacacataacctcacttctatttaactattaccacatctcctttccactactcacttaccacctcaaaaactcacttatctatttccctcaacaacatattcaccatctaattcttaatccaatcataaaactaacc

SEQ ID NO: 22650 - DNA, 398 bp, Glycine max
tcaattgcttctacaaggtatggagacttttttggtggaaaaactgccagcttgtgtgtgcgtcgtgctgtttattatgatcctgagacaggaaaggaagatccttccaagaatggcatatgtagcaattttttgtgtaattcaaagcctggagacaaaattcagatcacaggcccttcagggaagataatgcttttacccgaggatgacccaaatgctacccatataatgattgccaccggtacaggtgttgctccattcagaggctatctacgccgaatgttcctggaatcagtccctacatacaagtttggtggactagcatggcttttccttggagttgccaacactgacagtcttctctatgatgaagaattcagcaaatacctcaatgacta

SEQ ID NO: 22651 - DNA, 444 bp, Glycine max
  modified_base (287)..(287): a, c, g, t, unknown, or other
tcgtgaagtacatgaagcaattttcaatgaacaggtgtttgatctggtgaatcgagaagcatttaacacagttgcaggtgtcagtgtgactggaatacgggaaaattatttacaattaagcttaggtcaagaaacctctgtgtacttaacactagtgtccaatagtcaagatcattctacagttgaaggtgaactcaccgataacgcagaaaatgcaattttacctctggaatcatctgatggaatgaagcgtgaagccaaacagaacacctctaacaaagggcagntttctaattccatctgctatgagatttatattcaacagatttttcatgaatatatatttggaaaaggtggtgataaaccaagttcctctggaaatcgtttgtctggcatacaggcaaaggatggatccagtcttcttggtcatttttttaaatcttt

SEQ ID NO: 22652 - DNA, 440 bp, Glycine max
gatgagataatggctcgcagtatatcgtacataacggggtcgcagcttctctctctcagacgccatccaagcatcgccgtcgtcgatgtaagggacgatgagaggagctacgacggacacatatcggggtctcttcattacgcaagcgacactttctccgataacatctcaaatcccattcaggcagttaaaggcaaagacactctcgtcttccactgcgctctaagtcaggttcgtggcccaacttgtgctaggaggcttgtcaattatcttgaggagaacaaggaagatactgggataaagaacattatggtcttggaacgtggcttcaatgggtgggaagcttctggtagacccgtttgccgctgcaccaatattccttgcaaaggagagttgtctccttaatcaaagacgtatttgtggttggatggaattatgga

SEQ ID NO: 22653 - DNA, 363 bp, Glycine max
tacgtagtaaataattaagtatgattactactaggaaatggtacttgtacttatgcacctctactctacacttaacacttcccttttggagttctatttattaggtaaaccaagtctttataattagctggtcaattgattactataaaaaagcttcgtccatttctctctccttatgtgtgatgtgataatcccatgctagatgctacacaagtcaaatgaaccaaaacaaatcaaagactattgcttttttcggtgattccgaaagctactacccaatcttattctgcctgctattaagtagtacgtaaatacccttgtgaaaatcaaagatgcttacatgtttgaattattatttctaga

SEQ ID NO: 22654 - DNA, 426 bp, Glycine max
ggccatgtaaaggtgagtgtggaggaggttagagatgcagatgctccagttcctgtacccactaatgaggtttccttagtggggcaggcacttcacaccttccttgcttggccgacacatctggtcaagtctttatcacagtaggtacttattgtccttactatatgtttcttcttttcaaattaggctatttaactttgtttcatgaataggtagttgtgtctccgccaaaaccaccttcgaagcccgatccggaggtcgttgatccgctttatctgatgacattgaccatcccagagcttttcttgaggccttatcaggttagatgggatgccaccgtgttcacggtcgttaatccagatttccccctatacataaagcacgaagacctctccgaaatcgtacacggtggtcaatgtctcaaca

SEQ ID NO: 22655 - DNA, 383 bp, Glycine max
acattccaacaagtaatagaaggagtaatagcctggattgtcattaatatgaattttgaaaccgccatcaactaagcacaagtgtatcacaaagacaactctggtgtgtgcttgctacatttcactttacatgagttgctgaaattagttgctaagatacaagattattgttttagtaatcattggtattagtggaattgtatagggaaggtagctttactctatgctttctagatctcaatttccttcagcaatatgttttgcagtctcgagagtgtcaacctatcatttcttaaagacaaaagttagtagcttctattaataggtactgttgcaatatagacccatccaattcaaaagattttcgtctgcacatgtgtact

SEQ ID NO: 22656 - DNA, 421 bp, Glycine max
ggattgggaacgttatatacatgaactgctgaggatccagataccccagaactacaagatcaaagaaagcatcttcagcacctgtcagattctgtttcaactgattgtgatggtatgaatgaaaatacttctcaccgaattgctagattttcctgctctggttcaaatttggaaggtaaatttgatttagcagatttcaagtctcttgatcgacttctcactgaaaaggttggctggcaggatcaagccatatgtgctatcagtcaaactttgtccctttgtaaatctggtgcaggaaagcgtagaggctcaaatggtagagcagacatatggttggctttccttggacccgatagacttggaaaaaggaaaattgcttcagttcttgcagagactatatttggaaaccctgaaagcctaa

SEQ ID NO: 22657 - DNA, 255 bp, Glycine max
gatcaacaactacaacttgagacacatgactcacttaatctgcttaattctgatccttgcagctctcattctatcccctcaaattcttgcaaactatgagaatcccccactgtacaagcctaccactgataaaccaccactttataagcccccagttgacaatcctactgtctacaaaccttcagctgaaaaccccccaatctataatcctccaatctagaacccaccagcttacaatcccccagttgataaacc

SEQ ID NO: 22658 - DNA, 231 bp, Glycine max
gctctaaaattcagttgcgtgatggttctatagggaacctagatgataatgcggggaaccttgtattgcaagctctccatgaaatgtcaactagcgcattgcgctgattgggatcttcatacatggatttactcctcaaattatgaaatctacaatggtaattaagttcaatcttctcaactgcatttgcttaatctcttcaactgtctattaatcgaatgatcacttaaa

SEQ ID NO: 22659 - DNA, 447 bp, Glycine max
agaatacgacagaagggcaagaagtgcattgagatgttctttgaaattgctgaaaagaaggaagactataacaggttttatgaagccttctctaagaacctgaaacttggtattcatgaggattctcagaacaagacaaagctagctgaattgctcaggtatcactccactaagagtggtgatgagatgaccagcctcaaggactatgttaccaggatgaaggaaggacagaatgacatctactacattactggtgaaagcaagaaagctgtcgagaattcccctttccttgaaaagcttaagaagaagggatacgaggttctctacatggttgatgctattgatgagtatgctgttggccagcttaaggaatttgacggaaagaagttggtctctgctaccaatgaaggcctaaaacttgatgagagcgaagacgagtagaaaaag

SEQ ID NO: 22660 - DNA, 362 bp, Glycine max
gactcgtggcagttgtgtgacagagaaattaagctagagcttcatagtttcttcttcttttctcaccttccttctctcccttcagacaaagggacaaaaaatcagtgtgtgagagagagagagagaaattccaaaaccatgtcccacagtcatctaagtttcgcctttgggattctaggtaacattgcctccttcgtgtgctttctggcaccactaccaacattttatagagtttgtaagaagaaatcaaccgaagggttccaatcaattccatatgtggctgcactcttcagtgcaatgctttggatcttttatgcctatgtgaagaccggagaaacgcttcttatcaccatcaatgcatt

SEQ ID NO: 22661 - DNA, 416 bp, Glycine max
tgggtttactgaaaaaagatatacagccttggcaatgacgccgttctgcggaatagatgactcatgctcctttaggttccttaaattccgtgggtggcgtagctacagagattaatgcagtcaattatgtttctcctagaagttggttagctacttctcattttgttctaggattcttcctatttgtaggccatttatggcacgcggtaagagctcgcgcagctgccgcacgatttgaaaaaggaattgatcgagattttgaaccagttcttttcatgactcctcttaattgagacatgagatcctatgaagtagaaatcactcttatattactataaatattactatcaatattgggttgaattgagcggatcgatttaaataagaacttctgttacttttttcttagagtctat

SEQ ID NO: 22662 - DNA, 434 bp, Glycine max
gatgtctttgctgacttcttgttaaggttgtcggtgatgcaggtgttgttggttttgtgctaagagaagaagctgttgggaaggtttctttcgtcttttgatgatgatgtcacacaacttaacggggcagcttgtgggtgcagagatacatggctttcacacgttggatgatttggatgttagtaatactatggaggaagcaaaaagcagatggcttcgtcccaatgagattcatgccatactctgtaatcacaaatatttcaagatcaatgccaagctagtaaatttgcccaaaagtggtactattgtactatttgaccgcaagatgcttaggaacttcagaaaagatgggcacaattggaaaaagaaaaccgatggaaaaactgttaaagaagcccatgaacacttaaaagttggcaatgaagaaaggatcc

SEQ ID NO: 22663 - DNA, 410 bp, Glycine max
ggattcagttagtaaagttggggatctgatctagcttgctttgatctttggtgaatcaatccctcttacttatttcttagtattagcgatgctcgtgtgtgtttctgtagttaattgatatcacgtcacgatgaataaagtagggtggagtttcaagagcttcaaaaccttattggttgtggcttctataaccttccctattttactcacacttactctcgtccaccaaaacaacaactctgtttctgatctctttcaaggatttcacgtattgtctggaagaaccctcaatactaatgctactgctattctctcgaaagatcatgatattattagagagtcaactctaggtccaaagaaccattcatttgaaagatggaagaatgctctggtcctatctactactacca

SEQ ID NO: 22664 - DNA, 364 bp, Glycine max
attccaagaaccaccttattaaggcccacgaaatgagccacttcccaaccctgaaatcttgccaattttccatcaaggtttaatcctagacaatcctaagtcaacctttgtgcaatgaatgttcatatcatgaatggtaagttgagcttagcgcagaaactaaaaggtgcttttaagaatgacgtagttctaagaggttcaagttgttcacaactttgtgggcatcaacactctcatgtattacagcctaaccattgttcagtttgctggaattgccttcaactccacaggtcttgcactctctcttattacatctggtctaaatgcgcttggcactatcttgagtatggttttcattgataga

SEQ ID NO: 22665 - DNA, 421 bp, Glycine max
cactagtgttgatgctggcaagctcttctgtggctataaatgggatgaaatttgtgccggaattggacgagagatcggaactgagtaatgaatctgatgataatgatcaccatcaaatccctcgaaaggagtatggaaaacctggatctggccaacgtgaagtggatgaggggtttcgtcacgtctacaccgttggcaatgactatggcacaccttgccagggaggaaattaaatattaaatgttattaattagtctatatattaattaatatatgcattattatagctgtatatatgtatgcatatgtcttgcatagtttgatgtgatgagtcatgaatgctagctgatgagatggtgttggtaatttggaaattcattgtaagtataattagttagactaatactttactacttcacat

SEQ ID NO: 22666 - DNA, 421 bp, Glycine max
ggttctagtgtgtgattgtttgttgttgtaactggttcttcttcttttgttgttctgtgtttgtgtttgttttttctctcacctgaaaatgtcttgctgcggtggtaactgtggttgcggaagctcctgcaagtgctgcaacggctgctgaggctgcaagatgtacccagacttgagctacactgagtcaaccaccaccgagaccttggtcatgggagtggcacctgttaaggctcaatttgagggtgctgaaatgggtgttcccgctgataactattgctgcaaatgtggaccaaactgctcctgcaacccctgcacttgcaagtgaggtgttgggagagcaagcttcaatcatagatagcccttaattaggaataatgataaactattaatgtgtagctaaaaacttatgtattatgtc

SEQ ID NO: 22667 - DNA, 419 bp, Glycine max
  modified_base (409)..(409): a, c, g, t, unknown, or other
ggaaacgagtggaatgcgagccgagcaatgtacatgtggtcttcaatttcattttcgacctctgttctcataaaccctagaaaaattcaaactcttgggattccatcaacaacgatgtcttgggcatgcaaaaaatgcacctttgtgaaccccccttctcaaaaaggggaatgcgaaatctgcttttcccctgcgtccccgtcggcatcgggtccttcttcgtcttcgtcgcccccaaaatggtcgtgcaaggcctgcactttcttaaacccttacaacaacctctcttgcgaggtctgcggcactcgatgcccccgtctctccctttctaatctcaccgacttgaatgatgccaccgatcacgaatcttctgtgggttctgttttcttccctcttcaaacctgcaaanagagaaaggc

SEQ ID NO: 22668 - DNA, 296 bp, Glycine max
caaggatgaaaatgagactaaggatttttatgaaatggagggagcaaagagtcatctccatttttttgaaatggatcttcttgacatcgactccattgccgctgccataaagggttgttccggcgtaatccaccttgcatgtcctaacatcattggtcaagtcgaagatcccgagaaacagatattggaaccggcgataaaaggaacggttaatgtgttgaaggcggcgaatgaagcatgggtgtagcgcgtggtggcgacttcatcgatttcgtcgattatgccaagtcctaatt

SEQ ID NO: 22669 - DNA, 430 bp, Glycine max
gtcccttaacgcaaactgtcatcttgtcattcaccgagaaagtcgtactgattcctcttcatctttcgttaaaacgagtacttttcgttcttgatctgttggttacgatgtcgtattcaaggagatctaggtattctccttctccttctccttctccatacaagcgatacggtaggtctgtgtccaggtctctctcaatatcaagatccagaagccgttcaaggagtttatcaagagatgcagaaaatccaggaaacaatttgtatgtgacaggattgtctcctaggattaccaagagagaactggagaaacattttgctgctgaaggaaaagtgatagatgtccatctggtagttgatccttggacaagggaatcccgtgggtttggctttgtgacaatggagactcttgaagaggctgaacgatgtgt

SEQ ID NO: 22670 - DNA, 379 bp, Glycine max
  modified_base (19)..(19): a, c, g, t, unknown, or other
taggtttgattattacgtnttggctgttcttgttggatatggaggtttcggtgattggaagctctcaagcgaatctgggagcgtcggaattggcatctagggaagttggattttgcaatcttaagaacaatttaagggctttgaatgatagagttagttttggtaggaataatatacggtgggagaaggctgggattagcttcactttgagggctcttcagactgaacccgttagagaggagaagaagccttctgggattggaacaagatccaaaaatggcaaatggtttaagattatttgtggggcttcccctagatgcagtttcttatgcctgcaattcaataaaccatgctagagcaatttcagctggcctaaaag

SEQ ID NO: 22671 - DNA, 387 bp, Glycine max
cggacataattaaactttattaaactcatgaaactccgttctagcgtacaattcggaacagcaaccatcagtcatctaccactatatattactcctcagctcttatatttagacgcacacaattatacagctctagagaatcaagacaattattatacccattaagatgaaaccgtacctacgtgcaatgttcctgttattccttatccttctcgatcaatttatttcagcgagtgctggtggtacttaatagtgaactattcaaatttattggtctaccatttaaagcactaagaaagataccgaacaagatagaaaatttggagaggttaaataaattgactgagaggttcaagaaagtgatgaacgcctgtgacaatttacaac

SEQ ID NO: 22672 - DNA, 295 bp, Glycine max
gacactcaaatccaattccactgccaccggccaaaacgcgcaacacgttgtaattaaaacgacaccgaaactaatgggcgtcttcagcgaaaacccgaatccggacccggttgtgatccgccaggtttgggcttcaaatctcgaatccgaattccaactcatccgcgaactcatcgaccactatccttttatctcgatggacacagaattccccggtgttgttttccgaccacacctggaccccacaaaaccctacaaccaccgcaacaacatatcgaaccgtcacttcgaccac

SEQ ID NO: 22673 - DNA, 238 bp, Glycine max
aactcgagcgaccacacttcataagggaacttttaaatcttacatgcgtcaccccatcttgggtaaatggggtacgttttgcggcacaatgtagattcgtacctattatcgtttatatctcatatctaatatcccaatccgtaaattattcatcgaccgctatcaacataattcgaactgaattagtgacgtctattcctttatagtcctcactatattaatctttaaagtctcccta

SEQ ID NO: 22674 - DNA, 349 bp, Glycine max
aacccattgagcttagatgctttactagtgcttgtggcatggtttttccatttttcccttaaataaattctggaagctatacattaacaacttcttgcagataccagaatgcagactggagactacgtccacttcctgatgagatgataaggtatgattaacttttaactagtcagatttgacacttgattcatcatttttttcaccctttgtcttctttttgcactattggattttaaatgtgtttggtttcctaaaatatactggagctaattaatgagtattctagttttgcgtgattgtttagcatactaggaatctatagaatctggtaatccttgttttgatt

SEQ ID NO: 22675 - DNA, 330 bp, Glycine max
ttggaactgcctgaactagatgttgagtgtgggaactcggggttagcagggttctcagtcaattctcttggacaagatgccttgtctttcttcaaaaagatgctactactcggcttcttcccttctgagttttcttttgctaccgtaatgagctcttgtgcaaaactctcttccttatttcaaggtcaacagttttatgctcagatcgtaaaagatggtattctagattacatatatttgtggagttctcttatagaaatgtattgttaatgtgtgtatttaaacagtgcaagatgtttctttgacgtgatgcctgttataaatactgat

SEQ ID NO: 22676 - DNA, 348 bp, Glycine max
gaacgaggggcaccctgacaagctctgtgaccaggtcttcgatgctgtgctcgatgcatgcttggagcaggaccctgacagcaaggttgcctgtgaaacctgcaccaagaccaacatggtgatggttttcggagagatcacaaccaaggccaacgtggactatgagaagattgtgcgtgacacatgcaggaacattggttttgtctctgatgatgtcggtcttgatgctgacaactgcaaggtcctcgtcaacattgagcaacagaatgctgatataactcaaagtgtgcacggtcaccttacaaagaggcctgatgagattggtgctggtgaccaaggtcatatgtt

SEQ ID NO: 22677 - DNA, 340 bp, Glycine max
ttgggaactataaagaaactaaggtaagaatgccctactagcaactgacttccttcaggtatgattcgttcgtgacctataagtgagcaagtcttcgcccgttgccattcaatagcaaaagctgtagttactacactcttctttctctgattatctatcgtgctgtcaagaagcaaggttacgcagtcctctacctatacgtacctctaataaggaagctatttcaatcctctccttgaagtcaagcaattgaagacttttgtatgttctcataagtttgttcataagcttcagacaaagtcaccaaaaaggaaaacattttcattgaaaggctgtcttg

SEQ ID NO: 22678 - DNA, 337 bp, Glycine max
ggattacagacagtgagaaatgatgatgaagcaggtgttccttcaggttctcgtgggtctctatgtcacatttgagcatagtaagctactccaccacgtagaatccgatggtggatttgtaaaaacaagatgagtgcagcttatgctgaatgggagtccctactatgctaatggctttaatgcctattggcttatgtaccttgcctctgatccttaccagagaaacaaaatctcatcggtatatcaacacgcttcaaatcatggactcaacattgccagaacttgggccttcaatgatggtggatatcaacccctacaatactcttactgatcctac

SEQ ID NO: 22679 - DNA, 426 bp, Glycine max
ggaaaaacaaccccatcttgccttctgatccttgcgcatagagccttggctcgtttctgggccaagttcattgatgacaagtgcgtggctctagcagcgaaatctgtttttattgttgatgagaaagagaaagagaaggcaaaagaagaattatttgaggctctgaattatcttgagaatgagttgaagggaaagttttttggtggagatgagtttggctttgtggatattgctgctgtgatcatacctataattcaagagatagcagggttgcaattgttcccaagtgagaaattcccaaagctctccaaatggagccaagacttttacaaccattcacttgttaaccaagttatgcctcctaaggaccaactttttgcctatttcaaggctcgggctcaaagcctcgctgctaaaagaaagaat

SEQ ID NO: 22680 - DNA, 441 bp, Glycine max
  modified_base (338)..(338): a, c, g, t, unknown, or other
agccaatatcataaaaagtcttcactttctacgagtattttataaaaaaacggtcttagaaaaaattatccttctaagacggttcttaactaaaaattatcttagaaagatacctttttaaaacgattcttagttaaaaaccatcttaaaatggtagattttttaaaatggtttttcagagaaccgtcttagaatatatattttaaaaaaatatatatttggaaattctaagacggttttttccaaaaaaaattgtcttaaaatatgtacattctaagaatgtttttatgtattttttttaaaaaaataaaatatattttaggattctaagatggttntaggattctaagatatttcaagatcctaaaatatattttaggattctaagaaaacctacattttaagacgattttttaagaaaccatcttagaaatgattttt

SEQ ID NO: 22681 - DNA, 478 bp, Glycine max
tgcacgtactcggtctcggaatttcgacgcgatcgcgtcacgtacgtgcttgtcgagaagatcgacatgaagagggacattttgggttatagtaatgacgtgagagtttgaagagtggaaagctcattagagccagagttgtgtagagatgctaaaagtttcggggtatacatgtaaccagatccaacgtgatgactcttggtcggaatggacgtcgctagaaagggctttaatactatgctcgaatacttggccatcaaattaatctggatagcattcagattgagagcttgtatcccaaagaaatggggcctggcgtaatgactgttgaagacttcttgaaccgtggactcttgttgcttgataaagatattcaagatagagttgagaaggcagcttcaaatggaaatgtgttgcgctatgtctgtgtgatcatgggttcaaggtgtgaaagtggtattcaagagcttccaaaaga

SEQ ID NO: 22682 - DNA, 259 bp, Glycine max
gatccacacgctcacaataacacactgtcaccgttccgttcggttttcctctgattttggtttctttctttcaaatccccgcttcgtggaaatcccgaaccagaaaccatgcttctccgaaccgctgctgcttctgcttcgtccctctccctcttcagcccgaacgccgaacctccccgttcggttcccgctcgtggattggtggttcgcgcagcgaaaggatccacgaaccaccgtgccctgaccggaatgatttttg

SEQ ID NO: 22683 - DNA, 424 bp, Glycine max
aagacgacagaagggggcagttcaattccaatatattccattctctctgtgtatttccctagctctccctgcaagatgcagatcttcggcaagaccctcaccggcaagaccatcacccttgaggtggaaagctctgacaccatcgacaacgtcaaggccaagatccaggacaaggaaggaatccccccggaccagcaacgtctcattttcgccggaaagcaacttgaggacggccgtacccttgctgactacaacattcagaaggagagtactcttcacctcgtcctccgtctacgtggtggcatgcaaatcttcgttaagacactcaccggcaagaccataaccctagaggttgaaagctccgacaccatcgataacgtcaaggccaagatccaggacaaggagggtattcccccggaccagc

SEQ ID NO: 22684 - DNA, 391 bp, Glycine max
gaccacaaagtgtaacttgagtgattagatctgatgagtgcagaaagaaggaaggattgttggtgatcgatcatcgatcatcgatcatcgatggcgtctgctagccttggaagtggtggcgtgggcagttccaggtctgttaatggtggcttcaggggttcttccagttccgtcgattggcttggcagagagatgcttgagatgtctttgagagaccacaatgactattgagatagtgagcctgacatcattgatggtttgggtgctgagacttaatacgtgataatagctatcgtttgtggccgaaatggtcaatctaagcagaatgttagttatatttctgagcatgttttgggaacaggctcttttggggttgttttcaagcctaatg

SEQ ID NO: 22685 - DNA, 161 bp, Glycine max
gactgctcatggtgctccgaaatatgggtgcctggctcaattgaattgaagcatgacttacaatagtccatccccgcgtttcgggaacctatgctgggccaacatcgtgagaaaagcggctacggccattgctctcgctccgaacgccactctatgcgcca

SEQ ID NO: 22686 - DNA, 342 bp, Glycine max
gccaaatggagatggataacaagcaaggatctgaagagaagttaaatgctagatctttaattaaacgaattgttggtacggatgttcgatccgtgcaagaggatcaaaaagagcaagatattaaaggcttggaagcagaagttctggccttagaagagctttcgaagcaattgttcttagagatctatgaacttcgtcaagcaaacgaagctgcatgcttattctcgaacttggagaggacacatgcataatctacttagctatgctttgtgtgaatattgtgtgtataaaatgatcaagtcattgcaaagtgttgttttcaaacaagatggttctgttgat

SEQ ID NO: 22687 - DNA, 436 bp, Glycine max
gcaacacagagccatttcagtgtggcaaatgccaaccctcttcagtcccagatgaattctctttactcccaaccttttgctcactacaacacacagccgcttaacatgcaggctacccaacagcagcctcaggctcagaactcccaaaatcagaaaatccactataacgtttgaggaactttaggagcttaatgtggctttgatgggttatagtctttgcaatcagcaactgggtttgtgcctgtcttttgtgctgaaatacgtttgcatgtgacatccgaaggattgccttgggatagctatatcgaggaattggtatatatgatttcagttgatggaagtttggggcattacgaagatacaagcaggcgcatcccgggctgaaaattgataagataaccccctttaccgtactgaagttttgtattggttggga

SEQ ID NO: 22688 - DNA, 353 bp, Glycine max
gggtagttgactagttgcaagttagtgagttcacgtattaatctcttttggcgtgctgcttgttggacataggataaacttttagtgccacaataacaccctatctctctctctttctctgactgcctctccctttgattcaatttccccctgcttattctggaacaatgtctgataaaaccacagctgataaccttattgaaaatcttgtggacacatttgttgataagaaaaaatctgtatcattctttgaagatgataagtcagactcagtgagttctcagatcaatagactgtttggacgccagaaacccgtgcaccatggtttaaggggttgaaaaatttgcgatgtc

SEQ ID NO: 22689 - DNA, 367 bp, Glycine max
tggcggttcctgcaattggtcaaatcccgaaattatcatgtaccttgctgcgaattgcgcacaccattctttgctttccttcgaaactctacgaaatcccactaccgcgctctctatctctcataaaggcgccaacgtttatttcgcgtaactgctctgcacctaaaacttatatctccattctacaacttcatttattggaactggaactctaccctttcaaagctgttaaattttcgattcgcgatggacaaatacgagctcgtcaaggatataagatctgggaatttatgggaggccaggctcatgcgttacaaagacacacaagagcttggtgtcatgaaatacattgaacggtgtcacaaga

SEQ ID NO: 22690 - DNA, 432 bp, Glycine max
ggtggcagagagcgaacccaaaactagagctaccgtcccttcaaaccttccactcttctctccttttccaatcaagggaataatatttcttagagatattccgaaaccatggctcacgccaatcctatgatttttgttgttggaattctaggtaaccttgtctccttctgttgctttctagcaccagtaccaacattctatcgagtttgtaagaagaaaaccacggaaggtttccaatcacttccttacgtggctgcactcttcacttcaatgctttggatattttatgcttacataaagacgggcgaaatacttctcatcaccattaacgcattcggttgtttcatagagacagtttaccttgtcatctatatcacttattgccccaagaaagctaggttctttaccttcaagatgattttcttgttcaac

SEQ ID NO: 22691 - DNA, 406 bp, Glycine max
tattgctatggaacgagaagtagttgggggttggcgcaaagaaaaactggaagaggtcaagtcagctcttgtgaaggggacttccaattcaaccatcccccatgaagaagctggtatgctagtaagagctttggagtctgattgggctgtgctctgtgaagagattggcctctggatacctgctcaagtttctaataaagaacatgacgacaaacctgagggtgcagaggagtttgaggaggaggtccttcctggcagacccgtttcacccgagtgccatgctgaactgcacacagattatgatggcgccgcagtaagatggggtcttaccttccacaaagatagtgcaactgattgctgtcaggcttgcttggaccatgcgaaacatgccaaagaatgggaaaag

SEQ ID NO: 22692 - DNA, 422 bp, Glycine max
ctattttgttgtgcaaaactacgacgtctgtagtttagtacttttgatacttcatccattttttcttttttttacaagtttcacttctttggttttcgccagttgccggtcagatagcaagatcgctcggatgaaattagcgaccttatctttacttagcttttcattttcaataaaagataagtaaagaggggcaactattagaccctaatttcatccatgaactatcattcattgatgttttgattctcgctaatcgaaaggtgttgttcgacaccaatttctacacaaggcgtgagatcgttcgacattttggtcaaggatgcaaaaaatacccaagagaaggggcaaaaaggtcatttcaggcaattttctggaccctggcttgcccaggctagcctttggcttgcctgggccccaaa

SEQ ID NO: 22693 - DNA, 331 bp, Glycine max
gaagtcgaactaccaaaataaagagttagcaagtactaatggaaactccggaatttgcattcttggctttgcttcttctccttactagtgctactataagttcacttaacttaattagggcttcttcaaaaacacattccccaatgtggagcaaatggttcgctctgctgttgcacaaaagttccaacagacctttgtgactgctcctgccactcttaaactcttcttccatgattgctttgtgaggggttgggatgcttcgatttttcttgcaaattgtaagccagagaaagatcattctgatcaaaattctctagctggtgatgggttt

SEQ ID NO: 22694 - DNA, 355 bp, Glycine max
gaaattagaggattctaaagtgtttgttgttggatctggtgctttgggatgcgaatttttaaaaaatcttgctctcatgggagtttcttgtggaagtcaagggaagctcactattactgatgatgatgtgatagagaagagtaacttaagcagacagttccttttccgcgattggaatattggacaggccaagtccacagttgctgcttcagctgctgcagctataaatcctagttttaatattgaagctctacaaaatcgggttggttctgaaactgagaatgtgtgtaatgataccttctgggaaaacttgagtgtcgttgtaaatgcactggacaacgctaatgcaagacta

SEQ ID NO: 22695 - DNA, 425 bp, Glycine max
gatactattcctcagaatcacaagagattgcctgtgcatttagccttctaatcacatttttctctatatcctcgaactcaaaataatgggctggtcctaaaacttgtaatagcctcacaaaaatcgaccttttttcccatcaatgttacttacaaactactcattttttttcttctaattttctccctctctttccttttctggtgtgcacctctcatcactttttgagccaatattcaaaggtgcctagtagtgtttgagatgtctggtgttcttctttgggtgagttgtggacccaaggagaaccctatctccattgttggtcttggcgggagaggtggcagaagccagaggaggtttggactgtgcaatgggatcagttttgcaagcttttcaccagcagtggcagacccttcaagatcctc

SEQ ID NO: 22696 - DNA, 428 bp, Glycine max
cttcccgggaaaattgtctataacgtccctctcaagctgggttaacaaataaaaatggcaaagacagtgaggttgcattttagtatatatatgatctaaggtcaagcggaattcaaatatgatgggaaatgacaaaaatatttctaatgagaaaaataaaagaaatgctgatcttctttcgtttatatatttttacacatacaatactactattttgtttatcacttgttttgatcaagatattcctcaatgttacagctgctttatcacttgtgcaaatcaatcatcttttttgcactcccactaatcaatgcatataattataaaacattaagaaagtatataaaaaattatgttcaaagggggacatatataaattaaatatgatgtaggttttataaaatataaaagttttaagaataatctta

SEQ ID NO: 22697 - DNA, 318 bp, Glycine max
cccacacatcgggtgtaacaatacgacatatcggggctccgcttgagcatacttaacaacagggcaaggggtgttactgtggggttgaagctaccatctatctttctctttcttaatgccttcttgccagaagttaaaatggcccaagaaactttcctattcacatctgaatcaatgaacgaggggcaccctgacaagctttttgaccagatctcccatgctgtgctcaatgcatgcttggaacatgaccctgacagcaaggttgcctgttaaacctgcaccaagaccaacattgtgattgttttcctagagatcaca

SEQ ID NO: 22698 - DNA, 421 bp, Glycine max
  modified_base (379)..(379): a, c, g, t, unknown, or other
gattccacgagatatggcttcggctctgcttcccctggcaaccttcttcttagttctctccgcttcttatctccagattgctggggcgaaagcacaaccgttgactagtctcaagcttaactctccgatccttcaggagtctattgctaaagagatcaatgaaaatcctgaggcaggatgggaggctgctataaatcctcatttctccaattatacagttgaacaatttaagcgccttcttggagtcaaaccaacgcctaagaaggaactgagaagtacacctgctatatctcacccaaagtcattgaaattgccaaagaattttgatgcaaggacagcttggtctcagtgtagcactattggaagaattctatatcanggtcactgtggttcttgttgggcatttggtgctgatgaatca

SEQ ID NO: 22699 - DNA, 160 bp, Glycine max
  modified_base (68)..(68): a, c, g, t, unknown, or other
gatctcacttattattattattattaccacctcggaacttttgcttgattaggtccgaaattcaaganaataaaattattttcaacaaaaatggctttttatctgttgtcaatgttagatttgggtgctcttcgttagcgaaacaaaaagttcgttcagt

SEQ ID NO: 22700 - DNA, 413 bp, Glycine max
ggatataagcttgtcagcattacagagaaaaagagagagagagaaagaaaagtaatggcaatggcaacgatggaagagattccacaaagcccagaagcgaagttggggatgcgagtggaggatctttgggacgttcaggaggcacagttgagtcccaccgagaagctcaacgcttgttttgaaagcatccctgtctctgcttttcctttggatccttcaaacacagaaattgagattaaatcagacgccaccctagcagatgctgttaagatattggcaggacacaacgttttcagcgcgcctgtggtggatgttgaggcgcctgaaaacgctagttggattgacagatacatcggaattgttgaagttgctggaattgttgtatggattttgcatcaatctgaatctacgtc

SEQ ID NO: 22701 - DNA, 361 bp, Glycine max
tcttcttaaatctctccgcttcttatctacagattgctggggccaaagcacaacctgtgactattctcaagcttaactctccgatccttcaagagtctattgctaaagagatcaatgaaaatccttacgcaggatgggacgctgctataaatcctcatttctccaattttacactcgaacaatttaagcgccttctttgaatcaaaccaacacctaataaggaactgagaagtacacctgctatatctcaccccaaagtcatttaaattgcccaagaatttttattcaaggacacctctgtctcaatgtaacactattgtaagaattctatatcacggtcactgtggttcttgttggcatt

SEQ ID NO: 22702 - DNA, 426 bp, Glycine max
taagatggttctgctagagaagctctgggatgatgttgtggctggccctcaacctgagcgtggccttggcaagctcagaaaactcaccaccctcaaaactattgatgaaggagaaagtagcaagctgcagaagacgttgtcgatgccgtcggcaccaacaaccccgatgactccgacgactccaacgacaccgggatcggcccgtaaagctgacaacgtttggaggagcgtcttccatcctgggagcaactccgccacaaagaccatcggtgctcagatgtttgacaaaccacttcccaacactcccactgtctatgactggctgtacagtggggagaccagaagcaggcaccgctgaagctgaagtctttagctaagatgaccgtgggttgcatgtaaatattgtcgttgttcgttaagcatctg

SEQ ID NO: 22703 - DNA, 443 bp, Glycine max
ggagctgaaacaaaacctcatccatggcttctcttctccggttcaacggcgtctccctctttcccttaccttcccaacccacacgtgaccccatcctccccaaaccgtcacgcctcgtaacggtgcgcgcggaggtgaaagagacctccgcacccgccgccgccacatcctccgacgaaaagatccgcgaaatcctccgcaaccgtgactacgacaagaaattcgggttcagcgtggagatcgagtccttgacgatcccaaaagggctctcaaaagaaaccattggtctgatctcgtccctgaaggaggagccccactggatgctcgaattccgcctgaaggccttggataaattcctctccatgaaggaacccacgtggtctgacaacacttaccctcccatcgacctccagaatatctgctactactccgcccccaagaat

SEQ ID NO: 22704 - DNA, 53 bp, Glycine max
gagacctcaggtcaggcggggctacccgctgagggtaagcatatcaataagcg

SEQ ID NO: 22705 - DNA, 432 bp, Glycine max
attgaatcttcagaccttaacttttcaagatacggggacaccttttttgagggtgctttcactgggggtcgtacacaacctggaactaccaagcctgatgagggggaccgccacccatactctataatagagtgtgagcctaagcgtgaagtcattttaccatctgtaatctacatacaaaagattttgcggcgaaggccatttctcatcaagaaccttgaaaatgttatgcggaaattccttcagtccttggaacttttcgaggaaaatgagaggaaaaagttggcaatcttcacagcacttgctttctctcagaagctgtctggtctcccaccagaaactgtgttccaaccacttcttaaagataaccttgtggccaaaaggctagttctgtcatttatgactgacttctttaaggagtatctgattgac

SEQ ID NO: 22706 - DNA, 413 bp, Glycine max
gccaagtaaccttctcaaagcgcagaaatggttggctcaggaaagttttcgagctatctgttctatgcgatgctgaaatcgctctcgtcatcttctccagccgtggcaagctttttcagtatagtagcactgacattaacagaatcattgagaagtatcgtcaatgctgcttcaacatgtctcagactggcgatgtagctgaacatcaatcggagcagtgcttataccaggagcttttggtattaagagtcaagcatgagtcactccagcggactcaaaggaatcttctgggagaagaactagagccacttagcatgaaagaattgcatagtttagagaaacaactggatagaacgcttgcacaagctcggaagcacctgacacagaagctggtatcacgaaatgacgaatta

SEQ ID NO: 22707 - DNA, 397 bp, Glycine max
  modified_base (278)..(278): a, c, g, t, unknown, or other
gagaatagtgagagtgagagatggatcagtttttgtggagggtgttgcctttgcttacaatccttgtttcctttggagtgttcttctacttgcaggattcttacacagcacagttatttcctctcataaagttaccgcgggataagtgcagccttcttccccatcgccacttctggatatccagcaaacgtattgtgaccccacaagggatcatttctggttcagtggagataaatgatgggaaaataatatctgtcgttgagggacatgctattcangggaagcctaagcaagaagaagtaattgattatggagatgctgttatcatgcctggcttgattgatgtgcacgtacatcttaatgagccttgaaaaactgagtgggaaagatttgatac

SEQ ID NO: 22708 - DNA, 428 bp, Glycine max
gggggggaaggtaaggcattggggctatgaacaagatcccaactatgttggcaccttgctcacatcccatcctatgccccaaccccacctaaatttatatatccaaaagagatgaaacaaaaaacaacatggggggactataccaatacccatgctactgtaaggcaacccaatactgaggaagccctttaaaattacaggcaaaatgagaggagcaaaatacgggagcatcatcccacaaaaagagttcctgttagatacagcaaagttagctaaagaatctgcacattgatataggctgagattatgttagattattcgttgatttcagctaatacttccttttattatttggataatattgggaattaggctagaatatttctatgattttgtatgattccttttatattttttgggatctttct

SEQ ID NO: 22709 - DNA, 430 bp, Glycine max
attgtctctcctggagctgatatgtcaatatatggcccctactctgaaaagcagaacaggcttacagccctgcatggttcaattgaaaagctgttatttgatcctgagcagactgatgaatacattggttcattgaaagacaagtcaaagcccataattttctccatggcaaggctagacagagtgaaaaacataactggattggtagaatgctttggtaagaacagcaaattgagggaactggtcaaccttgttgtagtagctggttatattgatgtaaagaagtcgagtgacagagaagaaattgcagaaattgagaagatgcacgagctcatgaaaaagtataatttaaatggtgattttcgttggattgctgcccaaacaaatagggcacgtaacggggagctgtatcgctacatagcagacacac

SEQ ID NO: 22710 - DNA, 431 bp, Glycine max
atttcaaatgcaaagttaccttgtgtgggccctgacccaaagaatgtcatacttttggcatgtgacgcatttggtgtactcccacccgttagcaagctaaacctggcacagaccatgtaccatttcatcagtggatatactgctttggtggctggcacagaagaaggtattaaggagcctcaggcaactttttcagcttgttttggtgcagcattcattatgctacaccctacaaagtatgcagcaatgcttgctgaaaagatgcagaagcatggtgctactggatggcttgttaacactggttggtctgctggaagctatggtaatggaagccgtattaaactacaatacacaaggaaaatcattgatgctattcactccggaagtctcctgaatgcagagtacaagaagactgaaatttttgggcttga

SEQ ID NO: 22711 - DNA, 400 bp, Glycine max
cagagacgtgttggagacattccatgtgcatagcagagcttccactagacaactttggagcatacatcatctcaatggcaactgcaccttctgatgtgcttgcagttgagcttctgcagcgcgaatgccatgtcaagcatccactaagagttgtgccattgtttgagaagctagctgatctagaagcagcaccggccgcgttggcgcgattgttctctgtagactggtacagaaacaggatcaatgggaagcaggaagtgatgataggctattctgattctggcaaagatgctggaaggttttcagctgcatggcagctgtataaggctcaagaggagcttataatggtggctaagcagtatggtgtgaagctgacaatgttccatggtcgtggagggac

SEQ ID NO: 22712 - DNA, 430 bp, Glycine max
ggtggtagtttggcagcgacacgtatgttcatcaataatcgcaggagcagtttccggtgcatctcatcgtcttccaaaatgaacgacgcatatgtctcgaagcaaatccagcagatggtgcgtttcatccgccaggaagctgaggagaaagccaacgagatctctgtatctgccgaagaggaattcaatatcgagaagctgcagttggttgaagccgaaaagaagaagatcaggcaagaatacgaacgcaaagagcgccaagtcgaaattcgcaagaagattgagtactcaatgcagctgaatgcttctcggattaaagttcttcaagctcaagatgacgtgatcagttccatgaaagaagctgcatccaaggaacttttgaatgtcagtcatcaccatgatgatcatgtgtatagaaaccttctgaaag

SEQ ID NO: 22713 - DNA, 443 bp, Glycine max
agaaggggtaccattgctcatgctctagaaaagaccaagtaccctgagtctgacatttactggaaaaaatttgaagagaaatatcacttctcatgccaatttactgctgatctttttgtaatgaaccacacagactttatcatcaccagcaccttccaagagattgctggaagcaaggacactgttggacagtatgagagtcacactgccttcacccttccaggactctaccgtgttgttcacggtattgatccctttgatccaaagttcaacatcgtctctcccggtgccgacatgagcatatacttcccatacactgaaactgagcgtaggttaacagagttccaccccgacattgaagagcttctttacagctcagtggagaatgaagaacacatatgtgtattgaaggaccgcaacatgccgatcatcttcaccatggc

SEQ ID NO: 22714 - DNA, 345 bp, Glycine max
cctttactaagggatttcacttgggaaaaaaaatgtcccatactaatggattcgggtccacaaccattgggtcaaaatgtccaaatcttgtagcacttaccaaccagggcctatcgattagtattatacaaaaaaaattcatcatagacacttatataattagatctggtcttcataaacaaacttgggattttcgatctcaagtaagatcggttcaagatcatgggatccttttctatcagataagaaaggctgtttcacaaaatgtacttctaagtaattgctccataaatcctatatctatctatatgaagaaaaaatcatgtgacgggggggattcttatt

SEQ ID NO: 22715 - DNA, 403 bp, Glycine max
  modified_base (385)..(385): a, c, g, t, unknown, or other
gattgggagaaaagtaataatattgggggtttgcttctgctgcattcttctgcgcttcccaaaaacaatgcagtcctgccccttccctgatactaaccccctctctctctctctctctcttagaacattttcttttttgtttttaattttgatttcattgcttagatctccttcaatttcaattatatttgttaattgtttgttctgttactcttttgtttgatgataagtttataaccctaacctaatttcgcgctttgtaacctaatcacaggtactcttttgtttgttcctggtcttctgcaattctttcatacgtttctgtcactgttcttcatatgagaagagtaatgttttggaagggaaagtgaaaattttgttactntattatgaatgtgtggaa

SEQ ID NO: 22716 - DNA, 428 bp, Glycine max
gtttcccctgatgtagtagaccaggatcatgtaaataagatactcactgctgttgttcaagggatgaattcaacagaagaaaacaatgatgtcaggcttgctgccataaaagcattgtacaatgcattgggttttgctcaggcgaatttttctaatgacatggagcgggattatatcatgagaattgtgtgtgagacaacacaatctcctgaattgaagattcgacgagcagcttttgagtgcttggtagctatttcttcgacatactatgaaaagttagctccttatatccaagatatcttcaacatcactgccaaggctgtgagggaagatgaggagccggttgcacttcaggcaattgagttttggagttcaatatgtgacgaagaaattgatatactagaagaatatggtggtgattttagtgg

SEQ ID NO: 22717 - DNA, 337 bp, Glycine max
ggagggatgatctgtaattttggggttgggcgagtgtgttgatcggattggaggcaggcaaagtgcaaatcaagcgattatcaatctttggggcggtgctgttgaattctgcaatggcatcagcagcgcctaatgtcgatctcttcgatgcctattttcgccgtgcagatttggatcgagacggccgtatcagcggtgccgaagccgtttccttctttcagggctccggattgcccaaacatgttcttgcgcagatttgggcatttgcaaaccaaagccagagtgggttccttgggcgggcagagttttacaatgcccttaatcttgttactgttgc

SEQ ID NO: 22718 - DNA, 418 bp, Glycine max
actctttcatatactaggggatttcacttggaaaagaaaatgtcccatactaatggattcgggtccacaacgatgggttcaaatgtacgagatcttgtagcacttaccaacgaggccctatcgattagtattatacaaaaaaaatccatcatagacactaatataattagatctgttcttcatagacaaacttgggatttccgatctcaggtaagatcggttcaggatcatgggatccttttctatcagataggaagggctgtttcacaaaatgtacttctaagtaattgctccatagatcctatatctatctatatgaagaagaaatcatgtgacgggggggattcttatttgtacaaatggtacttcgaacttggaacgagtatgaagaaattaacgatacttctttaccttttga

SEQ ID NO: 22719 - DNA, 430 bp, Glycine max
gagaatacataaacatcaagattgcagttccaaacaaaacttatcaaaatctcatatactgattcagttctatacataaccatcgagatttactatcaaaccaaaaattctcaaaatctcttcacctctgtgatgaccatggaatacagaaccttagaactcaacatcatatccgcaaaggacatcaagaacgttaacctcttctccaagatggacgtatacgccgtcgttacgctctccggcgaccctctccaccctcagggcgccaccacccacgtgcacaaagacgccggcagcaaccccacgtggaactaccccgtgaaattctccgtcaacgaatcgctggccaaggagaatcgtttgtctcttgagatcaagctcgtcttcgaccgcaccctcggcgacaccgttatcggcaccgtccatgttc

SEQ ID NO: 22720 - DNA, 421 bp, Glycine max
caagaccaatgcatgaaaactggagcgagtgtgtcgacaaaatggcggcggcggaagcggttacttatggcgtggtcgtgaattcttttgaggagttggagccagcatatgcaggggatttcaagaagatcagaaacgataaagtgtggtgtgttggccctgtttcactcagaaacaggaatcaattggacaaggctcagagagggaacaaggcctcaagtgatgcgcacagttgcatgaagtggcttgatttacaaaagccaaattcagtagtttacgtgtgccttggaagtatatgcaatttaattccgttgcagttgatagagcttggtttggccttagaagcatctgaaaaaccattcatttgggttatcagggagagaaatcaaacagaagagttgaacaagcggattaacgaatc

SEQ ID NO: 22721 - DNA, 423 bp, Glycine max
  modified_base (410)..(410): a, c, g, t, unknown, or other
actgggccaatacgcacaccaagacaaagaaaaagaaggataaaaatggaggaagaaagaaattttcagtaacaataccaaaatccttaaattttggagggtaccatataaatgaactttctctagatcttaattatcataattaataaggttcgtctgagattttaaatctaattgaataacaaatagtcgccaataatatatacaccacaaaatataatgtgaaccttctcctcatccaacttaataacgttgccactcaaaaaattattagctagttaaagtataactacagaattatcatttatcttgtaatgatctaacaagaaccttatcttcattaatcttcacatcttgtaccttgtattgggtgcttgtcttcactaatcttcattgtctggactacgtanatgcatgaagtgc

SEQ ID NO: 22722 - DNA, 429 bp, Glycine max
gacaacaacacattaacacaacacagacacagaagcaaggagagagaaagagaaagagaaagagaaagagagacggctctaacttccaacgagtattcatattctacttttcagaccactacgcttacttcttccctttccctcttctacgttacccactctcattctaatcacattttctcccaaattcacctccctctacaacaaaaaaagcttttcattggatcacgtcacccatctttccttttgctctctcctgcctctgaattgagcatttacgggttccattgggctctgatcgaattgggtatgtgcaagatctgcggcttcgtttgttggtggcaaaaagatatgatcttggtggtgggaccaacccaattatcggattggatacgatcggggtagaaacaacgccatcagatggcgctg

SEQ ID NO: 22723 - DNA, 435 bp, Glycine max
  modified_base (391)..(392): a, c, g, t, unknown, or other
aatggatcgacattcatttcaaaatgggtgcagggcacataacatgtacaaatcatgctaataataaaaaagaatatattatttcacatataaatcatgctaataaacataacatcattttgcagtgaaaaaaataacatcattttaatctcatattcgattaattaagaaatacattaaaaaatcactatattagcaattttcaaacaatcggttgtaaattaaagggtcacacattagtgtcttgctttatagttcataatgaacatgcattaagaaaactgttttctctgccatggctagtgtgaaagtctatgaattaaggttatgttgttcttctaaaaaaaacgttatgttgtttaattttcaaaaagtgattttatgatacatnnttttaggtaaatatgatacattttatacagcttataactctta

SEQ ID NO: 22724 - DNA, 285 bp, Glycine max
gtcccgtgaacaaagaaattaattggggtaacaaagtctcttcaatcggatatatttaagtacgtataaagtgaaaaaataaagataaatatatataatactacattcttcattcctgtcttttttttgaaagataacactacccttcaaggctaggaaaatatacataattttgaagtcacaaaaagtaaagcatgctgactagaagtcaaatatcacacattctatgtatctgctactggtagctcaaatggcgtgggagttgcaagtttgaggtctaaatct

SEQ ID NO: 22725 - DNA, 372 bp, Glycine max
gagggcgtgggcgagggaatcaaacaaaccttgtgctacggtttatcttcatcctcatttttgtcgtcgtcgttcttcctttttccgtttttcatctggttcttctctcagaaaaagctcgccaatcgatcttgctctcttctacgcttttcgaattgctttcattccattatggacgcagattagattcgcactcacattcccttctcctcgatttgttcaaactctctgctctgagatctgatcgcattttcattcagaaaggaaactcgtgtgactgatttatgcgctaattgcaattgcactgcgagcgttactctgccgaatcggaagatgggaatagtgttcaccaaattgttttcctctcttttc

SEQ ID NO: 22726 - DNA, 401 bp, Glycine max
ggcagcgcttgatttgaggccaggcaagccccactgaaccaccacacctctcgtcgttcacgctacccctttctgctcttcttctacctttcaagttttaaaagtataaagatggcagagacattcctatttacctcagagtcggtgaacgagggacaccctgacaagctctgcgaccaaatctccgatgctgtcctcgacgcttgcctcgagcaggacccagacagcaaagctgcctgcgaaacatgcaccaaaaccaacttggtcatggtcttcggagaaatcacgaccaaggccaacgttgactacgagaagatagtgcgtgacacctgcaggaacatcggcttcgtctcaaatgatgtgggactggatgccgacaactgcaaagtcctcgtcaacat

SEQ ID NO: 22727 - DNA, 403 bp, Glycine max
gaaatttctcaccatggccagggtaacatgctcgccactcatgattccaagtccaaaagtgagaatgatccgtcatcaccacaccataatgatgtcgaggaagatgatagtgatgatgaagaagctaaagcagatgaataccggaagtttggtgcggcagatacatttgaaatcccagatgaggtagaccttgctcatcttagttagatctttcattgtgaaagccattctttagagttatgcagttgacaacattgtctgcttagctgttagtaggatttttataaatatttgttagttgcctttatcaattgtatcacctatttgatctattctagcagcgttatgtctgtgaacatgtgaatagtaattaagaattgagatgcaataattcctttgatat

SEQ ID NO: 22728 - DNA, 338 bp, Glycine max
  modified_base (26)..(26): a, c, g, t, unknown, or other
tttataaagttaaatttctcaccatnacccgcgtaacatgctcctcactcatgattccaaaaccaaaagtgataatgatccaccatcaccacaccataatgatgtcgatgaagatgacaatcatcatcaacaatctaaagcacatcaatacccaacgtttgttgtctcacatacattataaatcccagatgacgtaaaccttgctcatcttaattacatctttcattgcgaaagccactctttttagatatacacttcacaacattgtcttctcaactattaaaaagaattttataaatattttataaatccctttatcaatagaatcacctatctta

SEQ ID NO: 22729 - DNA, 413 bp, Glycine max
gcttggcccaatggaaaaagattcagagctggtgatatcctaatcttcaactatgactcaacgacccacaatgtggttgctgtggacagaagtggatacaacagctgcaagacaccagggggtgctaaagtgttcagttcagggaaggaccaaatcaaactagcaagagggcagaactacttcatatgtaactaccctggtcactgcgaatctgggatgaaagttgccattaatgcgctgtgatatactagtagtgctcaatacttcttgaaatgaagtaactgttaagttaatggtcaattaactagcattagtaaatgttagtgtgtgatattgtatgtagtcttttttttatatgaagctgttatatatattaattactatagtttgtgaagcaagtgggagtgagctgg

SEQ ID NO: 22730 - DNA, 424 bp, Glycine max
ggagattgggaagcatgggtggctggctaagctaagctaaaactaaactctttcagtttgttttagcttcagcttcttctgcttcttttgctttttccaccacaaccacaaccatgtcttctgccactgcctccaacactttcttccttcactcttgtttcctcctcttctgtctcctctcggctccttcctgtgtttccatgttctctggtattgagacaggagatttagaaaaaagagatgatttgtttccacagattctaagagacgaggcagtggcaaggctttatgagcttgggaaggtgagtgatgctagcggttatttggagaggacattcttgagtcctgcatccatgagggcaatcaatcttattcgtaaatggatggaggatgctggtttgagaacttgggtggaccaaatggg

SEQ ID NO: 22731 - DNA, 257 bp, Glycine max
ctaacaaacccatgatgataaatctacatctgctccaagactaactgctttttgcaattcatccacacccataaattctgaatatgcctaaaacacttccttgcttgaaactacttccctgatctgctgtgcaatgtgctctatctgccagagttcccattatcattggggataatactaaagcgttcaaattactagacgaaatgtttattcattagattcacaacgatgcggtgattaggttttataaacaaagg

SEQ ID NO: 22732 - DNA, 405 bp, Glycine max
ggatttcactcagttgcctcagggaggtaggaatactctagaggaagctggatggaaggtggggcgctctcctattttcgaaactgtaactgcagctgatggaactgttaagttgttgttgaagttggaggacaatagattgattgaaactgttggcattccagttatggttgataaaggcttgactcgcctcacagcatgtgtctcatcacaggttggttgccctttacgctgctctttttgtgccactggaaaaggggggttttcaaggaatcttcagagacatgaaatagttgaacaggtcttggccattgaagaggtcttcaagaatagggtgacaaatgtagtgtttatgggaatgggtgaaccaatgttaaacctgaaggcagtacttgaagcacacca

SEQ ID NO: 22733 - DNA, 369 bp, Glycine max
gtatacaaagtcaacagatctgggtgaataaaaaatagtgtgtatggctacgcaaaccgttgaggataattctagatctggtccaagacgaactgttgtaggggatttattgaaaccattaaattcagaatatggtaaagtagctccggggtggggaactactcctttgatgggtgttgcaatggctctatttgcgatatttctatctattattttggagatttataattcgtccattttactcgacggaatttctatgaattagattcacaagaatcgggtaattagtttttcaatagaaaggaaagttaagcattttggtttcttattgtttgttagtctatttcatttggatttggtagtttgatc

SEQ ID NO: 22734 - DNA, 360 bp, Glycine max
attgttatggagattgagtttaagtgcaaagttgaatgtggtaaattgcgagatacacgtaaacatgagatgattgattgtgacataatgagatgtgaaattgtgaacatgagttttagttgtaaataagtttgtgattaacacttgatgtgactaattgtattgtgagctgtgaattatacaataactcgaccagtatttatattgagaaaagtgtttatgcgcagtgttaaagagaaagtgtagcttcttagttaggaaataatgttaaatggtaacgcaatatgttaaacgtgtttgaaacacgagtgtgaggtcatggatattatattatttatgagcagtgtctgcttgcaaata

SEQ ID NO: 22735 - DNA, 400 bp, Glycine max
ggtttgcctttgatcttcttagctctactgcttttatttgcagacacccaattaacgatggctgctctctccaacggccacggctcttccttcttcaagatgcccccaatcaagttcacaaagctcttcatcaatggggaatttgttgattccctttcagggagggagtttgaaacaagagaccctaggacaggggaggtgattacaagaatcgcagagggagcaaaagaagacgttgatgttgctgtcaaagcggcacgtgcggctttcgactatggtccatggccccgtatgcccggcgctgtacgttatcatttctccatttctttctctataactgttgtgttgtgagttatgacaattaatttgtgggtctcactaattaaatctactgcatttt

SEQ ID NO: 22736 - DNA, 423 bp, Glycine max
  modified_base (371)..(371): a, c, g, t, unknown, or other
gagggcggtgttactccttctctcgttgattcggatctagagtcttttttcactcttcagttctcgttgttgttcttcgctttcctgaaactagggttttcaatttcgattcattcgttaataattaaagatgtttgggagggcaccgaagaagagcgataatacgaggtactacgaaatcctcggcgtctcgaagaacgcttcgcaggatgatctgaagaaggcttacaagaaagccgccatcaagaatcaccctgacaagggcggtgatcccgagaagtttaaagagctggcacaagcatatgaggttctgagtgaccctgagaagcgtgagatatatgatcagtatggtgaagatgcgcttaaggaangaatgggtggtggcggtggccatgatccggttgatatcttttcatctttctt

SEQ ID NO: 22737 - DNA, 383 bp, Glycine max
  modified_base (365)..(365): a, c, g, t, unknown, or other
ggaattcataaccatatcagttaaattcagattacaatgttttagttgctgggtgggttagtgtttattcagctttttgaattattacatacatacacccaaaattaagtaaattaaaattactgttggttgcccaatttgaaataataataatggttttgggtaataaggcttttaactcccccggggacccttgtttttccatcaaaaggagaatcccaaacaaccttagttcctccaaggagaagtttgactagatcaacatttacctctaagacctcaaggcttgcagtctcacaatcagagaacaacaatcccgcctctagaccagcaagaagcagttcagtaactcgctcttgcatctnaacttcacactcacagta

SEQ ID NO: 22738 - DNA, 407 bp, Glycine max
ggcatatccaaaggaacaaaaatattattaagatgagcaacattattggagcacttgttctactctttgcatttctcttcctcagttgtgtgtatgcacaagacacaacaacccttgtgcctgcaatcataacttttggtgattctgctgtggatgtagggaacaatgactatcttcccacccttttcaaggctgattaccctccttatgggagggactttgttaaccaccaacctactgggaggttttgcaatggcaaattagctactgatttcactgctgacacattgggtttcaagacctatgctccagcatatcttagcccacatgcatcagggaaaaacctccttattggagcaaactttgcttcagctgcatctggttatgatgaaaatgctgctactttg

SEQ ID NO: 22739 - DNA, 414 bp, Glycine max
gagagcgagagagaatcgtaacaaaagcggtaaccggaataagttgggtctacgatttgagccatggcaacaacaacaccctcaaaccgatcatcagaggcgtttgctctcatggcaatcctcagcactctgctttgcacggcggtggcggcgaaggagagcgtgtacgagatactccccaagtacggcctcccgagcggtctgttaccggacaccgtcaccgactacacgctcgacgaggacgggcaattcgtcgtcgttttggcgaaaccctgctacatacagttcgattacttagtttactacgagaccaagatctccggcaagctcagctatggctccatcaccaacctcaagggcattcaagtccagcgcctcttcatctggttcaacgtcgatgagatcaaagtcgat

SEQ ID NO: 22740 - DNA, 394 bp, Glycine max
ggatgcacgccaatgggacccgccctccaataagtctatcggatttttgttcaagaatgaaatcttattggaactgtccagttcaccctttggaaccatatcacattccggatatgatgaaataggatgaattgagacggtattttgtaagtacataattatcttgaataaattcactatttctttattttccgatcgtctggaaagaacaagatgtttcttttgttctttcttcaacaatttctgatctctattacacctctcactatgattcgaactcacatgaagttctgaccatctgtcagagaaaaaagaacgagtaactctgtattaatggaatctcatcatccatacataacgaattggagtggaatattcaaattataacatatga

SEQ ID NO: 22741 - DNA, 216 bp, Glycine max
acacacgcgtacgtccactcattttaatacaaccgaactctaatgcataccacttgcttcctttaataaattgggctatcgcactaccccccaataactatttattattttaccaccattcaaaccttttcgatcactccatcattctaactcttaatgcctaccaatcctgctttccattaccatatcatcctttccatttttacattctactca

SEQ ID NO: 22742 - DNA, 425 bp, Glycine max
  modified_base (302)..(302): a, c, g, t, unknown, or other
gacagcgctaaccccttctctctctgctgtccggttctccgatcgccgtctttgccctgcccattcctgatcaatatgtctcgaagatatgatagccgtactacaatcttctcccctgaaggacgtctttaccaagtggaatatgctatggaggccattgggaatgctggtactgcaatagggatcttgtcaaaagatggggtagttctggttggtgagaagaaagtcacatccaagctgctgcaaacctcaacttccaccgagaaaatgtacaagattgatgatcatgttgcatgtgccgnggctggaattatgtctgatgctaacatcctaatcaatactgctagagttcaagcacagcgctacacgtatgcttaccaagagccaatgccggttgagcagatggttcaatctctttgtgacac

SEQ ID NO: 22743 - DNA, 405 bp, Glycine max
  modified_base (311)..(311): a, c, g, t, unknown, or other
aggagcaagctgccacttggaatcagttgttatgcggtcatattatgtcgagtgtgtgtgctttgtggtccaagagctacaatctaccccaataatgcaattggcaaagtctaaaatcatggaattgatggctattcttaaggatgtagaatctgctcagcttcgcgtggcctggttgcggaacatagttgatgaaattgctgaaaacattgaactcattgatgagcactgcatggcggagatggcaaaggctaactctgatcgtgaaatggaaacattgaacaaagagctggaatcaaatctggaaagtntggctcagaaagaacaagaggtaactgatatcaaaacaagaattgaagagatcagagagcatttaagcgagcttgagctgaaatcttttgattt

SEQ ID NO: 22744 - DNA, 384 bp, Glycine max
ggagtgagtagtgagaatggagtttcaagggttaccggagggttgcattgctagtatactctctcgcactacgccggcggacgtgtgtaggttttccgtcgtatcaaagattttccgttcggccgctgaatcggacgctgtgtggaaacgttttctcccttccgattaccattccatcatttcccagtctccttcgcctctcaactatccttccaagaaggagctctatctcgctctctcggatcgccctatcatcatcgatcagggtaaaaagagctttcaattggagaaaaagagtgggaagaagtgttacatgcttgctgctagagctctcagcattatttggggtgacactgagcaatactggaactggacaaccgatac

SEQ ID NO: 22745 - DNA, 384 bp, Glycine max
gaaactgcatagcgtcagcgtgggtgcaaattccaggtttgcttcctttagcctagcttttactcattatctctctttctctctctctcagaggttctagaaagatccactccgaaatggacggtgcgccacaatccgccggtgccggaggtccggcgccgttccttctgaagacctacgacatggtggacgatgcctccaccaacgacatcgtttcgtggagctctaccaacaacagcttcgtcgtgtggaaccctcccgagttcgctcgcctccttctcccgacctatttcaagcacaacaacttctccagcttcatccgtcagctcaatacctacggatttcgaaaaatacatccagagcgatgggaatttgctaatgatg

SEQ ID NO: 22746 - DNA, 309 bp, Glycine max
gagagtggtggagtgtgcagaagagcgtcggggtcgcagccctaatcagaagaagcgcagcttcaagcgagtgacagccaccagccatgggtcgtatgcacagccgcggtaagggtatatcctcttctgctttgccctacaaaaggacacctgctagctggctcaagatctcttcgcaagatgtcgaagaaaatatctgcaagtttgcgaagaaaggtttgaccccgtctcagattggtgtcattctcagagattctcacggtattgctcaagtcaatagcgtcactggcagcaaaatccttcgcattc

SEQ ID NO: 22747 - DNA, 446 bp, Glycine max
aagacgacagaagggggagagagagagagagagagagagagagagagaggtggatggtgtctctgaaacttcagaagcggcttgccgctagcgttctcaagtgtggtagaggcaaagtttggcttgaccctaatgaggtcaatgaaatctccatggctaattctcgacaaaacataaggaaattggttaatgatggtttcattatcaggaagccaactaagattcattcccgttcccgtgctcgcagaatgaatgaggccaagaggaagggacgtcactctggtaatggtaagcgtaagggtacaagataggctaggctccccaccaaaatcctttggatgaggaggatgcgtgtcctcagacgattgctccgcatgtacagggaagcaaagaagattgacaagcatatgtaccatgatatgtacatgaaagtaaagggtaatgtc

SEQ ID NO: 22748 - DNA, 425 bp, Glycine max
gttctcaatccaaggtcaaagctatccatgtgccaagcgatttattgttctctattccattttgaagagacaccaataaaaaaaaagtgatggtttttttctcttcatgcaactcactcaaatttattttttctcttcattttctcttcgtgttattgataaggagttgtatgccttagtgagagcgttgaaaatatggctacactatctttatcccaaggagtttgggatccatagtgaccatgagtccctaaaatacttaaagggacaaggcaaactaaacaaaaggcatgccaaatgggtagaatttcttgagtaattcccttatgttattataaaaagggaaaaggaaatattgttgcggatgccttgtcaaggaggcactttttgctttctatgcttgaaacaaaaatgattggatttga

SEQ ID NO: 22749 - DNA, 427 bp, Glycine max
ggttctagtgtgtgattgtttgttgttgtaactcgttcttcttcttttgttgttctgtgtttgtgtttgttttttctctcacctgaaaatgtcttgctgcggtggtaactgtggttgcggaagctcctgcaagtgcggcaacggctgcggaggctgcaagatgtacccagacttgagctacactgagtcaaccaccaccgagaccttggtcatgggagtggcacctgttaaggctcaatttgagggtgctgaaatgggtgtgcccgctgagaacgatggctgcaaatgtggaccaaactgctcctgcaacccctgcacttgcaagtgaagtgtttggagagcaagcttcaagcagagatagcccttaattaagaataatgattaactattaatgtgtagctaaaaacttatgtattatgtctgtgat

SEQ ID NO: 22750 - DNA, 343 bp, Glycine max
gattgcattgcagtgtaagtatttacaaagcaaagcgaagcaagcattcactgaatgcgctctatctctctctttcgatctgggtactaaccctaacccgcttcgaaccgtggcttcctcaggctcgcagaacctctctcgaagaaaaccttctccttcttcgtcttcgtcttctcaacaaacacccgggtcgacccggatcgtttaccgagaatctcggatcccatcggaatccgatttcccgatctggcagcagaactggttcatcgcattgctcttcgtcatggctctcggattcttcgccctcgccattttcctcttcctcactctcgactctgacatc

SEQ ID NO: 22751 - DNA, 428 bp, Glycine max
  modified_base (351)..(351): a, c, g, t, unknown, or other
gagtgtgtgagttcattaacagatacaaattctctgtgttgtgttgtgtacttgtgttaattgtgttgttgttgtaggaaatttaagtgaagagagaatgatgatgaagtctgctatgtgtgcattggtgcttgtggcactggttgtggttgaagcggggcccatggctgaggctgcggtgacttgcaacccaacacagttgactccttgtcttccggcaattaattcaggttctgcaccttcgagtgcttgttgccagaagctgaaggagcaaaagccatgcttctgtggctacctcaaaaaccctagcttgaagcagtatgttaactctcctaatgccaaaaaaaccgntagttcttgtggtattgcctatccaacttgttaagcacctcttatatatatatataaaatgtgtgaacaatatatat

SEQ ID NO: 22752 - DNA, 445 bp, Glycine max
gtatgtgcttggtgagaaagaagtccttttagggtgtagggaaggggatagtgtcaggttcctctctattgccaagaagttaaaaagacaaaattccaccagaaggtatatcctgaagatatgatcaatcagtccaatgggcacctgaaggccaggtaaatagccggtataacttccttcactctctggtagcgagaaagcttctgtaaatcagagggtagaaggtgaagcggtggtggtgatctagtcttcaaaagaaaatctcgaagaactagacaatactttacttaccagccttactaggcaagacagaaaccaatcttagaactacaagatgatacgacttctcctaacgacaagtaaaggcatacccgaacataaaggagagcggctttccctctattagaaaacaagaatggaagtccatataaattagggggaaagg

SEQ ID NO: 22753 - DNA, 441 bp, Glycine max
  modified_base (350)..(350): a, c, g, t, unknown, or other
tatcaggttgctcttgtttatgttcttacaagattggttctcaacgtttcacaggcataccttgctttctttgtcatcaatgacctacaaatggcccaatcagccaaagctttggttcctgctctcatatacatctgcagctttgttgtgtctatagcattacaggagattgcatggactggccgaatgcttaaggcctactactctgctggatgcattctttggattttttgtggtgcaatgatccttcttttaaccacaaatatgagttatgtcatgtacatagtatcggtattcattggcatagcaaatgctctcatgatggtaactggagtaagcatgcagaattntctcattggagagaaccttaatggctgtgcatttgttgttggatcattgagttttttggacaaaatttcatgtgggcttgctttatatgtt

SEQ ID NO: 22754 - DNA, 422 bp, Glycine max
ggttctagtgtatgtgattggggtgactcgttcttcttcgtcgttatcttcttcttttgttgtttgtgtgtttgttttttctctcacctgaaaatgtcttgctgcggtggtaactgtggttgcggaagcgcctgcaagtgcggcaacggctgcggaggctgcaagatgtacccagacttgagctacaccgagtcaaccaccaccgagaccttggtcatgggagtggcaccagttaaggctcaattcgagagtgctgaaatgggtgttcccgctgagaacgatggctgcaaatgtggagctaactgcacctgcaacccctgcacttgcaagtgaggtgttggagagctaaagcttcaagcagaaatggcccttagaaataatgataaaaactatatgtagtttcaaaacttcaaaattatgta

SEQ ID NO: 22755 - DNA, 423 bp, Glycine max
  modified_base (152)..(152): a, c, g, t, unknown, or other
gtgctggatctttattggtggcaatttcattttcttctgtttttggtggttggttaccatgcaaactgtttagttccaattcaggtacttttgaaactttgagttacagcatgtatgcagcaatcttcaatgtgggctgggccgctactcangtttcacacatgtaataatttcctctgattcatcttttccatttgatgctgaaaattaaaaccataagtttgaatgtcaaattataagtggttggctggtttggttacttataaaatgatattccaacttgtgctcttggtaacttaaactttaaatttgaagtatctaaacatcattgaccttttgatagttatgtgatatctatattgggataagccataattttgttgagaaaagccattcaaatgaaatgatgatgactggtatgtg

SEQ ID NO: 22756 - DNA, 413 bp, Glycine max
acataagccagatgaaggagcgggaagacctaggatgtagaagatcataacatgagtgattcggcagatttggattcctatatacccactcgtgcggtacttcattgtatgatctatatctatatatctatatctatatatctatctatagatatatagatatataagatccatctgtatagatatcatcatctacatccagaaagccgtatgctttgtaagaagcttgtacagtttgggaagaggttttgattgatcaaaaagaagaatctacttcaaccgatatgcccttaggcacggcaatacataacatagaaatcacactcggaaagggtggacaattagctagagcagcaggtgctgtagcgaaactaattgcaaaagaggggaaatcggccacattaaaattacct

SEQ ID NO: 22757 - DNA, 353 bp, Glycine max
ggctgttcctgaaacatacacagatcaggtagcaggaggaggaggagttgcactttgctcaactctcctcactcttttcttctaacagatagatagatagatacatagtgagaaagaaagatggtttctgaaacctcactctcttcttctaaacgctctccagctactcctaagttctgcaactcattcactactaggatatttgctgatgttgctggtgacattacaattgtcgttgatggcgagtcttttcttctgcataagtttcccttggtgactctaagtgggaagatccggaagatggtggctgaagccaagggttccaatgtttcaagcttggagctcatcaactt

SEQ ID NO: 22758 - DNA, 406 bp, Glycine max
  modified_base (348)..(348): a, c, g, t, unknown, or other
ttcttgcatttatgtgatctttaacactgtttttcaggggcaagtgactattgctgcaaaacctggcttgaaattggaaattcctgatggggtgacgattgagaataaggtataatactaacttcagtacgggctttggagtctctttattacaaaacttcaccttttcattggttttattttctctgttctgttggtgctgtttgtggggttgtgatttgtaggttggatgcgtgttgggagaatttgttttgtttggactgtttttttatcagcgtttggacttggtataatgggtaccttttgtttcttgtttgctgatcaaagcatggggatttgtaattgttnttgtcatcattgactgggagaccctttcagttggatagcctgactgtgcaagcttaag

SEQ ID NO: 22759 - DNA, 410 bp, Glycine max
gataataaatcacattcatacctcggctataatttacgtgagctttcagagggagagagaaaaaatgcagaagcatggttttgcatcaaagcgtaacgtgttgccgtatcaaacgccgaggctaagggaccactacgttctggggaagaagctgggacaggggcaattcggtacgacgtacctgtgcacccacaaggttacagggaagctctacgcgtgcaaatcgatcccgaagaggaagcttctatgccaggaggattacgatgacgtgtggagggagattcagatcatgcaccatttgtcggagcatcccaacgttgtccagatacaaggcacgtacgatgattccgtggtcgtgcaccttgtcatggagctctgtgcatggggagagcttttcgacaggatcattc

SEQ ID NO: 22760 - DNA, 415 bp, Glycine max
  modified_base (342)..(342): a, c, g, t, unknown, or other
ggcaccgcttgagcagacttaacaacagcacaaagcgggttactgtctgttcaagctaccatctctctctctctttcttagtgcctccttgccagaagttaaaatggcccaagaaactttcctattcacatctgaatcagtgaacgaggggcaccctgacaagctctgtgaccagatctccgatgctgtgctcgatgcatgcttggagcaggaccctgacagcaaggttgcctgtgaaacctgcaccaagaccaacatggtgatggttttcggagagatcacaaccaaggccaacgtggactatgagaagattgtgcgtgacacatgcaggaacattggttntgtctctgatgatgttggtcttgatgctgacaactgcaaggtcctcgtcaacattgagcaacagagtcctgat

SEQ ID NO: 22761 - DNA, 355 bp, Glycine max
gataacattatccattcactaatcataatcacttccaagggctctgactattcactactactactggagatggcttcaactgcctcttgcacttctatttccccttctagtgatggttgcctttgctggtgacttaaacaaagactttgacatcacttggggagatggccgcgccaagatacttaacaatggagagttactcactctttcattggacaaagcatctggttcaagttttcaatcaaaaaatgagtatctctttgggaagattgacatgcagctcaagctcgtccctggaaactctgctggtaccgtcactggctattatttatcttcaaaaggatctacttgggat

SEQ ID NO: 22762 - DNA, 395 bp, Glycine max
tagtctctaactttaatttgcatttgaccttattacaacaacgcattttgttttaacacaacttatttgttgtgtgctgatgtgctttacatcccggttgactcccccaaatttggggcaaattgccttgaaccatctgctctcctagaatctaagcaaggtatctggagatattcattcaagttcaaggttcaattttgaaaatgtaatttagctcacaaagggtgcaaaggatacaattataattcaaggcaagctttttggtcaattggcttgtatatacaatcatggccttcatcatgtccatattcatacatttcattctaaaattcagaaattgatacaaagactattactcaatgctagtcattcactcacagtttaagatcacactc

SEQ ID NO: 22763 - DNA, 459 bp, Glycine max
gttaacgtctggccgagatccaggcataattccacgcaatgcacatcctccagagccagaaggcttggatagtaatctagatgttggtgctggtcagactcctcaattgcggttgcctcgctttaaggaggttgaggtgaatggcatccctattaaggtcaagtactgtgatacttgcatgctctacaggcctcctcgatgctcgcactgctcaatctgtaataactgtgtggaacggtttgaccatcactgtccttgggttgggcagtgtattgggctgcgtaattatcggttcttcttcatgtttgtcttctcaactacgctactgtgtatatatgtttttgcattttgctgggtctatattgtaagaattatggcatcagaggagacaacaatttggaaggcaatgattaaaactccagccttcatagtggtgataatttacaccttcatatcaat

SEQ ID NO: 22764 - DNA, 404 bp, Glycine max
gaataaaaaccattctcttcccttctatgggattgacaccttcacactgtcgctatcaccaatcccttatatcccccctccacttagcataccataattcaccgtcaatttccccattgatgatccatttggcatttcatcatatttcaccacttgtcctactccacttggataatttcctaacgtatagttttcaaaaatccttgttcttcatgagcttatagtttatgagtcctacgatttttggcaattcagcaacactatagatatatcttaggctaagagaagccttagcagcaactcaaatccaaaagtgtaagcctttcttcttgttattagtccatcttcaccaatggaagagaatatgaagtgtgaacaagatggtctcattgatgagttaatgc

SEQ ID NO: 22765 - DNA, 425 bp, Glycine max
  modified_base (417)..(417): a, c, g, t, unknown, or other
ggaagtgtgaagcactgagcagttgaggaaatgggaacccttgggagagcgatctacagcgttggtaactggattcgagaaactggacaggccattgatcgtctcggttcccgtcttcagggcggttactacttccaagagcagctctctaggcatcgaactctgatgaacatatttgataaggctcctgttgttgataaggatgtatttgttgcgccaagcgcctccgtcattggagacgttcaacttggaagaggatcatccatttggtatggagttgtcttgagaggtgatgttaacatcatcagagttggaaatggaactaacattcaggacaactctctggtgcatgttgcaaagtcaaatttaagtgggaaggtgttgcctacaattattggggataatgttactgtcggncacagtgc

SEQ ID NO: 22766 - DNA, 410 bp, Glycine max
ggaagtgagtgagtagtgagaatggagtttcaagggttaccggaaggttgcattgctagtatactctctcgcactacgccggcggacgtgtgtaggttttccgtcgtatcaaagattttccgttcggccgctgaatcggacgctgtgtggaaacgttttctcccttccgattaccattccatcatttcccagtctccttcgcctctcaactatccttccaagaaggagctctatctcgctctctcggatcgccctatcatcatcgatcagggtaaaaagagctttcaattggagaaaaagagtgggaagaagtgttacatgcttgctgctagagctctcagcattatttggggtgacactgagcaatactggaactggacaaccgataccaattccaggttcccggaagt

SEQ ID NO: 22767 - DNA, 179 bp, Glycine max
aggtgttagtacacctcagaaagggcatctaaccacatacttatcgagatattattcagtaccaagacattgggaccggaagtgtgacggctttaactgttaatgctcaagttaaaagtttaattcatgcaagatattggagctccttcagtatcacttgaatttgtatcactagcctc

SEQ ID NO: 22768 - DNA, 387 bp, Glycine max
attgtctcttctggagctgatatgtcaatatatttcccctagtcttagtagcagaacaggcttacagccctgcatggttcaattgaaaagctgttatttgatcctgagcagactgatgaatacattggttcattgaaagacaagtcaaagcccataattttctccatggcaaggctagacagagtgaaaaacataactggattggtagaatgctttggtaagaacagcaaattgagggaactggtcaaccttgttgtagtagctggttatattgatgtaaagaagtcgagtgacagagaagaaattgcagaaattgagaagatgcacgagctcatgaaaaagtataatttaaatggtgattttcgttggattgctgcccaaacaaat

SEQ ID NO: 22769 - DNA, 181 bp, Glycine max
aggtataataccacataaggagacaaactattaatgtgtatctaaaaacttatgtattatttccagaatagtgtgtctcacactgtgctgttttgttttaaacaaacatacttagaataaagtggtcatgtcttgcctttgagcaaactcaactgatatcaacttctgacgcctgtaataa

SEQ ID NO: 22770 - DNA, 371 bp, Glycine max
ggacccatacatgaaatagaatctcaattcaattcgtcttcgtcttcctcctcctctgtgcctatcaatctcttttgcaaacttctctttggactcttccttttgcatcaggctttctcccgatactcctcccttctctgcacccaacgaaaagcacaattctttttctccttttcgataaccccatcacacattctgcgtctaaaatgccaaaataataccccccttgtcttttccttcttggtgggcttgctctatggttatccttttcctctccctctcgagctcttttctccacaattggacaaaaccccttttgttcacatcaatcgcacaagacaattccctgttcaaaatcctgactatgtctc

SEQ ID NO: 22771 - DNA, 149 bp, Glycine max
tggaaccacccttctcctattaactctgcaacgagcaatgtgagcaactgcgtgaacaacaacaacagcaatggcatccaaattccaacaccaccactcactcccaaaaccaattccagatctgattccaacccttaccctaccacttt

SEQ ID NO: 22772 - DNA, 320 bp, Glycine max
tgaatactacagaatgggataaactattaatgtgttgctaaaaacttatgtattatgtctgtgatggtgttccagcactctggtgttttgtgttaaacaaacatacttagaataaagtggtcatgtcttgcctatcaacaaggtcaagtgttttggacttgtgatgggtgggttaaactcatgagtgcttctttatttttttttttaatgttaggtaaatggacgcttttgtttaaaagtcggctaatacgaaatatgaatctctgcttataatattaaatactaattccgggcacaaaaaagactatgatctgaacaaa

SEQ ID NO: 22773 - DNA, 479 bp, Glycine max
gataccaaaaacaaaacacaagccaagtgaaagtgagaaaaaataaaaatcaaagagcataatgtcagggatcattcacaagattggggagacccttcatgtgggagggcacaagaaggaggaggagcataagggtgagcaccatgctggagaatacaaaggggagcaccatggtgaacacagtattgagtacaaaggagagcatcatggtgaacacaaagctggagagtaccatggtgagcacaagccagagcacaaagaggggttcctagacgaagtcaatgacaagatccatggtgagggcggcgccgccgagggcgagaagaagaagaaggagaagaagaagaaggagcatggccatgagcatggccatgacagctgcagcagcagtgacagtgattaaactgctgcatcacctatatatttaaaatgtttatgggaccatagtagcgagggctgtgcctaaattgatctctctc

SEQ ID NO: 22774 - DNA, 324 bp, Glycine max
ggttctagtgtgtgattgtttgttgttgtaactggttcttcttcttttgttgttctgtgtttgtgtttgttttttctctcacctgaaaatgtcttgctgcggtggtaactgtggttgcggaagctcctgcaagtgcggcaacggctgcggaggctgcaagatgtacccagacttgagctacactgagtcaaccaccaccgagaccttggtcatgggagtggcacctgttaaggctcaatttgagggtgctgaaatgggtgtgcccgctgagaacgatggctgcaaatgtggaccaaactgctcctgcaacccctgcacttgctt

SEQ ID NO: 22775 - DNA, 392 bp, Glycine max
gaaaccgcgtcgatttttactttctttcggcatgggtttttccttctccaacccacattcttcttattccagaatatacacccaaattcctctttcctagggttttagtccaaagggttttggaggcatcaccatcaccatgagagccaaattgtttgtgttcccaatactatgcatgaactggtgcttctccagaaccatcgatcactctctctccgcttcccatgcttcctctcaatcccccttaaccctcaaagacttgtggaccaacatcaacgttggtgataagcccctgaacaccaaaactgagctctttgtctattacatcggccacatgatgaataatgcttggattggcttggataaagcgcccgaagggtctttcaagaaca

SEQ ID NO: 22776 - DNA, 276 bp, Glycine max
gataaactattaatgtgtagctaaaaacttatgtattatgtctgtgatgggtttcgtgcactctggtgttttgtgttaaacaaacatccttagaataaagtggtcatgtcttgcctttcaacaagttcaagtgttttggacttgtgatgggtgtgttaagctcatggttgcttctttttttttttttttaatgttcggaaattgggcgcttctgtataaagttcggctaatctgaattatgaatctctgcttataatattaaatactattactggg

SEQ ID NO: 22777 - DNA, 359 bp, Glycine max
atccttttgttgaattacttctaacaagactttcactcgagataactggtctaatttatagacagaatataaaaaatttcataaaaaaattagctctggtaaaatataaaacaaaggatacattttatagaaaaatgaaattaaaattgttagttattcatcaattattaagattgtgacatataaatgtatgcccttgtttttctttttttctttttaaaaacgcacctgtgttacttcagagcaatcaaatccaacaaaaattatccaaattttaaatcaagttcacaccttttttatcatttagaattttccatccttaacgttatcccattgagagtactttattaatatgaatc

SEQ ID NO: 22778 - DNA, 359 bp, Glycine max
ggtcgtttgcggcgttagaagacctattggggcgtgatggcgaagaagcgatcagccccgagtggcggtcgtctgtaaaaccgagccgaatcatcttgccgacggctcaactcagctttcggtcgcagaaaactcgttgtgttcttcatcgtatcgtccatcatcgctatcgtcacttatcgttatcgcttcagacaatcttctccttcgcaaggccttgtcacaactcatgctaattgccaacatatactcgccgaaaattcaaaagtatcaggaaattcgtctcagcgccattatacttatcctgtgcttggctacattactccctggaattctcgaggttatgaattggcaaaaag

SEQ ID NO: 22779 - DNA, 265 bp, Glycine max
gataaactattaatgtgtagctaaaaacttatgtattatgtctgtgatggtggtcgtgcactctggtgttttgtgttaaacaaacatccttagaataaagtggtcatgtcttgcctttcagcaagttcaagtgttttggacttgtgatgggtgtgttaagctcatggctgcttctttctttttttttttaatgtttgggaattggtcgcttctgtataaagttcggctaatctgaattataaatccctgctcataatattaaata

SEQ ID NO: 22780 - DNA, 408 bp, Glycine max
atgggagtatttacaggttgagtctaagtttctgcaaatatcatcaccttttgtgcaatcatgatattattctgatatcattgtttttttcatgggtattagtttgccacttgtggtcagttaatatttaatagatttttgaacatatcactgtaaaaattaatacttgacaacttttcacgagtatgatagccatcagattaccaatacaagctttatcatgttagctcacatcttgttcctctctgcatctgttcaattagattagttgtttccaaatgcatgttttgtcttaagtatacgtggttctgatttattttgttttcatagtttataatgtggtttagtagtgcgccttttacaaaccttgctcatgagggttgcgatgagaaagaaatcatttatgtg

SEQ ID NO: 22781 - DNA, 363 bp, Glycine max
gaattcacctatcccaataacaaaaaaacctgacttgaatgatcctgtgttaagagctaaattggctaagggaatgggtcataattattatggagaacctgcatggcccaacgatcttttatatatttttccagtagtaattctaggtactattgcctgtaacgtaagcttagcggttctagaaccatccatgattggggaacccgcggatccatttgcaactcctttggaaatattacccgaatggtatttctttcccgtatttcaaatacttcgtacagtgcccaataagttattgggcgttcttttaatggtttcggtacctacaggattattaacagtaccctttctggagaatgttaa

SEQ ID NO: 22782 - DNA, 190 bp, Glycine max
atttagagggtgagaaagattcatatagaattatgaatatacttgattgtatgctaattaaaaggattaattctataaacatattgatgcaactttagacccaaaatccccctaaatatgatactctattatgtatctggaaaatgatcattaaacattccaaattgaaaatagatcctctatgataaat

SEQ ID NO: 22783 - DNA, 130 bp, Glycine max
ggttctagtgtgtaatggtttttggtggaacctcgtccttcttctttggttgtcctgggtttgggttggtttttctcttaacctgaaaattcttggttccggtgtaacctttggttgcggaagctcctgc

SEQ ID NO: 22784 - DNA, 481 bp, Glycine max
gaaggtgacattctcatgtgattgcctatcacatttccattgcccaagaacattagtgtggaactagtttaaagcttcttgcagattcttctgaattttcatttgtaaaaagcttcaagtttttcctcctagatttttatatcagtgctgtacatgttgtcttcggttttgtggagaggagcgtgattcgaactcgtgttgattatttagttaattgtacagaaaaacattccagttatggttaaaccctttcttccctgtgtaatgctaatttcgtgaaacgattttgaaggtgcttcagtcactcaatggaacaagattgcctcaactcaactaaccaaggcacggatcataacatgcatcccattgttgaaatgtacatatatggagctctgaaatgggttaaaagtgacgtgttagacacaacaacaacgaatagagtgtgatcgcgtcatttgaaatgttacaaaatatttaacga

SEQ ID NO: 22785 - DNA, 478 bp, Glycine max
gaaaaccaaagagccgaacccggcctttagggaagaaaagaagaaaaaaaaaatcccttctctttttgtttccctctcttctctcttccatggaaaaaatggctgcagcttctagaaaaccaggaagcgcagtaattggatccctttcttcaacccctaggttctgcaactctcactctacatcatcatcttcttcttcctcagctttcgcttcttccacctccagcttcacctctcgctcctcctccttctttcaccgctcttgctctccaacacgtgtcaacctctactgttccaccgctccctccgtccggttcttcctcgaccgttcggtctctacgaaccgctccatctcggtggcgccgcgaaccggcgcttctaggcaaagcagtagcccgcaccaccagcagaagcggacctgcatgtgctcgcctacgacgcaccctggctccttccgttgcagccttcacatgaagag

SEQ ID NO: 22786 - DNA, 482 bp, Glycine max
ggaggaatcctgaaactttgcttgattaaatttttatggtggcacatggcagggtagttgtcggcttgagaatggataaaagcatatctgacaaggatcagggagctcttgtagaaggttttgatttttgtttgccagaggttttgattcatgggtggttcttctgagtttgagacagagttgtactttggacagatatataaaatactgatcttcactccttccttccaaggtcagttaagtcattcctgttaaatttaatgtggtgtatcattgttatgcattacatataaggattcatcacatcaatcaataattgattcttttattggattattgagctaacccagttggcatttctggttgaatattggtttactcattttgtgcaaataggaaatgcaagtgggtttatttaaattctacattatccttttctttaaggagaagattggattttttttacttctgatttagtgttt

SEQ ID NO: 22787 - DNA, 389 bp, Glycine max
ggaggaaagaagagagagaacaaagcacttagtgcgattcaataattacgaaaaaccaacagcgagtgttgtttttgtttggtccaggctggaccagggaatgaatagagatgagaggctttcggttgaagagaactgagttaagcggcgaagccaaacgcagaatctgcggcagaaattgccaccggaagcacgtctaagacgggtgaaccaaacacaatattccatccaccacttctcttttcaatccccaactcaaatctgtgaagaaaatctcaatttctaaattgtaattcttagcactactgctagtagtagttataaagtaacaattagaaagtagtagagtgtttgtttttctttttttcgtgtgttttacttttaagatg

SEQ ID NO: 22788 - DNA, 302 bp, Glycine max
gattgtgaaatcaacagagaaacatttcactaatagagagacataagcataatattgagaaataatggagggttgtacttattgtgtgaagttgctatgccttgttgggtttgtggtgcttgtgagtactattgcaggggtggagagtgctggtgaatgtgggaaatctaccaccccagataatgaggcttataagcttgcaccatgtgcctcagcagcacaagatgagaatgctagtgtttctcagagttgctgtgctcaggtgaagaaaattgggcagaacccaagctgcctctgtgcag

SEQ ID NO: 22789 - DNA, 420 bp, Glycine max
  modified_base (376)..(376): a, c, g, t, unknown, or other
gagggggaaagatcccagttttgagtgacccttctaatctttttatcttctcttctctgtccctcactccttcctttttcctctctcacacatataaatatatagcttctggatcttcttccacctcttaacggatctcagattccaaaatctatctcctttaggctctccaaatttttacttcagttcttaatctcctgaaattctgtttttttttttgtgtgtatgtgtgtgtgttcgaacttcaaaaaaaaaaacatgagtgaaagcatgcaactttgtagtcaaagagtgaacggcacatagcagcaagttttcagctttggaaagttcacttagctaattggtttttccccctttagctgctttatatttntccttttagtctttgacaattggcttttctctgcaagctctttt

SEQ ID NO: 22790 - DNA, 398 bp, Glycine max
tgggcaattaagggttttggggaagcatatacgttaagagagccaaattttgagtctgagaatcttctcttcccgttccttcatctttaaagaatgacttgtatataattgttaatcatttgttcatcaatttaaagtggcatatagtgaatccaggagggccattatttgcgagcatagaaattggattatatctgatgtgcctttttcatgttgcagtctgatgttaacactgtctgctttgctgatgaatctggccatctaatatattcccggagtgatgatagttttatcaaggttacattcataacttggttatgttgaatttgctaatatccacttatatctatgttggcagcaatatctgtatttaatggatgtctttattccaatattgg

SEQ ID NO: 22791 - DNA, 270 bp, Glycine max
gatggatttaactggactcatttacaatatgtgggtaccatttttagtgcacctaacttctgttaccgatttttgaacatggcttacatatcggaggttgattattgcaagggccacacatttattcagtttgaacctgctcctatgagaggtgaaccttatgtcactctgagaacgccctattacttcttataatgtagctgacgaatgtcatactgctatatcaaggtttcctctactgcacttattttatgttgtttcgcattctta

SEQ ID NO: 22792 - DNA, 468 bp, Glycine max
gaagatgagcaacctaagaagaaagtgcgattggggagtcgggctactcagtggatatcagtgtataatgctcgccgtcccatgaagcagagatatcactataatgttgcagacactatgctacggcagcatgtagacaagggtattgaggatgggttgtatataagctgtgtggcctctgcaacaaatctgtgggctctaatcatggatgcaggaacaggtttttcttcacaagtttatgagttatccccggccttcctgcacatggactggattatggagcagtgggagaaaaattactatatcagttcaatagctggcgcagttaatggaagttccttggttgtcatgtccaaaggaactccttacacgcagcagtcctacaaagtgagtgaatcatttcctttcaaatggataaacaagaagtggaaagaaggattccatgttacctcaatgactactgctggc

SEQ ID NO: 22793 - DNA, 202 bp, Glycine max
  modified_base (69)..(69): a, c, g, t, unknown, or other
  modified_base (149)..(149): a, c, g, t, unknown, or other
cgcgtgcgtgcggaagaccacataagggatatcgaacgaattaattgacttttctttttgaaagtttcnttaccttggaggcgctatatttctggtaatttcttaaatatgcttactatagctacataccaagactatgcatgtctgtntggtgctactgttacttaaactttttaagcgtgcttttttttttttctaatct

SEQ ID NO: 22794 - DNA, 297 bp, Glycine max
  modified_base (268)..(268): a, c, g, t, unknown, or other
ggctcacgatctgaggaagacaccaatcttctctccacgcccttcttgggtaaccgtctgaagtgcaggaatggcagatggattgcattcgcagcatccatcggtagttcagaagttatctggacagtcttatcttgtgtccaggcttgctcctaatcactccagaaactgttctaccactggtagttacttcaatggaggtttgcagtcttcaggtttggttccagtcacggcacacgcgccggctgagaaaggggtgtctggattnttgttggatttcctgatgggcggagtgtc

SEQ ID NO: 22795 - DNA, 422 bp, Glycine max
ttcgcatacatgagataagccaattgtgataagccattcactcaggtgaaaagaaaaaaaaaaacatatagtaacaaaaccatggtgattcacagactcgaattgtgcataaacatggttcaactcgccatagagttcgtcgtgagcgtcgcggaaacagtggtcatagttcagcagagaaccgtggagcctctcggaatgttgaatcgcgcaagtacacctcttcctttctatggctacctccgttgaatgttgaagagcatcgcttgattaattactttctagctttcttttcttctatgaaatttcgcaatttttatagaccccgttgtttctttccttttgggtgcattaagcgctgattgatgcatacccacacgagttgcttgtgttagtgaaattgatgcccttgtttttttttt

SEQ ID NO: 22796 - DNA, 416 bp, Glycine max
accgcccatcagagccatcgttaaccattggtctttaagaagacgtattctcaaaatacctatatctacggctgtggcaataggcgcatgatttggtaatactccaatttgtccgctattagtagataaaatgatttccttcacttccgaatcccaaacaattcgattgggggtcagtacacaaagatttaaagtcatttcttcaaattgctctccatttctaagttcgtagctttcgcagtagcttcatcgatattacctaccaaataaaaggcttgttcaggaagaccatctaattctccagaaagaatcaatttaaaccctctaattgtttctgctagactaacatatttccccggcgaaccggtaaaaacttctgctacgaaaaaaggttgtgataagaaacgctcaatttt

SEQ ID NO: 22797 - DNA, 229 bp, Glycine max
gagaacagagtgacgccaacgcaggaggcaggggcaggttctccaccacaccattctctctacgtgcaagtcaaaaccggcattcgcacgagtcacaaacttcaccgaacttccgtataaattctcttctcttccgggattattactgaaagaggaatagaatagtcagcgatggcacagaagagattcatcatcgaggtcgagaaagcgaaggaggcgagcgaaggaa

SEQ ID NO: 22798 - DNA, 195 bp, Glycine max
gggtgtttaaaattaaaaccgagcctctgggccaaatgagagacagagcgagagataatcgtaacaaaagctgtatctggaagtagatcgacatacgattttagccatttgatcaacaacaccctaataccgatcataatatgctattgctcgtatggcaaacctcagcactattcttttcacggccgatgccgc

SEQ ID NO: 22799 - DNA, 479 bp, Glycine max
  modified_base (69)..(69): a, c, g, t, unknown, or other
ctaccgttgctttagctttacttacatcaattgcatgtttctagtcgggtctttcaaaaaaaggattancttattttaataaatacatccaaccaaccccaatccttttaccgattaacatcttagaagatttcacaaaacccttatctcttagttttcgacttttcggaaatatattagctgatgaattagtagttgctgttcttgtttctttaatacctttagtagttcctatacctgtcatgttccttggattattcacaagcggtattcaagctctcatttttgctactttagctgcggcttatataggtgaatccatggaaagccatcattgaccagttttctacaaaatagtccttttcgtttagcttgccgcacatatattgcggctcaatataatctacttagtaaacatctatatctatctacctatatctatatagatataggtagatagatatagatagatattcgat

SEQ ID NO: 22800 - DNA, 415 bp, Glycine max
atatcaaacatatataatttcaacaagtacccttcagacattgggtagcacacttaatgaagaagagttggctgatataaaagatcaatttgatgctatagatgtggacaaaaatggttctattagcctggaagagatgagacaggtagcatttaatttactggctttgtgactaacttaaatctatatacatcgcttacttattggtatttagcaaattattcccttatatatcatttccctactttagtctaaagggaagattttgtgcatgctcttgccaaagatcttccttggaaattgaaagaatcacgtgtactatagatattgcaagcggttaataatgttgatctttttacaaaaaacacacattggtttgattgctggttctcaatctatattcaaagtctaaatt

SEQ ID NO: 22801 - DNA, 429 bp, Glycine max
  modified_base (401)..(401): a, c, g, t, unknown, or other
ggtagagaagagttaatggctggagcgtgaacagatcagaggcatacaggtggcaagtaagggaaattaatgcgagttacaggtgcatacatgtataccatgcttgtgatggcacagctatgaatgctggtgtcagtttcaatatggctttcttcgtgtttacattttccataaggaaatttgtcaaaggataattctcaaatttaatttccatgagtaatatcttcatactgtattaaatggagaaagtattgacttttttatatttttaatattgtttttattagaaaaaatcacaaacaaataataggaaatttataagttaaaaatatatcttatttaatcaattgagtttagactcttttatttttttaatatattaatatattttaatttttatntaatatttatatttaattacaactcatt

SEQ ID NO: 22802 - DNA, 143 bp, Glycine max
  modified_base (69)..(69): a, c, g, t, unknown, or other
tgtgtggtcctctaccaccaaagtggtatctgcgctggcttagcctgatcacgagttagtgggaaacancttctctagtggagcacaagcttttaatgcaagcagaaattgagctatattaatgtgaagatgtttagttattt

SEQ ID NO: 22803 - DNA, 505 bp, Glycine max
cccacgcgtccgatcacatatcctggatcaagtaaagactctgggattccgtcaagctacggatacatccatttcattaggaattgatgaccttttaacaataccttctaaaggatggctagtccaagatgctgaacaacaaagttttattttggaacaacatcatcattatgggaatgtacatgcagtagaaaaattacgccaatccattgagatatggtatgctacaagtgaatattttcgacaagaaatgaatcctaattttaggatgaccgacccctttaatccagtccatataatgtccttttcgggagctagaggaaatgcgtctcaagtacaccaattagtgggtatgagaggattaatgtcggatccacaaggacaaatgattgatttacctattcaaagcaatttgcgcgaagggctttctttaacagaatatataatttcttgctacggagctcgtaaaaggggtgtagatactgctgtacgaacatcagatgct

SEQ ID NO: 22804 - DNA, 233 bp, Glycine max
cactgtctcaattaattctgctatttgccgtctagagttctgttcgctgaaggcgctctttctcgaacattcttcttaattcttgcaatacctcatgcgtggtgacgaacccctcggagctttgctcaagaaatgcaacttgtgcatcaatttctctggttgaaaccattaattattctctgaatcgagttctatgatagctctctttggaatgtgatcacattgatgaatcc

SEQ ID NO: 22805 - DNA, 110 bp, Glycine max
ggtttgtccatgtcaagattgttaatgttacttgataaattagtaactaacaccttggtgtcatgcatgggaaacattaatggtaaatcgattaagttttcaacttaaat

SEQ ID NO: 22806 - DNA, 422 bp, Glycine max
tcgagcatcatcggaggttggtaaatctatgggtggttgtgttatactattgtagtcatgggcttggtaccgcatgccttttattgcaccaagagtcccacgacccgaaacaacgtttccactggctaaaaggttatttacatatagcgaaatgtaaatttttttatttcaatgacttgtattataacattacaatgaatactgattttgtatgttttacatttcagattgagtggtggtagattagaatatagggccacacctcatggtgacttagtcggatataggtctcatatagatcatatggagagccataaggtataatactatcatgatctgcaccttaaatatgtacatacatactaacatgttgccttgttggcatatatttcagttttcttgggtcccatatagaggatttg

SEQ ID NO: 22807 - DNA, 426 bp, Glycine max
gaaaattctaattaaaaaaaaagcaaaaataatttatatgttcttaaagaacaaaatgtttgttatgcttaatatctttaatttggtctgtatttgtattcactccgtcctttattcaagtagttttttctcggcgaaattgcccgaagcctacgctttcttgaatccaattgtggatattatgccagtaatacccttactcttttttcttttagcttttgtttggcaagctgctgtaagttttcgatgatatctgtaatttgagtaatgtcttaaaaaaaaattaagaatttatcagaaaactaaaattcgaacattttaacaatttaaaagatcaaataagtcttacagtgtgaattatcgattccaatattgaaatttttggatatttacgaaaaaatacggaccatctcatcatctacgttt

SEQ ID NO: 22808 - DNA, 250 bp, Glycine max
gacaacaaaaagataacattaataacaattaacaaaccctggtctctattttcacttcttttcttttcttctttttaaggatccaccccttctctctttatgctctttcttggggaatgtatgtgtgtggaacaataaccaatcttttcttgctaaagcaacttcctttcatctcttcttgttagctttcaacacaatccatgaccccacaacattagtctctctctttctctttctctctctatatctc

SEQ ID NO: 22809 - DNA, 391 bp, Glycine max
ggcctcatcgagacctacaagttgaacggccaattcagatggatatcctctcagatgaaccgtgtgaggaacggagagctctaccgtgtcatctatgacacaaggggtgcctttgtgcagcctgcagtttatgaggcctttgggttgactgtggttgaggccatgacttgtgggttgccaacgtttgccacatgcaatggtggtcctgctgagatcattgtgcatggaaaatctggttaccacattgatccttaccatggtgaccatgctgctgagatccttgttgagttctttgagaagagcaaggctgattcatctcactgggacaaaatctcccatggtggactcaagcgtattcatgagaagtacacatggcaaatttactcggaca

SEQ ID NO: 22810 - DNA, 279 bp, Glycine max
tattgggatggtgcaagagtttgttgcgagccattagctagtttatcgtgaggtgtatatcatatcggttgaactctttgttgcttcaatagtttttttatcaaggtcattccattgagcatgctaccaaattttctttgttcaaacgaaaactgtctttcgtgagcgttcttgttaaaaaaattcacaagtcctaaacttgctgaagaatcacacatcatatcttcctttaaaaccatttctgaaaaatgcgatgaaccaacctaatacttcattaac

SEQ ID NO: 22811 - DNA, 272 bp, Glycine max
gtgtgcatggttgtgatgtgtgcacacaacactgtgcaaggcattacatgtgggcatggtcacggtaacctaacaccatgcctagggcttctacataatgggggggctgttaccataagatgctgcaaccgcctcaggagtattgggagcaatgctaggaccactgatgatcaccgtcgtgtgtgccaccgattgatgcttgctgctgatgctgttcgtaggagcaacacttacaatggttaagctctccccgggtaatgtgggggctacat

SEQ ID NO: 22812 - DNA, 394 bp, Glycine max
tatatatatttttaaattatgtttaattcggaaaatatgaatgacagataaaattgtgactaatactttaaaataataatatttcatgttacaattttattatttttattatggtaaattttatgataaatattattttgtgctttaatgttatatgtttataatacatataaataatttttaatataaactattatattaaatatttaacataatagtttataatacaatattagaataataatatttaaattttattataaatttaataataaaatattaatattgtatatgttatctcttaaataattagaattccaataaatattaatttggtaaccgtcatgttgatatgcataattagaatatttaaataattatattagactggttc

SEQ ID NO: 22813 - DNA, 400 bp, Glycine max
caacagaacggggtgcaattgaaagagagatttgatagcctaaactcaagtaagggttttctctttgagaaaatcgtatcttacaccttttggtgaccactttgagtgagagaagagaaattaagagagatactcaaattagattcaagagagatggccatcaaccatgaaacttgggctttcattttcggtcttctaggcaacgtgatctactttatggtgttactcgctccattaccaactttttaccaaatctacaagaaaaaatctacggatggggttcaatcactaccttatattgttgcactattcagatcaatgctctggatttattacgcactcgtcaaaaaggatgctagcctccttctcattactattaactcctttggatgtgtgatag

SEQ ID NO: 22814 - DNA, 340 bp, Glycine max
aacaacacaaaagggtgcaatttcaaaaaatatttcttaccctaaactcactgcggcatttgatatttggggaaatcgtatcttacaccttttggtaaccactttgactgacacaatagatattaacaaaaatactcatattataatcataagagaatgccatcaaccatgaaacttcgactttcatttatctgattctaggacaactgatctactttatatattatacttacttcattaccaactttttaccaaatctacaaaaaaaaatctactgaatggaaacaaatactaccttatattgtttcactacttcatgctaatctcatcatttattaca

SEQ ID NO: 22815 - DNA, 423 bp, Glycine max
gacaacaaaccaaaaaacagagctgggtagcaagactaaaatgggagaaactgcagtgtccttggcaggtcagcaggcgcttccaaaaatattggaagctgtcaaaatgttgagagatctcccaaaagaagttagagacattacagatgaacttgaaagctttcaagatttcatcaatgatgctgataaagtggctgaagctgaagaagatgatggaaggcgtcatagaataaaagaaagggtgatgcggctgagagaagcagcttttcgcatggaagatgtcatcgatgaatataacatctcctgtgaggataagcaacctgatgatcctcgatgtgcagctttactatgtgaggctgttgccttcatcaaaactcaaatccttctccttcaagtgcgtataagattcaggatgttaaatcc

SEQ ID NO: 22816 - DNA, 349 bp, Glycine max
gacaacaaaccaaaaaacagagctggctagcaagactaaaatggcagaaactgcagtgtccttggcaggtcagcaggcgcttccaaaaatattggaagctgtcaaaatgttgagagatctcccaaaagaagttagagacattacagatgaacttgaaagctttcaagatttcatcaatgatgctgataaagtggctgaagctgaagaagatgatggaaggcgtcatagaataaaagaaagggtgatgcggctgagagaagcagcttttcgcatggaagatgtcatcgatgaatataacatctcctgtgaggataagcaacctgatgatcctcgatgtgcagctttacta

SEQ ID NO: 22817 - DNA, 432 bp, Glycine max
gacaacaaaccaaaaaacaaaacgggctaacaagactaaaatggcagaaactgcattgtccttgacacgtcagcaggcgcttccaaaaatattgaaagctgtcaaaatgttgagagatctcccaaaagaagttagagacattacagatgaacttgaaagctttcaagatttcatcaatgatgctgataaagtggctgaagctgaagaagatgatggaaggcgtcatataataaaagaaagggtgatgccgctgagagaagcaacttttcgcatggaagatgtcatcgatgaatataacatctcctgtgaggataagcaacctgatgatcctcgatgcgcatctttactatgtgaggctgttgccttcatcaaaactcaaatccttctccttcaaagtgcgtataatattcacgatgttaaatcccttgatcg

SEQ ID NO: 22818 - DNA, 417 bp, Glycine max
ggtatcaaaatttttgaacctgaaaattgttattttgatagggtttacagcaaatgcagcatagcctgcctcgtcacaaaatactgaacgccgcagctctgtggttgatcgacgcattcttcacttcaatcccacaatgtctataacgcacagcctcaccacttcactctcttcttcttcctctgctttcttagctccctcttccttcaattccagaggacaggtttcgttgcctgtgaagagcgtgagcatttgcaaatgcgttgccacacccgaagctgagaccgcctacaagacaggggtcactcgcaatccaaatatggggaaacttcaagctggctatctctttcctgagattgctagaagaaggtctgcacacttgctgaagtaccctgatgctaaagtaataagccttgg

SEQ ID NO: 22819 - DNA, 247 bp, Glycine max
gatgctcctattaatacctgtctcatatatattaggccatcttttctatcctgggagacacacttaattattataatctccaactattctctttaaaatccttttctaatataaatattatataccgattgaaatgtaaccacacgcttaaattaagcatattatgaaagcattcttatgcacagctacttattcttccactcttctatcctcttccaatttcttcataatgaaacacgtttataaa

SEQ ID NO: 22820 - DNA, 440 bp, Glycine max
ggttttcgtgttgggttcaaaggaaactatcaagggagcaaggaggagaagtattttattaataaccacttgagtttcagagtcatgtatcacaaggatcctgaaactggttctgctcgtattgttggatttgaggtcaccccaaacagtataaatcatgaatacaaggagtggaatgacaagaatccacaggtaacaacatgcaataaagataccaagaatttgatgcaaggtagtactgtcccacaagaagttgatacaagcaaggatattgtattcacatatgatgtttccttcacggaaagtgatatcaaatgggcatcacggtgggacacatatcttttaatgaatgatgatcagatccactggttctgcatcattaactctctgatgattggtcttttcctgtctggaatggcggcaatgatcatgatgagaac

SEQ ID NO: 22821 - DNA, 322 bp, Glycine max
gattactgggacatcccaagcggactgtgctgtgcttatgattgattcgaccactggtggttttgaagctggtatttccaaggatggacagactcgcgaacatgctctggtttaattcacccttggtgtgaaacagatgattgctgctgatacaaaatggatgcttctacacccaagtattccaaggccaggtatgatgaaattgtcaaagaagtctcttcctacttgaagaaagtaggatacaaccctgacaagattccttttgttcctatctctggttctgagggagacaacatgattgagaggtccacataccttgact

SEQ ID NO: 22822 - DNA, 241 bp, Glycine max
ccgtctcgactcacgcgttcgacccacacatcactacagaagacaacacacgtcgacccatccagaatatattcactgaatagggactctcttaggttcaaccactatgacgcattaccataaacttgcatactgcacatatgatcaaactattaacgtcaaacacttattttcaataacatcgatctaattatattacagataatgagatcactatacactactgcacataatatattct

SEQ ID NO: 22823 - DNA, 415 bp, Glycine max
gaccacacaccacacacatagtagctattatactgtctagagtaattgcggaatctgctagaattttctaataatggcgaaagacgttgagcaggtcacagagcaaggtgaatactccgcgaaggactaccatgaccctcctccggcaccgttgatcgacccagatgagctcacaaagtggtccttgtacagagccgccatagctgagttcatagcaacactcctttttctttacatcaccgtgttgaccattattggctacaagagacagagtgacaccaaaatccccggtaacaccgaatgtgacggcgttggcattttggacatcgcttgggccttcggtggcatgatcttcatccttgtttactgcactgccggaatctctgggggacacatcaaccctgcggtgacattc

SEQ ID NO: 22824 - DNA, 447 bp, Glycine max
  modified_base (404)..(404): a, c, g, t, unknown, or other
  modified_base (432)..(432): a, c, g, t, unknown, or other
ggttctagtgtgtgattgtttgttgttgtaactggttcttcttcttttggtggtctgtgtttgtgtttgttttttctctcacctgaaaatgtcttgctgcggtggtaactgtggttgcggaagctcctgcaagtgcggcaacggctgcggaggctgcaagatgtacccagacttgagctacactgagtcaaccaccaccgagaccttggtcatgggagtggcacctgttaaggctcaatttgagggcgctgaaatgggtgtgcccgctgagaacgatggctgcaaatgtggaccaaactgctcctgcaacccctgcacttgcaagtgaagtgttgggagagcaagcttcaagcagagatagcccttaattaggaataatgatcaactattaatgtgtagctaanaacttatgtattatgtctgtgatggctntcgtgcactctggtg

SEQ ID NO: 22825 - DNA, 353 bp, Glycine max
cggccagagagcgtgatcatattatgttctaaactgcctataccggacccatggtctactatgattttatcaataaccactcaaatgtctatcgcattgttcataaggatcttaactccccgaacgccatcaattgcccttctgaggtcacctctatcgccttagatcatctcttcaaggcgacctatgacaagaatcccctagcaacgaccagcaccacactgcccagaactaacatcaacgatatgactgttctacgagaaaagcctaccatcatggacattgtaaacacatacgatgcttgtttcacggaaagtcatatcagatgtgccttacgaatgcacacatatctc

SEQ ID NO: 22826 - DNA, 427 bp, Glycine max
  modified_base (416)..(416): a, c, g, t, unknown, or other
gaagaaaacagaagatgggtgagggcatagttgagagatcgctgaacagcttaggaaagggcttcgacttggcctcagatttcaggctcaagttctgcaaaggcgaagagcgtttggttcttctcaacgaaacagagaaacgagagctcatggtgccaggtttcagacccatcagagatgtctccgttgacatcaaatgcgacaagggcgatcgcacccgctaccaatccgacatcctcaccttcacccaaatgtcagagctcttcaaccagagaagttcaatccctgggagaattccatctgggtatttcaacaccgtgtttggatttgacgagggttcatgggcaactgatgcagctaacacaaagtgtttgggtattgatggctactttatcaaactcttcaatgctcatatngatcggtaccc

SEQ ID NO: 22827 - DNA, 404 bp, Glycine max
gatgaaaacaaaaggtgcctgtgggcatagctgagagatcggtgtttattttaagaaaggacaacgacttggcctgaaatttgacgctcaaattctccacaggcgactatcattactttcttcttaacaaagcaaacaaactaaatctcatggttccacggttcacacccaccacaaaagtctctggatacatcaaatgctactatttctatcacacccactgccaaaccgacatcctcatcttcacccaaatgtcagatctaattccccacagaccttgaatacatcggagaatgcattatggatattgcaacacctgtttgagcttttaccatgtttcatgaacaatggatgcatcgaacacagcgggtaccactatcaaatgctactgtatctagcttttc

SEQ ID NO: 22828 - DNA, 443 bp, Glycine max
ttcggtaaaaattgatttatatttgaactttaatgaatttagtgtctgaatgtaaaaaaataatgattttggcctattaatcatagataatttttactgtgaagaggaacaaaaattattagttttttataaattaattagaggactatatatttgacccttcattgtaactatcttaaaaataataataataatttctgattagaatataattagactcatcaatgattttatgcctaataaactcaattttaatttatgttaaagattggtggtggaaaaaaagaaagaacgatgaaaacatgcattactttgatttatttactgggtagataatgacagggccgttgcttgcttctttaacgatgttcacgaagacaacctctgcgaaatggtgtattatgcgtttgggtataaaaagattgaaccatggctgtggaaca

SEQ ID NO: 22829 - DNA, 392 bp, Glycine max
ctcactaacaatggacttatatacgagctttagtggatttagtgtatgaatggggaaaaataatgatttttgtatattcatgatatataatttaaactgataagaggaacaaaaattattacttctttataaattaattagatgactatatattagacccttcattgtaactatattaaaaataataataataatttttgattacaatataattacactcatcaatgatttcatgcctaataaactcaattttaatttatgttaaagattgtttggggaaaaaaagagagatagattgagaacaagcattacttagatttattcactgggtagataatgacagtgccgaatcttgattctttaacgatgttcccgaagacaacctctgcgaa

SEQ ID NO: 22830 - DNA, 388 bp, Glycine max
gtcagagtcgaagaaatcagtgcttagttcggtggatattattgggcttggaactggacctgaattggagaagaaacttaagtatgcagctgacatttcttctggaatcattctcggaagggagcttgtgaattctccggctaatgtgctcacgccaggggtattggctgaagaggcatcaaagattgcttcaacatataatgatgtttttactgccaaaatattagatgctgagcagtgtaaagaattgaaaatggggtcctatcttggtgttgctgcagccttagcaaatcctcctcattttatccatctgtgttataaaccaccaactggacctgtcaatgtcaagttagcattagtcggaaaaggtttgacttttgatagtggt

SEQ ID NO: 22831 - DNA, 330 bp, Glycine max
ctcttgtttcaagacctagatgaactctatagaggcatacattgggatgtttttctctatggtagctgagtcatagatctacatatatcacgccgttgctggagatgttatactccttaacattgtgtgatcaagtacttgctattggtgactctatcactgtgcattttaatttctgtagacttaatttacacagatttttcataacatgattatcctgaaaaatctagagaaccttttttgatatatggatttcaattggctcatcctagactttctatgattgttaaatttgctgatattaatactctatggaatcttcttatgtcc

SEQ ID NO: 22832 - DNA, 416 bp, Glycine max
ggaagagtgaagagaatggctcccaagggtttaacctttctggctgtgttaatatgcgtttcaacactgtcactgagtccttctgttgcgggggaagggcaaaataatggccttgttatgaacttctacaaggaatcatgccctcaggctgaagacatcatcacagaacaagtcaagcttctctacaagcgccacaagaacactgctttctcctggctcacgaacatcttccatgactgtgctgttcagagttgtgatgcttcactgttgctggactccacaagaaggagcttgtctgagaaggaaacagatagaagctttgggttgagaaatttcaggtacattgagaccatcaaagaagctttggaaagagaatgccctggacgtgtttcatgtgctgatatcctcgatctctc

SEQ ID NO: 22833 - DNA, 396 bp, Glycine max
  modified_base (388)..(388): a, c, g, t, unknown, or other
aagacgacagaagggggagttgaaggggttagggtttaggaagggatggaagcggcagtggtggacgtcggctctaagctcctcaaagcgggctttgcaattcctgaccagactcctgccatgataattcccactcagatgaagcaattactcgatgatggatccgtcgcagataattcactggctgacaatgtcaccgttgatcccgttgtgcgaggatttattagagattgggatgcaattgaggatttgttgcaccatgttttgtataccggcctcggatgggaaattggcaatgaaggacaaatactatttacagatccactgtgtaccccaaaggcgaacaaagaacagtggtgcaactaatgtttgaacattcatatatcangatttatg

SEQ ID NO: 22834 - DNA, 335 bp, Glycine max
aacacgacagaagtgggagaagacggcattagggtgtagaaaggaatgaatgcctcccagggggacaacctatctaaccgcctcaaagcgggctataccactgctacaccagactttttccttcataataacgactcaaataaagcctttacttgaacatgtacacggaatcaatcactcactctctaaacatcataacagaacacgctatgctcgactacatactccacaataacactgctttctacgatctgatgaaccattttcattattccgctcttcaaaagtaaaatgcttaactagtactaatactctcaacaaatacactttgttcc

SEQ ID NO: 22835 - DNA, 507 bp, Glycine max
  modified_base (6)..(6): a, c, g, t, unknown, or other
accggnccggaggtccacgctcgacccaaccatacaacgggtagtatgaacgacgtaagggattaagtacggaactaaaccaaacatggggacaatgggatataagcggctcaaagcggccttagcaattcctgaccagactcctgccatgataatttccactcacatgaagcaattactcgatgatggatccttctcagataattcactggctgacaatatcaccgatgatcccgctttgcgaggatttattagacattgggatgcaattgaggatttggtgcaccatgttttgaatacctgccatctataacaaaatggcaatgaaggacaaatactatttacacatccactttgcaccccaaaagcgaacaaagaacagttgatgcaactaatgtttgaaacattcaatatatcacgattttatgcctcacaacacgcaatgttatcactctatgctgagggacgtatctcatgctgcacttgtgatattggacatggaaaaat

SEQ ID NO: 22836 - DNA, 351 bp, Glycine max
gacacttgattagctgaggaggaagagagaaaaaccatggcaataacactcaacaatggcttcaagatgcctatcattggattgggcgtgtggcgcatggaaggaaacgaaatcagggacctaattctcaattccatcaaaattggttatcgccattttgattgtgctgctgactacaaaaacgaagcagaagttggagatgcgcttaaggaggcttttgatagtggccttgtgaagagagaggatctcttcattaccaccaagctttggaattctgatcaaggccacgttcttgaggcgtgtaaagacagtctcaagaagcttcagttaacgtatctagatttatatctt

SEQ ID NO: 22837 - DNA, 366 bp, Glycine max
gaagggatcaaagcatcacctgtggacatcgggtataatcggctcaaagcgcacttaacaattccttaccaaactccttccatgataattcccactcacataaagcaattacctcaatgatggatcctacgcaaataattcactgactgacaatgtcaccgtttatcccgttgtgcgacgatttattagaaattgggattcaatttacgatttattgcaccatgttttgtatacctgcctcggatgggaaattggcaattaacgacaaatactatttacagatccactttctaccccaaaagccaacaaaaaacagtttgtgcaactaatgtttgaaacattcaatatatcatgattttatgcctc

SEQ ID NO: 22838 - DNA, 398 bp, Glycine max
cttcagtttcaagacctaaatgagcacaaaagaagcatacatttggaggttattcgagatggtagaagagtcgagatctccatatatgatgttgttgttggtgatgttataccccttaacattggtaatcaggtccctgctgatggagttttgatcactggtcactctcttgcaattgatgaatcaagtatgactggggagagcaagattgtcgaaaaaattctagtgatccttttctgatttctggatgtaaagttgcagatggcagtggaactatgctggtaacagctgttggtattaatactgaatgggggcttctaatggccagcatttcagaagacaatggtgaagaaactcctttgcaggtacgcttaaatggtcttgctaccttaattggt

SEQ ID NO: 22839 - DNA, 435 bp, Glycine max
  modified_base (365)..(365): a, c, g, t, unknown, or other
gaaaacaaaaaccaatattttacttatcagagttgtttccaggagaaatagtagttacgtgtccctttaagcgaaaaaaaatccaaatctgttttgacccaattgatgttcatgtcggctgtgtcctttaacttcgtggaataacaaaaattcggttgcaacaattcatgaattcattaccccaatttgctttctcgcaaaaggaagcgaccctgattggttttgttgcatgtaatggagattttggattatgggcaccccgcataatccaaaaaggtcttacttttcttttgggagaattgtcagagaaagtctcttgtgctaatggagcattaaaatcatttccaggaagtgttgaagcatangaagctctagattcctcagcccctatcttgttattccttttggcaacagatgagatgtaatatatgagtc

SEQ ID NO: 22840 - DNA, 379 bp, Glycine max
gctccttcttgggccacctttggcctcatgaaacccgccatgcagcatatcgctgtccaggaaggcatgctgtggggttctgttgcggagcgagtcagaggaggctccgattttgacttcgagaatggcagagtcaaaccctgggagggtgagagaatacacgaggttggaatggatgatttggagcttactctaggagttggaaaggcttgatttgttgcaatcccttgcttggatctgctactctactactaccctcagggcaattggttgttatgcttaatttctctatatttttcccttttatgtgtacagtttccttttcatatagcagtggttaggtgttacatttcattacttggaatttgacttcattgta

SEQ ID NO: 22841 - DNA, 444 bp, Glycine max
ggcacaagtttgttgagatagctagaagcaataagatgaaaatgaaagtgcttgttttgtttgttgctacagttttggtagcatatgaatgccatggctcagactaccagaagttccctctccaaatgaaaactgggtttggtgggcaatacagcaatgaggtggcatgtgccagttggaggcttggcgtggaagcaaacaacgtagtcaagtggcaaactgttcctgcagcttgcggagagtacatagctgactacgttctaggagaccaatatagatcagattccaaaacagttaaccaacaagcttatttctatgctaaatccctcaaactcaccaacaaagatgtctttgtcttggacgttgacgacactactctctctaatctccagtattttgctaaccatggatttggtgtggaaccacacaatacgacggcgttta

SEQ ID NO: 22842 - DNA, 354 bp, Glycine max
cactacaagagctaactaaaggtgtgagatcttggcacgcattccacgaacacacatgggcatcaatcatgttaagacattaccaggtacacatagaggtcacgataggtactaaagtattcctcgaaacatccacaaactttttccagattaagggaaagaggactaacatttatctcgcttataatacaactatcatcactaattctttaggtcacctatcttacacaagaacactcactcttgaacccttccatgcttagcaattaacgccttactaactaccttacactattcttaaagtgtaacactaaaccttttagctattctttacaactttttcaactactctat

SEQ ID NO: 22843 - DNA, 316 bp, Glycine max
cgaccccaaagatcactatatactggttacaatgtgaagcattgaacagactgtcattgcaaagagggaagtctattaaattcttcagccacacaagctgaacaaaattcattcaaatattaacttatggtgggaatatttccatgaatgagaacaggttgtccaacatgactctttgcatgaccaagtctatcatgcccaatactattacacctattacatgtatttacatgatcatctctaactaaatttatcgtcattaataatcatcaactatcatacatgttgacgcacacacttatctgtatcttgaatc

SEQ ID NO: 22844 - DNA, 218 bp, Glycine max
cttcctacaaacattctaattatccgacaaacccatccacttatttgccaccatttcagcatactaacacatttccacctaaaaaccattctaatattcctatatgcgaaattttttcttccttcctattctccccctatttttactttacctaccatttttttttctctctcactcaccatatatggtctttttcacatcttctttacttgtccaat

SEQ ID NO: 22845 - DNA, 397 bp, Glycine max
attgtcgattgacttttctttgaccttcccatttgggtatcaagcgatcatgagattctacgggactcaatcggacatccgacttaattattattgacggaagaatttactcagagctactattttcaattacgagcggctcgatatattacaggactcaatctgacatgctagttaaaaattatttttatttgattgttctcacagatttccattacaattacgagcgtctcgatatgtgatgatgacataacctagggcctacgaccatgaatcacttgaaggttccatgaccagaggcagacttaaacaagcccaacacgttatagagacaaggctggtcattctgatagctggcatcgatgatgattgaaggcccagaggcagaggcactacc

SEQ ID NO: 22846 - DNA, 416 bp, Glycine max
gagagtagaggctgagattgacacgtctactaaaccaataaaactcatatcaacaattgtttctttttcttattatctagtaaatttgttctgagtcattacatggtacagtgaagatttatacaaacgaagacttccaagaaacaaagcaaaagatgcagagaagcctttccacttatctgtccaagataggagctcaagatgcaaattgtctttcttaaaacttatcctattgataaccatatgcggcatttttgtaaccctcctatactctccggaagtttacaataccaaccatttatcaagctctggcactcggtggatatggggtggttcagatcctcgttacatgtccaatgtagccactgactgggatgacatactgaaaattacggagaaactgacaggggaagatg

SEQ ID NO: 22847 - DNA, 369 bp, Glycine max
cataattttttaattttttctaacattaacacttctgctaaactgctaaaactgatatcaacattaataattttaacatataatctaataaatatgaactgaaccattacatcttacataatatattcatacatacgaagacttctaatttacacaactaaacatgcaatgcttcctatccactaatcttatctaaatatgatctcaaaatgcacattcaatttcttacaacttatactatatataaccatatttccccataactacaaccattctatacttttaatatgtatacaataccaaccatttatcaaactctttcactcattaaatattaggtggttcatatccttacctcatatccaatat

SEQ ID NO: 22848 - DNA, 422 bp, Glycine max
cattttgattgcaaaaagcatggtaatataattgtaatgggtggatatttactgtatatgcgagggatcaatatttagtaaatgttcttaggttccaagtgcaagaaatcgacttacgataattatgtgtgcatcagtaatgttaaaaaatgatttatacatgttagtcttattaaaatactaagggtatgaatgatgaaatctaatcctatatcttcttaattttattcaagtcgttattattgttttcatgatttacatatttccaacacactaaatttcgtatttttcttatttcagttatttacgtaaatccgatatttttactttaagttgtctttagttaatcaaaccaaaaccaatgacattgaattaaatttgtacataactattaaaatgataacctttatccgaatgaatta

SEQ ID NO: 22849 - DNA, 384 bp, Glycine max
agttatcaaaatatatgatttttaggaacaacaggtgactagaaatgtcaatgtcaaggactatgttgatgtattactctcaaggaaagctactactgttattttcagtgcagctaaagaatttgatttcaacatctctattgagctattttgcagatgaactatttatgaatgatgatgcgagctctcaaagctcaatgaactccttcaagtgtttcaatttcaattgctgtgaccctggcaatgaagatgagcatgatccaactctagtactaggagcagaacacctttactacaccccaaaaggaaacgaaatgtgcataagattttgtcctagagaaaaagtgatggatgctgatttcaccaaacagttatgcaacatga

SEQ ID NO: 22850 - DNA, 377 bp, Glycine max
ccacgctcgaccgacgcctacctaccgataagacaacacaactttaagagtttatgctcatatttacacctttggtaaacccgttaaactgatatcaacagttttttcattctattattatataataaatttcttctgaatcattacactttacagtgaagatttatacaaacgaagacttcccataaacaaaacaaaacatgcataaactccttttcacttatctctccaacatatgagctctaaatgcaaattgtctttcttaaaacttattctatttataaccatattccgcatttttttaacactcctatactcttcggaagtttacaataccaaccatttatcaaactcttgcactctgaggatattgggtg

SEQ ID NO: 22851 - DNA, 384 bp, Glycine max
ggtcacgaggaagggcgcacgggctaaccctgacgaaaacgcctttcaattccgataactctcgttgtgccgaaaccctaaccttaaccggattttctcgttggttgggattgaattgacatcggatggaggcgatcgattgcaaaattggttgtatgtaatttagcgttgaacaacgatatctgctgctgtttgctagaagcaagacatctttatacgaagagcttcctgcttctccgacactctacaagaagctccagtgttcctcttcgacaatttgatttcctcctccctctcacgccaaccaactatgacctctctttccccacatggacaacttgattcttgagagacctctccaagaatgtggcaatgatataaatg

SEQ ID NO: 22852 - DNA, 398 bp, Glycine max
aggcagccacggtggatattccaccaactcagcttgtgggtggaatgatgccacctggtttgggtacaggatatcctacgcgaccaaccttgcccacaatgccaccaatgtataatcctgctgtacctgtgcctccaaatgcttggatggttccacctcgacctcagccatggttttcacagccttcagctgtttcagttcctcctgctgccccatacacacagcagccattatttcctgtgcagaacgtgaggcctacactgccagctactgcttctgcgctccaaactcagattactccttctggattgcctacatctgcacctgtcccaatttcacaacctttatttcctgatgctggaaataaccatacaactactcaaagttcaacattttct

SEQ ID NO: 22853 - DNA, 433 bp, Glycine max
gtatctgaaacaaagtcaaattctgttcaacaatgcagggcattagcaagttgagatacaggatatctagtctgttgaaaattaaaaggatttaggtagggaaagaaggaaaaaaaaactcacagttataacctgaaattgcatcaatttgatgtcatacgaaacacaaagtactaacctaagtatcacatgagaagaaagataattgctgttatcttagtccatgacattcattatatgtctagacctcaactgaggcaatcttccatgataaatcaaaataatgttattttaaacatttttatctgtatcttctcaatcaaagtgaaacagaaggtacctttcactttttgtctatgttgagttttggaatcattctaggaacatgcagcaatcatagtaaggtttccatcttgagggactctcatgatat

SEQ ID NO: 22854 - DNA, 368 bp, Glycine max
gatacaaagcattgaattcaaaaactaagttcatgtcttgtgcttcgctttattcctcaaaaccaaacatgtcgaacacatgcggcaactgtgactgcgctgacaagactaactgcaccaagggaaacagctatggtgttatagtagagactgagaagagctacatcgagactgttgacatggatgttccagcagctgagcatgatgggaagtgcaagtgtggcactaactgcacttgcacggactgcacttgtggccattaaggaatatgtatgaaaatgtaattgccatgtgtttggcaatacaaatctccaaataatgtaatcttccgatgaataaatgtgtgttgttatcctacttcagggtct

SEQ ID NO: 22855 - DNA, 451 bp, Glycine max
catcggaaacgaaatagttgttgagagtagtcaagatgagagacagcaagaagaggaatttacagaaaagtttaatgaaaagttgaagactccacaaaatgataccgaggagactgcagaaacaaacaccaatgatactgagaaacaagggattgaggatgatggaaaattcgatcaagaaaaagcgaaagggattgaagaagcaacaaaagaacagttaccagaggaagaagtcaagacagcattgcccactgctgcctttgtccaaggcgatactgatcaaataccacagcagcaaacactgccggatgatgattcagaagtgattggtattgcgaagaacatcgacactccagaaattgaaattggcggaaggtccacttgtgttgaggaacctgaacaacccgaaaacatggacaacatcagcgaggagactgcagaaacaaacacc

SEQ ID NO: 22856 - DNA, 298 bp, Glycine max
gatctaaatgcttgtgcttaaaaatggtcaccaggaaccataactggccgccgttatcactcacatccacaccaccgccttgttgaaatttgaacgtaccattacggtttattctgatttctctatccatttttgcaatctccagctcattttaaatcatggttcgctcttgttcttcaatttcattgcaccaccatgcttaaaaatatagtctctttatcatgtcgaggattcaaaattctgacggtgatgtgctctttctagacatcagagagcaaagagttggagcataaacaat

SEQ ID NO: 22857 - DNA, 375 bp, Glycine max
accacacgtccgaacggcattgaaaacacaatagatgtggcgactaatcaaggggagatacgagcatacggggtaactacattaaaagattaatgaaaagcctaaaactctacataatgataccgtcgagactgcaccaaacaaacaccaatgatactgagaaacaacggcattgtggatgatacaaaaaatcgatcaagaaaaattgaatcggatggaagaaacttcatcttaacttgtaccatgatgaagaattcaagactagattgtccactgcttcctttgatcaaggcgacactcttcaaataccacaccattcaaacactgccctatgatgatttctaaatgattgatattgcgaataacatgcacact

SEQ ID NO: 22858 - DNA, 326 bp, Glycine max
acccttttcatccaacaaggtggactttatattcaacaagttttctgtcaaacccgggtcagaggaggctcagatcatgaagaatactattagtgagtgtgaagagggtggaatcaaaggagaggaaaagtactgtgccacttcgcttgaatccatggttgatttcagcacttccaagcttggaaataatgttgaggttgtgtccacagaagtggacaaggaaacgggattgcagaaatacaccgtagcaccgggagtgaagaagttatcaggggacaaggcttgtgtgtgccataagcaaaactacccttatgcttgtttttact

SEQ ID NO: 22859 - DNA, 356 bp, Glycine max
gggaatagcatcggcagcaccacaacactgtgccgtctttctctctttccttcgcagaagccatggcctcatttgcacgtggagccgcatctttaacccgcattggtctttccacttccaagactccccttcaactcatccaccgccgtggcctcgccgatcaccatggccctcccaaagttgcctgctggaaagatccaatgagcccatctaaatggaaggaggagcactttgtgattgtctctttaactggttggggactactcatctatgggggatacaagttggccacaggaggcaagggcaagaaagaagaggaattggcaaaagcataacactgaagtttggaagaatat

SEQ ID NO: 22860 - DNA, 387 bp, Glycine max
gggaattgcatctaaagcaccacagcgctgtgcgctctttctctctttccttcacacaagccatggcctcattcgcacgtggagccgtatctttaacccgcattggtctttccactttcaagactcctgttgaactcatacaccgacgcggtctctgcgatcaccatggccctaccaaagttgcctgctggaaagatccaatgagcccatctaaatggaaggaggaacactttgtgattgtctctttaactggttggggactactcatatatgggggatacaagttgaccacaggaggcaagggcaagaaagaagaggaattggcaaaaacataacactgaggcttgtagaatattaaaaatacaaagtgttcttgataataatgct

SEQ ID NO: 22861 - DNA, 409 bp, Glycine max
gaagacgacagaaggggataccagctcatgtgatacagtctgtcaaacatctatgtttctggttttttgtgtggaaaactagttgttctgatcttcctaaaagttgaactggcttttcttcttttcctggagttgttgccaaccaaattattcctctcttcacttactactactttcttctttctttctccacctgaagtagttctccacaacttggaaggtgatcatctccaattttccatcatggctactgagacttctgcatctgatcatgcttctactactgatgagcattatgtgaagaaggaaaaggacgagtccattgcacaaaagatcgcttctttagcaaatgaagatgaagtcaaacatgacaatactccttcatctaagacagaagaagatgtggtga

SEQ ID NO: 22862 - DNA, 425 bp, Glycine max
  modified_base (326)..(326): a, c, g, t, unknown, or other
  modified_base (398)..(398): a, c, g, t, unknown, or other
gcattgaggcaagtagaaaattgacccgcccaagtggggattcaagtcgggtaccgaacgtgcgactataaagggaatgaacgtggacaccccacgctttcttcacggcaacagaagaataatcaaatttctcagatctatccgacgtcgccgcagatccaccaaccgttatggctgccttcagcggtgatgaaacggctccgtttttcggctttcttggagccgcagctgccctcaacttctcctgtactccttccactctcttcaattaccccaatcacttccattagatccgtatttaccgtttcattatttatgtaatccgnacctaaaattgactttgaatccaatttcatgttccactgctcagaaccgtatatgattttaggtgttgaatntggaaccattgatgttggagattcaat

SEQ ID NO: 22863 - DNA, 387 bp, Glycine max
gtgtgcaaccaaatatagggttgtttagaatggttgcaaagacttgaattccttaataagtccttattgtatgaacagccaaaaatggctagtggtttgccaaaaatatttgtactttggtagtaaaaaagagttgaagagtgttttgttttacctttacatggattccaatgtacttaaacaaagaagcaacaattcatttctattgagtaaacgtgtgtttggatggttgtaaacagaaaaacaaacgcaggccaagactttgagtcacaataatacgagccaataatactctaatgatattaacatgttggacgtacatgaagtaggttccaagagtttccatttataaatgaggtaaggtcatgattaatataattttcttct

SEQ ID NO: 22864 - DNA, 216 bp, Glycine max
gacacatatccttctttttgaacgacttattgggggaaggactagatttgggggctacaactcttactgaataaagatacatcaacatgactctttaagctttacatctctctgtcgatgcattccccatatctgatttcctagaatctgtattacacacttattctataactcttaactcccttttcaccaaaaaaccttttacaatcatcacac

SEQ ID NO: 22865 - DNA, 104 bp, Glycine max
gactcttttgacaacacgtcaagaggattcccatgcgctgggaccactaaatggtcctgatgcgaaaaaacgacctaacattaccactgctaaaaaacgaccta

SEQ ID NO: 22866 - DNA, 395 bp, Glycine max
gggataacaacaacatgcttttgcttgttagcgctagaagccgaaagatgctttacgaatggatttctccttgtgagaatatgggagttgcagctgaacatggttactttctaagaatgaaacgagatgaagagtgggaaacacatgttgcagcaacagacacgtatttggaaacaaattgccgaacctgtaatgaaactttacactgaaacaactgatggatccaccattgaagacaaggagactgcacttgtgtggcgctatgaggatgcacatccagactttggatcgtgccaagctaacgaactccttgatcatcttgagagtgtgcttgcaaatgaacctgtaacagttaagaatgaccagaacaatgtagaggttaaaccacatggtgt

SEQ ID NO: 22867 - DNA, 397 bp, Glycine max
gattcaaaatacaaataaacgctcgcgctccaagggcagatatgaaagttcaccactccgaccaactccttctttctctatttctactgcttgcatttcacgttcctcatatggctgttggcactgcggagcttacagctctgatggagttgaagtcccctctggatccagacggcaagatccttgggtcatggataagtgatggtgatccatgcaatggcttcttcgaaggggttgcgtgcaacgaccaccgtaaaggggccaacatctacttgcagggaaagggtctttctggttggatatcttcaacactggctgaactcaaatgcttgtcggctttatacttgcactacaacaacctttctggtgagatacccccacacatttccaatctcac

SEQ ID NO: 22868 - DNA, 441 bp, Glycine max
ggtctctttcatctcacaacgaacgtctcaagtgagaaagtttctgagagtctgactcgttttgtttttgttctctctaatctcttggttcgcgttgcagattaaatgattttgtatctttggttctcttttaggatcaatggattttagagatttagctcacaagttctctcgttgtattgttactgtaagtcttcagtttttcatatccttacttgccttggccttgagtcagatctgtttgcccgaaatttgatgttctttgaatttaagctctttatttctctcaattcaaatatcatgctgtcatagacacatttttagaccatacctattctttaataaactggtaatctatatccaaatgcgtgtaactaactggtaatattaactcaataaattacctattctgtaagataaataaattatgcttatgaaatt

SEQ ID NO: 22869 - DNA, 440 bp, Glycine max
gttctttgtgactttcaagccacctgggaggtattaagctatgcgtcaagctaatgacgttaaacaagcgcttcctgggaggcaacccagtttataattgttgttaactatgtttttcatgcatttaatcatttggaacttgttgtatgatttgtacatacgagtatatcagcctatcttttgctaagcgcaagcctcacgctaagtgtatctttgttcatgtgctatgccgtgagtctcaagtgcttaccgcccaacccttgcatctgagctaatccaacttcaattcgaactgaattcggctaagcgacagtcaaaccgctaagcgataccttatccttggctaagcgtgactcagtgtcgccaagcgcaattccttacggccataactgacgtcaatgaagctaagtgtcagtcatggcagctaagcgagattcatt

SEQ ID NO: 22870 - DNA, 210 bp, Glycine max
aggcgtgcgaagacaacacaacggaacgcatgtaacgggagatatccaagtcatgtggggacattcaagtaaagggtgccgtactttgttacggactgatgatgagctaataccttccccgtacttaaattcaacttcggaacctttcacttaaagagttcctagattgcgtattttacagttattccgacacttttatgaaattaacga

SEQ ID NO: 22871 - DNA, 429 bp, Glycine max
  modified_base (43)..(43): a, c, g, t, unknown, or other
  modified_base (392)..(392): a, c, g, t, unknown, or other
agaagttaaaagctactctacttcagtttaacttcaagtgcangtgtgacccttcggtattcatctacactgattccaataacactggtttatatgctactgtatgttgatgacatcattgtcactggaaacaacttctccatcaaatcactagttactaaactcaattctgagttttctcttaaggacctaggaagtcttgactatttcttgggaattgaagtcagatctcagcccaatggtgctcttattctaactcagtccaagtacattagggatttgttgagtaaaacaaagatggacgaagctaatctcatctcttctccaatggttagtggttgcaaattgactaagtcagggtatgaatctttccctgatcccacacactacangtctgttgtgggagccttgcagtattcaactattact

SEQ ID NO: 22872 - DNA, 393 bp, Glycine max
ggactgacatgttctcgaaaaacgtgcactatgggaactgggtgtaacgatggttgcctaacatgaatacttccccatgctatgaatgtgttgtttagcaaacttgggaccctaaagcaccagattgattatcagttgcctgtttcctttattgagattcttaatgaagaagtatgagactggctgcatcccttctccatgagtaaaccagaaactgctaacggacatgcaggaaaaatgacctctactgagaagccaccaatacaaatttgtgagacctcaaatggtgtcatcaccctcgcatgatctactgaaattagtgtatctacactaatagaaatggctgcttgcttgtaacatgtatcattgagcagaccaactgggatcacagat

SEQ ID NO: 22873 - DNA, 352 bp, Glycine max
tacatatcaatttcccttagagtgtggaagattcagggtattgttgaggaaacatttgaacatgtccgcttgcccaaaattcattcgaacatcaataatttatacttattgttattcatcaaaatccaagatagatgagaagattggttgtccatacctaacatatgatacaaaaccctatagcatgtgacaaattgattccccccaaactaatttttcacttgctttataatttcatttccgtaatttaaaaaatgattaattcaatttcttaaactatttatatataccgctttttagtaattagatttcccctatggacctgtattttctaaacatatctttttttttt

SEQ ID NO: 22874 - DNA, 378 bp, Glycine max
gacattggttttgtatcgaaatgcgaccaaatgggttcttctcctgtgatggaggacgagcataaaaagttggattctttgcctgaaattgaattatcagagtcagaggaatattccaaggaattggaggtggctgttagagcagtgcaaatggcgtgttccctctgccagagagtgcaggacactttgatttccaacgctgggacaaatcatcgtcaggttcagtccaaggacgacaattctccggttacagttgcagattggagtgttcaagcaattgtcagctggatgttgtcagaatgtttagggagtcaaaatgtctcaattgttgctgaagaagatgttcaaactctttccaaggctaatgcatccgaactg

SEQ ID NO: 22875 - DNA, 298 bp, Glycine max
gataccaaatacaatacacaagccaagtgaaagtgagaaaaaataaaattcaatgagcataatgtctgggatcattcacaagattggggagacctcttatgtgggagggcacaagaaggaggaggagcctaagggtgagcaccatgctggagaattcaacggggagcaccatggtgaacacaggaccgagtacaaaggagaccattatggggaacacaaagctggagagtaccatggtgaggacatgccagtacacaaagaggggttcctagacaaagtgaaggacaagatccatggt

SEQ ID NO: 22876 - DNA, 410 bp, Glycine max
agacgacagaagggggatcacaattgtgtttttctctttctctccttcaaaatcgttgacggggacgcctgtttctttgtgaactcccttagattctctccatcgggtcttcaaaaatgcggatgagctgcaatggatgtcaaggtctcagaaaaggttgcagtgaaaattgcagcataagaccctgtttacaatggatcaaaagcccagaatctgaagccaatgctactgtgtttcttgccaaggtctacggacgcgctggtctaatgaacctggttaacgcaggccccgaacatcttcgtgcagcgatctttacctcggtggtggacgacgcatgcggtcggatattgaacccgatttacgggtctgtcaggttgttatggtccgggagctggcagatatgtcaagcc

SEQ ID NO: 22877 - DNA, 274 bp, Glycine max
taatgggattctataccacaatgaacccagtgcaaaaattggactatgggcaacaattcacacatatttctaaaacactatcttacaaaccccttcattctacatataccctctctattttgtcacacttattaaatacacttcccccatatacacatcttactgtctaccaaaaccccttagattcaaaccaaaactactttcttgcatatcaacctttaccatcttgctcacataatgaaccctcacaacccaatctccgttcctctcacaa

SEQ ID NO: 22878 - DNA, 288 bp, Glycine max
cattacatgcgccatttacgtgtgcaagactacagtgatctctgaagtaacggtggaacacgtacgattgtccacaacacgttgaaacatatgtgttatatacttaatgacattcatcaaaactcatgattgatgtgaagataattatagcaaacctaacgtatgatacataaccatactactggagacatattgattgcctacaatgtaattatacacttgcttaatatcttctttgcttaaataatactcgaactatcaattccttaactataatttaaactcctt

SEQ ID NO: 22879 - DNA, 407 bp, Glycine max
  modified_base (255)..(255): a, c, g, t, unknown, or other
  modified_base (293)..(293): a, c, g, t, unknown, or other
cattagataacttgtaattagatctttaatttgggtgcacttgttgtacttagtttctctgaagttttttcaaagaattttgtgggaattaatccttctaaaatatagtttgaatcagcccctgtgtcaaataaggccgttgtatctaaaacaaaatcattaatattaattttaatgtttatgtaaaaattttggattttaatcttgttgattaatcccataaatatatcattttccaaatttttagtttggttntctttactggttttgacactttcagaatcactatcttnctcaagttgagaaaggatgatttggtgaatttcttgttgttgacgaagttctttaacttctctttctagattattaatttctgtttggagatcttggattgttgttggttttgc

SEQ ID NO: 22880 - DNA, 385 bp, Glycine max
  modified_base (48)..(48): a, c, g, t, unknown, or other
  modified_base (50)..(50): a, c, g, t, unknown, or other
ggctgcaaatgtggggctaacgtcaccttcaagccctgcgcttgcaantnatgtgttgcagagctaaagcttcaagcagaaatggcccttacaaataatgataaaaactatatgtagtttcaaaacttcaaaattatgtagtatgtattatgttgcactctggtgttttgtgtctaaacaaacacccttagaataaagtggtcatttcttgcccttgagcaagttcaagtgttttggacttgtgatagatgtgttaaggtcatggctgcctttttttatatatatatatatatataaatgtttggtcaaaaaaaaaaaatatatacattaatatcattcactgaataccattccactgataccaaaaatattacaactacctggc

SEQ ID NO: 22881 - DNA, 439 bp, Glycine max
  modified_base (84)..(84): a, c, g, t, unknown, or other
aagactacagacggggacactcaactatttctgactacgttttgctctgcgcctctgcctctctctcggaaatcggtctcttcnattttagggttttgttttgctgctgcctccgttccccccttctcataaacaacgcgttttctcttctgcttcgtatctattctttgcttttggttttggttgattcaaggccttcacagcattcgttgcggcattttaatcgatttatccaagcaggactgaatgaactaatggagtctaaaggtgggaaaaagaactctagtagtagtagtagtaaatcattgttctacgaagctcccctccgatacagcattgaagacgttataccaaacggtggaatcaagaaattcagatctgctgcttactccaactgcgctcgcaaaccttcctgatatccatccagattgatagttca

SEQ ID NO: 22882 - DNA, 392 bp, Glycine max
  modified_base (40)..(40): a, c, g, t, unknown, or other
  modified_base (45)..(45): a, c, g, t, unknown, or other
gatgtaaaaagtgtgtgatgttaattagtgagtgaggaancattnaaatttagtggaaattaaagtcaagaatcaaactgaccaaggagtattcaggtatgctaattccttcaacttgaaactcctttcattctttgcttggacctgcatttctcatttctggtcgttaatgcatctatttgcattcaattgaagagttcatttcatttcttacccttcttgcatatacatgttaattgattcccatggtgaaagatttacatatatacctcttatacattcttgcatgcccaaattgatatatgtaagcattttatgaattgatatacatatattaaccctcacattcttcttctttttagtctataaccgaatgcctgacacgctcaagt

SEQ ID NO: 22883 - DNA, 429 bp, Glycine max
agaaggggacatatctccattgagagaattaaaaggttagtgaggggatggggtacccaatactctagattttgctgactttaagacttgtgtggactgcattaagggtaagcaggccaacatgtctaagaaaggtgctaacaggagttcaagcatattagaaataattcatactgatatttgttgtccagatatggatgcacgtggtcagaaatattttatcacctttatagatgattattcacgatatatgaatatttatttgcttcataacaaatacgaagcattggatgccttcaaagttgttaaggctgaagttgagaaccaatgtggaaagcaaataaaaatagtgagattagatagaggtggagaatactatggcaggtatactgagaatggacaagcacctggtccctctgtgaagtttct

SEQ ID NO: 22884 - DNA, 250 bp, Glycine max
tcacttctctttcaccacattctaaacataacactttttaccccatcatccccaataatttcttcttccccaaccttttcttttattaccatcttctcttctcttttttaacctatttcctccacaaaattattactcaccacctcattcaccacaaccctcttaccatttactttatcaaactcatcttttcccacaactttcatacttaacaccctcttcctcacatcctttacctttaattccccac

SEQ ID NO: 22885 - DNA, 420 bp, Glycine max
gtctcttaattggtaatatcaatttattgtgtttgggtcattgcagacctgtgattcatcagttcagctgcggaaggccgggaaagtcactgtcagagaatcaaacttgaaaaaattaggtgctacccattttagaaccggcgtagcaaacgagcatttcgaggtatataaacatcttagtatgagtataattgccaaattaaacattgtttattagcaagggtcaatttatagattgaaaatgacatttgctcataactatttatatcaattgttacattcaaaaatataattggcataaataagtgatggcaagacttgtatttatttgtgttttttaactacactttggagggtaattctctagaagcatgatgtatatagtttattgtttggttttaaagtgacaaagtttgcact

SEQ ID NO: 22886 - DNA, 371 bp, Glycine max
gacctcaacgcagcagaagcagcaatgaagaagaagatgatggcaagcacggccatctccctcgtcttcgccgcgctcttcctcttctcctccgtccactctttctacctccctggtgtcgctcctcgcgatttccaaattggtgaccccctctttgtcaaagtgaacaagttatcatctaccaagactcaacttccatatgactactacttcttgaagtattgcaaacccaaaacgatattgaacaatgcagaaaatttgggagaggttcttagaggtgatcgtattgagaattcagtatatacatttcatatgaggaaggaacagtcatgtactggtgtttgtcatgaaacattggatgctgaatctgc

SEQ ID NO: 22887 - DNA, 254 bp, Glycine max
agacgacttaagggggagcacatggaatcattattgtttatgacgtgacagatgaagatagcttcaataatgtgaagcaatggctcagtgaaattggccgctatgccagtgataatgttaacaaacttttggttggaaacaagagtgatctgacagcaaatagagttgtctcatatgacacagctaaggaattcgcagatcaaattggcatacctttcatggaaacaagtccaaaaaatgctacaaatgtggaa

SEQ ID NO: 22888 - DNA, 414 bp, Glycine max
gcctgccaccttcacttttcttcataggactcagaaacaactcagctcatcgttattcactttctctcaccacattctaaacagacagtagtagcaccatcatccccaataatggcatcatccccaacctttgctttgagaaccatctcctctttctctgtgaaacctgttaccaccacaagatcatcactcaccacctcatccaccacaaccctcttaccatttacttcaacaaactcatctctccccagaactctcaaactcaacacctcttccccacatcctcacctttcactaccccacaagtctttcacttgtagaagccaggctgagccatcttctgattcagccaaagtccaagaactgagtgtgtatgagatcaatgagagagatcgtggaagccctgcttatctt

SEQ ID NO: 22889 - DNA, 410 bp, Glycine max
ggtccacccgctcattagatctaacggggactgatccactttgtggttctaactactgaggaaaaatggcgcgtatgaagatcagagagtatgactcatagaggttgatgaaggagcactttaagagactctctggcaaggagtggccgatcaagtctgcacaaattaccgcatcaactgatttcactgagctacaagagatggaaccctggctttcatcttctaaattggttgataaacctgacatgttatttggaaagcgtggcaaaagtggtttggctgccttgaattcggattttgcacaagttgattcatctgtgaaggagcgtcttggaaaagaggttgagatgagtgcatgcgaaggacccataacaactgtcattgttgaacctttcatgccacacaatgaa

SEQ ID NO: 22890 - DNA, 404 bp, Glycine max
ggaacggaaaagcactggcgcaggtaccctgaggcttctcttctcttctcttctctgtcgtgagtcatcatggtgagggttagtgtgctgaacgatgctctgaagagcatgtacaatgctgagaaaaggggaaagcgccaagtcatgattaggccatcctccaaagtcattatcaaattccttttggtgatgcaaaagcacggatacatcggagagtttgagtatgttgatgaccacagggctggtaaaatcgtggttgaattgaacggtagactgaacaagtgtggggttattagtccccgttttgatgtgggcgtcaaagagattgaaggttggactgctaggcttctcccctcaagacagattgggtatattgtattgactacctctgctggcatcatgga

SEQ ID NO: 22891 - DNA, 395 bp, Glycine max
gatctcatcacaatagcaactagctagctagaggcgctctgatctgatgagacaaatttcttggatggatatggacaataacgaggaaataccctcaacaccctcaacaccagacactcctggtgcacctctttttggtggcttcagtaatggcaggaacaataatagcaagaagtccctcctgaagagaagtacgtgcttcaatgtggaagagcggagcctacaagatggagggctaccggcagtgtcatgctcattgccactgccatcgtctacaccagtagtcactcttgcaagaaagattggagcggagttcatatggaccttcatcctcatgttctcaagcactgacgtttacattgtcaaccaaaagacaaatggctcttataccctta

SEQ ID NO: 22892 - DNA, 386 bp, Glycine max
  modified_base (65)..(65): a, c, g, t, unknown, or other
ggattctagaatacattataataataaagaaccttgtaaatactggggaacagtcactattttcntgtttgtagctctttacttgtttgggatttagatgatgacatcgtcatctgttacgcccgtgcaaaatttttatgtgtctcaagagaataacaatgacgtgaaagaacataatgaggctaatgaacacccaactgacccctctaataacaattctcagcaaattgaatataataaacgtgatctttcttaggatacaaccaaaagggatggttgtgtcacccctgctacaaactattacgtgacagaaaaacatgacaagaaatcatacgaaaaatctcaataaaaaccttcttgcgattcacccaaaaaaaattttattt

SEQ ID NO: 22893 - DNA, 448 bp, Glycine max
gcgtactcccactcgtcctttcttctagattacgacttaagggggaacggaaaatcactagcgcagcgtcccttaggcggctctgctcttctcttctctgtcgtgagtcatcatggtgagggttagtgtgctgaacgatgctctgaagagcatgtacaatgctgataaaaggggaaagcgccaagtcatgattaggccatcctccaaagtcattatcaaattccttttggtgatgcaaaagcacggatacatcggagagtttgagtatgttgatgaccacagggctggtaaaatcgtggttgaattgaacggtagactgaacaagtgtggggttattagtccccgttttgatgtgggcgtcaaagagattgaaagttggactgctaggcttctcccctcaagacagtttgggtatattgtattgactacctctgctggcatcatggat

SEQ ID NO: 22894 - DNA, 370 bp, Glycine max
  modified_base (367)..(369): a, c, g, t, unknown, or other
atactagaatagataataataataagcgaccgtggagttactgttcaacagtgactattgtcgtgtttgtagctctttgcttgtttgggatttggatgatgacatcgtcatctgttacgcccgtgcaaaatgtagatgtgtctcaagagaataacaatgaggtgaaggaacagagtgaggcgaaggaacagccaactgacccctctaataacaattctcagcagtttgaagataatcggggtgatctgtctgaggatgcaaccaaaggggatggtagtgtcacccctgctacaaactatgacgtgacagaaaaacaggacgagaaatcagacgaaaagtctcaagaaaaaccttctgaagatccccnnna

SEQ ID NO: 22895 - DNA, 384 bp, Glycine max
gatccaattggaatgagaagaaccaaaattatacaactagcatatttaagggtccatttgctaagaagaaaagaaataggtacaaattagccttttttttatttttttgtttttgtaagtttatttttttaattttaacacaaacttatgtaaacaaaaatttaaaaaataaacttggaatgaaaaaaattaaaaaaaaatgctaacttacaaattataaaaatatatttaagcgaaaaaaaaacgatggatgaaagtagggaaagggaatgaaaataactaaatggttatctcaaaattctcaacaagcggcacttttcatacttcacgtcattgattatctcaataaaaccttaattaaatcatgggcacacgttttatttt

SEQ ID NO: 22896 - DNA, 407 bp, Glycine max
gactcaaacatatgggccccggttccctagtttagctacttacctcaatctttctcatgggaaagtttgccctagccaatatcctcttggtccttctcttgaacttgagcactttgctcaatgttcttgcttgtccctattgcccttacccttctcccaagcctccaaaaaagcctcccgttgtgaaaccaccggttcacaaaccaccaaaaccatgtccaccacccaagtcatctccaaaaccaccccatgtacaccctccctatgttccaaaacctcctcactaccttaaaccaccagttcatccacatccaccccatgtcccaaaacctcatccaaagcctccagtgcatccccatccaccttatgtcccaaaaccaccagttgtgccagttacaccaccatat

SEQ ID NO: 22897 - DNA, 415 bp, Glycine max
tatgctctatcaacacattaaaaagattatatgatatatctgctgtggaagtaggtcaacatttctattggcaaatagggagtttccaagtacatgcccaagtacttattacttcttgggttgtaattgctctcttattggtttcagccattctaattattcgaaatctgcaaaccattcccgctttcggtcagaatttctttgaatatgttcttgaattcattcgagacgtgagcaaaactcaaattggagaagaatatggtccgtgggttccttttattggaactttgtttctatttatttttgtttctaattggtcgggggctcttttaccttggaaaatcatacaattacctcacggggagttagctgcacccacaaatgatataaatactaccgttgctttagctttact

SEQ ID NO: 22898 - DNA, 376 bp, Glycine max
  modified_base (14)..(14): a, c, g, t, unknown, or other
  modified_base (55)..(55): a, c, g, t, unknown, or other
  modified_base (62)..(62): a, c, g, t, unknown, or other
ttattctataatanatcataatcataaagaaccttttaaattctaagtaacaccnaccattntcctttttttttctcttttcttcctttccatttttattattacatctttatctttctctcccactcaaaatttttatttttctcaaaacaataacaattacctttaataacatacttaatctaattaacccccatcttacccctctttttacaatcctcatcattcttattctaatcccaattatctttctttacattcaaccaaaatccattttaatttcaccccttctacaaactattactttacataaaaacatgaccattaatcataccaaaaatctcaaaaaaaacctttttaattttcccctttttta

SEQ ID NO: 22899 - DNA, 397 bp, Glycine max
ctatcaacaccttccaaagatgaaaccgttatctcttggggaagaagctcaacatcactatcaccaaatccttattttccaagtacatgcccaaatacttaccacttcttgaactgtaatcactcacttattcccttaagccattcacattattacaaatcatgtaaaccattctctacattcgctcaaaaaacacttgaatatcctctctaattcacaccatacatgaccaaaactcaaatagttgaaaaatatcatccgtgcgttacttctattgaaacttcttttctatttattttacattctaattcgtcgggtgctcttttaccttgtaaaatcatacaattacctaacctttagatagcttcacccacatattatataaatactatccgtt

SEQ ID NO: 22900 - DNA, 398 bp, Glycine max
ggcagtggagagagagtgttagcaccaaaaatgtggaagttaatcttcgtggtccttgcactaattcctcttctctgcacctccctctcgccagagaaaccctcagatcggcgcatcctcgttttgctcgatgacttcgccatcaaatcctctcactctctcttcttcaactccctcaaatctcgcggcttcgatctccaattccacctcgccgacgaccccaaaattgcgctccagagatacggccagtacctctacgacgccctaattctcttttcccccaccattgaacgttttggaggatccattgacgcggctgcaattttggattttgttgattcgggtcatgatttgatcgttgctgctgatagcaatgcatctgattaatcagggaaata

SEQ ID NO: 22901 - DNA, 360 bp, Glycine max
tgaattgccgtgtcgaccgactcatacttccactcgtccctacagcttcttttatacttcagtaaccgactcaaacatatgagtccccggttaaatatttaagctagttaccttattctatctcatggtaaatttttccttatccaatatcctattcatccttctttccacacttaacacttttctcaatgttatttcttgtacctattgcccttaccttttttcctatcctccaataacaccattcttttttaatcctcctattaaaaaaccaccaaatcttttatcacctcctctttcatcttcaaaactaccctatatacacctctcttatttttcataacctaataactaccttaa

SEQ ID NO: 22902 - DNA, 200 bp, Glycine max
ggagtgtgtgagagagcgagcgagcgagcagtttcaaagagaggatttgggattgggaaggcgagggattgcgctgcgtctcttcctcttctctttcgattcatccctcattcataatcttccaatccaacaacctcagcctcacactcacacatacacacatctgaacgcgtatcgtcccttccatggcttcaaagcgc

SEQ ID NO: 22903 - DNA, 349 bp, Glycine max
tgcatgtttctgaaacatctgaggtcacttctggttccaacattaaaacaaaggagcttgactttaatgaggatggcttcttggaaattaatgatctcattgatactgaacctacattgtcaaatgttgaaaattctgtggagtaccagcattttgaagatgggttaagtgaacttgatttgttccaagatgcacagatgtttcttcgtgacttggggccaattattcatgaaacagattcacatgcatatacaaatgcccttgtcagcagcaatattgaatgtcaaagttaccaattgctgccaaatccagaggatgccaatcaaactgttggtgaattctggatgca

SEQ ID NO: 22904 - DNA, 385 bp, Glycine max
gttgaaattgagagtgagagtgaaagtgaaaattcagagtctgaaagcccttcttctgattctggtagcggaagtagtagtagcagcagcgacagtagtagtgatagcgaggacaccgacgatgatgataaagatgatgatgtggaagttgaagaaggcgagataagtggttccgatgaagagaaaatggttagttggagcatggctgatgaagatgatgatgaaaatggtgatgtgggaagaggacccatcaggtcaaagaacgagcttcaggtgttcttttatttatttattttgtttttcaattttagatttatatattaaatttttggtaacttgattgtgtagagtttcattgggaattaacagttttttttatatatat

SEQ ID NO: 22905 - DNA, 394 bp, Glycine max
agggcaggcgaaatcgggggtcagggtccggcagagagaacgcgttcccatcgcacggctagttttggcattaagatctctttcagcccttcttcaaccaaacccaacctgtcttttattttacgaccccaaatctcaaatcaaatcattcactatttcttctttcccttttttccaaaccctaactttatttcccctttcaaacccaacaacaatcctaccccacgcgcatgtgcaatcctcgcaatttctcgaatcttccgtaattgatttcgttgctatcgtgattttttgtctcatcaataggttcattcaatggccaagggcgccgattccgacgagttcgtggtgctttctagggttcgtacgggtctcaagagagagttcgcattcg

SEQ ID NO: 22906 - DNA, 424 bp, Glycine max
ggtggctgagagcgaacccaaaactagagctacgttcccttcaaaccttccactcttctctccttttccaatcaagggaataatatttcttagagatattccgaaaccatggctcacgccaatcctatgatttttgttgttggaattctaggtaaccttgtctccttctgttgctttctagcaccagtaccaacattctatcgagtttgtaagaagaaaaccacggaaggtttccaatcacttccttacgtggctgcactcttcacttcaatgctttggatattttatgcttacataaagacgggcgaaatacttctcatcaccattaacgcattcggttgtttcatagagacagtttaccttgtcatctatatcacttattgccccaagaaagctaggttctttaccttcaagatgattttct

SEQ ID NO: 22907 - DNA, 396 bp, Glycine max
ggcaagtcggttggcgttggcacgatgcagagatttggttcgctgcctgaaacctaatggctccgaagcccaaaccggcgccgtcgcagcctgctcctcctcctgccctcgaagatctctttaccacgctcaaccgccacattcaggctttcgcatacgacaatgccgtcaggctcacggatcagattctcgccattgctcccggcgacgaggacgcgctccgatgcaaggtcgtcgcgctgataaaaaatgaccgcgtcgaggacacactctccgccattcggtcctctaagaagcagctcgatgattttcatttcctcaaggcatactgcttatacagacaaaacaagttggatgaagctttggagtctttgaaaagacaagagagcaatgatg

SEQ ID NO: 22908 - DNA, 312 bp, Glycine max
  modified_base (9)..(9): a, c, g, t, unknown, or other
  modified_base (84)..(84): a, c, g, t, unknown, or other
tacataatnctattcaacaactattaaatttttatatacactggaattagttctaaaaatgatttcccctaccacaaccaatantcattaaacaatatttccccaccccattaatactacatattccacaacagcttttacatgctcttattacttcaactatttcatactcctttttattcaaactcaactcttttttcaaataatcccacccaataatcaatcactttttactctatttccttcccacaataccatgttccttacaataactttcactacttctaattcactcaaattctacttaaaccc

SEQ ID NO: 22909 - DNA, 415 bp, Glycine max
cgcctggatacagcccaacctcacccggatatagcccaacctcgccatcgtatagccctacttcccctagttacaatccacagtcagcaaagtatagtccttcgttagcatattctccaagcagtccgagattgtctccatcaagtccatatagtcccacatcaccgaactatagcccaacgtcgccatcatattccccaacatctccatcttattctccatcaagcccaacatacagtcccagcagcccttataattctggtgtgagcccagactatagcccaagttcgccccaatttagtcccagtacgggttactcaccaagtcaacctggttactcaccatcttcaaccagccagtacactccacaaactagtgacaaggatgatggaggcactcgctgaggtaaactaac

SEQ ID NO: 22910 - DNA, 378 bp, Glycine max
ggaccttgtcacagcctaaaaaccccctcctctttttcagattcggattaggtaaaatagcctacgcattaacagggaagtgctaaccatgctaagaccgtttacgctgcaaatttaactgattactagtcataaatcctatgcatcctctcttcatgccaaagcagatttgtccacttcttcgagaataagaacaggagattcttgctaaactggggattaacaagtagagctaagactgtagccctgtattgattgcagtctccgaaggtaggtgaatgaggacgcataccacagcacccagaataggtaagttaggaaagttaacatcaaaccaccaggcatagcgtgatgccaatgaagacaagcaaaataatg

SEQ ID NO: 22911 - DNA, 227 bp, Glycine max
gactggtgccagctatgtaagtgagttttttgcgattgctgctgctatcggttcctttttccgaactttccatcgttttaggaatatcacaccaattcgtgaaatcgaaggattccgacagaatcgtacgaattattgttcattgtttgcctctactgttgtgctccaacttggtaaactagaagtacagatttatttcttcaatgggggatgctgagaatgccctt

SEQ ID NO: 22912 - DNA, 430 bp, Glycine max
gaagacgacagaagggggttcaaatgtacgagatcttgtagcacttaccaacgaggccctgtcgattagtattatacaaaaaaaatccatcatagacactaatataattagatctgttcttcatagacaaacttgggatttccgatctcaggtaagatcggttcaggatcatgggatccttttctatcagataggaagggctgtttcacaaaatgtacttctaagtaattgctccatagatcctatatctatctatatgaagaagaaatcatgtgacgggggggattcttatttgtacaaatggtacttcgaacttggaacgagtatgaagaaattaacgatacttctttaccttttgagttgttctgccggatcggtcgctcaagacctttggtctctacccggacctgatgaaaaaaatgggatcaca

SEQ ID NO: 22913 - DNA, 417 bp, Glycine max
gacttcaatccattagccttcttcccaggtttggtcccctctctgtggtgaccaggctctaacataaaacataagcctttgtgaaaaaaaagagaagagaatgctccctccacaacagcagtcacgggttggaggactacaaacctctatatctctagtttcttcagatccccgcctttctcccgaggagcctagatcaaactctgacaatctacgtgaatctcctactgaaagtgccagttctcgagaaacttggcctactgctgatgcaattgctgcaaagaagatggaaaatggaaaagcataaatggattgccctgatcagtcaattattcgctgtgtttctagtgcagacaaaattagtcttcaagacattgcaagagaacgagtggatataatatgtgagaaaaatcatca

SEQ ID NO: 22914 - DNA, 413 bp, Glycine max
gtacttggaagaggtaaaacaagagcgggacaggtgctcccaggataacagcaacacataaggatcaaatgaatcaagcaaggagttatggtcagaagctaatgctgctgcacaagaatcaggtgcaatgagatttgatcagattaacattctccaatcaaaggcagaaagcttcaagaacaaccaaaccacttccccaacagagatctccaattccaactcactccaatctggtttccatcttgctgacatgcaaagtccaaacaagccaaaaagcacttctgagatgcatcagaattctccaggtagcattctttcagtggacatggaaatgaagcctcatcatcatggagaaacaaataatatcactagagaaggccagaacaacaacacaacaacaaagtttggcattg

SEQ ID NO: 22915 - DNA, 370 bp, Glycine max
gatagcagcatcatacaaagcattgaattcaaaaacttaagttcattccttgtgttttgctttcttcctcaaaaccaaacatgtcgaacacatgcggcaactgcgactgcgctgacaagactagctgcaccaagggaaacagctatggtgttattgtagagactgagaagagttacatcgagactgttgtcatggatgttccagcagctgagcatgatgggaagtgcaagtgtggcactaactgcacttgcacggactgcacctgtggccattaaggaatatgtatgaaaatgtaattgccatgtgtttggcaatacaaatatccaaataatgtaatcttcgtatgaataaatgtgtgtgctgttatcct

SEQ ID NO: 22916 - DNA, 419 bp, Glycine max
acatacacaaatgccttaaagatagtcaggttggggaatgatgtccgtgctgttgtcaacagtgatcctgaggtcaacggctacttgaaagttgtgtttgtcccaaattacaatgtgtctgtggcagaggtgctgattccaggaagtgagctttctcagcatattagcactgcaggcatggaagcaagtggcacaagcaacatgaaatttgctttaaatgggtgccttataataggtaccttagatggagccaatgtggaaatcagggaggagattggtgaggataattttttcctttttggtgccacagcagaagatgtccctcgactgaggaaggaaagagagaatggactgttcaaacccgatcctcgatttgaagaggcaaagaagtttattaggagtggggtgtttggaagcta

SEQ ID NO: 22917 - DNA, 418 bp, Glycine max
tagtcaacaactattaaatttttatagagactgggattaaattttgaaatggttttctctagaaaaagaaataggcattaaaaaataaggccccgccccattaatacgagatatcgttgagagtttttacaggcctggttcgggagactataggatacggctttttatccgaactgaactcttggggaagggaattccacccactcatcaatggcatctactctcttcgcttgcccgtcgttgtgttcctcctcttcttctatattttctacttccgtcaaattctccttaaacccgaataaaatttctcttccgttcgccggaaacaaaaaacctctttcggctccaattcgaaggcggttcaatgtcattgctatggctccccctaaacccggtgggaaggccaagaaaggtgatt

SEQ ID NO: 22918 - DNA, 423 bp, Glycine max
ggttgcccacatatgtacacaacacggaccacgcgagcactgtgtttctgatcaccacgaacccgagcgagcgacacggtccttagttgaagtgttgaaccacaacccagagttgaagttgtgagtggcaaggggtgttcgaggctgttttcatcttcaattccttcattcagaggtttgcaaccattggagccaatgtctcctgcttcgtctcctttgcaagtgccatcatcaactgctccttttgctggtcttgtcatatgcgttactggtttatctaaagaagcaagaaatcaggtcatggaggctacagagagattaggtggacagtatagccccaatttgcatcctcaatgtacccatttggtggttcagagttttggtggacgcaagtttgagcatgcgctgtagcatggagcaaaa

SEQ ID NO: 22919 - DNA, 323 bp, Glycine max
ggttctagtgtgtgattgttggttgttgtaactcgttcggcttcttttgttgttctgtgtttgtgtttgttttttctctcacctgaaaatgtcttgctgcggtggtaactgtggttgcggaagctcctgcaagtgcggcaacggctgcggaggctgcaagatgtacccagacttgagctacactgagtcaaccaccaccgagacctttggcattggaattggcacctgttaaggctaattttaagggtcctgaaatgggtgtgcccgctgagaacgatggctgcaaatgtggaccaaactgttcctgcaacccctgcacttgc

SEQ ID NO: 22920 - DNA, 418 bp, Glycine max
ggtacgtcacaattgtgaagcacagaagaatgaggaattctgagagaagcagtgtaagaaagtacaacaaatctgaacttccacgcctgcggtggacacctgaacttcatcaacactttgttgaagctattcaaagtctaggtggatcacacaaggcaactccaaagcgaattttgcagcagatgcgtgtgaaaggactgaggatcgctcacatcaaaagccatcttcagatgtacagaaacatgaaaggacatgccattgttgcaccagtggatcagttgctggaaggaaaggcaaaagatttcaaaatatgctccaatatttgtccaaccgaaaggaatctcaagcgggaacttcatttgttagactacaaagatgggctttcacaaaccagtgaggaaactgattatgatctaaa

SEQ ID NO: 22921 - DNA, 340 bp, Glycine max
ggtggggaaaaaagatagaagaggaaaagtcatgaaaagcataagaatctgcaacaaatagtcatggctgcgcttggggaccaatcagaggaacaagccatggctgcccaacctaaacctcagaaccgacccatttctaacatcgtcatcatcgttgctatgcagacggaggcacttcccattgttaacagattccagctcactgaggaccctgacaccccgtttccgcaaggggttccttgggtccgttatcaagggacatacaaagatcttaatataagcttgatttggccgggaaaagatccaactttgggggttgatagtgtaggcacgatatcat

SEQ ID NO: 22922 - DNA, 370 bp, Glycine max
gaaggtgcaagagtttgttgtgagctataagcgagtttatcgtgaggagaatatgaagttgtttgttttctttgttgctgcagtagttttggtagcatggccatgccatggcgcaggctaccaaaggttccctctccgaatgaaaactggctatggtgagcgttcttcggaggtaaaatgcgcaagttttaggcttgctgtggaagcacacaacatccgagcctttaaaaccattcctgaagagtgcgttgaaccaacaaaggactacattaatggcgaacaatttagatcagactctaaaacagttaaccaacaagctttcttttatgctagtgaacgcgaagtccatcacaacgacatatttatattc

SEQ ID NO: 22923 - DNA, 174 bp, Glycine max
ctatatatacacagcggtcaaataaatacaactaattcctcttatccctttctcactccttcctaattgtatcttctacgtttcacaccttcctttaccccaaaccattcttcccttgttttaaaaccttccatacacaaccaatcatgtccatactacttctttgtccctatc

SEQ ID NO: 22924 - DNA, 417 bp, Glycine max
ggtttggccgatgttcctttcttgtgagccgaggagaacgaagagtcgttcctgagaagctcgtcgctatgggttctctccctgtgcccgcatttccatccaaacactgccttgacgagagcagccacattgacgaagccaccctctcggcgctattcaagtcgcagcagagccacctgaacttcttcttcgaccacatcgaccactcccaaaccctagccttcacgcgcgcgctcctcaatgccgtcggcaccgtcttcttcaccgtcgtcagaaaatccggcttcgtcgcgcacaagatctcgcagacgctcgtctctctgggcgttcgctccgcgttcctctcgccggtggacgctctccacggcgacattagaatcctcaccaatcgcgatgtgctcatcctcctcagcaagg

SEQ ID NO: 22925 - DNA, 368 bp, Glycine max
tgggttgtcttatgtatatcctcgtctgccgttcttactttattataaccacttctaatatccattttaaaaaaataacatgccccatttaattcattcaacaatacctatattagtgacataagaaacctatttttgatggaaaacgcattaactctcctgaaatctgtgcaacacctccaaaagtcattcttctttcttacgaacacctactaataagcataataactactccttctccttatatatcctgttaccaataaatcctgcacttgattatcaatctcttcttttgggacattaagatatctataggctttccatcagacagatgtgtcattgattatatcgatcttatcatcacattc

SEQ ID NO: 22926 - DNA, 420 bp, Glycine max
  modified_base (36)..(36): a, c, g, t, unknown, or other
ggtctccgtttgaaacagtttcagtttctgtctgtntcttcggctgctacgttctctgaacttccatcgacgcgccggcaaacgccttctgcacgcttcgtgtaacagcagaacccaagagaaaatgacaaatgagaatacagcaggcattgagatagattatgaatatgaagattgcaataattctaagcgcccaaaaatgacttctaaagtatgggaagaaatgcagcgtattcataccactgaaggtagtaaagttctgtgcagacactgcggaaaactgttgcaagataactgtggaacttctcatttaaagcgtcatttgatcatatgccctaagcgtcctaaaccaatggatattattactcaagattcaatgcctacggtgtgttttagaggtcctagcagtgtcaaagattc

SEQ ID NO: 22927 - DNA, 417 bp, Glycine max
gaaagtcaataaaatcggcaaaccctagtattggtttcttctctatagatgcacagagatcaaagagagagaaagagattcctttttatccctttctcgctccttcctagttgtttcgtcgacgttgcagagcttgcttgaccccaaacccttcttcctttgttttctttccttttttccacaaccaatcaggtccatgctacttctttgtctgtatcttggaagtgagagtaaggctaggattatttttacttcgaaaggagaagcgttttagaagatagttatgcctaccgatggttaattcagtgccagatttttttagcctacttcaatatattttgttgaggatttgctattgaatcgtaataactgaagtttaaaagaagggttttgacttgtgagctttttagcggactg

SEQ ID NO: 22928 - DNA, 415 bp, Glycine max
gaagttggaggatagtaaagaagagaagggtctggaaaggaatccccacacaacgaaaccaacgcttcccacactccaatttcctattctcaatctctgtgatttcactccaaatttcaccctcagcttgaagataacgtgtgagatggatttggtgaaaatgatgatcatatagtgccccatgccagtgacaaacataataatcagtttgtaatacaagaagatagctgtaagaaatcacgtcatgaattacatggtatcagaaatagtgattatgtgaatagctatggtactcagggtaaagaggaattgtacttagaaaatatgacccaaaaagaaagaatgcaggaaaaggattcatggcctcacacacctgaagatgtgttttcttcatgtggtagtgactcaagcaaag

SEQ ID NO: 22929 - DNA, 388 bp, Glycine max
  modified_base (212)..(212): a, c, g, t, unknown, or other
gaacccaggttgtctgttacggattagcatcagagcaagttaacaaaatttgggtgcgtcctggattgacccttttgccccctctccctcaccctccactaactcctcctttttggtttttataaagcacattcccaatagaggagggtccctacacaacacaacccttcaatgacgtccatggccactttcttcgcccaaaccttcttccnctcccactctctctccaaaaccttcgatacccatttcgcccctgccccgaaagtcaacgtctttgtgaacttcagggcgaggaggcacgttggggtgcgagtttcgaacgcgctgatcgaaccagatggagggaagctcgtggagcttgtggtgacggattttgagagggatttga

SEQ ID NO: 22930 - DNA, 242 bp, Glycine max
ggcacaagtgagtttgttgatcgagataactagagacagtgtgatgaaaatgaaggtccttgttttcttcgttgctacaattttggtagcatggcaatgccatgcgtacgatatgttccctctccgaatgaacactggctatggtgcccgtactccggaggtgaaatgcgcaagtcggaggcttgctgtggaagcacacaacatctttggttttgagaccattcctgaagagtgcgttgaag

SEQ ID NO: 22931 - DNA, 418 bp, Glycine max
gaaacaaaacctcaaaatctatatattaaattaatggcagaaacttgatatattattacgcaaccaaactttcacacctttgaattttagttgtcaacaccctctttttaaagctttgaagcatctctgtcttctagttagcttccaataacaaatggtacttttgatagagaaacttacaaaacattacttcaagctggagaatcaccaccatgccatcacacaccttcaaccagaggagttatcatcctcactgcttgcatttaaatcccatatgtccaaatcaattgaccaactagcatcggatttgaaacccggatcagagacccccctgtccttaacatggtttggaaagtgtttcggcctcttgccctcatcaacaaggcttttggaaaagcttgtgtggatattgactacc

SEQ ID NO: 22932 - DNA, 390 bp, Glycine max
gcagcatgggtgttgttggagtgccagaggggctcccattagcagttactttaacgctggcctactcgatgagaaaaatgatggcagataaagccttggtaaggaggctttctgcctgcgagaccatgggctctgacacaaccatatgcagtgataagactggtacattgactatgaatcagatgactgtggttgatgcttacgcggggggtaagaaaattgatcctcctcacaagttggagtcctatcctatgcttcgctctctgctcattgaaggtgttgcacagaacactaatggcattgtttatgcacctgaaggtgccaatgatgtcgaggtttctggatcaccaacagaaatggcaattttacaatggggaatacagattggga

SEQ ID NO: 22933 - DNA, 394 bp, Glycine max
  modified_base (6)..(6): a, c, g, t, unknown, or other
attganggaccgaccgacgcatacgtccactcatcctcccacacgtccttccacttttctattccaataatacaacagggggtgtgagctcattacaagcagggtcacacgtattcaccacataaatttacgccaaataaaattccctacacggatgacttatgaccaactttcatgataaacaatttcttttttctaatcaataatcattaatattattgtcgacaccccactaactcacatactcaataccaacacctatatccatcttacctcttctactacaaacgacctttataagcctaacttcaaacctatcacttttgatacgactatccaaaacaataagtatctcatcccaaatcaccatgactatctcatttactatcttatg

SEQ ID NO: 22934 - DNA, 409 bp, Glycine max
  modified_base (25)..(25): a, c, g, t, unknown, or other
cctataccaataattaaggagcgtntgggaactgatggcgaacagttcctcaagtatccaccacctaaagtgatgcaagtcgacaagtctgcatggatgactgatgaagaatttgcaagagaaacaattgctggtttgaatccaaatgtcatcaagattattgaggagttcccactaagtagcaagctagatactcaagcctatggtgatcatacctgtataataacaaaagagcatttggagcctaacttatgtggtctcactgttgagcaggctatccaaaacaagaagttgttcatcttagatcaccatgactatctcattccatatttgaggaaaataaatgcaaataccacaaagacttatgctacaagaaccatatttttcttgaaaaatgatggaactttga

SEQ ID NO: 22935 - DNA, 389 bp, Glycine max
ggcagttcaattccaatatattccattctctctgtggagttccctacctctcccttgaagatgcagatcttcgtcgagaccctcaccggcaagaccatcacccttgaggtggaaagctctgacaccatcgacaacgtcaaggccaagatccaggacaaggaaggaatccccccggaccagcaacgtctcattttcgccggaaagcaacttgaggacggccgtacccttgctgactacaacattcagaaggagagtactcttcacctcgtcctccgtctccgtggtggcatgcagatcttcgttaagacactcaccggcaagaccataaccctagaggttgaaagctccgacaccatcgataacgtcaaggccaagatccaggacaagga

SEQ ID NO: 22936 - DNA, 415 bp, Glycine max
gttgcaaatatacttgccatggctgagactgttcgggaggttctacctcatattccagatgacatgatattccaggacttgcaaaggacaaattcagtcacggttactgtgaataatctcctccaaatgtgatgaatcaaggtattattttactcctcaaggaatatgaagaagggcatagagttactactacaattgtccttggaaaggcataggctttcattttatgtatatagagtcagcacattcaatctgttgtactcaagaaagatagcagaaaatataggcattttctttctttctttgtcttctccttgaatctgtagtaaaataaatgtggggtgtgttcccaagttgggtaagttcctatctgtcatggttccatttcaattgtaattttgaatttgctgctacc

SEQ ID NO: 22937 - DNA, 417 bp, Glycine max
tggtccacatttaattcactcactctcatgtaaagtatctttatctcatatgatatgtaatcatatatattatcattaatttcttaattcttatctttatgacaccaataaatatttcaccttaaaattatattttttgtctcaccttttattttaaataatgaagattcattaaagaaaagatgttatgactcataatcttaaatgctcttaaagaaacctactagtattaattattaaagaaaaaatggatattaaatgaagcttgactatgtttggttataaattaataaaatttggtcctttatgtaacactactttcgttttataaattaaaaaaacaaacaccagtttatcaaaactaataaaaaaaagtagttacagttagtttattttaataatattataaatttaatt

SEQ ID NO: 22938 - DNA, 442 bp, Glycine max
cccaaaccaaaacttttgtgacttacacacaaacacgcactcccttataactatgtctgggtccaacccatgtgccagttatcatctccctccactctgtgtgaaaacaatgagggccatccaaacatgcccccaaccaaaattcatgaggagcctgacatgttcgtccttttgatccccaaacccccaacaacaacaacattcttcgaacaacgccaaaataaccaaaagccccataaaacccatttttccctcgccctcgacgaagtcaaatgcgtagccaacatagcattacccatggtgctaaccgggttactactctattctcgctccgtaatctccatgctcttcctcggtcgcgtcggtgagctcgccttagctggtggctctctcgccattggattcgccaacatcacgggctattctattctctcgggcctcg

SEQ ID NO: 22939 - DNA, 277 bp, Glycine max
gagaatgtgatggaagcatgtgcaagaacacctggcataacaagatgcgtgttcacatcatcactatcagcttgtgtatggcaagacaatgcacaatcagaactttcctcagttattagtcatgggtcttggagcactgaatcattctgcacagaaaagaagctttggtatgctttaggcaagatgagagcagagaaggctgcttggagaatatctgatgaaaggggtttgaagctcactactatttgtccagctctaattacaggtcctgaatttt

SEQ ID NO: 22940 - DNA, 458 bp, Glycine max
  modified_base (117)..(117): a, c, g, t, unknown, or other
gggcgacagacgcgtgctcccaaaccaaaacttttgtgacttacacacaaacacgcactcccttataactatgtctgtcttcaatccaggggccagttatcatctccctccactctntgtgaaaacaattaaggccatccaaacatgcccccaaccaaaattcatgaggagcctgacatgttcgtccttttgatccccaaacccccaacaacaacaacattcttctaacaaggccaaaataaccaaaagccccataaaacccatttttccctcgccctcgacgaaatcaaatgcgtagccaacatagcattacccatggtgctaaccgggttactactctattctcgctccgtaatctccatgctcttcctcggtcgcgtcggtgagctcgccttatctggtggctctctcgccattggattcgccaacatcacgggctattctattctctcgggcct

SEQ ID NO: 22941 - DNA, 315 bp, Glycine max
ggagccagctgaaggcatacttttgagggttgaaagtctgacttgagaaggaaatgaaattcacaatataagcatcacacaaagtgcccttactgtcactagtgaagaagctgggacaggggaacaagccaagaagatagtccttatgttcttggagagattgtctcatccattgggccttccgaaatcaaacaaacagcagagaaacacagacatgattgctcgtatattgccttacctaacctatggtgaacctgctacaatggatgcgcttgcccatcattttactccttacttgcaagattggagtacatt

SEQ ID NO: 22942 - DNA, 430 bp, Glycine max
agaagggggatctggggtttgcatatcttccttgcaaatctgtgggctactttggcttggctttctgaattttggtttttcaacgctgagagctgaacaagaagatggggggtggaaatcaagaggcagtcaagcagctgcagaccctgatggaaaatgtggatgatgagcagctgaagaatacattccagattatgcaccacggttatcaaacggaaacgttaatacggtttctcaaagctagggactggagtgttgccaaagcccataaaatgttaattgattgttcgaactggagggtggaaaatgagattgacaatgttttaaggaagcctatccctactgatttgtacaaagccatactggattctgaacttataggaatgtctgggtactcaaaggaggatctacctgtcattgtctgtggtgt

SEQ ID NO: 22943 - DNA, 372 bp, Glycine max
gatagctttttcagaggaacaatggcggtcgggggttcgacgtgcttcttcttcgtgtttgctctttctctccttcttccttttgagatctccgctgaggaatcatcggcgaaagagttcgtactcacattggatcactctaactttcacgacactgtcagcaagcacgatttcatcgtcgtcgagttctacgctccatggtgtggccactgtaacaagcttgctcccgagtatgagaaagctgcttctatcttgagtagtcatgatcctccggctgtttcggctaaaattgatgccaatgaggagatgaacaaagaccttgcatctcaatatgatgttaggggatacccaacaattaagattctgagaaat

SEQ ID NO: 22944 - DNA, 346 bp, Glycine max
  modified_base (261)..(261): a, c, g, t, unknown, or other
  modified_base (270)..(270): a, c, g, t, unknown, or other
ggggatggctggccgctgaaccggaccggttcggcttggagagatcttgttgggctcggaaacacgcatttgcggcggtgatgagagggagctgctgctgctggaaccgtcggacagagcagcggttccgcctcctcgcgatctccaccgttaaatcactcaagatcaagcttctcctcttttgctgcgtcgccttcacgcttctcgccttttccaccaacgcttcttccttcgtactatggatcaacaaccaaacgccgncgtcttcgncaactagctttcccgattccgggttctatttctttctctgtctcttttatacttcattcaactacttaatatgtac

SEQ ID NO: 22945 - DNA, 435 bp, Glycine max
gctcttgccatggagacccctcagcagaccgacgatttctcatcgtacctgcactcgtatcaggtcgagtatatgtggttgatgtgaaaacaaatccaagggctccatctttgcacaaagttgtcgagcctgccgatatcatacagaagactggattagcttatccacacacatctcactgccttgcttctggtgatataatgatctcgtgtcttggagataaagatggaaatgctgcaggaaatggatttcttcttcttgattctgagtttaatgtgaagggaaggtgggagaaaccgggtcacagcccactatttgggtatgacttttggtaccaaccacgtcacaataccatgattagcacatcatggggtgctcctagtgcttttacaaaaggttttaacttacagcatctctctgatggattatacggga

SEQ ID NO: 22946 - DNA, 365 bp, Glycine max
accactcgtacatgacgatgcaagcagaccacgcaatggaagaacatgaatggaataacggaaaatatgcgaacacaggattctgtataccaggatgtctagaatgaaccgaggaatgtggtcgtagcatgcgaatttgacaccagtactgtgcacttcataaagaatgcagatcacgaagagttgcgatagctgcgttctggtacatctgggactgggtaccatggaaaatggacaggatcaaatgatgcatttaaaatgaataaagaaatgctgcttcgctggtcgatcttgagaacaagaaatattgaccatagagttaatggcgggaagcatgacatactttccaagctgaaccatccaaa

SEQ ID NO: 22947 - DNA, 407 bp, Glycine max
gacaacaaaccaaaaaacagagctagctagcaagactaaaatggcagaaactgcagtgtccttggcaggtcagcaggcgcttccaaaaatattggaagctgtcaaaatgttgagagatctcccaaaagaagttagagacattacagatgaacttgaaagctttcaagatttcatcaatgatgctgataaagtggctgaagctgaagaagatgatggaaggcgtcatagaataaaagaaagggtgatgcggctgagagaagcagcttttcgcatggaagatgtcatcgatgaatataacatctcctgtgaggataagcaacctgatgatcctcgatgtgcagctttactatgtgaggctgttgccttcatcaaaactcaaatccttctccttcaaagtgcgtataaga

SEQ ID NO: 22948 - DNA, 135 bp, Glycine max
gatgcacgtattaatccctgtctcatatatatcaagccttctgtgctatcctgagagacacacttaattattatgatctcttactcttgtctttgaaatccttttctaattcaaatattatataacgattgaaat

SEQ ID NO: 22949 - DNA, 382 bp, Glycine max
gtatagcatgatccaatgtatataaactgtaaagagtctttattttttctctggctgtgctacaatattgtcacgtactgaccattgtgatgaacatttaagtttaaaacttacactaattagggttgggatattctttgtagtgctatgttagtcaattggtttttatatatttagattaaccactgttaagcgatatacttgctcaatcataattaatcctacatactactactagctaggttgtattaaccaaggtaatttgcatatgcaacttgatctggttttctttctttgttgacccagtaattaaatgttcttatatatggtaggttgaatatggtattgccactgatatatataaatggtatgagtcttggca

SEQ ID NO: 22950 - DNA, 384 bp, Glycine max
gactatccatcactggttaccaacgtttacactctcaacctctcaacaaaagacgcattttttttttttttggtttggaagagagaagaatggagagaaaggttctgatattgtgctctgttgtggccttcttggggctgttgtcggctgcaactagcttcggtgcagaagcgacaaggattaaggtttctcaagttcattttgttacaccaaaccagtgcacgtatcctcgtagtccagctctgcctcttggtttaattgctgcagtggctcttgtgctatctcagataatcataaatgttggaactgggtgtgtttgctgcagaaaaaatttgcaaatccctgattccaattggaaggtggcactggcctgctttggtttat

SEQ ID NO: 22951 - DNA, 414 bp, Glycine max
  modified_base (177)..(177): a, c, g, t, unknown, or other
gaaggcacagttgcaaactacactttggataactacaagtctggctacattcatcattgtcttattgaaggccttgagtataagacaaaatactactatagaattggaagtggtgattctgctcgagaacttttggttcgaaacacctcctaaagttgggccagatactccctacanatttgggatcattggtgatttggggcagacgtttaattctctttcgacccttgagcattatttggagagtggaggagaggctgtgttatatgttggagatctttcttaatctgatgaacatgactacaaagatatgggtttacggtgggatacatggggccgatttgctgaaaggagtgcagcatatcagccatggatgtggaatgtgggaaaccacgaagtagaggttttgcctga

SEQ ID NO: 22952 - DNA, 398 bp, Glycine max
gattgcctcaattctcatttttcagttgagttcagataccataaccataccataccataccagaaaattaaactgaagtgagagagagatgacagtactgtctccttctctttctcggcctaagttgcaatcttcctttctttgttgccctctcaaatattctaagcctacaaatagaaatattcaaccaaaacccacttcttatccacgcattagagctttggaccttgatcaaaacacggtagtggctataagtgtaggtgttgttagtgtggctgttgggattggcattccagtgttctatgaaacccaaattgataatgctgtgaagtgtttttgactccacactataacatttattttatttattctaatctaatattggttttggcaattct

SEQ ID NO: 22953 - DNA, 433 bp, Glycine max
ggttctagtgtatgtgattgttgtgactcgttcgtcttcgtcgttatcttcgtcttttgttgtttgtgtgtttgttttttctctcacctgaaaatgtcttgctgcggtggtaactgtggttgcggaagcgcctgcaagtgcggcaacggctgcggaggctgcaagatgtacccagacttgagctacaccgagtcaaccaccaccgagaccttggtcatgggagtggcaccagttaaggctcaattcgagagtgctgaaatgggtgttcccgctgagaacgatggctgcaaatgtggagctaactgcacctgcaacccctgcacttgcaagtgaagtgttggagagctaaagcttcaagcagaaatggcccttagaaataatgatgaaaactatatgtagtttcaaaacttcaaaattatgtagtatgtattat

SEQ ID NO: 22954 - DNA, 317 bp, Glycine max
ggcacaagtgagtttgttgatcgagataactagagacagtgtgatgaaaatgaaggtccttgttttcttcgttgctacaattttggtagcatggcaatgccatgcgtacgatatgttccctctccgaatgaacactggctatggtgcccgtactccggaggtgaaatgcgcaagttggaagcttgctgtggaagcacacaacatctttggctttgagaccattcctgaagagtgcgttgaagcaacaaaggaatacatccatggcgaacaatatagatcagactccaaaacagttaaccaacaagcttacttttatg

SEQ ID NO: 22955 - DNA, 363 bp, Glycine max
gcaagggttatgtgggatcagaagactgttcatgcaatgcgatttggatgcgtttaattccgtacccaacaagatgcacaacgctgtatacatgatttgactgatctgtggcttggacgtagacagatccgttggcactcgacgacacacggtgctgttggctatgaacagaagcagagactaaatgcaaaaagtgtggtgcaactcacgaaggtctcatctagagatggtaaacacacatgtcacatggactgctctgagaacaattctcattatactactggttatgtgggttaccttgctacataggtaactaaactcgatctccgatcccagttgcatgctcttggcgctaggactgat

SEQ ID NO: 22956 - DNA, 424 bp, Glycine max
gacacatttttcatgaccgccgtgataacacactaacaccaccacttcatcaactttacttgacaacaatattgtacaactcaaaatctagtgtcatactatctttcttctacttgaaatggctctacaggctgcttctctagttcctgcttctttctcggttcttaaagagggaaagagtggtgtgactctcaaggactccaccttgttcgaacattcattctcagaacctatcaaagctaacttcaactcttctgcattgaagcgcaagagggaattcgaacataagctctgtgctgagagggccgaaacagtggctacagtctgtccatcaattaccaagtctacaccataagggaagaaaacattgaggaagggcagtgttgtgataactgaggcttcatctggactaggcccggacact

SEQ ID NO: 22957 - DNA, 126 bp, Glycine max
ggctacccgatgacaatttaccgctgaaggtttccaatgtcacattgggtcacttgggtacccttgctagaatacgactgatgcttactaccatgcaaacatacaaccacggctatactcttacat

SEQ ID NO: 22958 - DNA, 373 bp, Glycine max
gatggaattttgctacgagaagttcagaatgatattttggtgaagcgctattctgtcttaattcttgatgaggctcatgagaggagcttgaacacagacattctgattgggatgctctcacgtgtaattaaaacccgccaaatgatttattatgaacagaagaagatgatactttctggggaaagagtaagtcctgaaaaaatgatttttccattaaaacttgtgcttatgagtgccaccttgcgagtacaagacttcacttctggaaagttattccatactacttcaccagtgatagaagttcctacaaggcaatttccagtaacagcgtattttgcaaagaaaacagagaaaacagattacattggagaag

SEQ ID NO: 22959 - DNA, 308 bp, Glycine max
gacgcacacgcatacgcacgtgtgagagacgacttcagtacgtgatagtgcatgatgctacaccgtggcagagcgggtctgtctaaattcttgattagactcattagcacttcttcaacacacacattctaaaagggatgctctcacttctaactaaaacccatcaaatgatacattatcaacacaacaggatgatcctttctagtgaaagagctagccctgttaaaatgctcattacactcctactttgactcatgaatgccaccttgcgagtacactacttcacttttccaaagttattccatact

SEQ ID NO: 22960 - DNA, 356 bp, Glycine max
attccgtcgacacgctcgctgcaaaacgacgaggggtgaattgattggtggacaggattctagagccgagtcatcactcggtgctcgcctgcttgtcacaccgccgtgtctaccgttgaatggccgtgaagtgttcgattggcactgagcgtcctgccggacgtgtagagccactgaccttatattaagaagaaaatacatcaagtgcagaagagattgaagcatggaagagggaagggtttggaagatacagaacaagatcaatcgcagtaccttttaaacgcaaatggttgctaagaagcttcggctattgtctatgcgatctgaatcgtctcaatttctcagtctggagcttt

SEQ ID NO: 22961 - DNA, 421 bp, Glycine max
gactttagcgaaggatcaaaaaccctgtgaaagtgtgtttgtttggtcgagttgattgaattcgctggcagcttacagctatgatcatcaacaacgccccttttcctctatgattgattcgattcgattgaagtcgattccgtagagagtgagaaatcagatcacaataatcatcgatgggtaatttgttcgtgaagaagcccaaggtaacagacgttgataaagcaatcctcgcactcaagacccagagacgcaaactcgcccaatatcaacaaaagctagatgctgttattgaagcagaaaagcaagctgcacgagacttgattcgtgaaaagaagaaggacagggccttgttagcactaaagaaaaaaaagacacaagaagaattgttgaagcaagttgatgcttggcttataaatgt

SEQ ID NO: 22962 - DNA, 415 bp, Glycine max
ggggaagaagaagaagaagaagaagaaaaagagaagaagtagtttggtgtgttaattgttcgagagaggaatggacgactacacgagggaaatgatggacctgaagacactggtcactcgcactctcgagaagaaaggcgtccttgccaggatccgtgccgaactcagagcgagtgtgttcgaggccatcgaagaggaagatcatgtgattgagaaggaacaagccctacctcctgcattgcttggtagctgcaacgatcgagctaaacagcttcacgcttctcctccagggagacttctttcggcgatgatatgtgaataccttgactgggcgcagctcagtcatacgctaaaagtttatcttccggaatgtaatttggagaaagatttttggaagacagagcttaaggagttt

SEQ ID NO: 22963 - DNA, 437 bp, Glycine max
  modified_base (400)..(400): a, c, g, t, unknown, or other
ggaacctttgcattctattcattcaagattcagggggtgcgttttggaagcagagaccgaaatacttcgagatggcccgtacaaagcaaactgctcgtaagtcaactggaggaaaagctcccaggaagcagcttgcaaccaaggctgcacgtaagtctgcaccaacaactggtggtgtgaagaagcctcatcgttatcgccctggaactgttgctcttcgtgagattaggaaataccagaagagcactgagctcctaatcaggaagcttcctttccagaggttggttcgtgaaattgcccaggatttcaagactgatctgcgtttccagagccatgctgtgcttgcattgcaagaggctgctgaggcataccttgttgggctctttgaggacactaactngtgtgccattcacgccaagcgtgtgactattatgccc

SEQ ID NO: 22964 - DNA, 336 bp, Glycine max
gccagagtaccatttgtggacaaagagtttatcagagttgcagggaacattgatcctgaggggaaaatgataaataaggacgaaggtcgaatcgagatatggacactgcagatgacctttgatgatgaagatcatccttatatggctaagcacatcttatataatcataacgaacaatccagtgatggagtaggctatggatagattgatggccttaaagcttatgatgaacaacatgcaactgacagatttatgctgaatactggccacactatcacctgtaacacttacaccgccaatgaactataccactacagaatgatatcagagagggtc

SEQ ID NO: 22965 - DNA, 418 bp, Glycine max
tatgcgaggagatcatgagggacataggccttgccaggctctacaatatggcggattctttcttcttccagagacttttgcaagacaaaccttacataagtgaaacactgttagccatgattattatatctttagtctggtggacatttcatccattcatatggcagaacagaaagatctactcagttctaatactgtgcacggttctatcactcttactagcttctcaagttctgcgaatagatcacattttattatacacaacttccagctccaaactaccattgacaccagggttctaaacttgccacattgccccatacagatactgaccttgaagtgctcttgatctattatccgcgtggcgttgtctatggatatagtgatttgatattatcatcacacatgatctttactc

SEQ ID NO: 22966 - DNA, 445 bp, Glycine max
ggatcgaggaaaaaaaatatcatttgttagctctgacagaaagagagagagagagagagagtgtgtgtttatttgagtttgcgatttgtgatttctgatttgttggcccagcttggcaaagcaatggctctttctgtatcccttatgcaactcagttgcgtctctcttcttcacaataatccctcatcatcatcatcaccggtgacccttttgcccaaatccctctttccttgtggaatttccctgaaactgaaagggttggttttttggagtaaaagtagttcagtgtgtggaagaagaagagtgggagttgggagtatcagtgtgaatgcctctttggttgaggctccagttttgtgggctggaaggctatgcatcttctatgccctcctcaaggctggcttggctggatctcaagccaacccacttgtctcagatttggaaa

SEQ ID NO: 22967 - DNA, 281 bp, Glycine max
gaggggatcgatgtataaaaatatcatgaggtacctctgacataacgagagatagagagagaaagtgtctgtttatttgagttagctattcgtgatcactgattcgttggcccagcttggctaagcgatgactctatatctatcccttatgcaactcatgtgcgactctcatgtttacaatcatccctcatcatcatcgtcacactgtacccttttctcttaatgactctttccttgtggaatgtcccattgactgactgggctggacacttggatctaaa

SEQ ID NO: 22968 - DNA, 329 bp, Glycine max
gactggtgccagctatgtgagtgagtatattgctattgctgcggctatctcttcctctctccgcactctccatcgttttaggaatatcacaccaattcgtgaaatcgaaggattccgacagaatcgtacgaattattgttcattgtttgcctctactgttgtgctccaacttggtaaactagaagtacagatttatttcttcaatgggggatgctgagaatgcccttccaccttcaaagaaaagggctgctggaaaggagctcactcgagatactcccattgatgatgaagaagatgcccctgagcttgaaactggcactttcaagaag

SEQ ID NO: 22969 - DNA, 414 bp, Glycine max
attcatgatgataccaaaaagttgcttcgttgggatggtcaccttcaaaattattgggaagcctctccttattttctcgaggacaaaacctccaagaagagacaaagtatgcacatagctaaattctcggacaggaagaagaatgatttcactcgtgactctctctcacaagttttaatgttcaatgatttccctcaggagttagttcaaggtgcatctaagcgtgcgtcgagaagaaaaaagtttcgatggaacccagagtcagagatgaagaaacttgatttctttgaacaacaagagaaaacaaaccagggcaaagaggaaaatgatgaaaatgaaaagaaagatggagaagatggagacgaggatgaaaatgcacaagaggaggatgaagaagatattaatgatgatgat

SEQ ID NO: 22970 - DNA, 227 bp, Glycine max
aaatataacaaagaagataacagattacacagcagaggatatatcagccatagtgggcaccaattttgagtccgtttaccatttgtgtcaagttgcacacccacttctaaaagattctgggaatgggagcataggtattaattctttcgtaacaaggttaaaaggctttcctggggtccctggttattcaacctttaaaagagccatggattaattcaacaaaaact

SEQ ID NO: 22971 - DNA, 412 bp, Glycine max
tcagttctaattattttaggcaggccatttatgaaaacagctcgaaccaagatagatgtttatgctggcacattgtctatggaatttggtgatattgttgttcattttaacatgcttgatgccatgaaacatccatctgaggatcattctatttttcgtgctgagataattgatcagattgttgatgattatatgtttgattttgattctattcttcatggtaggaaacatccatttttatctgatctgcatacttgtcattccttatgcattgaatctgaatctgagtttgaatttgatcctatatataatttttatgctgagagtgaatttgaatttgagtctggttctgattttctgggtgttgcacctcttgatgttgattttttagagtcagaatgcactaaccatg

SEQ ID NO: 22972 - DNA, 393 bp, Glycine max
ggcagcaagtgccattttattttgcgctacctcgtcgattctagggtctcaacaatggcgctgttccttctctacgaatccgcttcgggctacagcctgttcgaggttcacggcgtcgatgaaatcggccagaacaccgaagcggttcggaactccgtgtcggacctgaacaggatcggcaaagtcgttaagcttcgctccttcaaccctttcacttacgctctcgatgctctcaaacagtgcaacgccgtctccgaaggcatattaactgatgagctgaggactgtcttggagaccaacttgcctaaagtgaaggaagggtagacgtccaagttcagtttaagtgtgtccgatcctatgattggttcccagatatctgaaatgactaacatt

SEQ ID NO: 22973 - DNA, 189 bp, Glycine max
ggattgggtttggttcttagggaaccctaatacaggggcattaggacgaagaagcataataagatgaaagacagtaaccgagtgatctacagataattccctagttatgctcactgatagactcactgagtctatgcatcgtgataccgatattcatttttgccggaacaaactcatgctacgatcata

SEQ ID NO: 22974 - DNA, 426 bp, Glycine max
aagtgatgttacggaatgagttgtaaaatgatgtgaattgggctaagttgagcttggtatacttatgttatatatatgtgctattgtatatctctgcatgtttaggaatgtaataacttactccatgtgtgttgttagtgtctggatcctatgatgatatctgaccttgtgttcgtgagatcaaatgattagatagatgactataaagaaccttatgctaaatgacgatgaacactatactctgataggatatgacattagagcttaggattttacattgattttatcatatgctatgataagatatgtagttgaacatgatttatttttatatttctcattgaaatatcagttgtaatatcatcaagtttcacctcttgaagttctcaaagtagtagttaccctttcgtacatgtctactatagc

SEQ ID NO: 22975 - DNA, 414 bp, Glycine max
cgcgacatcttcttttacgtattgaatctcacaattggctaaattagatcttttggtgctctttgaataaataaagctcttttctttattttgtacatatctctgctctcatatctcatcaaccttaacctctcctataccacctacaagctgatcgcatagtacatattgatctatagatcacgaatggacctttcgtgcaatccaatgactatatcattaccacttaacaacccttcacatcttcccaagtagcactatcattgtaccatcacatgtcaatctactgttgaaaacaatgaaatgattttatacccacatgccattttcatgcatccattcacaagtgctaacaatattctagttatctgtgatgcctacactccttctggaaaacctatttccacttacaat

SEQ ID NO: 22976 - DNA, 194 bp, Glycine max
gactactgatgggggaactgttaacctcttagattgcacagattctgctccatggggctgaagcactagttgaagcctctgcacaacatgcgaatatatagaattcattcccaagacaaggatctggatttctcaacatagtcggcatcatagtttgcaaaatatcttagtatgaattacaaactgatgaactt

SEQ ID NO: 22977 - DNA, 411 bp, Glycine max
ggcttcaattggccggttcggcggttcggttccgatccgattggctcgtcttcagtgtgaaattcctcgctcatcgcgttccgaatcttcctctcttgttatccagcaaccggtttggcggcgcggcttttcacacgcgtctcacaattcgtccacgtttttgttttttttgttttttggataacgagaattctagatctcttgaacgcaccgtttttggcggttatagaggatcgggacgcgaggcggatgacggcgaggaggttatcggatgtggtgctggactgcgtgatgccatacatacacgactccaaggaccgcgacgccgtgtcgcaagtgtgcaggcggtggtacgagctcgactcgctcactcgtaaacacgtcactattgcgctgtgttacaccaccacg

SEQ ID NO: 22978 - DNA, 374 bp, Glycine max
gaaggtaagatcgattgcagaaaaggaaaaaatgacgatggacgatgatagctgcatatatgtagggggtcatccctacgacgccaccgacgaaaccattcgcaccgtcttcaatttgtatggcgctatccttgatgctaagataatcaacgacccacgcaccacgggcaagtgctattgatttggtacattcacaaatgctaggtctgcaattgatgccatcaacgacatgaatggcaaaaccattgactgacgtgtggttaaagttaacggggtgaggactcgtggaggcaggtcaaacttttggcagataacgttattactatcataatgattagaggaatggtaattgggatcgcattaagtatctaaac

SEQ ID NO: 22979 - DNA, 403 bp, Glycine max
caaggtttctggtcctcaatgtggtggttcctcaatgcaacaagcatcatcttccactcctgctgagaagaagcaagataattcaaatgctgttgggagcatgaaagcctctgatgatgacctcacttgcagtgtatgcttggagcaagttaatgttggtgacgtactgcgaagcttaccttgcttgcatcagtttcacgcaaattgcatcgatccctggctgcgccaacaagggacatgccctgtatgtaaatttcgagctggatctggttggagtgacaatggacataatgatatcatcgcggacatggtctgaatacctcgtctaattttatttatggacgtgtgattataaccttgtacaactgtaacttactctcttcatgtatcaagattagtatct

SEQ ID NO: 22980 - DNA, 271 bp, Glycine max
tgggcatctctagttttaattatgcaggggactgtcggctgtgtgtaataatcgggctggcaataaagtaagccatctttggctttaggggaattttatttggttgagaaaccttggtccaaattggttggaaattagattccggaaaccaccaaggaaaaggtaacctctcaatgggaattaaaaaaatccttggcaagttattacacttttataaatggaaaatttgcaaattttatctttcaaaaggatatatttttgaaagggtttt

SEQ ID NO: 22981 - DNA, 397 bp, Glycine max
gcatctctagttttaattatgcaggggactgtctgctgtgttgtattatctagcttggaataaagtaagtcatcttttgctttaggggaaatataatacgatgagaaaccttggtacaaaatagtcgggaattagaatactgaaaacaacaaagaaaatgctagcttctaatggtgatcgacagaagtcgtggcgaaataatcacttttataaatagaaaatctcaagattctatctatcagaatgaagattcatgtaagagattattttacaatgcaataggtgactgggtcagagtattaggctcatatgagtaactacataaactaagttggctgttatagagactggttataatcaaatttgtatttcttatttagatttttgaatgttccca

SEQ ID NO: 22982 - DNA, 443 bp, Glycine max
  modified_base (404)..(404): a, c, g, t, unknown, or other
ggttctagtgtgtgattgtttgttggtgtaactggttcttcttcttttgttgttctgtgtttgtgtttgttttttctctcacctgaaaatgtcttgctgcggtggtaactgtggttgcggaagctcctgcaagtgcggcaacggctgcggaggctgcaagatgtacccagacttgagctacactgagtcaaccaccaccgagaccttggtcatgggagtggcacctgttaaggctcaatttgagggtgctgaaatgggtgtgcccgctgagaacgatggctgcaaatgtggaccaaactgctcctgcaacccctgcacttgcaagtgaggtgttgggagagcaagcttcaagcagagatagcccttaattaggaataatgataaactattaatgtgtagctaanaacttatgtattatgtctgtgatggttttcgtgcactct

SEQ ID NO: 22983 - DNA, 420 bp, Glycine max
catactagacttataactgctgataatttgtgccgtccactaagggatttagatacaagatgccaatagggcacagtcaatgttcacaagatatagagtgagtcgcatctgcaacagaatgacatgacttataaaatatatattcgcacctacgcaagctagcatttttccttctgtcagtccataaacttaatgtgaaatcttccatagttactgttagaatgtgttaggacccaattgcaaggcatgggactagagtaccactcctcacatttgaagcatgggattccagtgagatttatagggtctagcgctctacaactacatcggctaacatttgtagtatgtttattcaaaggttctaatatcaattggcatcacagctttccaccatgtctttcagccacaaacgagctgtgc

SEQ ID NO: 22984 - DNA, 433 bp, Glycine max
tgcacgtttaaagaacattattaaattgattgttgcttcttcttatgcattctgagcctatcatttaaaagggggttaaaagtttgttagtgaaaaattttgtaagacttaattcaccctccccctcttaagttgttgaggtcacttgtccaacagagatctcgatgaactttaaagaattgcactaaggtctgagagaaggatgaatcggcaccactattgtgagctctgccatcactgccgctacgccacctcatcaacgagtagatctgactcccaaacattcaaatctaacttgcaatgaaggagaatgaaatgattatcccacttgaagtttctcattgaggatggcattgtgaagggcaaggaagtcctggaaggagaagtggaagttatgttgtaaagggagggtgaggagaacctggtgggggta

SEQ ID NO: 22985 - DNA, 441 bp, Glycine max
agagatattgagcttttacagcctcagacattcattaatgatactatcattgacttttatatcaagtatttgaaaaagaaactcccaactgatgaacagaacaggtttcactttttcaatagcttcttctttcgtaagcttgctgatttagacaaagatccatcaagtgcttgtgatggtagagcagcatttcaacgtgtacgcaaatggacaagaaaagtgaacctttttgaaaaggattatatcttcattcctgtaaactacagtcttcactggagtttaattgtcatttgtcatccgggtgaagtgtcatgcttcaaagatgaagaaattaaggaatcttccaaagtaccttgtatcttgcacatggattccctaaaaggaagtcataaaggtctcaagaatgttttccaaagttacctatgtgaagaatggaaagag

SEQ ID NO: 22986 - DNA, 429 bp, Glycine max
caacccactgatcaacagttacaatagcctattgatctagctctctaacactgattatctgtcaactaaccaatggttagttgagcttacatctggcacaaaacagtaagatataactacagctgtacaaagaaaaaactcttaaccgttagagtaagtctactctaataataagcatgcaaactaattctagttgagtagcattttccttggtgtgatagctgaatcttttagattgattgatttgttagcaagtaatgtttgtggttgctcactgctcaatattatcacaatgtgtgacaaaattgcaaatggtgccactctgacatgtggactggtactgggagagcacttgtcaatgcttaatatgcaaaacatggggaggggaacatatttcaagtatcttgaagaattaaatgagtatttcat

SEQ ID NO: 22987 - DNA, 411 bp, Glycine max
ggcagcgcttgatttgaggccaggcaagcccgactcaaccaccacacctgtcctcgttcacgctacccctttctgctcttcttctacctttcaagttttaaaagtataaagatggcagagacattcctatttacctcagagtcggtgaacgagggacaccctgacaagctctgcgaccaaatctccgatgctgtcctcgacgcttgcctcgagcaggacccagacagcaaagttgcctgcgaaacatgcaccaaaaccaacttggtcatggtcttcggagaaatcacgaccaaagccgacgttgactacgagaagatagtgcgtgacacctgcaggaacatcggcttcgtctcaaatgatgtgggactggatgccgacaactgcaaggtcctcgtcaacattgagcagcag

SEQ ID NO: 22988 - DNA, 353 bp, Glycine max
aaggaagagagagcaagtgagtgttgcttaggatccaagacaagacagtgataatattggaatttttggaagccaaattaggcttccattctgattctactattttatctgtctagttttagggtactgtttatcatcgttagaatctgaaggtgtgaagagtgaagatggcagaagaaaaagaatcaacgtcaattcctcttagtcaaggggacaatgcatcttgcgacgatcccgaagacccagccaagtctccactaagctcgcccaactcttccactcgcagggcttgctgctttgttctccagagttgggtctctaagaaatttatgactggatgcgtagttcttttt

SEQ ID NO: 22989 - DNA, 379 bp, Glycine max
gcggccgcttttttttttttttttttttttttttttttggtcacttgttgatgcttctgttttgaaaggatcaaagccgttaacttcaagcattcctgagttttcaattgattcgcttttttgactggtatcttcataaaacttggtcgaactaaccatttcaaggagtttactgaaggaagtgttgctaccaaaatggttgtactttgctgtgctggacagaacttctacttctgagttgctatctgagcatgatcctattttctcaggattttgatcatttgaaaaatctccagatatttgagaggaaaaaacagagccttgggatgaaactatgtcatttaactctttcctatcaccattgtaacatgatttttct

SEQ ID NO: 22990 - DNA, 417 bp, Glycine max
  modified_base (405)..(405): a, c, g, t, unknown, or other
tctcttgcatctttggcccaatcttcgtggagtctgctatccaatgcccttggggggtaggattgcatcagttgccttacccctcttgcgtgcgagaggttcgttcttttcttggtcatgcagggtttataggcgctttatcaaggattttagcaaagtggcccttccactatccaatctactgcaaaagaatgtggagtttgattttgatgaccggtgcaaagaggcttttgattgcctcaagcgtgcagtggctaccacccctatcattcaggcacctgattggacagccccatttgagctaatgtgcgatgcattcaattacgcattgggggttgtccttgctcaaaagattgacaagctatctcaagtgatctactatgctttcagaactttggatgctgnccaagaaaatta

SEQ ID NO: 22991 - DNA, 407 bp, Glycine max
  modified_base (365)..(365): a, c, g, t, unknown, or other
gccacatgcaaaacaaaatcaagttttaatcaattaaatacagaatcaatgtttaatactttaatttaaaaactgaatcaaatatccctcatcttttttatttcaccgcctccacaccactgtgtatatttcttggtgttgctttatcggatttctcctcgcgaaattaagtcctcgttgaccaaaaagaggttgtgaatacaagagtacatgcatagtgggaaaggaataacataagaaggggattgggtttagttaagtttagtttggttttggccattcttcttggaagcttcatcgttgttggtgggaccgatgtagcttattctgcactgctcaattctgtctcccatgcatgccactgntttcttttcatgaacggagtggaattaattaatattactaat

SEQ ID NO: 22992 - DNA, 316 bp, Glycine max
aggcgttcgaccacgcctgcatgcggattagagaacgacacaaggagatgagttctaaggtctcattcggacctttttgatatgtggtcaccacttcttctatttctatgcctatctatgcctctgtttgtgttgtccttattcaaatacccgtaaacctttatgaatccaccacttccaccaggtcctatatgccttcccataataaggaatcttcattaactaaataatccttctcttcatgagcagctatggcctctctcaaagaaatataggcctttattttacccttcatttcgcttaaagccagccctaa

SEQ ID NO: 22993 - DNA, 394 bp, Glycine max
  modified_base (36)..(36): a, c, g, t, unknown, or other
gaatcaaacacaacacacacacggaacttcagctgngttggaggaaaaacgaaaaaggaaaacaatgggttccgataatcaccagaacttggagttcttgaaggagatcggtttgggctcttccaacattggctcttacattaatggccagtggaaagccactggttcttctgtcacttctgttaatccttctaacaatcagagtatagctcaagtgaccgaagcaactttgcaagattttcgaggaggggttgcaagcttgcagtgaagcagctaagacatggatgactataccggcaccgaagagaggtgagattgtgagacagattggtgaatcattgagggccagattggatcctttgggtatgctggagtctcttgagatgggaaaaat

SEQ ID NO: 22994 - DNA, 322 bp, Glycine max
aggcgtgagaacacctgagagaggacaaccgaagagtgccgctaggatattgcggctgataggctatgacatacaggaatgactgccatggatcctacctatgccgctcagcatatacgcatccgataactgatgcttaatgcttctgctgatatgaaccggcctaattacgatctcattatgaacgtttacaaggaatcatgcactaagagtgacgacataatcatagaacaggtcgtgcttatatacagctcgactataacactggtatgtatatgctcaggaacatactacatgacatgatgctcagagatgcgatgct

SEQ ID NO: 22995 - DNA, 438 bp, Glycine max
tatgtggcatctggcctgagaatgaatgtgtagaggtgagttaacctgtcagtttcacattgcaggtccttctttatggggtaattttgaccgtggtaggagagtatcacatggagcttctttgtatccgtgccacataaatctggtccaaacattaaactatagagaatgtgtcaacaggacattctttctttctgactcttaaggtaaaaatagaaagcatggataaagaaactaaaaatgaagttagaccatatgtggtacataaagtttcctaaaaataatgcaagtgaagcaaaatgagatttactgtaataaaacgatgacaataacatgcatataaaataactgcataagctctctgtcttatgttacttctggacatagttttatacactataatgaagtctctataatagcatattacacccctgatta

SEQ ID NO: 22996 - DNA, 416 bp, Glycine max
gaggtcgaggacgccttcattgcgacctatgtgatgcatcctcttcaaactcacactcttcatacataattagatacattggttgcgcgctcttcctcgtttcctttgtctttctctttcggctttttccatcccttcctttctgcatgcagtgatgctgtgataaactgtgttagagcaacatcatggaacttttcaacatgtaatgattaagaaggaagatcattcatttaactgattaatggcactgatttccgagctactggctaacacaatactcttggtgatgaggcatttttctctacttagactggcatgcttgtttggtatcaaaatcgcattaactgtcatatatacttggacggagttgatcggaacaacaattaagtttcatgcaaacattatattaagaatta

SEQ ID NO: 22997 - DNA, 417 bp, Glycine max
ggggttggttcatttgatctgcgagtggagaagagaatcgtgatgggaggaggacacggtcacggcaccacctacaaaggagttaccgttcatcacccaaagcgctggcacactatcaccggcaagggtttgtgcgcggtcatgtggttttgggtattctacggggcaaagcaagacggtcctgttgtattgggctggaagcattcttgggagggtcatcacgatgatcatggcaagggccattaagcattccttaagcatgagctccaagaacaggaagaacagaatttgaagtgtctggtgctgtgggtgtgctgttagttgaaatgtttactttgatcaattcaataaatttggctgtaaaataagagatttctttttgcgtggtttcatgagcattagatatgattgtgcatg

SEQ ID NO: 22998 - DNA, 427 bp, Glycine max
cttattatatttattctctttttatccttaaacattacataaatatatccatgaatgtaattttatattttttaattactgtaacaactaattttatcaaacataaccttttatattcacaagtgctatgcgaattaaggatattaaatacattaaaagttgcccgagtaattaagttgtattttctatattgccctttggctgatgtttaagtggattgattctcctaaatacataaggtgaaaatgtgatattagcaacatttgagtaattaagtcaaatttaagatatttagttaagataaaataacctaatataagttgatcaacatgttttatggtatttaaaaattaccttcagttgatcatgcattcacggtacaaattacaatatacccacaaatcaaaatcatttatagaattaaata

SEQ ID NO: 22999 - DNA, 417 bp, Glycine max
gaagagggtcttaagcagttgcaaaaggcagagagaatacagaaaaaaggagggatggttatgtgtgcatcaacgcttgttataatgtgctttgtcatgctagttctcttgatactcaaggagattctcttctagtcgttactgagcactttactggccggcatcatgttaattcttccgttcaatgataatcatgatgccggtatcattggggcactatgataatgcgtttcaggtttggggatttgtttttgaagtgccatgggctaaaatgattggctccttattgagaggcaaattggggatggcactggacagcatcccttcgtgctaacattgctattagttttaacaaatcctgtaaggagggattttcagcaagttcatcttccagtggccaatttttttagaaaaagg

SEQ ID NO: 23000 - DNA, 421 bp, Glycine max
ggtgttgtgttggatttgagttttcagttttcactgcagtggaaaacaaaatgactgaatctccaatttccacacgccattggcaacgagtcaattaaaaagtcaagctttcaatgggtttcaatttgcatcccaatccaaccaatgttgcaatttccattcttcctaatccgacctacccactgttgcttccccattcaataattcaattcctgcactgcaccaatggagcttttgaagcctttgcaccctcaccatgcacccattttgcgaattccctttcacgctgtcccctcttcatcttcttctcaatctcagtctcaggttcccctccctatgatttctaaggttcatgtcgctgttgggaaatcgctcgacaaagttgctcctctgcttcgatggactttaaaccactttcgga

SEQ ID NO: 23001 - DNA, 415 bp, Glycine max
ggaaacaaaacacagtgaaaatcaaggtaaatccgacgagatgtgagtcctctgtaaagaggtgcgtttcttggtgcttggtataaagcgcaagcgtttttgggttcgggaaaagaaggaatgaagagaagggtctagaacaacgcaacactacggattgaatattgaattaaacgacgctcatggctacggtgccggagaagaaagcgaaggaagcattcttcgacgacgaattcgctctggccgttgatctctactctgaagccatacgattggatcccaacgacgcaaatctcttcgcggacagagcccaagcccatatcaaactcaacgctttcgctgaagccgtttccgatgccaacaaagccatccaattaaacccttccttgttcaaggcctatcttcgtaaaggcac

SEQ ID NO: 23002 - DNA, 381 bp, Glycine max
cggagaacaattcaaggctctgtaattgcgtcttcttgcgtcaatatcttccttgggtttagtaagacgtgcggaaatttgacaaggttgtttagtcccataatcattgtacctttggtatgtgtggcgggtcttggcctgtttgccaggggatttccattggtagcaaactgcgtgcagattggattacctatgctcattctactggttataacacaacagtatttgaagcgccttcatcatgctgctcatcaagtacttgacaagtttgctctacttctctgcattgctgttatctgggcatttgctgctatccttactgaggctgttgcatacaatactgctaaaccacatgacccaagtgagctgtcgcacatatcg

SEQ ID NO: 23003 - DNA, 441 bp, Glycine max
ggaaaccaagtgttgctatcaacggaggagcgcccagactggaaaaaaaatctccggcgattgttccaccgaacctcttccgttctccgccccgatcctggattcaatcgtcgattccagtttctcattctagttgatcgagttcgtaggtttttatggtgcttcgttggacacacggtggcgatttgcattactcagtgggtggtggtggcaccgtgaattattgagtctgattacactcgctttgaaaaatcgaagagagaaatgtcttatcagcataaaagcttttggatgccacgagatgctggctgcatggctgaagaaaatgtgggatatgaaaattcttccagagtagaatccaagcgcagtcataagtggtttatggatgcaggtgaacctgaaatattcagcaacatgaaacaagcagttgaagctgttagt

SEQ ID NO: 23004 - DNA, 325 bp, Glycine max
ggggtccgatgaagaaaactatgccttgactagaaaagttcagcgtgacgtatggatacatcagcatcctttgaactgcagcagcccggatgtcaagttccttgttactgactgggaaagattacctggatttggaattggggctcatattgctggcatgtgtggacttcttggtattgcaatcaacgaaggaagaatccttgtcactaactattacaacagagctgaccattggcattgcaaagggtctttcccgtctacatggagttgctacttctttcctgaaaacttcctaaaatgtcggctacgtgcatttgaactcatg

SEQ ID NO: 23005 - DNA, 405 bp, Glycine max
gattcttctaactggtaagcaggtgatcctcctcttgctgctctctgtgttctttgctgtaatttctaatttttgaggatccacagaatggaactgttggttctcgatggtatcatcagtaccctgattcaagtcatactctgacctgagaaacacgttcaactttcaaaggcagatatcaagcagctttttgcgacttgcatagatatctttactatacagcccaatctgttactactggatccaccaattaagatatgtggagacattcatggtctatattctgaccttctgagactttatgagcatggtggattgcctactatgtccaactacttatactcaggcgattatatcgaccgtcgaaagcacatctctgacactatatgtattcttttggcatac

SEQ ID NO: 23006 - DNA, 443 bp, Glycine max
  modified_base (421)..(421): a, c, g, t, unknown, or other
tcttgctaatcgagtagctacacttttagaatgtgaggttttttaatgcatacataatcaatctcgcaggaaaccaaaaaaactactagacttcgtaagcatttgtagcactgaaatgctctattgacataggtagccagggacaggaacaagtattaaaagacatatcttgagactacctaaatctttcaattttggatccattcttttggtatagaaaaaggatgtgtagtttaaatatgagagagaagtattcactacctgctggttattgaagacatgtcaactgtattctgtttatagttttaaacaatccattttagtaaatctttaaaaactaatgttttctctttattcaacctgagtctgtacatattttcttccatttcctgtacctctattacctgcgctctcagtttgntatcaccagtaactttgatgtg

SEQ ID NO: 23007 - DNA, 402 bp, Glycine max
  modified_base (303)..(303): a, c, g, t, unknown, or other
  modified_base (350)..(350): a, c, g, t, unknown, or other
gacacatatccttggtgttgaacgggtttttgggtgaaggagtagtgttggtggcttcatcttttagtgaataaggatacagcagcatgcggtggtggcttactctctctgttgatgtataccgcaaagtgatttccttgaatctgtattgcaaagttattctgtaactcttaagtcccttttgatcaaaaaaccttttacaatcatctcactcatctcttccttgccttgaatcaatgggatccaatttttttgttgttgttccttgttatgtccgtcagatcagctgaagaaacccacccncagcttgtttcaacctcttcttttcaacttagcctctttaaacattntagttgtcattagtttctagcctttttctccttgggtgtctgtagacaagtc

SEQ ID NO: 23008 - DNA, 427 bp, Glycine max
cttgttttaaaggtttacaaaaataatgaaagatttacgtactcacttaagatcccaggatgtttatatgtgtgtgatttatttatttaatcaaaaaatttgtgtttaatttttattgagtacaaattttcttggtcaattgcaatcagaaaaatttatgtttgaaagctaaaatcagctcttacaacaccactaacaaaactgggaacaaaatcaaaaacatgaaagctaaaatcctcttccatcgcatattataattaaaggagataacttcattttattttttacaatttttttttattttacctctaatcaatacatatacactcaagtaactacttgtgacaaaaaaaataaaattatccataggcataaactgatattaaagtagggtcgtaaggatgttcataacttaatcaaaatttca

SEQ ID NO: 23009 - DNA, 378 bp, Glycine max
  modified_base (259)..(259): a, c, g, t, unknown, or other
gacacatatccttggtgttgaacgggtttttgggtgaaggagtagtgttggtggcttcatcttttagtgaataaggatacagcagcatgcggtggtggcttactctctctgttgatgtataccgcaaagtgatttccttgaatctgtattgcaaagttattctgtaactcttaagtcccttttgatcaaaaaaccttttacaatcatctcactcatctcttccttgccttgaatcaatgggatccaatttttttgttgntgttccttggtatgtccgtcagatcagctgaagaaacccacccccagcttgtttcaacctcttcttttcaacttagcctctttaaacattttaagtggcattaggttctagcctttttc

SEQ ID NO: 23010 - DNA, 413 bp, Glycine max
caatgaagccgtttctcagactattagtacaaactgcatattctggcaggtatatgatgatacaactgaaggcagaaaagtctgcacttattacagactggattcaattcctgttgtacttgttattgatcccatcactggccaaaagatgcgctcttggattggaatggttcaacctgaaagcttattggaaggtctactagcattccttgatgcagggcctaaggatcatcatattaccatgtctcacaagcgtcctagaggaagttctagcccaccaaaatctaaagccttggtagaatcagatgagaataaagaggagtatgaagaagttcaaagagctctggcagcttctatggagagcatgaaagaatcaactgctatggctggaagagacaataaagatgcagatg

SEQ ID NO: 23011 - DNA, 422 bp, Glycine max
  modified_base (391)..(391): a, c, g, t, unknown, or other
gggggatttagagagagagagaacttcaactgagggtgagagtgacacaaatctagggagcactactctaaaagttctattagattcttcaaaacatgaccatgcatcgcgagtcttgggcttttgtcttcggcgttatgggcaacatcatctcctttggagtgttccttgctccattgccaaccttttaccaaatctacaagaagaaatccactgaagggttccagtcacttccttatgttgttgcactgttcagtgcaatgctttggatttactatgctttcgtcaaaagggaagctgccctccttctcattaccattaacacatttggaattgttgtggagtcaatttaccttgcaatcttcctactttatgccccaaggaagcctangcttacaaccatcaagcttcttctcttactg

SEQ ID NO: 23012 - DNA, 420 bp, Glycine max
ggcccccctctctctcaccctcctcttcacacatgttctgtgcgctctaacaaacattctcgttcacactttcagattgtgtgaagatgggggcgggtggccgaactgatgttcctcctgccaacaggaagtcagaggttgaccctttgaagcgggtgccatttgaaaaacctccatttagtctcagccaaatcaagaaggtcattccacctcactgtttccagcgttctgttttccgctcattctcctatgttgtttacgacctcaccatagccttctgcctctattatgttgccacccattacttccacctccttcccagccctctctctttcttggcatggccaatctactgggctgtccaaggttgcatccttactggagtttgggtcattgcccatgagtgtggccaccatgcat

SEQ ID NO: 23013 - DNA, 426 bp, Glycine max
gactctcttgtaagcgagtgaacataattaccaagtgcacatatagatatatgggcatgatgagaatgagtggacttacatggtcagtgctaaagagtgagctgtgaaatagaggggagagaaagagagagaatggaacaaattccattgtttaatgagaaaatgaaattggctcagaaagcagccatggctaaacgatgggaagacttcaagaaaataatgaaggacgaccaggagaacttgctcaagcagtttgatctgtttgagaacagtgccatccatgttgcaactcgctctaacagcccacgactcctcagagaattgatagagatgttaccaaaagaagaaaggtggcaagctttgtgcaaggaaaatcgcgaagggaacacggttttacacgaggttgtgttttgtaagaagaagaaa

SEQ ID NO: 23014 - DNA, 414 bp, Glycine max
ggccacacaacaaataactctggacatataatgaacctaagacccgcctctgattctgaacaacaaaaggctaatttggctcttttgacgacaatttttgctgacacctaaagcatctagcagcttatcaaaatggagactaaccatacagcaaaacggtgttgtaagactttagtatgcatttgatcaagagcagctaggaagcatttttacaattacaaaggttgaccactcattgttctgatcactgagtaaataatttctttttagatgcaaacttctaagaagcacccaacttcagctggtatccatttatacctgcagcctgcacaagatattgatccttacactcattaccaaatattgcaaagcaattcatgccatgataatagcagcagccagggaaccactatt

SEQ ID NO: 23015 - DNA, 430 bp, Glycine max
cccacgcgtgcgtagacgacagaaggggtagctacagcagctgctggtgttccacagaatgagggtgcagtcttttctgaagaaaggattaaaaaacttgtatcaatgggctttgataggacgcatgttgaagtggctctggctgctgctgatggtgatctcaatgtggcattggaaattctcatgaaccatcacggttgaaaaataaagcttctgttggattctgaacgcgacctaactgacactgatcattgactatgtcatggcgctttgctcaatacatgcatctggataatctttggactaccactaacaattagcacacacctgatcgccatgctcacgccaattagcagaattgaacatatgtaaatgatacaagcaatgtttaagaatatgatgctagatgctgacataggcaacattttgg

SEQ ID NO: 23016 - DNA, 283 bp, Glycine max
caattcgagggaggatgtattgagagggctgatgaggcgatgtgcgtatttgaaatatgttgagggaagattgggtgatcgtgtcctttatgcagatgagattttgaaagatggattttgcttgaacatgattgacacccctctttgccctctcaaggttgtcacaaacctgcaggatgctgtgtgggacgcatatattgtgattaatggcttgccatcaacggaaacccgtgaggtatttgaagaaattagcatgtactggaaagagagaatcacagtgcct

SEQ ID NO: 23017 - DNA, 446 bp, Glycine max
agaagttaaaagctactctacttcagtttaacttcaaatccaggtgtgacccttcgttattcatctacactgattccaataacactggtttatatgctactgtatgttgatgacatcattgtcactggaaacaacttctccatcaaatcactagttactaaactcaattctgagttttctcttaaggacctaggaagtcttgactatttcttgggaattgaagtcagatctcagcccaatggtgctcttattctaactcagtccaagtacattagggatttgttgagtaaaacaaagatggacgaagctaatctcatctcttctccaatggttagtggttgcaaattgactaagtcagggtatgaatctttccctgatcccacacactacaggtctgttgtgggagccttgcagtattcaactattactagacctgagataagttt

SEQ ID NO: 23018 - DNA, 432 bp, Glycine max
  modified_base (405)..(405): a, c, g, t, unknown, or other
tacataacaatttcccttagagtgtggaagattcagaatattgttaatttaacatttgaacatgtccgcttgtccaaaattcattagaacatcaataatttatacttattgttattcatcaaaatccaagatagatgagaagattggttgtccagacctaacatatgatacaaaaccctatagcaagtgacaaatcgattccccccaaactaatttttcacttgctttatattttctttacgtaattaagaaatgatgaatcaatttcttaactattttttatacacttttagaaatagattccctaagaactgatttctaaacatccttttttttagaagccaattatgaaattagtttccaagaaccgatttcataattggtttcttatttttttcaatgttntttttggtatttctttaaattcttttt

SEQ ID NO: 23019 - DNA, 417 bp, Glycine max
aactttctttcgagcataatgatccatgcaactcggccatttatagtaaacgagtggattcaaacgaagattgaaggatatgaggtttctggcacagttgagcatgtaggctggtggtcaccaaccatcatcagaggtgatgatcgtgaggcagttcatattcctaaccacaagtttacagtaaatgttgtgagaaatctgagccagaaatctcattggcgtatcaagagttacattgctatcagtcacttggatgttaacaaagttaataatattgtagctgatatgcgcaaggttttgtctaaaaatcctcaagtagagcagcaaaaattacacagaagggtctttttggagaatgtcaatcctgaaaatcaggctcttatgatattaatatcttgctttgtgaaaacttctcat

SEQ ID NO: 23020 - DNA, 427 bp, Glycine max
gggaaaaccacggagaagtactaccacctgagtgccaagaacaagaaggctgcttcttctctttctctatcactgggcgatcagtttctcgacgagggtttctcgctggggaagtcactaaccagcaagaacctcgtcgagctggcatccaaagggggacagaggaacgccatcaacgttgttctgacatccgctgacgtggcagtcgaaggtttctgtatgagccgatgtgggacccacggctcctcctcttctgcatctcacgtgaagaagaacaacaacggcaagaactacaagttcgcttacatctgggtcggaaactccgaaacccaatgcccggggcaatgcgcttggccattccaccaacccatttatgggccccagagcccacccttggttgctcccaacaacgatgtgggacttgacg

SEQ ID NO: 23021 - DNA, 340 bp, Glycine max
ggtgcagttcaaagcgaagaaagattcgaaacgaagaatgaaagcgttgtgaagaatggcggaagagggacaagtgatcggtgtccacagcgtagaggagtggaaggaacatctcaagatgggagaagagtccaagaaattgattgtggtggattttactgcttgttggtgcggtccatgccgtttcattgccccaattcttgcagagtttgctaaaaagttgccgaatgtcaccttcctcaaggtggatgtcgatgaattggagactgtttccaaggagtggggaattgaggctatgccaaccttcctgttcttgaaagaaggcaagctggtggacaag

SEQ ID NO: 23022 - DNA, 399 bp, Glycine max
caggcttgacccatgcatacgaccaccgaacgacgactgcaataactccactgattgaggttaacaccaaatagaaatgagacacctaggtgatctatttactctgattccaataacactgttttatatactactatgtgcttatgacatgatcttctctatatacatcttctaccatcaaatcactatttacataatctcaatcctgagtctttctctaatgacctagtatgcattgactatacttcgggtatcgaagtcagatctctgcccaatagtgctttaattctaactaagtgcaagtacattatggatttgtcgcgttaaacaaagatggacttagctaatcatatcatttactcaattactagtgcttactaatcgtccaagttagggcat

SEQ ID NO: 23023 - DNA, 377 bp, Glycine max
ggtttctttgagactaatctcagaaaccttaagagtgttttttccagcgaccgtggcattaacgcttacacactctggcggtcaacgattcgcgcgtggagacaattggtacggacagtaacaagtaacaaagtagttcctatgtagctgattatggcggagatttcaagttcagggtacaaggaatatgcggctggcttgttcgctggtgttgccgctgtagccactggccacccctttgacaccgtcaaggtgatgctgcaaaagcacaatgcagaagcacataagattcagtataaaaatggatggcattgcactgctaggatattgaagactgaaggaatcaaagggctttatagaggagcaacatcatcttt

SEQ ID NO: 23024 - DNA, 353 bp, Glycine max
  modified_base (305)..(305): a, c, g, t, unknown, or other
accacttcatattattcttaagtagtgaaggtattgcagactacagaaaagggttttcagttcaatcctttcataacttaaaaaaataagattgtttaatgtataaagtggtatttatcttaccctctgtgtttgtctgaattgacaacgactgtgatgctgtttgaaatctgttcaaacgttctgctcctctatgtcccatgcctgttacctctcacttcctatgtataattaaacgcaatatcttggcatacatctaatcccttcctctgcaattcccaattgcaacaccttcatatctttgntatcctctaaatatgttaaaatctctaatagatctctatcaatcacct

SEQ ID NO: 23025 - DNA, 420 bp, Glycine max
gaccaccgacaggatgctcattaggaactctcttcattcacatcgagctgatttccatatgtcggagaggcctagttctccccctcttcttttcctgaatcctcaaaagtatcacgcattcatcttacaatactcacaataaaactttcatgactctttttcaaatatcgatagcacacgctattattgatattaataactactaacgttttactacctttctcccattcctgttactccttacatagaccctattacagcgttactatcaatacaatttcgctaaaaccacataaattaacaaaagagttaatgatatccaataacactttcattcccatgttatttacatatgcacaaacaatacatatctttcatgaatatgcacactttgccttacgaagcttaatgtatttcttt

SEQ ID NO: 23026 - DNA, 235 bp, Glycine max
acaatttcaatctcttattcaccaattaccattatctactcctcatataaacattcatatcaatccttttttaaatcccacatctacaactcctcaatcatcattgataacaatactctttttgtatcaaagtaccaataattttacttttaaaatgttcccaataacaatctttaagcaactactttataatatacttcaactacaaaaaccttctttcatacaatcttctaac

SEQ ID NO: 23027 - DNA, 216 bp, Glycine max
gtcaaacttttattggctcatatttcatacctcgtcagccatatactaataagggcctactaatctacgatatgcttctattacttgcaacaattcgtacatccagacatttcctacatacagtaacctttcacactgctgcttctttctcgctcattctagagacaactctaagaactgaaacatcttattattcagatgaaaagaaagctaatg

SEQ ID NO: 23028 - DNA, 330 bp, Glycine max
ttttctaacgtatgtcattgatattaccgccgcttcttaatcacgggctgcttcttttgttctttgtctgtttgttttttctctcacctgaaaatctcttgctgcggtgataactgtcgttgcagcagcccctttttttctccaactgcttcccatgctgcaatatgtacccacacttgatctacacctagtcaaccaccaccgacaccttggtcattgtaatggcaccacctaatgctcaattccaaaagtctcaaatgggtgttccccctcgaaaccatggctgcaaatttttatcttacttcaccttcaacccctgaactttcaaat

SEQ ID NO: 23029 - DNA, 180 bp, Glycine max
  modified_base (176)..(176): a, c, g, t, unknown, or other
cgagaaacgacagaaggggtatgaaagtagtataagtaattatagtaccggtatagggtgtaacaataattatagattattttatgattcaagtttagttgttataaaagaaaattaagatcatatgtattgtgatagaaatttcatgtatgttatatttataaaaataattattngacg

SEQ ID NO: 23030 - DNA, 406 bp, Glycine max
ggacaccaacaccaaaacaaacccactaagatggcttcctttgtatccttgctagtgctgcttcttgcagcccttatcctcatgcctcaagggcttgctacttactacaaaccaattaagaagccaccagtgtacaagcctccagtgtacaagccaccagtgtacaaaccaccggtttataagccaaaaccaccggtttacaagccgaaaccaccggtttacaagccaccatataagaagccaccatacaagaaaccaccttatggaaagtaccctccagtagaggacaacacccatgcctaaagcaagcaatgaggtctattatctacttaataaataagaggaactgctttgtgttttctagcattgtgatttacaacttcgtagcaatgcatattcttgactc

SEQ ID NO: 23031 - DNA, 352 bp, Glycine max
ggttgttacttttgctttaacacattacactcgcactctttgtgaaaaaggggagtttcttattctttctagacgcttccattgatcggcgatttcttagacatggcggagcatcacgaacacgaggaagtgaagggtgagtccttgttggagaagatttctgggaagatccacgaccacgattcgtcatcttcgtcggattccgacaacgagaaaaccagcgcttctgactccttgaagtcaaaggttttcaggcttttcggcagagaaaagcccattcaccatgttcttggtggcggaaaaccggccgacgtttttctctggagaaacaagaagatatctgcatcgacac

SEQ ID NO: 23032 - DNA, 62 bp, Glycine max
  modified_base (6)..(6): a, c, g, t, unknown, or other
  modified_base (11)..(11): a, c, g, t, unknown, or other
aaaaanaaaanaagaaacaaagaaaaaaagaaaagaaaaaaaagaagaaagagaagagggag

SEQ ID NO: 23033 - DNA, 416 bp, Glycine max
agaaggggatggcaactctaaccccaatgtgttactcatgttcgaacggccatattcaatggtcggcaccatcatcatggctatcaactaaaactaaaaccctcagttttgaatttcagacctcataagcaaaatagaagcatcagaatccgatcaccctctgcctccaacccgaaccagaatgagtcttcttctcccggattatactctgccaagaaattccacctcaccgcatccaacgtcgacctcgttctcgacgatgttcgcccttacctcatcgccgacagcggcaacctggacctggtgtccgtggaagaccgcgtggtatctctccgtcttcaacgaacatgcgagagctgcctccacttcaccaccaccatgaccatggggatcgagcgcgttcttaaagaaaaatt

SEQ ID NO: 23034 - DNA, 191 bp, Glycine max
aaacgacacaacgggtatgaaagttttataagtcattataattccggtctcggggggaacaataattatagattattttatgaatcaagtttagctgccataaaaaaaaattaatatcctctttattgtgaatgaaacttcacgtatggtctctttatcaaaataattattagacgaaaaaacacctaatg

SEQ ID NO: 23035 - DNA, 202 bp, Glycine max
acacgtgagaacacaccagcatgcgttttttcgattactaattacacaatccggccggtttattaacaacgggaggtccttattacttcaacacgccttcatttttagatgaattattcgctctgtcaataccttaataaaccgaattagataaaacgcacgtcttgaaaacaaaaattctctacagaaaccattaccacaa

SEQ ID NO: 23036 - DNA, 204 bp, Glycine max
ttggattccaagcagtacctcctctcaatccgacgcattcttaaaaaggggcggtgttatacaatacaacattcattacacatactcaaaatatcttctaaattcgattccttttccaacaccatgaagaaaaattttcatcctttttgacaatatattttccaactaacactaccaccatttaattttgctaaccggattccc

SEQ ID NO: 23037 - DNA, 381 bp, Glycine max
  modified_base (356)..(356): a, c, g, t, unknown, or other
aaaatatgggcaatacttcccttgtgaaggcttcttgatttcttctcttgaatcttgaattcatcttttcttgaatcttgaaatcaaacttctcttgattcttgaatcttcttgatttcttctcatgaagcttgaaattaaacttgatcttgaacttgttgactcaatcttaaaattattctttggagctttttgtcatcatctttgtcatcattaaaactacttgaatcaacttgattcatcatcatgaagcttgcttctacattttcaactaggaaacataccatatcaatttcatgcacaagctcctcaaaaatgataatggacacaagaaatgataaaggaagtaacctcanttaattgtatgattcatgcaatctg

SEQ ID NO: 23038 - DNA, 385 bp, Glycine max
gggcagcgcttgatttgagggcaggcaagccccactcaaccaccacacctctcctcgttcacgctacccctttctgctcttcttctacctttcaagttttaaaagtataaagatggcagagacattcctatttacctcagagtcggtgaacgagggacaccctgacaagctctgcgaccaaatctccgatgctgtcctcgacgcttgcctcgagcaggacccagacagcaaagttgcctgcgaaacatgcaccaaaaccaacttggtcatggtcttcggagaaatcacgaccaaggccaacgttgactacgagaagatagtgcgtgacacctgcaggaacatcggcttcgtctcaaatgatgtgggactggatgccgacaactgc

SEQ ID NO: 23039 - DNA, 148 bp, Glycine max
ttaaaccaccttctaatatccaacttactaccctcattcacttcataactctttatatttacctaaattcaattactcccatcttttacaacttccttacttgaaaaaccctacattacccaacttaattccttcatcacattccctt

SEQ ID NO: 23040 - DNA, 271 bp, Glycine max
gaccaccaaaagggctcatgctactttatctaccgttggggattatctaacaggctaaattatcccaactacttttaatcatgattctctctgttaaattactgattgtgctcctgatcagaacgaagataatgctttccctggcatgattaaaccttacaaagctgttatcttccacaaaacctgtgctcgcctctaataagacgctcatactgtcagactatacgatcataagcttctcctgctggcctttagccctatagataaacaa

SEQ ID NO: 23041 - DNA, 290 bp, Glycine max
agaattgggagtggtggcattgccactagtggggggctttggtttaagaggatcgcaactattgttggcaactctctgtctgtgaaaactgtttctgatgatgataaggctcgctgccatggagggggtgctaattctccttctatggctagacatactaacaacatatattcacctatcaatgctaccgtggcaaccaacctcaaaccaaagccagcgtcaaatctaaaaatgcatacagttttgtttaaaattaggggccctgcattggctggaaactgccacaacat

SEQ ID NO: 23042 - DNA, 372 bp, Glycine max
  modified_base (19)..(19): a, c, g, t, unknown, or other
  modified_base (67)..(67): a, c, g, t, unknown, or other
  modified_base (360)..(360): a, c, g, t, unknown, or other
tgcactggtgggaatttantaagttcaaggatgatttccatcttggcggcgagaccacttacaacanatttgagttgcaccaatttagcattcattttttacgtacccatacctacatgtaatttctctttccattattattcacaccaaatttcccattgaaatagttattctcatttattttcttggatacacatttattatggttttgacgcttcatataaccaaccaattcccatgaactgactcattaatactatcaataaatgtagcatcattgttaagcaatgatgtcaccaaattggtaattgcaagtgttacatcactaatgagtctaggttgatcttgaatgaaattaangcttgttggtgt

SEQ ID NO: 23043 - DNA, 392 bp, Glycine max
gagagtgcgcagagagcatggcaataataccacattaccacttccaccctcaccttgctgagcctatccctatggcggccataacccgactcgaaaagcgcacctcccccctatcttccatggcgcgtgagttatcatataacgcgcctacgagcaacgaggagacgaatgttcagagcatgtttctgggttgccctggcgtccgaaaatgcacctataccaaccgactatacaaccttctcagagatcctcacatagccactggcgaacttgttcgccacgaactaccatccaacggacccctttcttcccaactatcagaaattgctaatcaaggcaaattggtgtcagatgaaatcataataagcttattgccaaagacgctggctgat

SEQ ID NO: 23044 - DNA, 412 bp, Glycine max
ccacataaggggacacacttaacaatcaatcaaaacattcccgggcgcaataatatacacatgggcaattaagctccttctcctatagccatggctctttctaagcttataattgcttcccttcttgcgtcgcttctccttcttcatttcgttgatgctgatcaatcggcacatgcacaaacgcaggggtctcttcttcagcagatagattgtaacggagcatgtgctgcgaggtgccgtttatcatctcgtccacgcctctgccaaagagcttgtggaacttgttgtagacgctgtaactgcgtgccacctggcactgctggaaaccaaaaaatgagtccctgctatgcaagttttactactcattggggcaaacgcaaatgcccttagacttaattggaccactatccta

SEQ ID NO: 23045 - DNA, 366 bp, Glycine max
ggcgtcggaaggaagagaagatgagggagaatttgatggagaaagtgagcgcactgggagagcgcctgaaaatcggaggcgtggaagtggggagaaagatgagcgaggggatgagctccatgagtttcaagctcaaggagttcttccagcctgggcccaatcaggccgacaagcttgtggaggacgctacttccgaggccctggacgagcccgaatgggccctcaatctcgatctctgcgacctcgtcaacaccgacaagctcaactgcgtcgaactcgtccgcggaatcaagaagcggatcattctcaagagccctagggttcagtacctcgcccttgtcctcctcgaaaccctagtcaagaact

SEQ ID NO: 23046 - DNA, 412 bp, Glycine max
ggaacaattaatcccaatgataaatttaaaggcgatgctgagggtgaaaagtccaaagatggggtatctggtccaaagaagggaagtaggtatgtaccatcttttattccacctccaatggcaaccaaagggaaagaatctgaaaggaaaaaagaggaggaaaagccaaaggagaaagagaaagggaagtcaagaaacattgatcattttatggaggagctaaagcatgagcaagagatgagggagaggcgaaatcaagaacgtgaacattggcgtgacgggcgtcatacagaacattctatttccagtcgctttgacgagctgcctgatgactttgacccaagtggaaaacttccaggatcatttgatgatggtgatcctcaaactacaaatctttatgttggaaatctct

SEQ ID NO: 23047 - DNA, 405 bp, Glycine max
gatagcagcatcatacaaagcattgaattcaaaaacgaggttcatttcttgtgctttgctttattcctcaaaaccaaacatgtcgaacacatgcggcaactgtgactgcgctgacaagactaactgcaccaagggaaacagctatggtgttatagtagagactgagaagagctacatcgagactgttgacatggatgttccagcagctgagcatgatgggaagtgcaagtgtggcactaactgcacttgcacggactgcacttgtggccattaaggaatatgtatgaaaatgtaattgccatgtgtttggcaatacaaatctccaaataatgtaatcttcgtatgaataaatgtgtgctgttatcctacttcaaggtctgtgtagtcatgcagtctgaatcatgt

SEQ ID NO: 23048 - DNA, 370 bp, Glycine max
accactttttcggacacactcttttattggaggtgattcatgtaaggccgtctaaatatgcgagtttcattccacatttggtgggtttcatgtaagttcttttattggatgtaattctagtgtagggagacacatgtttttcaatcaacaaggagaaaaatatgttggaaggaaagtgttacattgagtgttactatcacttctatgtgattcatttatgcaatcttcataatcataatcagaatgatgtgctgttctaattagttaaatttgttttgtcgttgtcccctttgatcaatgggggtgctagaagattcccaagaaagattgtactttttattttcatttaaaattattaaaagggatttat

SEQ ID NO: 23049 - DNA, 362 bp, Glycine max
gagttgaaattgttgcatcacctatttcaatggagactcaacaaataaaagtaaaatgaaagcaaaagcaagaatcttgatccttggcaaaattacttttgcttcaaaagtcactttgtaccggattgtcaaacatgctctcagttagcggcatctatttattccttgcctatgccttctgcttttaatttcctcacaacttctctgcttccctttctccctctctatcgaggaaacatggtatttttgggtgttctcttggtggggtttctcttaagtgcttatggggacagtgatggttggatggatgctcatgctaccttctatggagggggcgatgcctctggcacaatgggtggagc

SEQ ID NO: 23050 - DNA, 417 bp, Glycine max
agaaggggataggtagctactcactagcattttagttcccacgattcgtatcccttcctgggatgaagactctccctcaaacaccagggaaaaccatcccagatgcttgcgactacaaaggtcacccagcagagaggtccaaaaccggtggttggactgctgcggccatgattttaggagtggaagcatgtgagaggttaacgacaatgggtgttgccgtgaatttggtgacatatttgacgggtacgatgcatttgggcagtgctaattctgccaacacggtcaccaacttcatgggaacctctttcatgctctgtttgttcggtggttttgtagctgacacttttatcggcagatacctcactattgccatcttcgcgactgttcaaaccactggtgtgacaatattaacaatat

SEQ ID NO: 23051 - DNA, 386 bp, Glycine max
tattggggcgtcggaaggaatacaaggggagggtgaatttgatggagagggtgagcgcactgtgagagcgcctgaaaatcggaggcgtgtaagtggggagaaagatgagcgatgggatgagctccatgagtttcaagctcaaggagttcttccagcctgggcccaatcaggccgacaagcttgtggaggacgctacttcctaggccctggacgagcccgaatgggccctcaatctcgatctctgcgacctcgtcaacaccgacaagctcaactgcgtctaactctttcgcggaatcaagaagcggatcattctcaagagccctagggttcaatacctcgcccttgtcctcctcgaaaccctattcaagaacttcgagaaggccttc

SEQ ID NO: 23052 - DNA, 402 bp, Glycine max
tatcttaaagattttattgacagtaacaacactttaatatttataaataaaaaattaaatatcatactcattatatatttataaataaaaaattaaatatcatactcattataaaaaaaagtatacacatatctcaagtcaaatctcttggtgatataacaataaaagtcaaccaaatactcctgttttagtttttttttttatatttggatttctctctattttgttacaccacatcatcacttatattggttactgatctgatctctcatatagtcatattttagtatctgagttgtatcataaccaatatttactccaaaacaaaatatctttccgttcatatatgcgtcaagtcaaaagctttatatatgtccgtttagtgaagagcaaactggatta

SEQ ID NO: 23053 - DNA, 329 bp, Glycine max
cctgaagagaccacgggctgggtatcttataaagggggctgaggtggatcatatgaggaatttaatggaggattcaatgaaatcacaacaaaggagaagaaatctaacaaaaacacaaaatcatttttcagaggaaagaggcttaagaaagagaaaaacttttattatataaaagaaacaaatgaagagaagcacgattattttgaaaggctttcttataatagagaaagtgtcccacaatgtagttcttaaaagaaagaagttgatgaatcaagtggagcttttatgcaaaatatttattggagaagaaataatttgatttcttgaag

SEQ ID NO: 23054 - DNA, 280 bp, Glycine max
catctctatatcatttttaacttcatattttatattaagcacataaaactcttcttactttacatccatgaatgactaatattttcttttatttgaagacaaatatttactattcatcccattaataattatctttccttatatttaccaatatttttttacatctcaaaattctaacctttctcatccttccaccatctttcacaattataaaccattttatattccttatatataaaattctatatccatattttattcatttttgtatcctattttt

SEQ ID NO: 23055 - DNA, 398 bp, Glycine max
  modified_base (66)..(66): a, c, g, t, unknown, or other
aggccatttttttctatatcatcccacggctgtattctcaccagggacggggggccatggacatcngaaagaacaagcgcatctccaaggggaagaagggtggcaagaagaaggcagctgatccctttgccaagaatgattggtatgacattaaagctccttctgtttttcaagtgaaaaatgttggcaaaaccctcgtctctcgtactcagggtaccaagattgcttctgaaggactcaagcatagagtgtttgaggtctccttggctgatcttcaaggggatgaagatcatgcattcaagaagattaggttgagagcttaagatgtgcaacggaagaatgttctgacaaatttcttgggaatggatttcacaacagacaatctgaagtcattggta

SEQ ID NO: 23056 - DNA, 92 bp, Glycine max
aaatatcatactcattatatatttataaataaaaaattaaatatcatactcattataaaaaaaagtatacacatatctcaagtcaaatctct

SEQ ID NO: 23057 - DNA, 401 bp, Glycine max
agcatagttcccgtccctgtccccgaattagcggtggggggtttttgatgcccatccccgtccccgcgggaaatttttccccgactgcaaggccccgaatggggcagtccccgcggggatccccaagttgtggggagaattgtcatgcatacccgcacccgcttacacccctaattttttttatgtcttttattatttattgctttgaatttttttatctttctaaaaaaagaaaaattaattttttgttaataaaatttgtatttaccccacaaatttacttgaactaaaaaagggtttaagttaacataaattagaatagaattacaaagaatacaataatttggttttaatttgttttggtttgaattttttttatggcttttattaggtattccttt

SEQ ID NO: 23058 - DNA, 391 bp, Glycine max
atcctgcaattgcaattcttggtatctgctgcggcgggcagttatccagagtgaggcccactgtttcggagctttttggtttgaaagacttcggtctattgagcaacttcatggctttggggaacccacttggtgcatttcttttctctgctcttctagcaggacatatatacgacaatgaggcagcaaaacaacacggtgtaggcctcattgcttcaagtgttgcatgcatgggtccaaattgtttcaagctaacctttttgactctggctggtgtgtgtgttgcgggaaccatctccagcattatcttgaccgtaagaattaagcccgtttaccaaatgctttatgccgggggtgcttttaagctacctcaaacttcaggccagtaaaa

SEQ ID NO: 23059 - DNA, 118 bp, Glycine max
agaaaacaacacaaaggtactttttcgagaacacgacatatggtttcggcggggatattactacagaggggtacgtcttctacaacactacttaagggttctgcttccaaaacactac

SEQ ID NO: 23060 - DNA, 153 bp, Glycine max
agcacaggcttatctttgcgggtaacatctagaagagggacgaaccctttcaaattataacatccagaaggaatctaccctgcacttggatttgaagcttcgttgtggcatgcaaatctttgttaatactttgacctgaaaaacaataacttt

SEQ ID NO: 23061 - DNA, 421 bp, Glycine max
ccacataagggggatggtttctcatccccaatatatttactttaacgatacctcacgttgatggggggtccaatttgtcaattaaaattcggtggtctcagaaaatactctactccaaaggccagttctctttgaatgtgccgtttacctttccacattttgttaaccctgcggggaagagaatatctaaaatagaaaagattctaattaatggggattctgttactggagttgagcttctgtgcaagacaataacccacccactgaatgaagtgaggcctcattcttggagtatcggcttcttatatgattcccaatgtctcttatggtctacagtccattttagcttttcatatgcctgttctttaagtcatataaatggtggtggtctttttgaatcttcatctgtgcaatattttca

SEQ ID NO: 23062 - DNA, 373 bp, Glycine max
ggcagagcaaagcaaagcagagccgacaacaagaagaacaaaaccggcatcaacaaccacaagaagaagaagcttgcaaattagaagaatcttcagttgaaagggaagaacacacaagaacaaagagaggaagaaacgcgaatgaagggagaattagagttgccaccagggttcagatttcaccccactgatgaagaattggtgaatcactacttgtgtaggaagtgcgcgggtcaaccaatcgcggttcccatcatcaaagaggtcgatttgtacaagtttgatccatggcagcttccagaaattggctactacggcgagaaagaatggtacttcttttctcctcgggatcggaaatacccgaacggttcac

SEQ ID NO: 23063 - DNA, 389 bp, Glycine max
gagaacgatggctgcaaatgtggaccaaactggtcctgcaacccctgcacttgcaagtgaggtgttgggagagcaagcttcaagcagagatagcccttaattaggaataatgataaactattaatgtgtagctaaaaacttatgtattatgtctgtgatggttttcgtgcactctggtgttttgtgttaaacaaacatccttagaataaagtggtcatgtcttgcctttcagcaagttcaagtgttttggacttgtgatgggtgtgttaagctcatgggtgcttcttttttttttttttttaatggttgggaattggtcgcttctgtattaagttcggctaatctgaattatgaatctctggttataatattaaatactattactggat

SEQ ID NO: 23064 - DNA, 399 bp, Glycine max
gaggcatactagaaaatctatctatgattatgagagcgtagttgaaagcaacgactgaaatcgagagggagacgaaaagtttagatcgagagagatgggaaaggagagtagcaaagatacggttccggtgacgcagtggctgaatcgaatggtctcagaaccttactacctcttccatttcttaaccttcttctcctatttcgtcgttcgcagctccgcaacccaaatcttagcgcctcatctcactcaccatctccttcgtcgcgaaatacaaacactgctagtgttcgcgatattggctttcatcaagggaataaaagaagaaacatgggaagcctttatagctgatgtgcttttcctggccaagatttgtctttttctcctagcctttacaatgga

SEQ ID NO: 23065 - DNA, 381 bp, Glycine max
gggaaacactcccctttgccgctgttgttgggggtgcaccaccgaacagctggccctgtaaatcgcgtttcgtttgtgcaaggttttaaaagatggctgatgctgaggacattcaacctcttgttgttgataatggaactggaatggtcaaggctggttttgcaggtgatgatgctcctagggccgcgttccccagcattattgggagaccacgccatactggtgtaatggttgggatgggtcataaagatgcttacgtgggtgatgaatcccaatcaaaaaggggtatactcaccttgaagtatcctattaagcatggcatattcagcaacctgggacgatattggagaagatttggcatcacacattttacaatgagct

SEQ ID NO: 23066 - DNA, 409 bp, Glycine max
agaaggggtggaaagagttttagactaaggtggcttaattatcttagggccaacattaagcgtgggcggtgctctgaagcagaagataaaataatctgtagcctctttgctagcattggaagcaggtggtccataatagcatctcagttgccggggaggactgacaatgatatcaagaactattggaacaccaagcttaagaagaaaatgatggccatgaatccttcactccaaaagaagcctcaacaaattacccttttatccatccttcaaagttcagcatattcatcaccatcgtcattcagagacagtaacaacatctcatactaccaccctcacgggtccttttcctactcgtcaaatcttctgagtggtaacaacacttctgcttctgcttattccttctttt

SEQ ID NO: 23067 - DNA, 254 bp, Glycine max
  modified_base (5)..(5): a, c, g, t, unknown, or other
  modified_base (13)..(13): a, c, g, t, unknown, or other
  modified_base (55)..(55): a, c, g, t, unknown, or other
gggancgacgggnaacaaaaagaggaggaccacttacaggaggggggggagcggnaaagtgccaaatataacattttgaagggggcgaaccaacaggaggggaagaaagggaagatgagtttgaggactcttgcaatgctactggggtgggcggaaagacaaagggggagactaaaaaaggaccaatggacaggggttggaagaatccaaaaaaacggaaacaaggagagaaaaaagaaaaaggggagggaaag

SEQ ID NO: 23068 - DNA, 340 bp, Glycine max
tttgcgtagttttaatttgacggggggttgtgaatccttacattttttaagtagcttttattgttttagttagtcttgcttgaggacaagcaagactctaagtttggggtgttgataaatgtcaaatttattggatttttatatgtattttgtgacgtttatttggcattttatgttttagttatttttagtgattttttgttaattttccagcaaaaatatcccgcttaattaagtgtcagagctccaatggtccaaaatcaacagaaagttctagaaaaagaaattacgagaattgtaaattaaagttaggaaaatcaaaagcaaaatatttttcaag

SEQ ID NO: 23069 - DNA, 307 bp, Glycine max
gaaattaaaggagggtaaaagaaacacacaccggggcttatttatatttggctggcgcaccaacagttttctacttcacacctttccactgatcatctgcaactgccacaatgattcaaaattgctaagatctttgacatggcacattcatcattgaccaaattgcaattttttcaaaagaatagcaacaatttatgaagtttctgaaacaataaggagtagtggacacaaattaagatcattggtattataggagaatttgatggtaatcatacacagttgctaggaaaagatataatggctactg

SEQ ID NO: 23070 - DNA, 364 bp, Glycine max
tttgggggatatatggctaacaaaaagagtgggaccacttacaggagtactgggagtggtaatgtgccaaatataagattttgaatttggtgaaccaattggatgtgatgaaagtgaagatgagtttgaggactcttgcaatgctactgctttggccgcaaagacaaagtgtgagactaaaaaaggaccaatggacaggttttgtaagaatccaaaaaaatgcaatcaattagagaaaaatgaaaatgttgaggcaaaggaacataagagtcaatggataagaatgaagtcttgaaggtgcatcaatatattgctcgtttttggtaccaaactagtttgtcattcaacttcattaaattgaaaa

SEQ ID NO: 23071 - DNA, 369 bp, Glycine max
ttggggggatatatggctaacaaaaagagtgggaccacttacagtagtactggtagtggtaatgtgccaaatataagattttgaatttggtgaaccaattggatgtgatgaaagtgaagatgagtttgaggactcttgcaatgctactgctttggccgcaaagacaaagtgtgagactaaaaaaggaccaatggacaggttttgtaagaatccaaaaaaatgcaatcaattacagaaaaatgaaaatgttgaggcaaaggaacataaaagtcaatggataagaatgaagtcttgaaggtgcatcaatatattgctcgtttttgggccaaactaatttgtcattcaacttcattaaattgaaaaagtttg

SEQ ID NO: 23072 - DNA, 128 bp, Glycine max
  modified_base (15)..(15): a, c, g, t, unknown, or other
aaaaaacaaaaagcnaaaaacaagaaaaaaggggaagataaaaggagggaaaaagaaaaacaaaaggggggtgatagaaaaaggggggggggaccaacagatttgtgcttgaagcctttacagagggc

SEQ ID NO: 23073 - DNA, 163 bp, Glycine max
gtgaaaacagcacgacagagggggcaccaacacacgccgttgcaattatcctaggcgcgcactccctgatgagtgaagagaatctctctcctttttactagacccatacaatttagggcgcgctttttcccggccttccctcgccaccgcatatacatacata

SEQ ID NO: 23074 - DNA, 368 bp, Glycine max
gttggactgagtcatctagtgctaatgtgagaggcccaccggcacttcctttcaaattgcctcagttggatgaaaaacttagagctggttataagcttaccactgctgggaaattcactgaagctcttaagacatttgttaatattcttcatacaattcctttgattgttgttgagtcaaggagggaagtggatgatgtgaaggaactaattgtcatagtcaaagagtatgttttgggcatgcagatggagctgaagaggagggaagttaaggacaatatagtacggcagcaggagcttgcagcatatttcactcactgcaaccttcagacacctcacttgaggttagctttgcagaatgcaatgact

SEQ ID NO: 23075 - DNA, 431 bp, Glycine max
ggagagagagagagaaacaaagcagcacccatttggatcctctcttctcttctttgatctccgttaccctttttgttttctcaacagagagagagagagagaatctttcgaagttcgtttgcgtgtgttgtgtggtcagtcaccgatggcagcaccacctgcgagggcacgtgccgattacgattacctcatcaagcttcttcttattggcgatagcggtgtgggaaagagttgtctgcttttgcgattttctgatggttccttcacaaccagttttatcaccaccattggcattgattttaagataagaaccattgaacttgatggcaaacgcattaagttacaaatctgggatacagctggtcaggagcgatttcgaactattaccacagcttattaccgtggagccatgggtatcttgctcggttatg

SEQ ID NO: 23076 - DNA, 389 bp, Glycine max
acacacaccacaatcatggaagttgatagtaggtttgggaacactggcctcctccttgtggccacaatccttgtggtcaagctcatctcaaccttcatagtgcccaaatccagaaagagggtacccccaattgtgaaggggtggcccttaattggaggactcatccgtttcctcaaaggtccaatctttatgctccgtgacgagtaccctaagcttggaagtgtcttcactctcaaactcttccacaagaacatcaccttcctcattggccctgaggtttctgcacacttcttcaaggcctcagagactgatctcagccagcaagaggtgtatcagttcaatgtgccaacttttggacctggggtggtctttgatgttgattactctgt

SEQ ID NO: 23077 - DNA, 403 bp, Glycine max
gaaccaaaacacgttgtttcaattattctattcgcgcactccctgaggagtgaagagaatctctctcctttttataaacccataaatttagggcgcgctttttcccggcctcccctcgccaccgcatctccatccatctccgccacgtcgcctcctctctctctcgcttttcgtagttatacttcttctctcgttcctagaaatgagcttctcaacatgcgcagagctgtcgcgttgtttcgccgcagcatcggcgaaacctaattccggtcagtcaaacggcacttccacaacaagcctcagttttctcactccaatcggtcggtacggcgccggttcatcagtatcgaggtcgaataagaccaacagaatagtcgcggaagctactcaaggtcttacttac

SEQ ID NO: 23078 - DNA, 334 bp, Glycine max
gactattccctcctccttcctttgcgtctttcgcttttgctttctaggtttttttttttttttcttgctctttctctgtgtcgatggcgggaaaaggagggaaggggcttgtggccggaaaaaccacggcagcgaacaaggacaaagacaaggataagaaaaggcctgtctctcgttcatcccgtgctgggatccagtttcctgtgggtcgtatccataggcagttgaagcaaagggtgcaagcaaatggacgtgtgggggcgactgctgctgtgtacttggcctccattctggaatatctgactgctgaagtgctggagctggcggggaatgc

SEQ ID NO: 23079 - DNA, 433 bp, Glycine max
gaccaaacctcaatttataaacactctagaataagcctgagggcaagattcacacactcactcctgtcacttccctacactcctgcatggccgaaccactatatctagaggaagattacaaaccaaaagattatacccctgaagccaaaagtctatccttccttgcctctattgttgcccttttcatctacatatgtgtcttctataccttcaacctatctacctattctatcctcaacaacaacatcttttggtttttcatgtccaataccctcaatctcatcattgctgctgactatggagcatcctcttcaaacaaacataaacaagatctctatgaagagtatgtgcgacatagtcaagcaagaaactgtgactcgtcatcatacgtgcccaaatatgatcatgaacaattttataaaaaatgcattta

SEQ ID NO: 23080 - DNA, 423 bp, Glycine max
ggtggcagagagcgaacccaaaacgagaggtaccttcccttcaaaccttccactcttctctccttttccaatcaagggaataatatttcttagagatattccgaaaccatggctcacgccaatcctatgatttttgttgttggaattctaggtaaccttgtctccttctgttgctttctagcaccagtaccaacattctatcgagtttgtaagaagaaaaccacggaaggtttccaatcacttccttacgtggctgcactcttcacttcaatgctttggatattttatgcttacataaagacgggcgaaatacttctcatcaccattaacgcattcggttgtttcatagagacagtttaccttgtcatctatatcacttattgccccaagaaagctaagttctttaccttcaagatgattttc

SEQ ID NO: 23081 - DNA, 319 bp, Glycine max
gaaccaacacacgctgtttcaattattctatgcgcgcactccctgatgagtgaagagaatctctctcctttttataaacccataaatttagggcgcgctttttcccggcctcccctcgccaccgcatgtacatacatcttcgacacgtcgcctcctctctctctcgcttttcgaaaatatacttcttctctcgctcctagaaaggagcttctcaacatgcgcagagcttgcgcgttgattcgccgcaacatcggcgaaacctaattgcggccagtcaaacggcactttcacaacaagcctcaattttgtcactccaatc

SEQ ID NO: 23082 - DNA, 217 bp, Glycine max
aaacccctaaaagttactattctctacttccacaatctcgcaactttcctaagccgaacctaaattctctcatcaaaccctcacttatccaatccccacccaaataacacaaatcaacctcactcacctaaaataaaccatcgcctgctctctcaccgacgaaatcatcgcatcgccgcctcccctacggtaggtatctgatgggacacattatact

SEQ ID NO: 23083 - DNA, 440 bp, Glycine max
  modified_base (411)..(411): a, c, g, t, unknown, or other
aagaagaaaccagcagcagagaagaaggaggaagttgaagtgacagaagggaagaaggaagctgaagtcatagaagagaagaaggaagtggaagtgacggaagagaagaaggaaattgaagtaacagaagagaagaaggaagctgaagtcatagaagagaagaaggaagtggaagtgacggaagagaagaaggaaattgaagtaacagaagagaagaaggaagcagaagtgaaagaagagaagaaggaaggggaagtgacggaagagaagaaggaagttgaagtgacggaagagaagaaggaagcggaagtgatagtagaagagaagaaggaagttgaagtgacggaagagaagaaggaagtggaagtgaccgaaggaaagaaagaagtggaagtgatcgaagagaagaangggaacagagtgacagaagaaaagaaaga

SEQ ID NO: 23084 - DNA, 389 bp, Glycine max
gagaagaaaaaataaataagcttgggctataagctacaattagcttatgcataagttgaaattatttttttagagaagataaaatcatttagcttctccaaaaagctgattctaatttatacataagttaattttggtttatgaaggagtttatttcatttttttttgcaagtacgtgcttatagagaagtttattcaaatatggccacattaacattcatatcttgcagtaaaatgatgtttttctttctaaccaatcttatgatgctttataggttttgtggaggcaaacagaagatgctgtggtaccgggactgtagagacaacatccttgttgtgtaatccaaaatcaccaggaacttgttctaatgccacacagtatgtgtttt

SEQ ID NO: 23085 - DNA, 363 bp, Glycine max
ctaagaaattatacaatgtaccaggaactgtgtgctgcccttgagaaaatgttcagctgtttcactctaggtcaatgtggttcccatggagctccaggaagagaaatgttgagtgagagcaagctgaaggacctcctgcatggttcagaatatgtactcacttatgaagataaagatggtgactggatgcttgtcggagatgtaccatgggatatgttcattgacacatgcaaaagactgaaaatcatgaagggttctgatgccattggcttaactcccaaggccatggaaaaatccaagagcaagtgctagttggtattggaacatgaagagtgtggaaagagaacttatgatataaatgac

SEQ ID NO: 23086 - DNA, 386 bp, Glycine max
ggcgctcacatcgtgttctctgcggcgcgagctaggtagggtttagaacctcgcagttacagaaaacatggcgactgtggtgccaacctccgaagaagacgctgcactctccgtcgttcgattcgcctctgaacttgcctgggccgatgccggtcccgaagttgctgagccccaagttagcaaactctgcgtggaagctgaagaattcattgttatgggaaagtggttggagctagcatcattgatgattacctgtgctgaattgattttctcggaaggttctggaaaagatatagagtccattttcactatcatctgccatcttgttacaaagaccggaaattcagatgaagtgatggagattgttaaaggtattactacaaaaa

SEQ ID NO: 23087 - DNA, 403 bp, Glycine max
gatctatcaccctcagagtcgaaccagacacacttgcacgtcaccaccaccaccgtggaaggtggagcgtgaggctgtttccggtaacctctcccggcggcgctgagtggtgatcaaggaaatgggtcagacgctgagttgcgtgcaacagcacgaggaccatggtgtgctcttccctgcacttgcaagtggagaattggaggttgttgaggccatggtggaggaagaccccactgtgttggaacacaccattggctgtgacaggctttctcctctgcatgtcgctgctgccaatggtcggatcgaggttctttccatgttgttggataggtctttcaatggtgacgtattgaatcgacataaacagaccccgttgatgttggctgtgatgcatggaaagact

SEQ ID NO: 23088 - DNA, 403 bp, Glycine max
gaatcgccaatttctgattgcaaaacagcgttttctggaagccccaaacgtacgcgattcgttcgaaacagatgaacttttatctgaattcaacgctcgtttgctggcttggaattctggattcgctgtagcgcggataaagagaacaagaaatggctacggttgatgttatcaaatcctgcatcggttccattagacagatatcagagcatattcaagacgctattgtttatttagatgctggatctacagaaagtttccaatttattggggcatatccagtacttcttgaacttggggcacgagctatttgcattttggaaaacatgttctcacttgatgtggtggttgattggaactcaaattctaattcttcgaagaaacttgtggttatcacattaag

SEQ ID NO: 23089 - DNA, 385 bp, Glycine max
gaccgttccattgctgagcaacttctgctacttcctactccaaccgcacttctgctccgcaattatcatgggcaaggtcaagatcggaatcaacggatttggaagaattggccgtttggtagccagagtggctctgcagagagacgatgttgaactcgttgccgttaacgaccctttcatcaccaccgattacatgacatacatgtttaaatacgacagtgttcatggacactggaagcatcacgatgtcaccgttaaggacgagaagacccttctcttcggtgacaagccagtcactatttttggacacagaaaccctgaagagatcccatgggggtcaactggagctgacatcattgttgagtccaccggagttttcaccgat

SEQ ID NO: 23090 - DNA, 322 bp, Glycine max
gacacacaacacagtttccactttccacttggactgtaccaaagtcacgcttgctccctctctcaacggcttccctcttcttcctctctatatctctctctctggacacacacatacttggtgttgaacgggtttttgggtgaacgagtactgttggtggcttcatcttttagtgaataatgatacagcaggatgcggaggtagcttactctctctagtgatgtatcccgcaaagtgatttacttgaatctgtattgcaaagttattctgtgactcttaagtcccttttgatcaaaaaacctttaacaatcatcttactcat

SEQ ID NO: 23091 - DNA, 360 bp, Glycine max
gaatcgccaatttctgattgcaaaacagcgttttctcaaggcccccaaacgtgcgcgattcgttcgaaacggatgaacttttagctgaattcaacgctcgtttgctggcttggaattctggattcgctgtagcgcggataaagagaacaagaaatggctacggttgatgttatcaaatcctgcatcggttccattagacagatatcagagcatattcaagacgctattgtttatttagatgctggatctacagaaagtttccaatttattggggcatatccagtacttcttgaacttggggcacgagctatttgcagtttggaaaacatgtgcgcacttgatgtggtggttgattggaac

SEQ ID NO: 23092 - DNA, 299 bp, Glycine max
cactcttccattgttgctttcaacacttgtgttcttctccactttcacacatgccttctcttcttctgtgtttccggaattgaatcctattaaacctaggcactcacgtcttctcaggagtgctgtgcaacgagaaactcctacatctcagttgtctgaactatggtcacctctggaaagccaaggatggaaaccttatgttgaatcaaataagccaacattaccagagaagtcagagggatatatccaggtctttcttgatggaggttttgaccaacaaaagatggggatatgtgatg

SEQ ID NO: 23093 - DNA, 443 bp, Glycine max
gggaattgggagtttcattttcattaatttttggttcgccccttttctcaatgcttttcttaatgttgaatccttcacaaatcgtcaagagttagcccacccagaacaacaacgcgtttcagctggccacacacattcttaatttttttggctggcctatagtaaaaactcatatcaatgtcctcaagaacgttgaggagaagactccatcatggggatgttgatggcaaaaggcaggagcatttggagacttcgggattagattcgttgagtgagcccttgctggcagatgatgattatattgagaataagaagatatgtactcttgaagatctatgggatgatgagaggaaagaggcccagtttcattggacattcatattctcaaacctcattgcacaatgggcacagtggttagcaaatgttgtactaagatctggatc

SEQ ID NO: 23094 - DNA, 410 bp, Glycine max
gagagtggtggagtgtgcagaagagcgtcgcggtcgcgaccctaatcagaagaagcgcagcttcaagcgagtgacagccaccagccatgggtcgtatgcacagccgcggtaagggtatatcctcttctgctttgccctacaaaaggacacctcctagctggctcaagatctcttcgcaagatgtcgaagaaaatatctgcaagtttgcgaagaaaggtttgaccccgtctcagattggtgtcattctcagagattctcacggtattgctcaggtcaatagcgtcactggcagcaaaatccttcgcatcctcaaagctcacggacttgcgcctgaaattccagaggacctgtaccatttgattaagaaagcagtttcaattaagaagcatcttgagaggaacaggaaggac

SEQ ID NO: 23095 - DNA, 327 bp, Glycine max
aagaagaaaccagcagcagagaagaaggaggaagttgaagtgacagaagggaagaaggaagctgaagtcatagaagagaagaaggaagtggaagtgacggaagagaagaaggaaattgaagtaacagaagagaagaaggaagctgaagtcatagaagagaagaaggaagtggaagtgacggaagagaagaaggaaattgaagtaacagaagagaagaaggaagcagaagtgaaagaagagaagaaggaaggggaagtgacggaagagaagaaagaagttgaagtgacggaagagaagaaggaagcggaagtgatagtagaagagaag

SEQ ID NO: 23096 - DNA, 327 bp, Glycine max
ggttctagtgtgtgattgtttgttgttgtaactcggtcttcttcttttgttgttctgtgtttgtgtttgttttttctctcacctgaaaatgtcttgctgcggtggtaactgtggttgcggaagctcctgcaagtgcggcaacggctgcggaggctgcaagatgtacccagacttgagctacactgagtcaaccaccaccgagaccttggtcatgggagtggcacctgttaaggctcaatttgagggtgctgaaatgggtgtgcccgctgagaacgatggctgcaaatgtggaccaaactgctcctgcaacccctgcacttgcaagtg

SEQ ID NO: 23097 - DNA, 393 bp, Glycine max
  modified_base (16)..(16): a, c, g, t, unknown, or other
  modified_base (306)..(306): a, c, g, t, unknown, or other
cccacgcttgcttacngataaaacaacacaacttaatttattcatccaacatcacacacatctggtacgtttactttcttacaatcaaaaccaacaacaactactacaacttatcacaaacactaccattatcaaagacacacagcttactaatattgcaacgatcagaagcaaaccgactaatacatctaccttctccatgctactattgtcacctatgtacacaccaaaactactgctttagcttacagacataacattcataaccaacattataccaccaatgcctactccattaacactgantaacaccattctacttgctgctacgaatgtcacactaataaacatcatataactacttgtgcccttaatgataacaccaataaacat

SEQ ID NO: 23098 - DNA, 399 bp, Glycine max
  modified_base (255)..(255): a, c, g, t, unknown, or other
  modified_base (259)..(259): a, c, g, t, unknown, or other
ggaacacaacacaacgttagccttggaagtttaaaccttagcagcgtcgacaatggccggcgaggagctcgccggagaccacacgccggagctgctgtgtctggtccatgacatcgccggaatgtgctcggcgttatcctcctccgccggctccgccggcgccatgttccgcaaggactgcaccgatctggttcgccggatctccctcctcacccacctcttcgaggagattaaggaactcagcaacaacgttgncggngggtcttcttcttctccttctccttcttcctcggcttcttcaaagtggtcttctgatctggtcctcgcgcttcactccgcaagacgcttgctttccgtcgctagaaacttccgctccaattgctcctctgatggagctgc

SEQ ID NO: 23099 - DNA, 418 bp, Glycine max
gatgatgaaagcggcagcatcaccctttaacctaaagtattaaaatgttggtttattattattactcatagctcaaaacccaattttaccctaccaattaaggtctctcatacagtagtattttatttgcactacgtactggctactttatttatttaagcagaagcaggtgagtgagtgagtgagcaagagtgaagagcgaagagaatggctcccaagggtttaatctttttggctgtgttatgcttctcagcactgtcactgagtcgttgtcttgcggaggataatggacttgttatgaacttctacaaggaatcatgccctcaggctgaagacatcatcaaagaacaagtcaagcttctctacaagcgccacaagaacactgctttctcctggctcagaaacatcttccatgact

SEQ ID NO: 23100 - DNA, 412 bp, Glycine max
  modified_base (402)..(402): a, c, g, t, unknown, or other
gatcatccaacatcacacacaactgctacgggtacttccttacaatcaaaaccaacaacaactatggcaagttatcaaaagcactacgatgatcagggtcgcaaggttgacgagtatggcaacgttgagaagcaaaccgacgaatacggcaaccctgttcatgctgctagtgtcacctatgtagccaccagaactgctgctggtggttacagtgatgacattaataagcaacatgataccaccaatgcctacggcgtagacactggtagacagcattctagtggtggctacgatggtgacactaataaacatcatggaactactggtggctataatgatgacaccaatagacatcatggaactaccggtgtctatggtatagacaccgataggcaacaacantggactactg

SEQ ID NO: 23101 - DNA, 296 bp, Glycine max
gacatatgatcttgagtctgccgcatttgccatatcacgacggttcctaccaattggtccattgattgcaagtgacagcaacaaaagttcactctggcaaggagacacaactttcttagactggttagatcagcagccacctcaatcagttatatatgttgcctttggtagtttggcagtaattgatcacaaccaacttaaggaattagctctaggactcaatttccttgacaagccttttctttgggttgtacggccgagtaatgataatgaggcaaacaatgcatgctctgatg

SEQ ID NO: 23102 - DNA, 391 bp, Glycine max
acgacagaagggtgaaggagatatattagttacatttatctatgaaaaatcgagatcgggtgagataacacaaggtcttccaaaagtagaacaggtattagaagttcgttcgattgattcaatatcgatgaacctagaaaagagagttgatacttggaatgggcgtataacaaaaattcttggcattccttggggattcttgattggtgctgagctaacgatagcgcaaagtcgtatttctttggttaataaaattcaaaaagtttatcgatcccagggagttcacattcataatagacatatagaaattattgtgcgtcaaataacatcaaaagtcttggtttccgaagatggaatgtctaatgtttttttgcccggtgaactaattgga

SEQ ID NO: 23103 - DNA, 428 bp, Glycine max
gggagagaaaaacgaagagtgagtcaccgttccgtgttcccgccgagtcggtataaacgagtgagcgagtcacaactcaccgcgctgcatggaccctctagaagctttggtcgcccaaatccaagggctttcgagcactcccggcgacctcactcgcctccacagtgttctgaagcaagccgatgactcgctccgatccgagtcaactcgcctcgctccgattctcacccagctcgacccctccattcattccctcgggtttctctacatcctagaagcttcaatgaccgatccggtaaccaaaacgcaggctgagaccgtcgttccgatcgttactaggtttattggcgcttgcagcccggagcagattcgcttagcgcctgataaatttttatctgtctgtaagaggttaaaggatcaagtgatgc

SEQ ID NO: 23104 - DNA, 445 bp, Glycine max
ggaggcgaaagggtcatagggtactgttgtggttagggattcgaattttgattatcgaatcgcaaaattctgaatcaatcaatcagtaattagagccattaacgactgcaatggtctgcgagaagcgtgagaagaaattatcgaaggtgatagtaccagacaaatggaaagaaggggccagcaatactaccgagggtggtggccgcaagatcaacgagaacaagcttctctccaagaaaaacaggtccttttaacttaatctctagctttacatactttgataatttctttttttcttaattttaaaattgggtataagaattaagaagcataacttggctctgtcacctgtgtattttataattagctgataacatgttaaagcgatcatttctagttccatagcagagcctttggaatgtaaatgacttgacagttgacactt

SEQ ID NO: 23105 - DNA, 440 bp, Glycine max
gggaactgtttataatttcattttgactctctctcgctctgattgcttccttttcccttttattttgctctcttctctgcacaacaattccttctcattccagatattccaaccatcgaccgatctcaattctcaaccttaacctctcagaatgtcttacgcttatctcttcaaatacatcatcatcggtgacaccggagttgggaagtcttgtcttctacttcaattcacagacaagcgctttcagcccgtccatgacttgaccatcggtgttgaatttggtgccaggatgatcacaattgataacaagccaatcaagttgcaaatatgggatacggctggtcaagaatcattcagatctattacaaggtcttattatagaggggctgcaggtgcactgctttgttatgatataaccaggagggagacatttaatcact

SEQ ID NO: 23106 - DNA, 443 bp, Glycine max
taaataagacaattgacgagcttaatgcagagttggaccgtattggcaggccaattgctgtggactcaggggcccaactttacactattttagagatgtgtcgtgcatttgacaaagtgtttagagaacacctggatggaggacgtcctggtggggaccggatatatggagtttttgatcaccaattaccggctgctttaaaaaagctcccttttgatcgccatctttctttaaaaaatgtccagagagttgtcactgaagctgatgggtatcagccccatctgattgctccagagcagggttatagaagactcattgaagggtcaattggctatttcaaaggcccagctgaagcctccgtggatgctgtccactttgttttaaaagaacttgtgcggaagtcaatttcagaaactgaggaactaaaaagatttcccacactt

SEQ ID NO: 23107 - DNA, 474 bp, Glycine max
  modified_base (17)..(26): a, c, g, t, unknown, or other
  modified_base (28)..(31): a, c, g, t, unknown, or other
  modified_base (399)..(399): a, c, g, t, unknown, or other
  modified_base (404)..(404): a, c, g, t, unknown, or other
aattcgagcggccgctnnnnnnnnnntnnnnttttttttttttttgcagtacaatgaaatcctgggcgaaggagcttccaagacagtatatagagcatttgatgagtaccaagggattgaagttgcttggaatcaggttaaattgtatgattttctgcagagccctgaagatctcgagaggctttactgtgaagttcatctcctcaagacgttgaagcacagaagcataatgaaattttacacttcttgggttgatacagcgaacagaaatatcaactttgtgactgaaatgttcacttctggtacccttagacagtgagttccctccattttcaaccttttgccactcctctatattatatttgtatgatcattatcctttttgtgcttttgagaagntttgntattttttcttcttttatttattttaattatcacaatagatataggcaaaagcacaagagagttaacatt

SEQ ID NO: 23108 - DNA, 412 bp, Glycine max
accactttttcggacacactcttttattggatgtaagtcatgtaagtccttctaaatatgcgagtttcattccacatttggtgggtttcatgtaagttcttttattggatgtaattctagtgtagtgagacacatgaatttcaatcaacaaggagaaaaatatgttggaaggaaagtgttagattgagtgttactagcactcctatgtgattcatttatgcaatcttcataatcataatcagaatgatgtgctgttctaattagttaatttgttttgtgttgttccctttgatcaatgtagtgctagagattcccaagagtatgtactattatttcattaaattatcaaaggatgatgaagtcctaatgaattatgataatgacttatcagcaaatgatatacattattctt

SEQ ID NO: 23109 - DNA, 277 bp, Glycine max
gatagaagtgaggggtgatcgatcttttccacactcaaacctagagagtctcataaaaaaaactatgcaagcttctctcatccgaaccggctccgtgccggtccagaacacggttctccccggttcaccgcgagtctcactcacgcgccaagcctccttctccggcgacaagagccacgcgcattctcccaggttttcaatccattcttcccactccaacaaccgcagatcctcgtcggagcgcgacgacgagaatttcggcgttcgccgggatctg

SEQ ID NO: 23110 - DNA, 414 bp, Glycine max
acaccgatttacaaagtatcgtagggtattttatattagaaatgattgacgaaatcgtttctgacaagaatatccaaataccaaatccgacctatatataacctctgcaaagtaaaagaagttcttggaaaaatcaaagaaaaagtctcttcttcttctgtaaagaattcttccaataatttttctgaccctaatcttttcaaaaaagtgcgcgcagtacttttgtgcttacgagccaaagtttttatacaagaaagccgaagtatatatcttatttgatacaaactcttttttttgcggatccattgtaataatgagaaaaatttcggcatatccgcaaaaaccggtcaataatatcaaaatcagataaattggcccaaaccggcttactaatgggatggccaaatacattac

SEQ ID NO: 23111 - DNA, 428 bp, Glycine max
  modified_base (421)..(421): a, c, g, t, unknown, or other
catatactaggggatttcacttggaaaagaaaatgtcccgtactgatggattcgggtccacaacgatgggttcaaatgtacgagatcttgtagcacttaccaacgaggccctatcgattagtattatacaaaaaaaatccatcatagacactaatataattagatctgttcttcatagacaaacttgggatttccgatctcaggtaagatcggttcaggatcatgggatccttttctatcagataggaagggctgtttcacaaaatgtacttctaagtaattgctccatagatcctatatctatctatatgaagaagaaatcatgtgacgggggggattcttatttgtacaaatggtacttcgaacttggaacgagtatgaagaaattaacgatacttctttaccttttgagttgttctgncggatcg

SEQ ID NO: 23112 - DNA, 452 bp, Glycine max
cgggccggccgacgcgtacgcaagaagactacataaggccatatactttttgatttcacttggaaaaaaaaatgtccggtctgatggattcggatccacagcgatcggttcaaatgtacgagatcttgtatcacttaccaactaggccctatcgattagtattatacaaaaaaaatccatcatagacactaatataattagatctgttcttcatagacaaacttgtgatttccgatctcacgtaagatcggttcatgatcatgggatccttttctatcagataggaagggctgtttcacaaaatgtacttttaagtaattgctccatagatcctatatctatctatatgaagaagaaatcatgtgacgggggggattcttatttgtacaaatggtacttctaacttgtaacgagtatgaagaaattaacgatacttctttaccttttgagtt

SEQ ID NO: 23113 - DNA, 336 bp, Glycine max
gacttactcctgggtttttcatggcaagcatggcaagaggaaaagcaaatgtgaactccaaaaaaaaattggtcacagctgtgttggttttggtgattggtggggggtttttctatttctattctcaaaataatgattcatcttctggtgggtatggggataaatctttgagccactttggtttgggaggggacaaagattatggtgaatctttcttcacagttgttggaagagagggcaatgttgtaccaaagagcattccaatctgtgatgatcgattatccgagctgattccttgtctggacagaaatctcatataccaaacaagattgaagc

SEQ ID NO: 23114 - DNA, 432 bp, Glycine max
aggatcatagatgttgtactgatcaatgttaccaagcgcttgatccatggcatagctatacccagactcacactcatcagattccttctgcctgtgaaaatcacatctactcattagttgccggaaagtctggtcggagatcatagcatggctccaccaatacgtcactgtgcccaagttatcatagtagttgtctgtcactgcatttcctacctgcattgcattattaatattaacaaaacttcaccatcaatattccaccccttcttataacaacgtctatataatcttatcttaaaatgtcaagatattacattttaagttgttaaaaagtgtaatttactcttgggtccggctaatcattcaaggtcctaagagtattaattaaagaattaaaaaggataaatctttttggtgagatacataaaggta

SEQ ID NO: 23115 - DNA, 420 bp, Glycine max
aggttcctatttaggaaccagtgttgaattgtagcgcaatatgttgtgcgtgcttaagacacgagtgtgaggtcgtgggtattgtataattcactagcagtgtctgtgtgctaaaatgattttaggggctggacctgaatcaggagggagaggccctgatagactcttcggagtgtacgccttgggggtcatcgggtttgagtgcttctttaagcctatgttgatcccatatggttggagcattctcgcaaaacatcgtgaccctgactggtctccctatgatcttacttagtgagagtgacctgacaaacccattgtgtggtgtgtcttgttatgtactcctaagcgccgcagggtggttattcactgacatggtaccacattgcatgtaggcttgagtcttagcataattgtctcatg

SEQ ID NO: 23116 - DNA, 425 bp, Glycine max
cgacagaagggggagaaagagaaagcatagaaaggaaacgaaaaaacagagtgccgcgcagaatttgaaaacaaaggctgaaatttgaagaaactgagatcattgggtgtgaaatatatggcagaggttgtcctgctagtcgatgatttgaaattactttctgcgagtcctcgttgtagaatttgtcatgaagaagagtttgaaagcgtagaaaccttggaagcaccttgtgcttgttctgggaccgttaagtttgctcatagagattgcatacagagatggtgcaacgaaaaaggaaatacaacctgtgaaatatgtctccagcaatatgaacccggatatacagctcctccgccaaagaagtctaagataaatgatgaaacaatgtccattagggaggaggaagaaccgtccaacgcaagaat

SEQ ID NO: 23117 - DNA, 256 bp, Glycine max
tcattgttattgaaatatatactatcaagttctctgctctacaatgattttaaattcctttcttcaattcctacgtatagaatctgatatactcaacagtttttaagccttgaaacccattaagcaccttttccttgttaagccaccgttaattccattcatatagatcatatacacagatcattctacccataactaaacacactatgagcattatttctccaactgacctaacccacctattcagttcctttct

SEQ ID NO: 23118 - DNA, 389 bp, Glycine max
gagaatagtgagagtgagagatggatcagtttttgtggagggtgttgcctttgcttacaatccttgtttcctttggagtgttcttctacttgcaggattcttacacagcacagttatttcctctcataaagttaccgcgggataagtgcagccttcttccccatcgccacttctggatatccagcaaacgtattgtgaccccacaagggatcatttctggttcaggttttgcttttttaaaccttgattattattattattattattattgagtagtgctatctagtaggaatgttgctaacacgaattgttacgaattcaaaaacagacaatcaaattaattgtattaacatccaggtagagagcggataataactatctgcaataaa

SEQ ID NO: 23119 - DNA, 351 bp, Glycine max
gattaagaaacactatgtctaatatccatcgagagagtgacacaaaaccctaaccaaaacgacaccgtgggatctgttcctcctctcagattttgctgcaatgggcaagaaaaagttagattcaaagtccgatcgcaaattcgaaaagaaggtccaattttattccaaggtgaaagatgctgttacctccttgagtgcccaaaagtctattactaagaaaaagaaaaagagcaaacaacaaaggcggcagaagaaattgaaggcatataatctatcttcacttttagaagcccttcctgaggtgaaagcatcaaaaaaaccaagttgtgcgaatgacagcaaacttacgtg

SEQ ID NO: 23120 - DNA, 366 bp, Glycine max
ggttgcagctgaaagacgacaggttgatgaaaaagttaaaaaaatcattgaactgaagaataaggtttgttctggtaatgatagcaattttgttgtcctcaatcaaaaaggaattgatcccccatctctggacctgcttgcaagggaaggaataattgctcttcggagagcaaagaggagaaacatggaaagattggttttggcctgtggaggggaggcagtaaactctgtagatgatttgactcctgaatgtctgggttgggcaggattggtatatgaacatgtccttggtgaagagaaatatacattcgtagaaaatgttaagaatcctttttcctgcacaatcttgattaaaggtcctaatga

SEQ ID NO: 23121 - DNA, 148 bp, Glycine max
gacaacatttttctctctccgcgtctttttagccacgatcggttcacgggtccctctcttcccttggtctggtctggttgctctggttggttcctaagaaaagaaaaaggcctaattggggtcccttatatttatttttctttactct

SEQ ID NO: 23122 - DNA, 77 bp, Glycine max
gtaaatcaaaattataagagagaaaatggtgcttttgtactacagattactataaataaaaaacttttatggtttcc

SEQ ID NO: 23123 - DNA, 343 bp, Glycine max
taaaatcatcttactttctgtttcgagaagactatttaaaggattaattctatatctaatacgtgcgacatactcctacttttggaagggatgcatttattatactaaaattcaacacaggctcttcctgttacttttactactcaagataactcctctgatcatactaccttttttctctctacacattattcaaatttctcccctatcaacttttcattgttctatagttttctaccatttttgttacagttgaccataaattatatttctattcctgtaacgtaacctgacaaacgtctaccacttccaatttatttcatcatactccccaattacccat

SEQ ID NO: 23124 - DNA, 361 bp, Glycine max
gaaagcaacatcgccaggagtaagagagagcaaaggtggctccttttcatgtgagttttgagtgattcattgattcttctgctaccatcttcttttctactcgaaaaaggaagaggggaaaagaaattgaaacatgggttggattccctgttccggaagttcaaacactaagaagaagttaaagaagaaattggagaagatggaagggcagagcagcctcgttgatccgatcaaagccaccccagggaaattaaagaggaatccatccatgaattccaaaaattcctccaaaaatgggaaccctgagcacattgctgcacagacattctcattccgtgagttggcaactgcaactagaaac

SEQ ID NO: 23125 - DNA, 405 bp, Glycine max
aattcgagcggccgctttatttttactacttttcttttcatatctaatagaaatatccccccgccgtcctcttttgctgagtttggacagctttattctatttgctttaaacatgcataggactgatatttcaagatgaatcttaggtattatcagttttgtaaaagagagattgattatttgttgaatgctatttttgattgcttagctatggtaagaccctctactcaacattacggctaagatattgtaattgttcaatcaaaagatggtaaagttgttcttttaatgtgtgtgtggtgtatgtgccatattccttttagtatgaaattttggaaatatgtaaggtgagaacaatctcatctgggtttgtttcgttaaatgtattaaatgctggaaaaaaca

SEQ ID NO: 23126 - DNA, 370 bp, Glycine max
ggaacctgaaaggctagtttcttacaaggctctactctactgcttcaccttctgctctagaaaattcagtggtgatacatggcttcggctactctctctgtagccaaaccagcccttcaggcaaatgggaaaggcttctctgaattctctggcctccgcagctcatcaggcttccttcccttttctagaaaatcttcagaggatttccattctgtcattgccttccagacctatgcagttggaagcagtggaggatacaagaagggtgtgacagaagcaaaactgaaggttgccataaacggatttggaaggattggaaggaacttcttgaggtgctggcacggtcgcaaagactcccctcttgatgtca

SEQ ID NO: 23127 - DNA, 391 bp, Glycine max
cttgtaagcgaacaggtgttctctttttggctcagtggtggtccaaaagcgaaagatggtggtgaactaatttttggaggtattgatcctaaacacttcaaaggagatcatatttatgtcccagttactaaaaagggctactggcagattgaaatgggagatttttttattggaggtctctcaacaggtgtttgtgagggtggctgtgctgctattgtggattcaggaacatctttgcttgctggtccaactactgttgtaactgaaatcaatcatgctattggagctgaaggagttctaagtgtggaatgtaaggaagttgtttctgaatatggagaattgttatgggatctcttggtatcaggggtacgacctgatgatgtatgctcac

SEQ ID NO: 23128 - DNA, 342 bp, Glycine max
  modified_base (33)..(33): a, c, g, t, unknown, or other
  modified_base (35)..(35): a, c, g, t, unknown, or other
  modified_base (172)..(172): a, c, g, t, unknown, or other
  modified_base (220)..(220): a, c, g, t, unknown, or other
ctaagcttttcccattcatgtgtggtggttatngngataacattggagttagaaaccgtgcctataccgtcgcaacttcaattggaagaaaatgctataatcaatagtggatggtggaataaatcaaaatcagtagcttcgcgcaatatctgttcatggtatggtatgtccngcaacgtcgctggaaacgtaactagaatcaactatcccttttatacancctggattcgattagcaacactaaacctcttttgttttaaaaatttaaaatggcttgaggtcttaaacttgggactacaaaagactatcccatctgatattggtaaatctcctaaactcact

SEQ ID NO: 23129 - DNA, 335 bp, Glycine max
aaatataatattgaaaacgggggatctgcaccagagggaattacttacaatatatattaaaacacaacaacaattaatgagtacttgattgcatcatatctgccagatgtgtatattaccacaacatgtgttacaagctatacagtcccttaaggaccatttgatgttgaggtttttgattcagcaattgattatatataatataataattcaatttttgatttttaatttatcatgaaactgctgtcatcttataaattcacattctttttattatgcacttcattaggttttttgtagcatattcaaatattatattttttgattaacttttt

SEQ ID NO: 23130 - DNA, 426 bp, Glycine max
gacaacacaacgcggcagagcgaagagaaggggcaaaagagaaagaggcgcttatcgaactcggacggaagcactgagttgactcggagggagtggaaagtgttgttgcgtaatgtctggtggtatcgctcgtggacgcctcaccgaggagcgcaagtcgtggcggaagaaccatccccatggttttgtcgcgaagccggagacgctgcccgatggaaccgtgaatttgatggtgtggcattgcactatttccgggaagactgggactgattgggagggtggctacttcccacttacgctgcactttagtgaagactaccctagcaagcctccaaagtgtaaattcccacaaggtttcttccaacctaatgtttattcttctgggactggttgcttgtctatacttaacgaggatagtgggtggag

SEQ ID NO: 23131 - DNA, 427 bp, Glycine max
  modified_base (236)..(236): a, c, g, t, unknown, or other
gactcacttttgctctctgatttcacctcaatgcacgacactgcacgtaagtactcactacctttggctcttctttactatggatgaagctgcaggcagccaaccctagcttgcatatcccctcactctccatttcagccgcaagccacgcaccattcttcatctcttatagttttacttcatctccgttcatagcatatatattattatgcgtaagtgaaccaaccactcacctnctcatctccgaccaccaccagcagcctaaccagtcaggacttgcccgccatgaaccaccatacatgcgtgaaccaactgcagtgacttcctctttaaccaacccttgtgaactataggaaccacgtgcagtagcgaatcagcgaggaaaaagtggtagccacagcaggaatcaaagaaacaagaagaacgt

SEQ ID NO: 23132 - DNA, 418 bp, Glycine max
gacctccaagtccatgctttttgttcttgcaagaggaacagagaggaggtggacaaacaaagctataatttttagaggggttaccaccctcaccttctgccaaaccaaacccacccttttctctctttaagctactattgtgctgagagctgaagaggagatggggggtggaaatcaagaggcagtgaagcagctgcagaccctgatggaaaatgtggatgatgagcagctgaagaacacattccagattatgcaccagggttatcaaactgaaacgttaatacggtttctcaaagctagggactggaatattgccaaagcccataaaatgttaattgattgtttgaactggagggtggaaaatgagattgacaatgttttaaggaagcctatccccatggatttgtacagagccata

SEQ ID NO: 23133 - DNA, 346 bp, Glycine max
  modified_base (101)..(101): a, c, g, t, unknown, or other
gaagacttctttccatttcccattttctcattctctgtttcgctttcaccgagtaacttcactttccccaactccacctgagaaaaagatacccataattnggacgcacgcccgcacgcacttgttctgactcagtgcttgtggtggacgcagaaaaaccagaaaagaaaaacaagcacgaggagatgatttacttcgaagaaaccgagttgcgactcggccttcctggcgggtctgcgagtgatcacaacgagtcaacaacggtcaagggcaagggtggaaagagaggcttatctgacactgcttcttgtgatttgaagcttaatctttctttcagtgatgactc

SEQ ID NO: 23134 - DNA, 407 bp, Glycine max
gaagtaaaagaatctctgtgttgtcatcacacttcggtagatccagccccatcatggcttcagagaagcaagcggctcttgccgtcactccctctgatgctgatgctcctaccatatttgacaagatcatcaataaggaggttccttctactgtggtttatgaggatgacaaggtgcttgccttcagggacataactcctcaagctcctacacatattcttatcattcctaaattcaaagacgggttaagtggtctatccaaggctgaagagaggcactttgagattcttggccgccttctgtacactgccaagctggttgcgaagcaagaaagactcgacgacggcttcaggattgtaattaacgatgggccgaaaggatgccaatcaagttaccacattcatgtg

SEQ ID NO: 23135 - DNA, 410 bp, Glycine max
aaatcaaatgctcctgacagttttttgatcccggcaggattgaaagttgatcatgatgactgcaagtatgttggggatccttccatcttcagttcttcagttgtgccttctttaactaacatggttatgtgtaggtgactccatgattcatatcttagtttccgggttctttacttctctcactcctttgcttttaagtacatgtatttagcccctaaaccttagtgcatcttttcgatgcctgtcttgtccagatcttcacgtccagtatctattctcttcgtccatttcctttgataacagagaaatttatcttaggttagtctttttctttcccacctttcattagttttgtggtttgtggcatcgaagccaaggaggcaaggatgatgccatacaagttttggcat

SEQ ID NO: 23136 - DNA, 438 bp, Glycine max
  modified_base (319)..(319): a, c, g, t, unknown, or other
ttctcgcttctttgatcactgcttcgcaaattgatcgttcggcgactaattgtgcattggtgtgctggtgatgggtatggtttggatttcaaatgtctttcttctcgggtaatgagatgcatcaagttttgaagcacagtgagcagggatggatattgctgctcttttaacttctgctggaattaatattgctgtgtgtgtggttctcttttcattttattctgtattaagaaaacaacccagtaatgttaatgtgtactttgggaggagactagcctctcagcattcaagacgcattgatctctgcttggaaagattntgtccctcccctagctggatattgaaagcatgggaaacatctgaggatgagatattggctattggtggcttggatgctgtgggttttgtgaggatacttgtttcagtattcgagtgttt

SEQ ID NO: 23137 - DNA, 373 bp, Glycine max
ggattctacaggtgctttataagagattttagcaagggagggcgtccactatccaacttgttgccaaaggaggtggaatttgacttgaatgataaatgcaaagaagcctttcattgcctcaaaagagcattgactaccacccctatcattcaatcacttgattggacagccccatttgagctaatgtgcgatgcatccaattacacattgggggttgtccttgctcaaaagatctccttacttcaactgacttcttttccaccatgacttagggagtttttctttttctatctcctttcttacttttatcacaatttgtcgattctatttgattggttaattgcttttaatctttaaattgggctacattgag

SEQ ID NO: 23138 - DNA, 463 bp, Glycine max
acgacagaagggaattcagaattaataataataagagagtaaggaagggcactccaagactttggtggagagcaagagctataagtgtgagaagtgattggaaattgttggaacccaccctatcaacaaggagaagctgttttcgttcgtcgccactaacactaatcgtttcttcaatgccttacgagaaggaactcgccgctgcaaagaaagcagtcactctcgctgctcgtctctgccagaaagttcagaaggctcttctgcaatccgatgtgcactcaaagtcagacaaaagtcctgtcacagtggctgattatggttcacaagcattggtcagctttatacttgagagagaacttccttctgaatcattttcattaatagctgaggaagattcaggtgatcttcgtaaggaaagtggccaggatactctgaatcgcattacagaacttgtcaatgatac

SEQ ID NO: 23139 - DNA, 394 bp, Glycine max
cagggtagtgaaactcatttgtaagtactggtaattgttgattgccgaacttcattttgtgttttatattttggtaggagactttggagggcttcatcttgttgaatacctgcaaaacgagaaaaaatatcaacaacaacattattaactccttttatatgttcaaaatttatctttattccgttatcataaacatattcttggaataaaagccatcttttctgagattttttatcggtatttatttgttggctactattacttcgcaatcagttcttatggtgatttcacttttattaatcagaaagagtttaaatccttctagagcgtttatcacaacattgacttcataatctgtagaagttgagtatacctatggtttcgtgtgatattt

SEQ ID NO: 23140 - DNA, 277 bp, Glycine max
agggacttaagttagtaagatgtctcacgtgaggaacaaacttgtactaataaaagactatgataccggatttatcaaagaatcccacatgaatattcactaaagtaccataacatcgaagcttgcacaacgttccaactgatgtctggctcaaaaactcgtacttgtctttgagatccgaatataacgaatttcattaacaactcctaaggcgccttccaatatgatgagcttacactaatggctctccattaataggatatggagagactaaagt

SEQ ID NO: 23141 - DNA, 310 bp, Glycine max
gaagtttttaaactcttggacgcatgcatcaacccggaggaatttatctaattcatcatctcaccccccaatttgtcagctttttaatttaataataagggagcttgtttcttttttcggcgtatatcaagtgcttgttatgatgagtcagaatgttagcttgttgtactaggtggattgtaaatcacgtattttgctagagtcatccgcgtaaagcgtgaaaatgcagaaaattacaaatgtctaagctgcgtctgtagtatacctactgccaaccattgttctttctacaagtaactcctcaatccca

SEQ ID NO: 23142 - DNA, 370 bp, Glycine max
cataactttatttatatctagtttcaaattacttggttagcacttaataatcttgagcccttcaaccaacatatttcattttatttagtttataggttagactgaaatgttatctttgtgtattcaaatacgtgaagctgacatctttcgacttttttttgcagatgatctttgtttaaaaatttattggaagtttgcctcttgattaacattttatttgtttaaaataatatcatctttaattattaatgttgctcttcttatccttttaatattgctttgtaaaacaatttttttggggataaatatgatatattaacttttttttgcttgattcacaaaattctgcccatacctaaatttgcaacta

SEQ ID NO: 23143 - DNA, 353 bp, Glycine max
ctctctggtaatcgattaccaatggcaagttttgtgttcgaaaagctttcaactgaatttacaacattccaatgaatttcaaaatggtgtgtaatcgattacaatgatttggtaatcgattaccagtgtgtttgaacgttgaaattcaaattcaattgtgaagagtcacatcctttcacaaaaaagttttgtgtaatcgattacaatgatttggtaatcgattaccagtgataagttctgaacaaaaatcaaaagatgtaactcttccaatgattttcaagtttttctaaaagttataacttttccaatggttttcaagtttttctaaaggttataactcttctaattggttt

SEQ ID NO: 23144 - DNA, 270 bp, Glycine max
ttatgggatagcgtcatcatacaaagcatcgaattcaaaaactaagttgattgcttgtgctttgctttattcctcaaaaccaaacatgtcgaacacatgcggcaactgtgactgctctgacaagactaactgcaccaagggaaacagctatggtgttatatgtgagactgagaatagctacattgagactgttgacattgatgttccatctactgatcattgatgggaagtgcaagtgtgtcacttactgcacttgcacggactggactt

SEQ ID NO: 23145 - DNA, 239 bp, Glycine max
acgcctacaaccactcatacgtacatttgctaaatgacgatatatgggtggtcttcagataccatgtccataccatactataccattcaattatactgttgtcagagcgttatctctgtattatcttgtcctctgtctagaactatcttgcaatcaacgttcctttatttacctctcaactatatttatactactaatatatttattcaattaatatataattaaaatcctcacattat

SEQ ID NO: 23146 - DNA, 340 bp, Glycine max
gtcagagtcgaagaaatcagtgcttagatcgatcgagattattgggcttggaactggacctgtattggagaagaaacttaagtatgcagctgacatttcttctggaatcattctcggaagggagcttgtgaattctccggctaatgtgcttacgccaggggtattggctgaagaggcattaaagattgcttcaacatataatgatggttttactggcaaaatattagatgctgagcaatgtaaagaatttgaaaatgggtgtcctatcttgggggttgcttgaaccctagcaaattcttctcattttatccatctgggttataaaccaccaactggacct

SEQ ID NO: 23147 - DNA, 339 bp, Glycine max
gagaggaatgatcatggaagaatcctcggtacacgagatcaaaacccctctcctgtcatctaacaaggaggaagatgaagttggaagcagtactagccataggcagcaaaatgaagagaactcgcccataaaacaagtggccctaacggtgccaaccaccgatgacccatctctttcagttctgacgttccgaatgtgggtgttgggaactctatcatgcgtgctgctgtcgttcctgaaccagttcttctggtaccgcattcagcctctcaccatcaccgcgatctccgcccagatcgcggtggtgccgctcgggcaactcatggccgcaacgatcac

SEQ ID NO: 23148 - DNA, 381 bp, Glycine max
tgcgggttggagaacactagcttaccttacacctatgggtagcaaataattcaaggttcccaagacatgtagcttaattcagttcttgaaccctttgtactatagagttctatcaaagactggacatcacggatcaccaactatttctttcggacacaacgaccaggagttgacattcccaccaatcatgaaccatttgcagcaccaaagggttataatgcacctcaacaagtgcacataacacacggcgactattatgtaaaagcacaatattctcatacctgaccccagatgaaccaatgactcgacatgtgcaatatagcacatcaaaggataagtttcaaactattgccgaaagcacaactgcaaactacactttct

SEQ ID NO: 23149 - DNA, 393 bp, Glycine max
gactttgagcgatgaaaatgttcagattggtgatacaacttgcccatgggttgcaaaggtatggaattctgttgaaaaacacatgcatggagattatacctctgtaattcatggtaaatatgcccatgacgaaactgtagcaactgcttcttttgctggcaagtgtataattgtgaagagtatgaaggaggctgaatatgtttgcgactacattcttggtggtgaattgaatggatccagttcaaccaatgaagcctttttagagaaatttaaatttgcactttctgagggctttgatccaaacagagacctgattaaagcttgcattgcaaattatactacaatgctcaagggagagacataaaacatttggaaacttttggagaggactat

SEQ ID NO: 23150 - DNA, 154 bp, Glycine max
aaatttaaaaccatttttcataaatttttaatccatttccctataattttttcatatttcttttttttttttctaaacctatccatctcattaaaatattttatttaaaaccctaaaaaaaaaaccatatattcctaataaacccaaaatttaa

SEQ ID NO: 23151 - DNA, 336 bp, Glycine max
gatagcaaatagcgggcccaaaaggggagctacctacccttcaaacctttcactcttctctcctttaacaatcactgcaataatattgcttaaagatattccgaaaccatggtttacgccaatcctatgattttagccgttgagaatactacgtaaccccgtctacttctgcagcttcttagcaccacgacctacaatctatctacaattgtcataagaaaaccaccgaatgttttccatcacatttcttacgaggctgcacacttcacttcaatgctttagatattacatgcttacctaaagacaggcgaaatacttctcattaccattaacaca

SEQ ID NO: 23152 - DNA, 365 bp, Glycine max
gtcccagcaggaatatattcactgaattgcttgcctcttaggttggttcactctgaggcatcaccaattcgatgcattctgatcaaatgatcaaatgatggggtcaaacctggttttcaattgcacggtatgattatattacgagaatgggtcatattgtttctgtgcataattatccttatccttattaagtcaaaatactgatgctaaaggatgaacctgccacaagaagcaacgtaacccccaatacaattagtggtgtccataaaaagcaatttgatgccaattgcaagctaagctgatagtaatatgttgaattactcttaatttacgtccttgggttggaaagtacttgaattattggg

SEQ ID NO: 23153 - DNA, 396 bp, Glycine max
agacgaccacagaatgtttcccaccaggaatatattcactgaattggtggcctattagggtggttcactctgaggtatctccaattctatgcattctgatcaatatgatcaaatgatggggtcaaacctggttttcaattgcacggtatgattatattacgagaatgggtcatattgtttctgagcataactatccttatccttattaagataaaatactgatgctaaaggatgaacctgccacaagaaacaacttagccacgaatacaattattgatgtccataagaagcaattttatgcaaattgcatgctaaactgatagtaacatcgtgaattactcttaagttacctacttcatttgtatgaactgaattattgcgattaaactttaattg

SEQ ID NO: 23154 - DNA, 396 bp, Glycine max
caaaaccaaaaaaagcctcgggggttgagtgagtgagggggttctttttccttctttctctgttctttcctgcttttgcggcttctcgccgcctttgccgttcggttctgccttttttctgcgccaattagtggcgcgcattaaagcggtgcgtcttttattatatataaaactctccccagttttcaagttccactactcagcagcacagcagcaacaacaacaattacaagtgtgtactgcgtagtaacttaacttcattcactatctcattgcatttaaagcttcctttgccatttccatgaatagaatacagaattcttaggcatatgaacatttagcccatctctgccactgactctgctccacagcattcaattataacatagaccattt

SEQ ID NO: 23155 - DNA, 422 bp, Glycine max
gctatttttggatcctctaactgtacatgttggtgattaaatgttatgttcaaatgatgcaggataaggtcctacaggaacaaaataacactctcgcaaagaaggtaattaatgtattttgtatttaatcaacaactttagttgactctagttagtttggactttggatactaaatgtatgtttggattcatgttttaacacctttttagataaatgtttatataagcatttatagaagaagaaataaaaaaaatattaaaatttaaaataaacttatagaagctaatatgaaaagatttctataaaataacttacaataaattaatttaaacttataaagaaatttaatttttttcatttgtctttatcttataagctcttatgaaaaaatgtatccaaacagaccttaatctttcagtgt

SEQ ID NO: 23156 - DNA, 419 bp, Glycine max
gacgcacttagcaatcaatcaaaacattcccaatgacaataatatacacatcgtcaattaagctccttctcctatagccatggctctttctaagcttataattgcttcccttcttgcgtcgcttctccttcttcatttcgttgatgctgatcaatcggcacatgcacaaacgcaggggtctcttcttcagcagatagatcgtaacggagcatgtgctgcgaggtgccgtttatcatctcgtccacgcctctgccaaagagcttgtggaacttgctgaagacgctgtaactgcgtgccacctggcactgctggaaaccaagaagtgtgtccctgctatgcaagtttgactactcatggtggcaaacgcaagtgcccttagacttaattggaccactatcctatgcatgcctttgatttat

SEQ ID NO: 23157 - DNA, 202 bp, Glycine max
gagagaaaatgttgaggaaggagggggggaggggaacggatctgctgggtgggactagataaagtgaagcacgctgacaagactaatggaagattggatggtggaaatggaatctgtagctgaaaaccctaattacccggcggtggactacaagcgaccttgcatcttgtcatttcctctgaggcccgacctcatagttaca

SEQ ID NO: 23158 - DNA, 411 bp, Glycine max
gaatagtgatcttataagcttggcagcatcgcagttacagagaaaaagagagagagagagagagagaaagtgtaatggcaatggcaacaatgggagagagtccacgaagcccagaagcgaagttggggatgcgagtggaggatctttgggacgttcaggagccacagttgagtcccactgagaagctcaacgcttgttttgaaagcatccctgtctctgcttttcctttggatccttcaaacacagaaattgagattaaatcagacgcgaccctagcagatgctgttaagatattggtgcgacacaacgtattcagcgcacctgtggtggatgttgaagcgcctgaagatgctagttggatggatagatacatcggaattgttgagtttgctggaaatttgtgatggattt

SEQ ID NO: 23159 - DNA, 388 bp, Glycine max
cggcaggatagcgagactgcatatgcaagtccatatggtgaggatgtcattaacgtaactgattcatatttcacatataatattcctcgtgcacctgaataatatctgcctcatagatgacttgtggagtaccctggacaggtggagaacatttaacctgttaatcctgcaaataaaattaagacagatgtctcatatgatctgattcttgtgtaatatcgacatacatcattcagcatttctacacagatgatctaaacaaagtttttattgagctattaaattaactcgcaaaaagcatatacgaatatctggatcatccttctaatgttccatctatcactatgtattccatgattctagaaccaagtttgtccagaaaagtttt

SEQ ID NO: 23160 - DNA, 180 bp, Glycine max
gctgattttaatacttcatatgcgagttcatagggtgatgatgtaattaatccagctcatttatcttaccaactgatagctatttaacacttaactaaactttgtgataatataaacgtctgcagcaagcttgacttgtaaaaatcattaaatcatgagatggattacgtcaagaatata

SEQ ID NO: 23161 - DNA, 219 bp, Glycine max
cgggaggatagtgagactgcatatggggttacatatggttaggatgtgattaatctaactgattcatatttcatataataaattcctcgtccacctgaataatatctgggtcattgttgacttgtggagtatcctggacatgtggagaatatttaacctgtaaatcctgcatattaaattaatacatgatgtctcatatgatctgattcttgcataata

SEQ ID NO: 23162 - DNA, 400 bp, Glycine max
  modified_base (389)..(389): a, c, g, t, unknown, or other
gacacctttgttcactcttcttctcttgcggctagggttttagcgcagcttcttctagatttaaggaagatgggtaaggaaaaggttcacatcagtattgtggtcattggccatgtcgactctgggaaatccactaccactggtcacctgatttacaagcttggaggcattgacaagcgtgttattgagaggtttgagaaggaagctgctgagatgaacaagaggtctttcaagtatgcctgggtgctggacaaacttaaggctgagcgtgaaagaggaatcaccattgatattgctttgtggaagtttgaaacaacaaagtattattgcacagttattgatgcgcctggacatatggatttcattaagaatatgattactgggacatnccaagctgact

SEQ ID NO: 23163 - DNA, 365 bp, Glycine max
gacactaaacaagttaaaagaagagcatcactgagctgacaaagcaaccctatgtcgaaggtggtttgtgtcaccggagccagcggcgccatcggatcatgggtggtcctactcctcctacagcgtggttacaccgtccatgccaccgtccaagatatcaaggatgaaaatgagacgaaacatttggaggaaatggaaggagcaaagagtcatctccatttttttgaaatggatcttcttgacatcgactccattgccgctgccataaagggttgttccggcgtaatccaccttgcatgtcctaacaccattggtcaagtcgaagatcccgagaaacagatattggaaccggcgataaaaggaac

SEQ ID NO: 23164 - DNA, 53 bp, Glycine max; identical to SEQ ID NO: 1282

SEQ ID NO: 23165 - DNA, 408 bp, Glycine max
gattacctataatttcagagctagctagttcacagcttcagttcgtttttgttgatcctgtgaacttatggctgacggggtggttctgttggatacatgggccagcatgtttgggatgagggttaggattgcattagctgaaaagggtgttgagtatgaatacaaggaagaaaatctcaggaacaagagtcctttgcttttgcaaatgaacccaattcacaagaaaattccagttctgatccataatggcaaaccaatttgtgaatctgcaattatagtgcagtacattgatgaggtctggaatgataaagctccaatcttgccctctgacccttatgagagagctcaagccagattctgggtagattacattgacaaaaaggtgtatgacacttttgaggaaatgtg

SEQ ID NO: 23166 - DNA, 424 bp, Glycine max
gacttgcggctgcagtagagaagcactcttcgttcttcgactgtctacgatctgctttctctgaattgtgaaaatgtcgctcggagaaactgcttgttcatacgcagctctcatccttcatgaagatggaattagtgtaactgctgacaagatcagcaccttgttgaaaactgcaaaggttccagtagactcttattggccaaccttgtttgctaaacttgctgagaagaaaaatcttggcgatttgatagcaaatgcggcaggcggtggtgcaccagttgctgttgcagctgccccagttgctgctgctgctggtggtgctgctgccgcagctccagctgctgaggagaaaaagaaggaagaaccggaagaagagagtgatgatgatatgggattcggctcggttgattagggacattctcaa

SEQ ID NO: 23167 - DNA, 419 bp, Glycine max
gccatcggacttgattatctctggatgaccataagttgtctctgtgtgccaatgaactcgcttgtctctggttggcaaaggggagattgcaatagtcttggtcgaaagacattgagtcttcaacaaagggagcagatgacgaagggaagactttaatagtctcggtcgaaagacattgaagttttcgacaaagggagcagatgaccatatttgtctttgcgtgccattggacttgattgtctctggatgacgaaggcgagactttaatagtctcagtcgaaagacattaagtctttgacaaagggagcagatgaccatatttgtctctgcatgccaacggacttgcttgtctttggatggcaaaggagactgtaatagcctcgaacaaaagacattgaagtctttgaaaagggggtaga

SEQ ID NO: 23168 - DNA, 388 bp, Glycine max
gaggatagtgagactgcatatgcaattccatatagttaggatgtgattaatttaactgattcatatttcagataaaaaatttctcgtccacctgaataatagctgggtcattgttgacttgtggagtaggctggacaggtggagaagatttaacctgtaaatcctgcaaaagaaattaagacagatgtctcagatgatctgattcttgtataatatgggcataaatcattcaacatttcgacacagatgatctaaacaaagtttttattgagctattaaattaactcgcaaaaagcatatacgaaaatctggatcatcctcctaatgttccatctcccactttgtattccaagattctaaaaccaagttgtaccaaaaaagtttcttt

SEQ ID NO: 23169 - DNA, 380 bp, Glycine max
ggtggcagagagcgaacccaaaactagagctaccttcccttcaaaccttccactcttctctccttttccaatcaagggaataatatttcttagagatattccgaaaccatggctcacgccaatcctatgatttttgttgttggaattctaggtaaccttgtctccttctgttgctttccagcaccagtaccaacattctatcgagtttgtaagaagaaaaccacggaaggtttccaatcacttccttacgtggctgcactcttcacttcaatgctttggatattttatgcttacataaagacgggcgaaatacttctcatcaccattaacgcattcggttgtttcatagagacagtttaccttgtcgtctatatcactta

SEQ ID NO: 23170 - DNA, 307 bp, Glycine max
aggcgttcgaacacgtcttataggactatatatatatatatatctaagactatcttagacaacgtggaatcatacttactacaaaatactgtccagttcaaaatactgagttatatatgtatttgaatgatgatattgaacattaccactctcagtttgacattctgaattgatcaaaattgaaagcatataaatatcatattttttaatttgttatctagagatatctcattagtcattcttgtttctactgtataattttactgctctatttcatacaaattgttaattactttcaagttgaaat

SEQ ID NO: 23171 - DNA, 427 bp, Glycine max
  modified_base (226)..(227): a, c, g, t, unknown, or other
  modified_base (260)..(262): a, c, g, t, unknown, or other
  modified_base (321)..(322): a, c, g, t, unknown, or other
  modified_base (345)..(346): a, c, g, t, unknown, or other
  modified_base (400)..(400): a, c, g, t, unknown, or other
gctcttgggcaagtagtgtgcctcttcttcgcagagtccgcgactcataaattctaaggggttccccgaaatgggaccgcctgtatcggaaaagatcacagaaagggggcgccaggcggaaagaaaagggtgcggcgtgccccacaagaagaaagccccggtttcaaaggtgcccgtcaaagcccggtcttctcaattctcccgtctggaaagaatatggcccgtnntatttgaagaaaagggaaggtaccgcctcagannngtgtcggtacccggtggcttcccgtatacccttggcttgcagttcttcgagataccctnnagctgccgaaggtggctttgagnnttggctgggaaatgcccagcacgttgaccaacccaagaagaaccagggattatntctcaaagaacacgttgcccttttggc

SEQ ID NO: 23172 - DNA, 376 bp, Glycine max
gacttccagaacaactttctcatcatcgaagcccgtcgcgagaagaagctgcttcgtcgcggttcccaaaatcgcgtttcccaagctccgtttcaaacccgtcgctatggctacgctcggcgctcgcatggtggccgccgcacccaccgtcactccgccggcctcgctcgacttcgaaacctccgttttcaagaaggagaagattaacctcgctggacacgacgagtacctcgtgaaaggagggagggatttgttccctctgttgcagggtgctttcaaggggattaagcagattggcgtcattggatggggttcgcagggacctgctcaggcacagaatttgcgggactcgcttgctgatgcaaagtctgatatt

SEQ ID NO: 23173 - DNA, 368 bp, Glycine max
tactttagaagacgtgctgcagcctgcgggttttctcattgaaatttatgatattcttggtaacctcaagaataaaaactcgtgaatgaggaagagaacaccatcatcttttcttctttttttttgacaatgaaccggcgtcattgaaaaaagaaagatgatgaactaaagcttaaacttattcttaaaaagggaaataaagttgaaacctgagaattgagatgatgaaaaattacattatttggctgatcggtaagaagctatggaaattacaattaccgatacagagcacttttcaaattaaaaaagaacgttacagcatagtgaagttcaactattaccgttcatgtattgcaatataatgaact

SEQ ID NO: 23174 - DNA, 372 bp, Glycine max
gacaggaggtgatactagatatcacactacatagttagcaatagtgaataaattaggacatatgtactaaatggctggggtccataaatggtatcatactttttgaacacggacaggtcctttctatacaacggagcctttctttcttttcattcttattacatgaacctaatgatattgttaacttgtacaggtcacactatttggctctacccatccaatatttagttcagtaagtagattttttcacaatgaaatctagttatacagtaacggtatttaattatgaaaatttgctgggtagctgaccttcttattccgttcgtccaaaatccatcaaaattcattcattaaggacatactttatcttta

SEQ ID NO: 23175 - DNA, 364 bp, Glycine max
gatcacaaatctttcgctaacactcattaatggcgagaatggcacttcggtgcttggtgatgtccctttctgttctcttcactcttggtcttgcgagagaaagccatgccagagacgaagatttttggcatgctgtttggccaaacactcccattccaagttcattgcgagatcttctaaagcctggccctgcaagtgttgaaatcgatgatcaccctatgcaaattgaagaaacacagtacccgaaaaccttcttctataaagaagaccttcatccaggcaaaacaatgaaagtacaattcatcaagcctccctttcaacaaccatggcgtgttggtacatggttaaaggaaattaaagacac

SEQ ID NO: 23176 - DNA, 387 bp, Glycine max
catcctcaccacttgtatttttgaaatctttcatcttgttcttctctttattgtaaagaaggcttcctggtacggaaagctaaatcctctgttggatcttccctgtaggtacctgatgtaaatatatttttatctatttaatgatgttttgtgtgttctctatgctatctgcttttcattccaatattcctttaccttgatcacgtagatgcatgctttgttagggtcattcaacagtggaaactggtctgactctaaagtccttgatagtacagggctaagttgtcgtactatcatgaggaatcggggtgcgatagcttagttgtgtatgactgtcttaatgcggtcctggttgagcttagtcttacaagaggaatttacggacgc

SEQ ID NO: 23177 - DNA, 377 bp, Glycine max
aatgcatgatattatatgaactgttattcctaaaaaaagttatataagtttttaaagtctttgatcatactttttaaacaatgtaaacagattcgaatttaaaaactgtaatatcatatcccatttcttcaaaaatccaacacatcaaatatagaattataaaccaaatattattctacaagaattaagattgagattaaaagtacgtgtttcaattctcgtgtctaatgaaatttccttttgctgataaaaaaatgtgtttcaattctaagttaacatctgaattgaccttgattatatatttctctctttttgagaaatagaaaaaaattgaagaaaaagcaacataaagaagtgaaacacacacactacactgg

SEQ ID NO: 23178 - DNA, 381 bp, Glycine max
agctggcatagggcgaacccaaaactagagctgcctgtgataataacctaatactcggatgtcctattacaatcacggtattaatatactatagagacagtctaaaaccatggcacacgctatcactatgagaatcggaacgggaatactaggaaaactggacaacaaaaggagtcaactagcactcagtctcaacataggagacagtgcatctgacgacgatcacggaaacccagccatgtcttcactacgctggcgcaacttttacactaacacggcttactgcttaggtctacatagttacgtctgtaagacatttatgactggatgcctaattctttttccagatgctgtcaccttattcattacatggtggtatat

SEQ ID NO: 23179 - DNA, 343 bp, Glycine max
gaagacgacagaaggggataccagctcatgtgatacagtctgtcaaacatctatgtttctgcgtttttgtgtggaaaacgagttgttctgatcttcctaaaagttgaactggcttttcttcttttcctggagttgttgccaaccaaattattcctctcttcacttactactactttcttctttctttctccacctgaagtagttctccacaacttggaaggtgatcatctccaattttccatcatggctactgagacttctgcatctgatcatgcttctactactgatgagcattatgtgaaagaagaaaagggacgagtccatttgcacaaaaagatcgctt

SEQ ID NO: 23180 - DNA, 428 bp, Glycine max
agaagggtctgaacagtataataactcttgaaaaatctattttggagtaccagaggtatgtggcggccttttaagtgttcatatttgtatgtgtttcttcaaccggcacttggttttgtgaaattagtttttttactctatgtattcactgtgcagataccctcataagatgcatcaatcatttagttttggactccgctgattcttctgaagtaccaggcactattcaaatgcatcttttaatttgtacttttagtctatttgattattaaagaaccagattctgaaacttgtatttttttccttcttatcttagtagattttccccgacatgtttttaaaatcttgttatacctcattcctctatggaagaatattgaggaacgggtgaattttggggcaaagaaaactttattataataactttt

SEQ ID NO: 23181 - DNA, 279 bp, Glycine max
cgacataacaaaagtacactgtcgctctaactgcgcgttaatctaatattcggaggtactacttcagttctcctactctcttctgcttcgcctaactattttcatattctaacacatgatgaacctcgggttaccgaacaacctacagctcttttacgcaagactggttattcgcatatggcttaacatccctagtatccagcctcattacaccccaaacccttatcacgattatgacgcacaccttgaaagtgattcagataccgtttaatgatcaaa

SEQ ID NO: 23182 - DNA, 420 bp, Glycine max
  modified_base (388)..(388): a, c, g, t, unknown, or other
gcttcccatttgatgaccacaattgcccttgccatttaggctggaatggcaaggacaggattgatgatttatagtcttctagtattcttaaaggtgaagagtttctaagcattttctaacgtgcctggtatttgcattttctaatgtgcttggtacttgttctgcttggtattcttaaaggtgaagagtttctaagcatttttctaagcatatattttataggtgcatgcttaggggatttcggcttcacagatgcccttactgaattaggtcctctataaccgtctcatatcataatggtatgcttgccattcttgtactaaaatctctcctactgcttatagtccatgaccattctgttagtagatttataatgtcatgttattgntgttccttttcttgattaagttcttgatattt

SEQ ID NO: 23183 - DNA, 279 bp, Glycine max
gccacacgaccacacaactgtcaaaatacaacacaaaatgcagcttcaatgggctaaattgagaatcaagagctaatactataatacactgactgaataaactatccctaatcttacatataatactatctccataccactgcctatattccattactattgctttaacagatttctcatccagaaactaatatcttgactaacaaacctaggatgataatacttcaattcatgcaaatatccaatagaataacaccttaaaaggatctgaccaagtta

SEQ ID NO: 23184 - DNA, 354 bp, Glycine max
ggaagaaatgaagcagctgccaacgctgctgatgaagtccctctcactctcagtgtgttctttgccagcagcagcttccacaaccacccttcaacaaattgctctccatcaacccaaaggtgttgcaaaggttgtacttaaaaaggggaagacacaactctttaaggatggcaacccaatggtgtacagtggagctgttgatagaataattgggaggccaccttccaagaccggggatgttgttctggtagcagatgggactgagaaaccaattggatggggcatgtacaactcagtttctatgttctgtgttcggctcatgcagcttgaagatgaagctactagcgattcatc

SEQ ID NO: 23185 - DNA, 250 bp, Glycine max
acccaaaggtgcactcatgctgatgctaagaatatatttatagagtacattattgtataataggactctctctaggtttcatcctaacttactcgcgccttcttctgtcaaatttttctatagtctatacctatatttattttattgactttcatattacatcctttatactttgaaaaccttctcaatacttaacttatttaatcgtcatcaaatacttttttatataattaatactattacttacata

SEQ ID NO: 23186 - DNA, 384 bp, Glycine max
gactctaatttgttttagtaaaagaaagaagaccagcttgttcggttgttgtgttgttctaaatgggtgctacctctatggtccgaggaggagtcacgaggtttctaccccgaagggaatcattggggtgcgagaaactacaacttggagttggagatgtggagtttgaatttctcgatgatggtgagatgatgatgtcgttggtcaaaagtgatgaaagttctggcgatgagtttcgtcaatccaatgaaatggaattggatgatgatgatgacggtgagagggttgatggtggcagcgttgaggagaatagaagcttttgggataatcaacaccagcttttgcagaactacctatatagatcaacttctattgagtcaagga

SEQ ID NO: 23187 - DNA, 447 bp, Glycine max
ggcaaccagagaattgacattcccagtagatgaaaggggaaccatgaaatctgttgtggagtgcttctatgagacatatgggtttgtcattcaacatactcagtggccttgtctgcaagttggcaatacacagagacctaactatttgccaatggaggtttgcaagatagtggaaggtcaaaggtactcaaaaaggcttaatgagaggcaaatcaccgctttgctgaaagttacatgccagcgtcctgttgagagggagcgtgatatcatgcagacagtacaccacaacgcataccatgaagatccttatgccaaagaatttgggatcaagatcagtgagaagcttgctcaagttgaagctcgcatccttcctgctccatggctcaaatatcacgatacgggcagagaaaaggattgtcttcctcagttgggcaatggaatatgatg

SEQ ID NO: 23188 - DNA, 384 bp, Glycine max
gggcagagagcgaaccccaaactagagctaccttcggttcaaaccttccactctggtctccttttccaatcaagggaataatatttcttagagatattccgaaaccatggctcacgccaatcctatgatttttgttgctggaattctaggtaaccttggctccttctgttgctttctagcaccagtaccaacattctatcgagtgtgtcagaagaaaaccacggaaggattccaatcactttcttacgtggctgcactcttcacttcaatgctttggatattttatgcttacataaagactggcgaaatacttctcatcaccattaacgcattcgggtgtttcatagagacagtttaccttgtcatctatatcacttattgccc

SEQ ID NO: 23189 - DNA, 295 bp, Glycine max
gatattaacagccttaaaacattggatttagggtgggatcttataataagatgaaaattgcgcttctcagattgacacataagaatgtttaaccaatagtatgaatggaggtacaagtccagcttaagttgaactttattaagggaaaaaacacctatataaccatcatgacctcatgttgaacagcgtagctgttagtcctttactatgcagggcaattactactagcgctgacatcattattggactagcattgaaatagtcaccaatttgaatcagcttgtgcgactgaaca

SEQ ID NO: 23190 - DNA, 349 bp, Glycine max
gatcatttacaatttcaatgtcgctctctctctgtgggtgtctctctagacttagattttgtgaatggctgaagtggaagagggacacgtcatcggcgtccacaccgttgatgagtggaaactgcaactccagaatgcaaaagactccaataaactgatcgtggtggattttactgcttcctggtgtggtccatgccgttatatggccccagttcttgcacagattgccaagaaaactcctgtattgatcttcctcaacgtggatgtggatgaagtgaggcctgctgctgaggaatattccattgaggccatgccaaccctgctcttcttgaaagatggctagatcgtg

SEQ ID NO: 23191 - DNA, 397 bp, Glycine max
ttatcaattataaggcttggttcaagtaaagcgtaggctttgtatatcgaaggaatcgattaccatttatcgtaattgattacaaagcatctaaaacacttagattgcttgttggacattgaaataattgattaccacatattgtaatcgattaccacgattctaaaaatgcagaataatggtatttaattaatcgattacagttacttgtaattgattaaatctgtttttttttctactaaatctataaatacctcacttgttctatctcttatatgactttctgcgaaactatcacttcataatatttctaatagtcatctaaagaggttttgatgcattttccctcaagagattgactcagcataaatcttggaatcttcatcatgggttgatc

SEQ ID NO: 23192 - DNA, 254 bp, Glycine max
tgacgacctatcggacaacaattcaaggggctgtaagtgcgtcatctttcgtcaatatgatccttatgtgcattaagacgtgctgaaatttgacaacggaggttagtcccataatcattatacctttggaatctaacgacagccttctcctgtctgccaggatatgaccattggttgcacaatgtgtacagattgcattacctatgctcattctactgtacattacacaacagcatttgtcactcttacatcat

SEQ ID NO: 23193 - DNA, 403 bp, Glycine max
ggaataaatgaagcagctgccaacgctgctgatgaagtccctctcactctcagggtgttctttgccagcagcagcttccacaaccacccttcaacaaattgctctccatcaacccaaaggtgttgcaaaggttgtacttaaaaaggggaagacacaactctttaaggatggcaacccaatggtgtacagcggagctgttgatagaataattgggaggccacctcccaagaccggggatgttgttctggtagcagatgggactgagaaaccaattggatggggcatgtacaactcagtttctatgttctgtgttcggctcatgcagcttgaagatgaagctactagcgattcatcttgtgcattgaatatggagaaactgattgaaacacgaattgatgcccct

SEQ ID NO: 23194 - DNA, 384 bp, Glycine max
gactctcttgtaagcgagtgaacggaattaccaggtgcacggatagatatctgggcatgatgagaatgagtggacttacatggtcaatgctaaagagtgagctgagaaatagaggggagagaaagagagagaatggaacagattctattgattaatgagaaaatgaaataggctcataaagcagccatggctaaacgatgggaagacttcaagaaaataatgaaggacgaccagtagaactagtttaatcagttggatatgatcgagaacagtgccatccattttgcaactcgttctaacagtccacgaatcctcatagaattgatagatatgttaccaaatgaataaaggtagcaagctttgttcaaggaaaatcgcaaaggg

SEQ ID NO: 23195 - DNA, 405 bp, Glycine max
ggcctactgtcctgttgttcatgcatttgctatggggacattcaattctgctgtcatttatgtggacaaacaaaaggtttctgttgaggtacaaactcatttagtggagaatggaattgaaattcaagagtatacagccgtaagctctgatgcgacattgcttgcaactgatgagctagatgctgtatctactgccaaggctgctttagccgaaacagaggccagaaaaattcccagtgaaattgataagagtgtaaatggtgaacatcaagcagaagaaaatagtaatgacctcatatgggctgatccagtttcatgctgttatgcactgtatgcaaagttgaaccccgatacagttctcttgcagcaatcacctttagcccttgcaaaagctttaaagaactc

SEQ ID NO: 23196 - DNA, 347 bp, Glycine max
gactcataatctgagactactgagtggttcaaaggtgagaagtcgccaagatgggtccattcagtcacaagggtcaaatgataaagggcactatggtggttatgcagaagaatgtgttggatatcaacagcatcaccagtgtttaccggatccatggctccgtcttaaactttttaggcattgcacttgattcagttacttttttagcctacttcatatgcatccaacttattactgctaccaaagctgatggtgctaaaggaaaagtatgcaaatgcttcaaatttgagaggaaagataacattacccaccatatgaactaacgaagaagcatactatgctcaatt

SEQ ID NO: 23197 - DNA, 52 bp, Glycine max
  modified_base (19)..(20): a, c, g, t, unknown, or other
tgcacgtacctcggtccgnngaattcctcgggtcggacccacagccgtccgt

SEQ ID NO: 23198 - DNA, 174 bp, Glycine max
aaattaaagtccttgttttcttcgttgcttcaattttggtagcatggcaatgccatgcctacgatatgttccctctccgaatgaacacttgctatggtgcccgtacttcggaagttaaattctcaagttggaagctttgctgtgaagcacacaacatctttggcttttagacca

SEQ ID NO: 23199 - DNA, 428 bp, Glycine max
gacctagtgctagtagtaaagagtagaagaacgtgttttttcatattgttttgctatcctaatagacgcgaggactattttaaaatccggaccgtcgaatcggaccaccatcgttccaccggcgccgtcgacctcaaaggctcgaaccaccttccttctactcaactgcactcgcactcgtcggcgcaagctcccaccgtcgcacgcctcagccgcttccagttaacaagggaaatagcatttggtcataagaaaggaaggaaggaaaatggtgtttgggcaaatagtggttggtcctcctggctctggcaaaacaacttactgcaatggcatgtctcagtttcttagtcttattggaaggaaggttgctgttatcaatttggatcctgctaatgattcgttaccatatgattgtgctgtgaacattg

SEQ ID NO: 23200 - DNA, 131 bp, Glycine max
gactctattgtaagcgagtctacggtaataccagaagcacaggtagatatatgggcatgatgagaatgactgcacttacatggacctagctaaagattgacctgcatgctatagcttagagaatcagtaga

SEQ ID NO: 23201 - DNA, 425 bp, Glycine max
ctctattctttaactactacatttttataatcataatttgtagtgactttttcttatcctcaagtaaaataatacgatgaagtagacggaataatacataaataaaacaaaatccgcaaagtttttgagttttaaaaataaatttgggaataaatatcaataaattataattaaataaacaaatttaaataaagataaaagaagcaactttatgtaaagatgtttgtgccgtcgtatgttagtatataatttaattttaatatacttattagtctaagttttattatcaattaattaaaaaatttcctgaatataatttcaatatattattacaaaaataatattatgaattgccgttgttaactcttaaataacaattcaaagtagatctctaattaatttcaaagctttacttaaggattttt

SEQ ID NO: 23202 - DNA, 407 bp, Glycine max
tacataacaatttcccttagagtgtggaagattcaaggtattgttaggttaacatttgaacatgtccgcttgtccaaaattcattagaacatcaataatttatacttattgttattcatcaaaatccaagatagatgagaagattggttgtccagacctaacatatgatacaaaaccctatagcaagtgacaaatcgattccccccaaactaatttttcacttgctttatattttctttacgtaattaagaaatgatgaatcaatttcttaactattttttatacacttttagaaatagattccctaggaactgatttctaaacatccttttttttagaagccaattatgaaattagtttccaagaaccgatttcataattgttttcttatttttttcaatgttttt

SEQ ID NO: 23203 - DNA, 188 bp, Glycine max
gaccacctaagggtacctttactataccttgcatgcggggtttttggggggctatggatttcattggctatcatctccttcaaggatcttaaaacctcaataatcgatttctctaatccggattaatattgtgccataatctatatttacaatatcgtacttttgactgaacctatccaccaacatta

SEQ ID NO: 23204 - DNA, 316 bp, Glycine max
gattcctcaagaactagggtttgcagtcactgcgctgtttcaccgagtttgggcgtttagatcagaaccaaatcgtgttctcttccattggcaaacacggcaactcaaatgagcaagaagagaaagtttgttgcggacggagtgttctttgccgaactgaacgaggttctgacacgtgaattggcggaggacggttactccggcgtcgaagttagggttacgccgatgcgcaccgagatcatcatcagagccaccagaacccaagccgttctaagtgagaagggaaggagaattagggaacttacctcagtggtgc

SEQ ID NO: 23205 - DNA, 389 bp, Glycine max
gacaacaccacacacagatcaattgcaacggttgaattttgactgaagacaaagttagaaaaaaaaacatgtcttgctccgtcgcggtttccaattcgccggtgttctctccttcttcttccctcttctgctcgaagccctccatcatctcttcttcgccggaatccctctccctctctctgtcgcatctcaaaccttcgaactcttctacgtcgtcgtcttgttcttcgccttctgctgctgctgcttcttcttctccttcttctccgtttcgacttcgccttaccaagccttccaccgcgttctccgcgtcttctgctgcttctgcttcgtctacctctccgaactgcaccgctttgaagaggaagcgacccgctatggtggacata

SEQ ID NO: 23206 - DNA, 382 bp, Glycine max
cacgctatcagttacatgacataatacagagtgttcaattagagcataatgggatccaaaaatgcaaatgggaagaaccacaaggacaaaaggaacaaatttaaggataatttgagttctagttattcatcacccagtgatgccaaggttatcctcatcagtgatcctcgatattcaaaggctcacacggatcctcggttccgtgaggctccaaagcgtgaaacgaatgtggctgttgactctcgcttcaaccgcatgttcactcacaagagttttttgccctcttctgctcctgttgacaagagaggcaagcccaagaacaacccaacctctcagattggttctctgcgccgttactacaaaattgatgaaaaggaatttg

SEQ ID NO: 23207 - DNA, 423 bp, Glycine max
gatcacttattaattgtgttaagaaatttaagtgaggagctagagaatgatgatgaagtctgctatgtgtgcagtggtggttgtagcacttcttcttctggcggaggtggggcccatggctgaggctgtgacatgcaccccaacagagttgagtccgtgtcttccagcaatcacttccggtgctaaaccttccaatgcttgttgcacgaagctgaagcagcaaaaaccatgcttatgtggctacctcaaaaacgctagcttgaagcagtatgttaactctcctaatgcccgaaaaaccgttgcttcttgtgggattccctttccaacttgttaattaattaagccttcttataattaaagtgtgggatatatatatatatagataaacagtttaatttatacacactttgatcctacaaagca

SEQ ID NO: 23208 - DNA, 200 bp, Glycine max
ctcgattacttaacgactacctcatcatacacatgggtggccaacgacacttgctgatgctcacgtaaacaagtacgatgaagcagacggcatgattcatcgatgccacaaaagccggacagcatttgagttgtaagcacggatttggggatagatgtcggtaaaccattgttagattaacggatctcaataaggattgg

SEQ ID NO: 23209 - DNA, 338 bp, Glycine max
agggatcactcattaatcgtgttaataagattcaagtgaggagctactgaatgcagaggtagtctactaaacatgccttgctgcgtctcgcacttcaatttctcgcggatgtctcccccatggctgacgctttgacatgcaccccaacagagtttagtccgtgtctaacagcaatcactttcggtgctaaacctttaaatgcttgctgcactaaactgaagcatcataaaccatgcttatgtggctacctcaaaaacgctagcttgaagcaggatgctaactctcctaatgcccgtaaaaccgctgcttctgcgggattccctttccaacttgttaat

SEQ ID NO: 23210 - DNA, 408 bp, Glycine max
ggagtgagcaagagtgaagagcgaagagaatggctcccaagggtttaatctttttggctgtgttatgcttctcaacactgtcactgagtcgttgtcttgcggaggataatggacttgttatgaacttctacaaggaatcatgccctcaggctgaagacatcatcaaagaacaagtcaagcttctctacaagcgccacaagaacactgctttctcctggctcagaaacatcttccatgactgtgctgttcagagttgtgatgcttcactgttgctggactccacaagaaggagcttgtctgacaaagaaacagatagaagctttgggttgagaaattccaggtacattgagaccatcaaagaagcctatggacagggaatgcccaggatttgttatctgggctgatatt

SEQ ID NO: 23211 - DNA, 383 bp, Glycine max
agcgaggatgagatattgcacgcgaggattttgaagaacttcacattcaatgagctaagaactgctacaaggaactttcgtccggatagtatggtgggcgaaagtgggtttggatgtgtgtttaaggggtggatcgatgagcatacacttgcccgtactaaaccagagacaggaatggtcattgctgtgaataggcttaaccaagaaagcaaccaggggcacattgaatggttgacagaaatcaactacctggggcagctcagtcattctaatcttgtgaaactaattggttactacttagaagatgatcaccggattttggtgtatgaatttgtggccaatgttagtttggataatcacttgttcaagaggggttcttactt

SEQ ID NO: 23212 - DNA, 447 bp, Glycine max
ggttctagtgtatgtgattgttgtgactcgttctgcttcgtcgttatcttcttcttttgttgtttgtgtgtttgttttttctctcacctgaaaatgtcttgctgcggtggtaactgtggttgcggaagcgcctgcaagtgcggcaacggctgcggaggctgcaagatgtacccagacttgagctacaccgagtcaaccaccaccgagaccttggtcatgggagtggcaccagttaaggctcaattcgagagtgctgaaatgggtgttcccgctgagaacgatggctgcaaatgtggagctaactgcacctgcaacccctgcacttgcaagtgaggtgttggagagctaaagcttcaagcagaaatggcccttagaaataatgatgaaaactatatgtagtttcaaaacttcaaaattatgtagtatgtattatgttgcactctggtg

SEQ ID NO: 23213 - DNA, 426 bp, Glycine max
  modified_base (325)..(325): a, c, g, t, unknown, or other
  modified_base (371)..(371): a, c, g, t, unknown, or other
  modified_base (378)..(378): a, c, g, t, unknown, or other
  modified_base (402)..(402): a, c, g, t, unknown, or other
ggaaaggagatgtttgaataaaaataattcccctgcaagttctgattttttgagaggactggacaatatgaatgttttattatgctctatcaacacattaaaaagattatatgatatatctgctgtggaagtaggtcaacatttctattggcaaatagggagtttccaagtacatgcccaagtacttattacttcttgggttgtaattgctctcttattggtttcagccattctaattattcgaaatctgcaaaccattcccgctttcggtcagaatttctttgaatatgttcttgaattcattcgagacgtgagcaaaactcanattggagaagaatatggtccgtgggttccttttattggaactttgnttctatntatttttggttctaattggtcggnggctcttttaccttggaaaatcat

SEQ ID NO: 23214 - DNA, 436 bp, Glycine max
actagtgcttattctacattttctactgctatgtactgggtggtagtttttaacataaacaattttgagggctagtggatttcatcttttggtataccaaacatgggtggtaataacaatcatgcattatattttcacccctgcaaggtggttttttgtaactaacatgtccccttcttaattatggattcatttagggtctttggaacatggccaaccgcattgttagctgcacacaggaagaaagtgaaaatcgaaggacctgtatgtgattcatcacaagtcattggttggcatcttaaggatatgaacaatgaaactgatacaatcactcccccaattcatatttcaagttttgcttttaatagctccatcctttgggaccctgagagatggggtcgcacttcctctgttcaagacacttctcatgtataca

SEQ ID NO: 23215 - DNA, 413 bp, Glycine max
ggcaggctagagagagaaagacacggactgagaaagagagaatgctctgagtttcagagacactgtaatagagagagaaagagagtgtgagtttgcgatgatgagaaccagagaccgaaagagcaaaacgacattcacaaatctgcgcaaacctctcaatcttatttcctgagcattctcttgcgttttgtctccaccgtcgtcgtttttgtttcttgaagcatttcgcgcgcgagggagggtaagatgagtcgtttagggttcaagcacgaggtgtacgacggcgacaagcacatcggcgaactagatttgattcctccgtcgtcgttgacgacgacgacgccgtttcacaacaacttccgcttcccgaacaacgagattcgcatccaccacttcagcgcgaagagcgagcg

SEQ ID NO: 23216 - DNA, 369 bp, Glycine max
accacaaggacgaggataataagccagtagaaaccgatactggttacgacaacacatcatattccaagccttctgatgactatgactctggtttcaacaagccatcgtatgagtcttctggcggtggctatgaaggtggttacaacaaaacatcttattctagtgatgagccagcttctggtggtggctatgaaggtgggtacaagaaaacaggttattctggtggcattgatgagacttctggtggctatggcgctggtggtggtggatactctgacgtcactgatggtggctacggcaaaccaagtggtggctatggcgccggtggtggtggtggtgtgtaccctgacactaccactgatggtgggt

SEQ ID NO: 23217 - DNA, 98 bp, Glycine max
ccatgcatgctttatatctaagagagactatttgcacagaaagttttattgtataactataagattgaacttatgaatgttaatattacatcaaaatt

SEQ ID NO: 23218 - DNA, 132 bp, Glycine max
accacatggacgaggataataagccagtagaaaccgatactggttacgacaacacatcatattccaagccttctgatgactatgactctggtttcaacaagccatcgtatgagtcttctggcggtggctatg

SEQ ID NO: 23219 - DNA, 418 bp, Glycine max
  modified_base (411)..(411): a, c, g, t, unknown, or other
ccatgacagcttgatagctaagagggactagttggacagaaagttttattgtataactctaggctcggactcatgagtggtaagttgaggtcaaagtggattgatccttttgtggtgactaatgtttttccttatggtacaattgagatcaaaagtgaatccacagataagagcttcaaggtcaatggacaatggctgaaaccattcctcataaatccctccttagtggatgtagtgatggaggagacctccttacttcatcctacttctcttccgccatgacttagggagttttctttttctgtctccttctttacttttattgcacttgtccaaatttattgattgttctgattgctcttgatcttatgattatgctacattgaggacaatgtgttgtttaagtgtggnggggggg

SEQ ID NO: 23220 - DNA, 398 bp, Glycine max
aagaacatggatgccataatgggaaacatacgaccacaggagtctgaataccaggatgacaagaatgaaccgaggaatgtggttgtagcaggggaatttgacaccagtactgtgcagttcataaagaatgaagatcttgaagagttgcgagagctgggttctggtacatttgggactgtgtaccatggaaaatggagaggatcagatgttgcaattaaaagaataaagaaaagctgcttcgctggtcgatcttcagaacaagaaagattgaccatagagttctggcgggaagctgacatactttccaagcttcaccatccaaatgtggtggcattttatggtgtagttcaggatggaccaggagcaacattagcgactggtaccgagttcatggtgga

SEQ ID NO: 23221 - DNA, 371 bp, Glycine max
ggttctagtgtatgtgattgttgtgactcgttcgtcttcgtcgttatcttgttctcttggtgtttgcgtgttcgttttttctctcacctgaaaatgtcttgctgcggtggtaactgtggttgcggaagctcctgcatgtgcagcaactgctgcggacgctgcaagatgttcccagacttgagctacaccgagtcaaccaccaccgagaccttggtcatggtagtgtcaccagttaaggctcaattcgagagtgctgaaatgggtgttcccgctgagaacgatggctgcaaatgtggagctaactgtacctgcaacccctgcacttgcaagtgaggtgttggagagctaaagcttcaagcagaaatggccct

SEQ ID NO: 23222 - DNA, 427 bp, Glycine max
ggtgtgcttctcgtgccttctttcactttataacgcactctcaccccttccctcatgtgatttcttcttccccttctgcacttcttcatctccttcttcactcacacatcaaaataaccaaattctcaaaaattaccctcaaaatatcaaccacagcactaaatctttgatgatgccccctcagcaagaaacctctattacatcaaacattccggccatccccaaccggccggaaaacagctacgtccatgccgaaccaccgagctccgccaccaacgacattaaacccactttcacgagcaatgacattcacagcaataattcttctcagcaccaccaagcagctccttcagcacccagattttctgttcttcagcaatccttgcgccctgttaccctcaaatttgaggatgtttcctacagcata

SEQ ID NO: 23223 - DNA, 418 bp, Glycine max
gggagcgaagtgaatggaaattgaggtgactcggggtgagttgactcagcaatggcggaagaggtgactcgggtgatggtggcggtgaacgagtcgagcattaagggataccctcatccttcgatcagcagcaaaggggctttcgactggaccatcaacaagatcgttcgcgacaacgtctctgccttcaaccttctttttcttcacgttcaagtccccgatgaagatggttttgatgacatggatagtatctttgcttctcctgacgattttaagaacatgaatcagagagatagaattagaggagttcatctgctggaatacttcatcaataggtgtcatgaaattggggtggtttgtcaagcatggataatgcatggtgatcccaaagaagtaatatgtcatgaagtgaaacgac

SEQ ID NO: 23224 - DNA, 442 bp, Glycine max
gaaaagagagatgggaaccgttagtaacattggctgcccttcactattcagagttcatctagattcacaagtactatcaaagcatatgaagaataaatcatcgtgcgattttatggttccttctaatcataactactctgttaggctgagtccaatatgttgtaagctatcagaaagtgggattgaggagaaccgcacgagcacgagcacgggcgagaggccctctaagatcaaggacaggatggaggagtacaatatagctatgaagaaaatgatgaggaacccttatgagtatcaccatgatctgggtcagtttcatctctatcctattattgtttattggtaccccctacaacatttgacatttgctacctagtacttttgtttgatctatttctatgaaatgctacatatgtttgatatgattatgatattgagaaat

SEQ ID NO: 23225 - DNA, 392 bp, Glycine max
gcattttcccttgtctcttccttggtctctctacaaagagtgtgtgtgagagagagaaggatttggaattttggataactagagcgaaagcgtgacaccaccaaaaaccgaactgttcccagatctccctctctctctctctcttccaacaatccaaatccaaatccaaaaccctaccaacaccacactcaatcgatcgatggggcagaagtctctgatctacgcgttcgtgtcgcggggaactgtgattctcgcggagtacacggaattcagcggaaacttcaactccatcgccttccagtgccttcagaagctccctgccaccaacaacaagttcacctacaactgcgacgcacacaccttcaattacctcggcgacaatggctacacat

SEQ ID NO: 23226 - DNA, 408 bp, Glycine max
gtaccaaagacggtgagtttatcagcaaactacctttacttcagtatattcactccaagtggggccttctcaatgttgcagctaaattgcctcattactccttgcagaatgatgtaggacccaagatatatatatcttatgggattagtgatgaacttggtagaggtgattcagtgacaaatctccacttcaatatgcgtgacatggtgtaccttttggttcatacaaatgaagtaaagctgaaggactggcagagaactaaaattgaaatgatgcaaaaagctaaagctaataaggaatttgaggcaaaagaatcacatggggatcctcaaatatcttcaagggggagttcacctgattcctcacttggtacaaaaagtagtggactggaaatagactcaaaccaga

SEQ ID NO: 23227 - DNA, 311 bp, Glycine max
gcgcatagagattgataggacaggaaggatacctatgttgaagctccgcgatcgagagtcatatgtacggaataagacaaaggaatatgatgatattgctatgaagtatttgatctatgttctatttctccttgctgctggtttttctggctactagctgatgtatgagcgtcacaagagctggtattcttggattctgtcttcggtcacaagttgtgtatacatgaacggctgtattattatgggccctcaattgctcatcaactactagcttaaatctgatgctgatctaccttgggagaaatgacata

SEQ ID NO: 23228 - DNA, 431 bp, Glycine max
  modified_base (401)..(401): a, c, g, t, unknown, or other
  modified_base (405)..(405): a, c, g, t, unknown, or other
tctgtccagttacaacataccgttggtggctgatgttcattttgctccctctgttgctttgcgggtagctgaatgctttgataagattcgtgtaaactctggaaattttggtaagcatctcttcttaattcattagtcttatgtttttttctatcatttttttttcatgtgttggctttcattctgattccaagatgttggtcttctacagctgatagacgggctcaatttgaaacattagagtacacagaagaagactatcagaaagaacttgagcatattgaaaaggttaaatcatccatctgttagttttataactcaaatttcagtgaagagcatgctgtatgctaatttatcagtacttcttttgaggtccctcttctgtcatacacatatacatncctncttagtccttactgaagatgtgggaa

SEQ ID NO: 23229 - DNA, 455 bp, Glycine max
ggcctgctacatttcaccaccccctttatccttatctcctctcttcttcatttgttctgctcgtcccctctatttaaagctcacacaaagggatcatataccttggttgcactttggtaaggtgagagaataggaaaaagggaaatatggcatttgcaggaacaactcagaagtgcatggcttgtgacaaaacagtttatctggttgataagttgacagcagataaccgagtgtaccataaggcttgcttcagatgccaccactgcaaaggaacactcaagcttagcaactataactcttttgagggggttctttactgcaggccacacttcgaccaactgttcaaaagaactggtagtcttgacaaaagcttcgaagggacaccaaaaattgctaaaccagaaaaaaccggtgaagaagaacctgcagcaaccaaagtcttaagtatgtttggt

SEQ ID NO: 23230 - DNA, 308 bp, Glycine max
agtctttcttggtgtgatattatgcagtttgggaggatgaatgtccctaatagtgatcataatgcgccaactgatgagaagactgagctgctgtagacactgcaatggacgtgaatggtcctcatgagagtaatccagattactgtgttcttgccggtagctgatgcaccatcggaggctactgtcgttgtggtggccaccatttagcatgattgtcgatgttcatgagtaactgatgcataagatcaactatcattacaccaatggctaatgcttgaatgcctaaaaattacactattactactcct

SEQ ID NO: 23231 - DNA, 411 bp, Glycine max
aaccacaagctcaccgatgctgttcttcctccaacgaaagactggagaaaagaaggtatagtgagttcagttaaagatcaaggcagctgcggatcatgctggacattcagcacaactggggctttagaagcagcctatgcacaagcatttgggaagagtatctctctttctgagcagcagctagtggactgtgctggccctttcaacaactttggctgccatggtgggttgccatcacaagcctttgagtacattaaatacaatggtggactagagacagaggaagcatatccctacacaggaaaagatggtgtctgcaaattctcagctgaaaatgttgctgttcaagtccttgactctgtgaatatcaccttgggtgctgaagatgaactaaaacatgcaagtgcattt

SEQ ID NO: 23232 - DNA, 301 bp, Glycine max
gatacataccctttgcacattcttcttcttcttcttggtctctttctctctctgaagcaagtgcagagcaattaataactcaagttttgggtcactccgtgaccgtgatgatcgtaaagttattgtcttttgagtgatgggtttgtgctcttcggtccccaaaaacgctaacgaagacatgaagctcaaactctcgttcggttcaaaatctgagaagcttgtgattcctccaacatccatcaagggacaacaaccacaacaaccccaaaatgggtggtcaacggctcggtcaacgaccacc

SEQ ID NO: 23233 - DNA, 437 bp, Glycine max
aagaaggagttgatctctatctttaagcaattagaagagacactaactgacaaacccttttatggggatgacacgtttggctttgttgatctttgtttgatcactttctctagttggttttatacttatgagacatatgggaacttcaaaatggaagaagagtgtcctaaactcatggcttgggtcaagagatgcatggagagagagactgtgtccaatactcttcctgatgctaagaaggtgtatggtcttattgtggaactgcagaagacacttgaatcgaaatagaagatttcaataaatcaacccattaaataatattttcatgttaaatatgttgttgtaaggtcttgtgtacttttcctctatggttgtgtgggttgggtcagtcatttatgtggtttactagacactaatacatcttctctattgaagat

SEQ ID NO: 23234 - DNA, 449 bp, Glycine max
attatggtttattaatgccactagtgactgtgcattagtgcttcttgttgttgaaacagctttgtctttcgaggtcatacttattacttgggggagttaatggcgtagcattgaggtaatttccttcgtccattttatgtgtagttacaattataaatgtgtctgtttccgcgtgtttaatagatatctagagtttttttcgtaaaaaacaaaattttcgtgcataaatatgtattttgacatttttgaaactaaattttaaattttaatcttttagtaacatttatcacgaaattaattgtcaacataagcatgctgaatagattggaaaaaaatgttaataagatctcattattgaactaaaatgtctctaattttttgttggacgaaaatgtcaataattttgtttggacaaaaatatcagtcatttttaatttggatcaaaatgt

SEQ ID NO: 23235 - DNA, 420 bp, Glycine max
gacatcttcttttacgtattgaatctcataattctctaaaagagatctttttctgctctttgaagaaagaagggtctttgcttgattttggagatgtctctgctctcagatctcatcaaccttaacctctccgataccaccgagaaggtgatcgcagagtacatatggatcggtggatcaggaatggacctgaggagcaaagcaaggactctcccaggaccagttagcgacccttcagagcttcccaagtggaactatgatggttccagcacaggtcaagctcctggtgaagacagtgaagtgattttatacccacaagccattttcagggatccattcagaaggggtaacaatatcttgcttatctgtgatgcctacactcctgctggagaacctattcccactaacaagaggcacgct

SEQ ID NO: 23236 - DNA, 347 bp, Glycine max
gctcggttttcgcgtactctactcgtgcatcccgacatggtttgcttggcttgtttgctgcccctccttctcgtcccaatcgtcaacatcctccctcttctcttccattttatcatggggaaaatctatcgggtttttggttgggagtacaggaaaccggagagggctcctcctgcatgtccattcaagcctccagccaacagggttagtgaagctgaagcagatgttgaaccagttccagcagatcctgttaagcctggaaatgtagatgtcaagcaagattaatctggcgtacctattgtataagatttgagtttgacaggagtaaaatgtatgataacatctga

SEQ ID NO: 23237 - DNA, 455 bp, Glycine max
cccacgcgtccgaattcgagcgggccgattttttattgtttattacttttttttttttactggaattttaagcttcaattcttttatcgtttattttaatcagccaaaaaaaacataatattatataatgaggtacgacctcccttttacaactgtatccatcaaatttcctttccagaaaaaaaaaccccaccaaaatatagagtacagatgttctttttaagaggattacagatgttataaattatttaatattttaccctatgatttggttaattaacattaaaggcggttaaacaagagcttaattgtttaatttttacttttaaaattttaaattataataattattatacacactattgattatcaacttatcgatgatttgagtaaaattagatttatatctcttaagcaagattcaattggaatgagtaattagctaattttttgac

SEQ ID NO: 23238 - DNA, 384 bp, Glycine max
ggaagcgtcgcatttgatggcttcgaaccctttgcgacaagatggggcccacaagtccgggtcggttgggaaacccgtgggtcaggaaatgggcattttagacgaatcgggtcgggtccaagaggctggtatcagtggagaggtttgcattcggggatccaatgttacgaaaggatataaaaataacgtggcagcaaatacggcgtcgtttctgttcgattggtttcatactggtgatattggatactttgattctgatgggtatttgcatctcgtgggtcggatcaaggaactcatcaaccgaggaggtggaaagatatcaccaatagaagtggatgctgttcttctttcacatgcagaaattgctcaagcagttgcttttgg

SEQ ID NO: 23239 - DNA, 431 bp, Glycine max
catgccaccactcctattctactattttttgtgcctgtggttcaataagcattagtcaaaattctaatccccctcagcctaaatgtaacctcctaagttcctcattcacactagtttcctatctcaataatttgttttcttttaaaattcaacaattgatttaactctcattataggtgttgcccatgcttttataatcttgtgaaatatgttgagttgcaggattatcacagtcaacaactattatggggcaaattattattgactttttgggagttttcaatctaataaacatttgtcaggcatgtggcgtggttttatgttgcataagcaagattgagagattttgtgccttcctatttttaagtattgagtctcaacatgtcaatgttattgaaacttttctaaattgatggcttgagaagtagtat

SEQ ID NO: 23240 - DNA, 406 bp, Glycine max
ggaggaacctttgtctctcatcaatggctgccacgagaccggtgcagtgtttgttacgaagggtttgcaggggaagtaggagttttggggttgccacagaagttaatgcttcttcttcatcttcttctcagaaaatcatcgacaaggaatatgaacacagtgcccacaattaccatccccttccgattgtattttctcaggcaaagggaacctctgtttgggatccagagggaaacaaatatcttgattttctatctggttactctgctgttaatcagggacactgccatgctaaaattctcaaagcattacaagaacaagcacaaaggctgactgtgagctctcgagccttctacaatgatcgctttccagtctttgctgagtatgtgacaaacatgtttggtta

SEQ ID NO: 23241 - DNA, 416 bp, Glycine max
ggatcaccgtcgatggcgtgcaggggctctgggtgccagtccggtggctgctacaaagacgaagacgcaacatgtaagcaaccacccaagtccgaagaagccgattcaaaaaaccctagcaatgtctgcatcaagtgcaagctcaacgacgccgtttcgggctacggcggaatcgacgatggtcgtttctgcgccgattgcttcaaaaccaacttgttcggcacgtttcgtttcgccgtcacttcaaatgccatgataactcccacggacaaggtcctcgttgccttctctggtggcccttcatccagggtagctttgcaatttgttcatgacatgcaagagagggctcagaggaacttcgatgcgagtagggaccggtcgttgccggtggttggagttggagttcgtgttattga

SEQ ID NO: 23242 - DNA, 455 bp, Glycine max
cccacgcgtccgaattcgagcgggccgcttttttttttttttttttttttttttttttactggaatttgaagcttttattcttttatcgtttattttaatcagccaaaaaaaacataatattatataatgaggtacgacctcccttttacaactgtatccatcaaatttcctttccagaaaaaaaaaccccaccaaaatatacagtacagatgttctttttaagaggattaccgatgttataaattatttaatattttaccctatgatttggttaattaacattaaaggcgtgttaaacaagaacttacattgttaatttttacttttaaaattttaaattatactaattattattcccactattgaatatcaacctatcgatgatttaaagtaacttagatgtatatctcttaaggcagattccattggaatgagtaattaactaattttttga

SEQ ID NO: 23243 - DNA, 432 bp, Glycine max
aagaaggagttgatctctatctttaagcaattagaagagacacttactgacagacccttttatggggatgacacgtttggctttgatgatctttgtttgatcactttatctagttggttctatacttatgagacatatgggaacttcaaaatggaagaagagtgtcctaaactcatggcttgggtcaagagatgcatggagagagagactgtgtacaatactcttactgatgctaagaaggtgtatggtcttattgtggaactgcagaagacacttgaatcgaaatagaagatttcaatagatcaacccattaaataatattatcatgttaaatatgatggtgtaaggtcttgtgtacttttactctatggctgagtgggttgggtcagtcatttatgtggtttactagacactaatacatctactctattg

SEQ ID NO: 23244 - DNA, 355 bp, Glycine max
gattatcatagtagatattcattcgccttatctttctctcttctctctccccgcccaaaccctaactccctaccctattccgctttctctcatccatcatgaaaggaggaaagtccaagaccgaatctaagagagccgatgccaaacttgctgtgaataagaagggcgccgccaccaagactaggaaacccgccggaaaggggaaggcagcgaaagatcctaacaagccaaagaggcctccaagtgctttcttcgttttcatgtaattataatatattggtatctctacgattcatttgacttccgatgcgctctcttatctttcctccgaataattttatcgtcaaaactttta

SEQ ID NO: 23245 - DNA, 248 bp, Glycine max
cgacatcttcttttacgtattgaatctcataattcgctaaactagatctttgggtgctctttgaataaagaagggtctttgcttgattttggacatgtctctgctctcagatctcatcaaccttaacctctcctataccaccgagaaggtgatcgcatagtacatatggatcggtggatcacgaatgtacctgaggagcaaagcaaggactctcccatgaccacttatcgacccttcacagcttccca

SEQ ID NO: 23246 - DNA, 353 bp, Glycine max
tcatccacaactattaaatttccatacacactaagatccatttggaaaattagtatctatacaaatccacataaacattaattcccaatgccccaccccattaatactaaatatcacttacactttttacaggcactaactcattaaactatatgatactcctttttatcctaactgcactctttcataatgtaattccacccactcatcaatctcattatactctcttaactttcccttccttacattcctcctcttattctatattttctacttacctcaaattattctttaaccctaataaaatttctttttaaatcttcaaatacaaaaatcctctatacacttcaatt

SEQ ID NO: 23247 - DNA, 452 bp, Glycine max
aggcgtgcgaacacgtccgagaggaccacacaagggaagtgttgttacggggtgagttgtaaaatgaggggaattgtgctttggttagcttgttatacttatgttatatatatgtgcttttgaatatctatgcatgtttaggaatgtgatatacttactccatgtgtgatgtttgtgtttggatcctatgatgatatcggaccttgttttcatgagatcaaatgatgagatatatgactataaacaaccttatgctaaatgacgattaacactatactctgatatgatatgacattagagcttatgatttgacattgattttatcatttgctattataacatatgtcaatgaacatgatttatttatatatatctcattgaaatttcaattgtaatactagcaagtttcacctcttgaaggtctcaaagaagttgttaccctttcgtacatg

SEQ ID NO: 23248 - DNA, 355 bp, Glycine max
  modified_base (338)..(338): a, c, g, t, unknown, or other
gattatcatagtagatattcattccccttatctttctctcttctctctccccgcccaaaccctaactccctaccctattccgctttctctcatccatcatgaaaggaggaaagtccaagaccgaatctaagagagccgatgccaaacttgctgtgaataagaagggcgccgccaccaagactaggaaacccgccggaaaggggaaggcagcgaaagatcctaacaagccaaagaggcctccaagtgctttcttcgttttcatgtaattataatatattggtatctctacgattcatttgacttccgatgcgctctcttatctttcctccgaataattntatcgtcaaaactttta

SEQ ID NO: 23249 - DNA, 429 bp, Glycine max
attggattgcattttggacatgtactgatacacttacaggatcatccttccaggttgaagcactggcttctcctaggcttagctctccttacttcaggacttattcttcacttcactcatgccattcctttgaataaacaattgtacacgctgagctatgtttgtgtaacatctggagcagcagcattacttttttcagccttctatattatggttgatatttggggtttaacattcttgttcttgcctttgaaatggattggcatgaatgccatgcttgtttatgtcatggcagctgaaggaatcttcgcaggattcattaatgggtggtattatggtgaccctcataacacgctggtctattggatccagaaacatgtcttcattaaggtttggcattcaacgagagtaggcatcctgctatatgtg

SEQ ID NO: 23250 - DNA, 403 bp, Glycine max
ctgctgcagaaacgttggggttagaaacctcagagcgcacttcatcattggaaacttcttttgcttgtttcttattaggagacaggtgaggttcagtatcagcaacgcattggtcgtagtcacgcttcagttccgtccttgactcctcattgttctcctgctttccttcttctaatgtatgcacacaaaccactttttctcccatcaaaatcaaagaacagagcccctgggaatccaaacgtggtaactaccagataaacaccactgccgcacagcattcacaaagaaactcgaactgacttgaacttccacacaagattcgtgtcaaatcaaagcctcaaaaccacagcagcgttttgtaattagggaaagaaggtagctgtaatattataagtatttgtgc

SEQ ID NO: 23251 - DNA, 421 bp, Glycine max
ggttgtgcgaatggctacgtttgcaattgggacacacttgcccatgttccagcatttgcataattctagacttccacttcttggcctttgcaccgttgaatcttcacccttctttggctcctcttcttgcagaaccagattcgcaggtgccatccccacgttgctccgtcacaatgtattggcacgtgccgaagataaggccagagaccctacaccttcttcctttcagcctcaacaaagttctcagcaacagtttcagaacttaacaccagaatctgggagttgtgatcccctatgttcactcgatgaaacaagctcacaagagtttgaagacagctaccagcccaagactgatttcctcaaagctgttgcaatattagcaacagctgcaactggggcagtggccattaatcattcttgg

SEQ ID NO: 23252 - DNA, 404 bp, Glycine max
gacatcttcttttacgtattgaatctcagaattggctaaaagagatcttttggtgctctttgaagaaagaagggtctttgcttgattttggagatgtctctgctctcagatctcatcaaccttaacctctccgataccaccgagaaggtgatcgcagagtacatatggatcggtggatcaggaatggacctgaggagcaaagcaaggactctcccaggaccagttagcgacccttcagagcttcccaagtggaactatgatggttccagcacaggtcaagctcctggtgaagacagtgaagtgattttatacccacaagccattatcagggatccattcagaaggggtaacaatatcttggttatctgtgatgcctacacttctgctggagaacctattcccac

SEQ ID NO: 23253 - DNA, 404 bp, Glycine max
gggctcctgggtacatttgtgctcgctagctttcaagattgctttgaaccctaaactgcttgctccttgctccttcgtttgaaccctccctttctgcttgctccttcgtttgaaccctccctctctttgacattgaatccctaccccttcttccattgaagctccttcacttgatcttccattgaagctgctaccccttcttccattgaagctccttcacctcttcgacttcatcgctccaacttctggttcagcatattcaagttttacaatttcgtggctctgaaactattagatggggaatagtttgcgcaagatcaatcatgctttacaagattgtgaattcatcatcagctcaattctaacgtgactgggaagagcaaactggtggactttgtgaacat

SEQ ID NO: 23254 - DNA, 395 bp, Glycine max
gaatcaaacacaacacacacacgtaacttcatctgggtttcaggaaaaaagaaaaaggaaaacaatgggttccgataatcaccagaacttggagttcttgaaggagatcggtttgggctcttccaacattggctcttacattaatggccagtggaaagccactggttcttctgtcacttctgttaatccttctaacaatcagagtatagctcaagtgaccgaagcaactttgcaagattttgaggaggggttgcgagcttgcagtgaagcagctaagacatggatgactataccggcaccgaagagaggtgagattgtgagacagattggtgaagcattgagggccaaattggatcctttgggtaagctggtgtctcttgagatgggaaaaattc

SEQ ID NO: 23255 - DNA, 383 bp, Glycine max
gagtgaagagagagagaagacgaacactatcatggcttcttcactcagaatctcaagacttatctctcgctccttttcttctacttctttcttttcacgaggtgggaatggtttccttggttcaagacaaagtaaattcagcacttctgctgccattgaggaagaacccattaaaccatcaatacaagtagaacacacccaactcttaattgatggaaaatttgtagatgctgcttctggtaaaacttttcaaactttagatcctaggacaggtgaagtgattgctcatgttgctgagggtcactctgaagatgttgatcgagcagtttcagctgcacgaaaagcatttgatcatggaccatggcctaagatgacagcttatg

SEQ ID NO: 23256 - DNA, 385 bp, Glycine max
tccatcgcctcctcctccacgttacagcagaagaggaggagggaggagtcccagccctaggggccgctatcctccccgtccccgacaacaagatctccctaccagccttcttgttcgtaaccttcgtcatgactgtaggtacacatggactcacactcgcctctctttcccttccctttacttgtaccttatctgtatatatcattccaacgaacgagtgagcaattttgcaggcctgaggatcttcgcagaccttttggtcaatttggtcctctcaaggacatttaccttcctaaggattactacactgggtgagttaccatactcccttcccttctttccttttcactcctccatgtatcatgcattctctatcatattttta

SEQ ID NO: 23257 - DNA, 390 bp, Glycine max
  modified_base (374)..(374): a, c, g, t, unknown, or other
  modified_base (382)..(382): a, c, g, t, unknown, or other
caacccactgatcaacagttacaatagcctatttatactagctctctaacactgattatctgtcaactaaccaatggttagttgagcttacatctggcacaaaacagtaagatataactacagctgtacaaagaaaaaactcttaaccgttagagtaagtctactctaataataagcatgcaaactaattctagttgagtagcattttccttggtgtgatagctgaatcttttagattgattgatttgttagcaagtaatgtttgtggttgctcactgctcaatattatcacaatgtgtgacaaaattgcaaatggtgccactctgacatgtggactggtactgggagagcacttgtcaaatgctaatatgcanaacatggngaggggaa

SEQ ID NO: 23258 - DNA, 406 bp, Glycine max
gtcgcaagtgggtcatccacatcgagcgcataaccggcgagaaggtgaatggctccaccgtcaacgttgggattcacccctccaaggtggttgtcacaaagctcaaattggacaaggatcgcaaggccattctcgatcgcaaggccaagggtcgtgccgccgccgataaggagaagggtaccaagttcgctcccgaagacatcatgcaaaccgttgattagtctctttatcatacaaaccaattttatgtatgggttttggtagcctttttctatctctccattttgcaggattttgttatcttttcttatgttaatcaaactgttttatcccatgagcttatcattaactattttaattcgttttcatgcgtgaagacagtgatgccagttatttcaagcgaatc

SEQ ID NO: 23259 - DNA, 440 bp, Glycine max
gatcccctttttcttctgcaagaactacaccaacgaaaacctccttcttctttgtttttttttggaggctggtgtgtgtttttctttttcttcttcttcttcttccaatccttaaggaaaaaaactaacgaaaaaaaagtgagccatgtcaggcttgtataatcccaacttctctcctgctagagcagcttctcctcagattaggagcaatccagaagtggacagtcagtacctatcagagttgctggcagaacatcagaagcttggacccttcatgcaagtgcttcccatatgcagccgcctcctaaatcaagaaatattaagggtttctggaatgttgtccaatcaaagttttggtgacttcgatagactgcgacatagaagccctagtcctatggcttcttcaaaccttatgtccaatgtcagtgggactgggttgg

SEQ ID NO: 23260 - DNA, 368 bp, Glycine max
actgatttatacgggtcacaccctgtgtacatggatctcagaaatgaaggtggcaagccttatgcacatggtgttcttttgttgaatagcaatggaatggatgtgttctatagaggaacctctctcacgtacaagattattggaggggtgctcgatttttacttctttgctggacccacccctctcaatgttgtggatcagtacacttccttaattggcagacctgctccaatgccttattgggcttttggattccaccaatgcagatggggctatcacaatctatccgttgtagaagatgttgtcgagaattacaagaaggcaaaaatcccggttgatgtgatctggaatgatgatgatcacatgga

SEQ ID NO: 23261 - DNA, 439 bp, Glycine max
accatcggttcattcaaaatccctatctccggcgagttctcctgtgccggccgtcggtactccggcaatatctccggcgatttctattccgacactggcaccggagacggggactccaccgccgtctcttgggccttcatcatcttcaccaccgtctccgggtccttcatcttcttcaccgccgtctccgggtccttcatcatcttcaccgccgccggcggggccaacttcaccgccgtcgttagcaccgtcgtctaattcaactgcgccgtcaccgaagaacagtggattttctgtggctccttcaagcgttttgatgtattgtgttacaattgttgctggtgctgcgttgttgcgttattgaacaaacattttgggttgaaattgagacatactttagtgacatgcttcgtgctagaacgttctttgtgggacacat

SEQ ID NO: 23262 - DNA, 442 bp, Glycine max
agagatattgagcttttacagcctcagacattcagtaatgatgctatcattgactgtcatatcaagtatttgaaaaagaaactcccaactgatgaacagaacaggtttcactttttcaatagcttcttctttcgtaagcttgctgatttagacaaagatccatcaagtgcttgtgatggtagagcagcatttcaacgtgtacgcaaatggacaagaaaagtgaacctttttgaaaaggattatatcttcattcctgtaaactacagtcttcactggagtttaattgtcatttgtcatgcgggtgaagtgtcatgcttgaaagatgaagaaattaaggaatcttgcagagtaccttgtatcttgcacatggattccctaaaaggaagtcataaaggtctcaagaatgttttccaaagttacctatgtgaagaatggaaagaga

SEQ ID NO: 23263 - DNA, 338 bp, Glycine max
taccgtcccaatgaccgggtctaaccacacgttcctacctgttctaaaaaaccacatatgggtcacgccaagagtatctccacgttctgtaacattgtaaactatcgcattcacaagttactgttctatatcctccatataccatacaacatttacacaaccctcaatacatgcttcaagcttttgagcgatataaaactttctgattcctataacatcattcttatttctccacacttaattattttgaaagactcattatccattccacagtttgtcaacaaaactggcttgactctacccctttgtatatatatatagagtattcatctactatt

SEQ ID NO: 23264 - DNA, 437 bp, Glycine max
ggaagcgtacgtcaaatgttgtttcctgttaactaacgaagacgacaaagtctgttttgctggcaactacacctcactgaagcttcctcaaccgaaccccacgccacgctacgacgcgtcgtttcattattattcatagtcttcctttgcatgcgccaccatcatcaattcaattccaatgggtaatatctgtgctcgtttgaagtcgaagccgccgccgcaatcctcagccaagaagcgttcctcttcccgccgagagaggaggctcgacgacgccgcgattcgcgagcaggccatcgccgccgcgattctcttcaagcagcaccagcaacagcagcaattcgatcgctccacttcgcttcggtatccgaatggagtctccaagaagaataacagcaacaccttgccaaggagttcgagttccagggcaaggtccc

SEQ ID NO: 23265 - DNA, 387 bp, Glycine max
ctacggggggctgctgggtacattactactagctagctttactgattgctatgaaccctatactgcttgctccttgctccttcgttagaaccctccctatctgcttgctgcttcgtatgaaccctacctctatttgacattgaagccctaccggttctttcattgaagcttcatcacttgatcttccattgaagctactaccccttcttgcattgcagctcctttacctcttcgactttatcgatccaacttctggatcagtgtattcaagtttgacaatttactggctctgaaactattagatggggaattgtttgcacatgatcaatcaggctctataagattgcgaattcatcatacgctcagttctaacgtgactgggaagag

SEQ ID NO: 23266 - DNA, 383 bp, Glycine max
caataattgattggattgagtaacagtatgcattgaagtttacatgattgcttttgactgtgccggattttgtagtgtttgatatattataatggtatcattctgcctattgaaacttaagttgacaagttactgactgcataagctatgctattggcagttaatttctcccccccaaagctagtgattcttcatatgaatatggcactacatgtgtatgaagatatcatgaggatgactgaaaacctgagtgagaagtatataattggatatggagcatcaagtacagtttataaatgtgttcttaagaattgcaagccggtggctatcaagaggatctattctcactatccccaatgtattaaagaatttgaaactgaact

SEQ ID NO: 23267 - DNA, 383 bp, Glycine max
tgactcgtgtttatcataaaaaaatggaagatctatctactgcttttatgtggacaacatgttcatagcatctcaaaatttgttggtaattcaaaggttgaagtcactacttaatggtgaactttagatgaaggacatgtgagctattagaaagattatgggcatggagatcaagagggatcaagtctaaaagaagatctttttgtgttagaaagaatacattttgaaagtgtttaatcattttgggatggcattcacaaaatcagtatgttttcctctaacaccgtccattcgtctatctgaactcaatactactcgatcaaaattagagaaggaatacatgttttgttccttatgcaagtgttgtaagttggctcatatat

SEQ ID NO: 23268 - DNA, 411 bp, Glycine max
gggagaagaatcagactccagagcgagcatgagaaatcggtgagttgactcagtagagcgaatcgatggaggaagaagagagtcagtgcttcgagtgcctccaacttcgaataaagtccgatttctcggagcaagtgtttttcaattatgccatttccacttctgcttttcctttcggatcctcagctatcgttaatatttctggtacagctgatggcgaatcttcgggtgctcaatttatattgcagtacatgccgactcgtgataagaattgttttatcaattatgtaaatgaatatattttggatagtggtgaaatcactactaggagtagtgatcctggtattggaagcagtgaagataataatgctgttaatgttagaattacttcatcagatgattctgagagtg

SEQ ID NO: 23269 - DNA, 431 bp, Glycine max
agggagtatttgatttgcacaatcaaataacattagtcctataacttcttcttcactaattaattaattctttttttttgagaaagtaggataattacaaatcaatttgagcacaaatagaatgtaaaatacatctggatccatggaggacaatgtatatattggaagtgcactagctctctttgatttgtactgtacttaggatttgtagaagccatgaagtgctgtaaggtgactagtgaatttgatttgaatggcaggtacagtgaattatccactattaaccgacgccattaatcaggccaacaagagatctttatgcacgtacactccacatctggatttaatcaatttctgctttgtaacttctatgttctacacttgacacgaaattttccttttggttcccttctaaatgtgtttttgattct

SEQ ID NO: 23270 - DNA, 138 bp, Glycine max
ggcagttcaattccagaatagtgcattctctctgcgtatatccctacctctcccttgaaggttgcagatcttcggcaagaccctgaccggctagaccatcacccttgaagtggaaagctctgacgccatcgactacga

SEQ ID NO: 23271 - DNA, 424 bp, Glycine max
gaaggtgcaagagtttgttgtgagctataagctaggttatcgtgaggagaatatgaagttgcttgttttctttgttgctgcagtagttttggtagcatggccatgccatggcgcaggctaccaaaggttccctctccgaatgaaaactggctatggtgagcgttcttcggaggtaaaatgcgcaagttttaggcttgctgtggaagcacacaacatccgagcctttaaaaccattcctgaagagtgcgttgaaccaacaaaggactacattaatggcgaacaatttagatcagactctaaaacagttaaccaacaagctttcttttatgctagtgaacgcgaagtccatcacaacgacatatttatattcggcatagataacaccgtactctctaatatcccatactatgaaaaacatggatat

SEQ ID NO: 23272 - DNA, 431 bp, Glycine max
ggatacactgatacctctgcttttgctttgtttggctcttcttttgtaatggaaattgatctttctccccagttggccaagaaggtgtatgaaagcaatggtgggtcttaccatgcatggtccccttctgagcttcccatgttgcctgaagggaacattggtgctgccaaactagctcttcaaaaaaatggttttgcccttccttgttactctgactcttccaaggttgcatatgttctccaaggaagtggagttgcaggaattgtgctccctgaatcagaagagaaggtggttgcaattaagaagggtgatgctttggcactcccttttggtgtgataacctggtggtacaacaaggaggacactgagttggttgttctgatcttaggtgacacttcaaaagcccacaagactggtgaattcactgattt

SEQ ID NO: 23273 - DNA, 439 bp, Glycine max
tatgtggcatctggcctgagaatgaatgtgtagaagtgagttgacctgtcagtttcacattgcaggtccttctttatggggtaattttgaccgtggtaggagagtatcacatggagcttctttgtatccgtgccacataaatctggtccaaacattaaactatagagaatgtgtcaacaggacattctttctttctgttttttaaggtaaaaatagaaagcatggataaagaaaaaaaaaatgaagttagaccagatgtggtacataaagtttcctaaaaataatgcaagtgaagcaaaatgagatttcctgtaataaaaagataaaaataacatgcatataaaataactgcataagctatcttttttatgttacttctggacatagttttatacactataatgaagtctctataatagtatattacacccctgattac

SEQ ID NO: 23274 - DNA, 400 bp, Glycine max
ccacgcctacccacgcttccatacgactacaaaaagaccacagcataatgatactagcttcactatcataacactgggttttttaatacatacgtaatcaatctcatacgaaaccaaaggcactactaaacttcttcttcataacaatcactgcaacgctctatttacatacgtcactctgaaccagaacaattcttaaaacacatatcttaagactacctaaatctctcaaattcgatccaatctttctatataaaattactaagccatgataacatttcacctacaactcatcactacctgatgccattcaagaatatgcctaagctttttctcaataactttcaacaatttattactctcaactctttccaaactacacaacatgtgtttattcaaa

SEQ ID NO: 23275 - DNA, 414 bp, Glycine max
gacaccaaacgagccatttgggagttaggttctgcacgctctgcttccagcgagtgttctttcttcgtttcaacaccttaatttgcacacgctgcttcttcagcttgagaaatggcacaagaaacctttctattcacatctgaatctgtaaacgagggtcaccccgacaagctgtgcgaccagatctctgatgcagtgctcgatgcgtgccttgaacaggaccctgacagcaaggttgcctgtgagacatgcaccaagaccaacatggtcatggtctttggagagatcacaaccaaggccaacgtagactatgagaagattgtccgtgacacatgccgcgaaattggattcatctctgatgatgttggtcttgatgctgacaaatgcaaggtgttggtcaacattgagcagcag

SEQ ID NO: 23276 - DNA, 437 bp, Glycine max
gattcaaaatacaaataaacgctcgcactccaaagatcagatatgaaagttcaccactccgtccaactccttctttctctatttctactgcttgcatttcacgttcctcatatggctgttggcactgcggagcttagagctctgatggagttgaagtcccctctggatccacagggcaagatccttgggtcatggataagtgatggtgatccatgcagtggcttcttcgaaggggttgcgtgcaacgaccaccgcatagtggccaacatctccttgcagggaaagggtctttctggttggacatctccagcactggctgaactcaaatgcttgtcgggtttatacttgcactacaacaacctttctggtgagatacccccacacatttcatatctcactgaactgcttgatctctatcctgacgctaatactttatc

SEQ ID NO: 23277 - DNA, 413 bp, Glycine max
gaggaacaaaaaattaacatgaagaacaatttcagattaattagaacagaaaaaactcgaatcagttcacccacacagggcattagggagacagaatccacaatggctccagagtggacagacgagaaacacagcatgtatatcaagtctatagaagcatctttcgttaatcagttatatgattctaagcaaatgaaaacttcatatgaccctgctaccacttccggccagttcaaggtactacgtggtggctgttggcaaaaaatcaattttgagagagtgaatccgcaaacgagtaggattaaccagtgtcatgacttgacggaaaatccatggattcagcactaccgatcttcaagcaaacagagaagcatagcagtttcatcccttcaagaaagtgttactaccacaag

SEQ ID NO: 23278 - DNA, 416 bp, Glycine max
gaaggagagagagagagacgcatttgtaacgacaaagaagcagaaggtgtagtaatactgagtggtcaaattaaggatcgggattcaggaatttccattctgagacacacagaagaacagaaagaaactccttttaattttcaatttcaagtcaagatcgatctgacatcatagaaaatgaccatggatgtcgttcagctgcagaggaagctgcgcgaacaccaagccgctatgtttcaacagggttttttggatgatcagttcagccagcttcagaaactgcaagatgagagcactccagattttgtgattgaggttatcactatgttctttgatgattctgagaatctcctaaaaaacatggcacgttgtctagaacaagtgccagctgatttcaaacaaatagatgctcatgc

SEQ ID NO: 23279 - DNA, 433 bp, Glycine max
tctgacatcatagaccatgtgtcttccaattcgttggatagatactgatttcatgttaaaaatattgttaaaatttagtatgcatttcgatcaatttatcttaggagtaaaaaaagtcagttttaactcttatgttttataaactaattctcttaaaaaatctaaacaggtacacttcactttaatttttttattttacactttttaagaacaaagtaatctgcaaaagaattaaataatccaattacggttggtgagtcaaatcggtatgcttttcattcttctgtctttccgttctgcatatacgaaagaaatatgttttcggcatattattagacgttgctaacaagtttcagcaactcacggtattgcttttgtcactgtcatatgaaagtggaatcggaaagaatgtttgaacaaaaaaatgattact

SEQ ID NO: 23280 - DNA, 409 bp, Glycine max
  modified_base (366)..(366): a, c, g, t, unknown, or other
  modified_base (373)..(373): a, c, g, t, unknown, or other
ggaaacgaacctcaacaacgctgagcgcagaaaggggaaaaggggattagggtttaggaagcagcgacaacaatggatttcacagtggagaagaaggaatcagagaacaacgccgaaaatgctcacccaacaacgttagattcttcttctcaattggcatcggcacttgattccaacaacaaagaaatcgaagaacgacaagctcgtgaactcaaagccggacttcaccccctaaagcacaagtttgtcttctggtacactcgtcgaacacctggagttcgaaatcaaacatcatatgaggacaacataaagaaaattgttgaatttagtacggttgaaggattttgggtctgctactgccatctngctcgtnctgcttctttacctagtccaacagatttgcaccttt

SEQ ID NO: 23281 - DNA, 446 bp, Glycine max
tcttgctaatcgagtagctacacttttagaatgtgaggttttttaatgcatacataatcaatctcgcaggaaaccaaaaaaactactagacttcgtaagcatttgtagcactgaaatgctctattgacataggtagccagggacaggaacaagtattaaaagacatatcttgagactacctaaatctttcaattttggatccattcttttggtatagaaaaaggatgtgtagtttaaatatgagagagaagtattcactacctgctggttattgaagacatgtcaactgtattctgtttatagttttaaacaatccattttagtaaatctttaaaaactaatgttttctctttattcaacctgagtctgtacatattttcttccatttcctgtacctctattacctgcgctctcagtttgttatcaccagtaactttgatgtgatg

SEQ ID NO: 23282 - DNA, 430 bp, Glycine max
gtgatggctttatttagataccatttctcagtttgattagaaaataaaattttccaacgctactcctaaaacttaccatgcaaatgggtgatcaaaccacaagcaataatataaaacacaagaaaggataatacaaatataatgttattaaatagataggaagagaagttacatcaagagtagttggttgtcaagttcccgacaaaggggtttagcctctcattatcatggagactttataattgtaagaggaaaatatttaataaaggaggaaaagataagaaaggaaatggaaggaaggaatgactctcattacttgcttctccttcttctaatctttgccttctataaggaattatattctcttggaatttttgtgggtctttttcttcttctttcttcttcttttataggtgcagattaacgggct

SEQ ID NO: 23283 - DNA, 321 bp, Glycine max
  modified_base (75)..(75): a, c, g, t, unknown, or other
actactctacttcattctaacttcaaagacccacttaaaacttcggtattcatctacaacacatccaataacacnttattcatattctactacctctttattacatcattttcacttataacaacttctccatcaaatcactacttactaaactcaattccaaacttttctattaaataccctacaactttttactttttatttctaattcaaaacatattttatcccacatactgctcttattctaactcaatccaaactcattaaatatctaactaattaaacttatatttactaaactaatctcatcttttcttcaat

SEQ ID NO: 23284 - DNA, 438 bp, Glycine max
ggtgtgattgtttgttgttgtaactcgttcttcttgttttgttgttctgtgtttgtgtttgttttttctctcacctgaaaatgtcttgctgcggtggtaactgtggttgcggaagctcctgcaagtgcggcaacggctgccgaggctgcaagatgtacccagacttgagctacactgagtcaaccaccaccgagaccttggtcatgggagtggcacctgttaaggctcaatttgagggtgctgaaatgggtgtgcccgctgagaacgatggctgcaaatgtggaccaaactgctcctgcaacccctgcacttgcaagtgaagtgttgggagagcaagcttcaagcagagatagcccttaattaggaataatgataaactattaatgtgtagctaaaaacttatgtattatgtctgtgatggttttcgtgcactctggt

SEQ ID NO: 23285 - DNA, 391 bp, Glycine max
ggcgtgtgtgtgtgacaaaagcaaaaggaaagaatatcaacaaggtaaagtagattccttactagacatggcgttgaaggacacattctacatatctcatggatcaccaactttgtccatagatgaatccattcaggccaggaagttccttcagtcatggaagaaggacgtgtttcctcaaagaccctcttcaattcttgtcatctctggtcattgggaaaccgcagttcccacggtcaacgtcgttgactccatcaacgacaccatctacgatttctatggcttccccaaacaaatgtaccagcttaaatatcctgcacctggagctccacaattggcaaggaaggtgaaagaactactcaagaaatctggtttcagccatgttgatgaa

SEQ ID NO: 23286 - DNA, 435 bp, Glycine max
gatagaggcgtatctagtgattccctaagattcctgaggcttttcctttggttgctctgctagggtttccaagcgttaacgagaaggagaagagattggagccttagtttcactatttttgtgtgaggggacatttctctctctacagttattattttgtaaattccaatggttggaatgtaagggattgaattccaaagttggtgtccaaatttcaggatgatccaacggttaatgagtccaggattatagttttaccaggacaaatttgggtgtatgcagaaaaaattaaagggttttggaagaggaagaagggataacaaatttatgaagaagaagaaacatagaaacgcatcgtaaatgtaaaaactaacctaatatgtctctatttatagctgggatactctgagtctattatttactcaatttttcttt

SEQ ID NO: 23287 - DNA, 456 bp, Glycine max
acggaagacgacagaaggggagttcgaaaggtgaggaggaagtttaggatttgtggtggtagcaattaatttacgtttatgaatggttgggaactttagttcttttgatttgaggtatttttgtttgatgatgctctgtgagtgtgattggttgctcatgcgataacactttcccttctgcttcagtggattgctggaaattgttcttactgatttacatcgactgactgacttgtttctttttactgttattggaatgagaaatttgtggactatttcatgttctgatttcaaattctagtttaatttggttggttgagattgtggaagtctatttttggttgcttttgcagggaaatgaaagtgtctttgttggtgaagggtaagtgagagaaacgaaaggggtgtgtgttgggttgaataggtatagataggatcaatgagcaacaacaacgc

SEQ ID NO: 23288 - DNA, 431 bp, Glycine max
gatcctcaaaaattaagtttagcttaccaatatcagcacatatatctcagctttcttccatagcattttctccttagctttcagcacattcagcttattccttactgtttggaataatattcgagttttgatcatccaatttgaagaaccaaaggtttgttcgtttatttatagcttatatcggtcattgttaatttgtttaagattgtaagaaattacactcagaaaaaaaaacgaagtgcatttccggatccaatttcaactttatgactttatatacaaatattagaaagttaaagaaaacaatgaatatatatcatagtttaagccaccatttgtaagctccttaacacttcttttactgaattcattggccaatatatagaataagtacttgtgcatacttcattatacaagtagcttttcttatc

SEQ ID NO: 23289 - DNA, 293 bp, Glycine max
gatgaatgatgatagagatcgaaccatagattgctgttgaatagcttacaatggatcgacaatatgatgtaccggaaaacacccagtcttgagctaagagtgaataaacagcaaagcgttactgttcaaaatgaactgaattgaacgcttgactccagacggagatgccttctgctgatatggacgccggaagcactgtcatgagactgctgaaccacacacaaatatgcatgcaacactattcttacctgtcacacactcttctcagtgactagaagatggatggctaaatt

SEQ ID NO: 23290 - DNA, 432 bp, Glycine max
agaagttaaaagctactctacttcagtttaacttcaaatgcatgtgtgacccttcgttattcatctacactgattccaataacactggtttatatgctactgtatgttgatgacatcattgtcactggaaacaacttctacatcaaatcactagttactaaactcaattctgagttttctcttaaggacctaggaagtcttgactatttcttgggaatcgaagtcagatctcagtccaatggtgctcttattctaactcagtccaagtacattagggatctgctgagtaaaacaaagatggacgaagctaatctgatctcttctacaatggttagtggtcgcaaattgactaagtcagggtatgaatctttccctgatcccacacactacaggtctgtcgtgggagccatgcagtattcaactattactaga

SEQ ID NO: 23291 - DNA, 356 bp, Glycine max
ggtgacaaaaaaaagaaggtttgttcaatcttttggaggcctgagtgtcatctccaatccatagcttgcaattcccggcaagcacagtgattggtgtccagaaaggcttcagcttgctcctcccttctcaacttcaacaatttcgctgtaacacttcttctctcattctcgcagtttcacatttttacaacatttctccaaattttatgttttagtttatgggatatggagattgtgttcacatgtgatttgggtctgattttgattttgcgtttgtggggttatggttcccaggagaacatgttttgtggtgcactaatgttgttcgatgaaatgccccactgtcgtgatatttt

SEQ ID NO: 23292 - DNA, 237 bp, Glycine max
gcttcagaagacaccaagggtatgatccttgtgaattgtttatgctggggggcttataatttgaatgatgtgttgtgaattgttttgtcttgtgatgtcaatattctgataaattgctctgcagtgtattcatttattgaagcattaacattattccttaattcaagtaatctttgacatatatcagagtacaattttactctgtaatctgattatttttaatcactttacttttac

SEQ ID NO: 23293 - DNA, 424 bp, Glycine max
gactcgctgtacttgtgttgtgttgtgttgtgtggggtaacaatggctcaggggaaagcattccctgttactgctccttcccttcatacaacaggtgttgccctacgtggaaaattgagtaaggttgtgctggcttacagaggtggcttagacacatcagtcattgttccatggctcagagagaattatggatgtgaagtcgattgcttcactgctgatgttggccaaggtatacaagaattggaaggtttagaagcgaaagctaaagccagtggggctagtcaattagtggtaaaagacttgaaggaggaatttgttagtgactatgtatttccttgcctacgtgctggtgcaggttatgagaggaagtatttgcttgggacctcaatggcccgccctgtaattgcaaaggccatggttgatg

SEQ ID NO: 23294 - DNA, 189 bp, Glycine max
ttctactctttgaaagaatatgatttaggacattctggagattatagattaacagctgatattgatcgagaaagattccctgggcctcaaggttatgagccacatgatcacatgcgggagccatatgcttgggagccgcataagaagccctcatcccatttaagcaagacgactcatcgcagatctgac

SEQ ID NO: 23295 - DNA, 273 bp, Glycine max
  modified_base (43)..(43): a, c, g, t, unknown, or other
  modified_base (45)..(45): a, c, g, t, unknown, or other
  modified_base (65)..(65): a, c, g, t, unknown, or other
  modified_base (91)..(91): a, c, g, t, unknown, or other
  modified_base (113)..(113): a, c, g, t, unknown, or other
  modified_base (119)..(120): a, c, g, t, unknown, or other
  modified_base (122)..(123): a, c, g, t, unknown, or other
  modified_base (143)..(143): a, c, g, t, unknown, or other
  modified_base (145)..(145): a, c, g, t, unknown, or other
  modified_base (181)..(181): a, c, g, t, unknown, or other
  modified_base (201)..(201): a, c, g, t, unknown, or other
  modified_base (205)..(206): a, c, g, t, unknown, or other
  modified_base (222)..(222): a, c, g, t, unknown, or other
  modified_base (227)..(227): a, c, g, t, unknown, or other
  modified_base (240)..(241): a, c, g, t, unknown, or other
  modified_base (252)..(252): a, c, g, t, unknown, or other
aggagaaaacgaagacgaaagagaacagggaagcagcagaagncnaggaagcaaggccaagccanggcgcaggcaaccaaaggaacccacnccgaaagaaaaccggccacggngagcgnncnncggaggaaaaaagcgcaagnanaaggcacgcagaggaagcacacaacaaccgagcccngaaaaccaaacccgaagagngcgnngaaccaacaaaggacnacaanaaaggcgaacaanngagaacagacncgaaaacagggaaccaacaag

SEQ ID NO: 23296 - DNA, 296 bp, Glycine max
  modified_base (17)..(17): a, c, g, t, unknown, or other
  modified_base (33)..(34): a, c, g, t, unknown, or other
  modified_base (66)..(66): a, c, g, t, unknown, or other
  modified_base (68)..(68): a, c, g, t, unknown, or other
  modified_base (117)..(117): a, c, g, t, unknown, or other
  modified_base (144)..(144): a, c, g, t, unknown, or other
  modified_base (156)..(156): a, c, g, t, unknown, or other
  modified_base (170)..(170): a, c, g, t, unknown, or other
  modified_base (176)..(176): a, c, g, t, unknown, or other
  modified_base (184)..(184): a, c, g, t, unknown, or other
  modified_base (186)..(186): a, c, g, t, unknown, or other
  modified_base (209)..(210): a, c, g, t, unknown, or other
  modified_base (215)..(215): a, c, g, t, unknown, or other
  modified_base (220)..(221): a, c, g, t, unknown, or other
  modified_base (224)..(224): a, c, g, t, unknown, or other
  modified_base (233)..(233): a, c, g, t, unknown, or other
  modified_base (240)..(240): a, c, g, t, unknown, or other
  modified_base (249)..(251): a, c, g, t, unknown, or other
  modified_base (258)..(258): a, c, g, t, unknown, or other
  modified_base (267)..(267): a, c, g, t, unknown, or other
  modified_base (278)..(278): a, c, g, t, unknown, or other
agaaggggataggagcnacgcactagcacaagnncgaccaggcgaacccgggcgcggaggaagacncnccctcaaacaccagggaaaaccagcccagaagcccgcgacgacaaaggncacccagcagagagggccaaaaccggnggaaggaccgcngcggccaagaaaanaggagnggaagcangngagaggacaacgacaaagggcgnngccgngaacnnggngacaaaaangacgggnacgaagcannngggcagngccaaaacngccaacacggncaccaacggcaggggaac

SEQ ID NO: 23297 - DNA, 186 bp, Glycine max
accaactttttaccaaatctacaagaaataatctacgggtgggtttcaatcactaccttaggttgttgcactattcacttcaatgctctggatttattactcactcttcaaaaaggatgctagcctccttttcattactattaacttctttgaatgtgtgatataaactatataccttacaatctt

SEQ ID NO: 23298 - DNA, 389 bp, Glycine max
atatgtaaaatgtaacatgaaaaaattaaaataagtacatcaatcaatttaaagagacctaaaattcaatgggggcactgaaaggaagaaattcccaagtgtacccaatatgttatatctttactatggcagccatataggagttcacttgcatcccagatcaaaactaatacctattcatgctctcaagagaccgaacctattaaactcataactgggttaaatagcatgcctatttcctgttgtttgacttctattcagtttgcaatttcccattaagtgctggttgctacaatcttatatctttgcaaggctccttgtgactttggttttcagttgaagtaattcttttgtgcaatatgttgattaaggaaagggagatgatcaag

SEQ ID NO: 23299 - DNA, 309 bp, Glycine max
agatttaagaccgttaaacaattagaatgtattgggatggttaacaaatatttctagtatcaaaattctaaagatggaaagaataatgtgaggttcatcggaaaccaaacttttacacgacctgtttttgtacacattcagcgctatactcaattgcttaggactatttcaccaaactgatacactctgtatccttattcataatcatggctcaaacgttatctagcatactaaatagattgcatatcatctttgtcgccccctcattcagactaacccttacaatgatttaataacctttgacattat

SEQ ID NO: 23300 - DNA, 422 bp, Glycine max
gaacctatatttgcccaatggatacaatctggtcatggtaaaacttcctatgggttcgatatacttttatcttcaacgaacagtccggcgttcaatgcaggacgaagcatatggttgcctggttggttaaacgctgttaatgagaatagtaattctctattcttaacaatagggcctggagacttcttggttcatcatgctattgctcttggtttacatacaactacattgatcttagtaaagggtgctttggatgcgcgtggttctaagttaatgccagataaaaaagattttggttatagttttccttgcgatggcccgggacgaagcggtacttgcgatatttcggcttgggacgcattttatttggcagttttctggatgttaaataccattgggtgggttactttttattggcattg

SEQ ID NO: 23301 - DNA, 447 bp, Glycine max
gcttgctcattggtgacatcaggggtgatgacaacagggtccgctggcttccagtttgctggggtagcaaccttgaactttgaggccttctgcaatgactctatcaccctcggcacttcatccatgttccttccagtagtggcagggtacagaaaactcatcttgatctacaacaattaaccctcatattaaattaattaacatgttaattagcccaaaaaaaaaactacatattcattaatttaactagtcaaagaacaagtttcaccttcaaatctgggccaacaatatgaagagcccttgagggtaggttgccagtggagtctttctcatcagggtcaaccatgttgagttgcttgatgatttctctcttcggatcagcaattattggataattcactttcgcacctggctgcatacaaagggaaagatcaaaatctattcaac

SEQ ID NO: 23302 - DNA, 407 bp, Glycine max
  modified_base (111)..(111): a, c, g, t, unknown, or other
cccggtcgaccgagcgtccgacggatcgacaagagacctagcgcatttcagacatcacgggtgatgacaacatgttcggttctcttacatcttaatggggtagcaaccttnaacatggaagcctacatgcaatgactatgtcaaactccgtacattattcatcaacgttgcaggacaggtacatcacagaacacgcatctcgggctacaacagttaaccatgatactacagtcatcaaccagtgaaccaaacaccctattttgctacatactcataagctgaactggagaatgatcagattccaccatgcaaagttaccctacaatatgaagaggcctcgacaacaggctgccacggctgtgttgctgatccaggtcaaacatgccaagttgctataagctttctca

SEQ ID NO: 23303 - DNA, 393 bp, Glycine max
ggttgtagagtgtgattgtttgttgatgtaactcgttcttcttcttttgttggtctgtgtttgtgtttgttttttctctcacctgaaaatgtcttgctgcggtggtaactgtggttgcggaagctcctgcaagtgcggcaacggctgcggaggctgcaagatgtacccagacttgagctacactgagtcaaccaccaccgagaccttggtcatgggagtggcacctgttaaggctcaatttgagggtgctgaaatgggtgtgcccgctgagaacgatggctgcaaatgtggaccaaactgctcctgcaacccctgcacttgcaagtgaggtgttgggagagcaagcttcaagcagagatagcccttaattaggaataatgataaactattaat

SEQ ID NO: 23304 - DNA, 436 bp, Glycine max
ggggactcgaagtgtaagcactaagtggttgaggggatgggaacccttgggagagcgatctacagcgttggtaactggattcgagggactggacaggccattgatcgtctcggttccctcctccagggcggttactacgtccaagagcagctgtctaggcatcgaactctgatggacatatttgataaggctcctgttgttgatgaggatgtatttgttgcgcctagtgcctccgtcattggagacgttcaacttggaagaggatcatccatttggtatggagttgtcttgaggggtgatgttaacagcatcagagttggaactggaactaacatacaggacaactctctggtgcatgttgcaaagtcaaatttaagtgggaaggtgttgcctacaattattgggaataatgttactgtcggccacagtgctgtca

SEQ ID NO: 23305 - DNA, 403 bp, Glycine max
gctgttactaatatgagatttgatgaggagcccgggtatgccaagcttatatcactttttgaaagcttgattgaaccatgcactccgttgagacctattagaatagatggagctttaaaggttggccaaaagcgaggaaggatgcttataaatctggaagaagatgagcaacctaagaagaaagtgcgattggggagtcctgctactcagtggatatcagtgtataatgctcgccgtcccatgaagcagagatatcactataatgttgcagacactaggctacggcagcatgtagacaagggtattgaggatgggttgtatataagctgtgtggcctctgcagcaaatctgtgggctctaatcatggatgcaggaacaggtttttcttcacaagtttatgagt

SEQ ID NO: 23306 - DNA, 405 bp, Glycine max
ggagttgattaaggcgaggggtgtgatgagattagttttgagaagaaaccagcaatcggcgattaggagtgagagagatatggagggaattgaaggaaatagcagcagatacagtctgaaaccctcgcgaatttgcaacgaagatgttctgatctgcgtcgacgtcgatcctcagtgcctcgtcgaaatgaaaggtgccaccggtcccaatggcagacccctcacccgtttggactccatcaaacaagccatcgttctcttcgtcaatgccaaactcaccatcaaccccgaacaccgttttgccttcgccactctcttcaacaccctcgtctcttgggtcaagaaagagtttagcagtgaaattgagtcaacacttgcagcaatgcgtgttctttcagcttcttc

SEQ ID NO: 23307 - DNA, 336 bp, Glycine max
tcttgttaaccatagttacatcgatgtagggtatataacaatgagtggtattgcttctatcatctattccgtaacattgctcaatatataactgattatagagagagataaaaaaaagcatgtatgctttttattgatttattgttacgtcaaatcacttgaggaagtcaatgtgtctcatcaagcatgtacttactgatagagcaattgaagaaccatatcccattaggtctgctgatatgaaaagaatgataaatgttctttgatgacttataattgacctgctcttgtgatgacattactgcatatgttgttagaatatgacatctacatttt

SEQ ID NO: 23308 - DNA, 423 bp, Glycine max
gaaagaggtgcatacaactacaaaggttgctgtaggagataagatattgaagtagtgctaagtgcctaacacctgcagtgaacaatggcctctgcatcagcatctcttctcaagtcttcacttgttcttgacaagtctgagtgggtgaagggacaagcacttcgacaaccttctgctgcatcagttgtgagatgcaaccccaccaccccatcaggcctcaccatcagagctggttcctatgctgatgagctcgttaagaccgcgaaaacagtggcttcaccagggaggggtattttggccatggatgagtccaatgctacctgtgggaagcgtttggcttcaattgggctagagaacactgaagctaaccgccaggcataccgtacccttcttgtgacagttccaggacttggtcagtacatc

SEQ ID NO: 23309 - DNA, 434 bp, Glycine max
tatcactggttttatgctgttttatcatcatttggggttgggtaaaaaataaaaaacatcagggtacaataaaaaagttctacagcagtattttaattatttaatttaatgtgatatagtaatgggctgatactaacccaatagtttcactgggccgggttgggttgcaatgcaccaattgtttaccttctccaaactaaaaccctcattctaccctatgtaccactttcttttgtgtgagtcggggtctgcaacaaaaccttcgctcgcgtttttcagggtgagtctctccgtcgcatgcattgcaatagcttgttaatttctcaggattgggcttcggatcccaactttatgtggctccatgtatttaatttatcttgtgttttatttatgattcattccaaattcgcaatacctaatcatggcgtatttaa

SEQ ID NO: 23310 - DNA, 440 bp, Glycine max
gtggtttaccatgtatctactagcatcaaccaggcgatggttatctcggtgacaatgggtgcaccaaaaacaacctttgggttttgatggccttatgcgagagtgtcaacacatattgctctgggaagccagagcaaatgcatcacctatggtagatttaggaatgtcagatgtgggctttgacgaaatctaaagtaatgcaacaaatgctgattgcattgctggtgccataggtgacccaagaatttggtctcatgtggtaaaatgttcccgaggcagattataaagggacagagtcataaaggatgtgccatggttcttgagttccttcttagccttggtggcgatagaggcagcatggggtagaagctcattgaaatcatggagagagctgcatgaacttgcccaaggtaggcagtcatgggcatgccaaattgcta

SEQ ID NO: 23311 - DNA, 417 bp, Glycine max
  modified_base (49)..(49): a, c, g, t, unknown, or other
gatgtaaaaggtgagggtgacccgtgattcgtgaacacgaacaccatcnccatgggcttcaatattctgagaaccacttccatctccactcctatctcttcctccaaatccaaacccattttctcaactcttcttcgttcttctccttccaccattttccccccaaagtccgttactcccaccactcttttcgtttctgccacccccttcttcactctccatcccaagcttggttttcgtggtgggattgtggccatggccgcacctggctctctccgcaaatccgaggaagagtggcgcgcaattctctcccctgaacagtttcggatcctcaggcaaaagggcaccgagttccctggaacaggagagtatgacaagttctatgaaaagggagtttacaactgtgctggttgtggg

SEQ ID NO: 23312 - DNA, 253 bp, Glycine max
ctattcttctttattactcactcacaagcagtacataaaaaaaattcttagctcttaatcttcttaacactaccattcactactctaacaactccacaatacttctctattacataacctactcaccataactctatttctcacactatctctaacttcactccaccaaccatctcttcttcaaacacacactcacacaactctctacacattccattatcccccatctaccatactctttttaacctacacc

SEQ ID NO: 23313 - DNA, 441 bp, Glycine max
ggtagtgcccttattttctttgtcctaatctttaggatcctcagatgtcaaacaaaaaaaaaccaacaacctcttcctttgtgtttgtgagctcaagttgaagtttttagttcgaagacttttactctcttcactgttgttgtgttgtgcttcttctgggaaggttctggggttcaacggattcccccccccccccccaagacaagaccaacaagtttctaaatttagatagtgtcgagagatatcattgggattggataagtttctagaaatggaaagttccaagaacaatagagtggagaagagagggtacgagctagttgaggagggtgatgatgcacaacaccatcttacacaatcaaagaaaccaaaactacccggtttaaccagtgtgattgtggaagctttaaaggtggatagtatgcaaagactctgctcatc

SEQ ID NO: 23314 - DNA, 443 bp, Glycine max
ggatctgcaactgcaacagcaagcacaaacatcaagcatagtcattgttattgtaacgtaaaatcacatggagaaggaagctttgaaggaccaaattgaaactccaaagcactgaacgaactcaattgaaaccctagcacagagtcatacatagatagtagcgtggatagcagtgtgtgatgcggtgatcgcgatcacgatgaaaaatgcaaacggcttgatttcgacgacgtcgtctaatacggcacagtcacaatccactggcctcaagacgtatttcaagactcacgaaggccggtacaagctttattacgataagacttacccttccactcttcttcactacgctcatggcaaaaccgtttctcaggtcgctctcttggtctttttttcccctctttcttattctgcctttgcaatactcttttgtattgctattatgt

SEQ ID NO: 23315 - DNA, 441 bp, Glycine max
  modified_base (410)..(410): a, c, g, t, unknown, or other
  modified_base (416)..(416): a, c, g, t, unknown, or other
gacgcccgagtgggagtaggcgtttgccatgcttgtgcgtgagggatgggcttaacgttaatctcatgtcatgctttttaacccactcacacactctctcttctttcttcatgcccgcctccctttcttcttcctttgatccgttcatacggtggttagatgatggaatcctgtgattgtatagacacacagtatcctccagatgaacttctcgtaaagtatcagtatatctcggatgtgctaattgctcttgcctatttttctattcccgtggagctcatctattttgttcagaagtctgctttctttccatatagatgggtgcttatgcagtttggtgcttttattgatctctgtggagcaactcatttcataaacctgtggacattctccccacactctaaggctgntgctgntgtcatgacgattgccaaagtgtcg

SEQ ID NO: 23316 - DNA, 252 bp, Glycine max
  modified_base (39)..(39): a, c, g, t, unknown, or other
  modified_base (66)..(66): a, c, g, t, unknown, or other
  modified_base (119)..(119): a, c, g, t, unknown, or other
  modified_base (156)..(156): a, c, g, t, unknown, or other
  modified_base (212)..(212): a, c, g, t, unknown, or other
gagcgccgaaaaaggcaggcaaaaggggggggcagagancacaacggggcgcaccagcacaagacnagaggaccacaccaagcgagcaacagcaggccaagggaaggagcgaagagacncggagccgcaagacaacgagaaacgaacgcgacagcngccacaggagacgaaccaccgaggggacagaagagcaggagaggagccacaggaanaacaagcggaacaagcgccaaaccggcagcaggagaaacc

SEQ ID NO: 23317 - DNA, 53 bp, Glycine max
gagacctcaggtcaggcggggctacccgctgagtgtaagcatatcaataagcg

SEQ ID NO: 23318 - DNA, 461 bp, Glycine max
  modified_base (10)..(10): a, c, g, t, unknown, or other
ggcggcattnggagcatgtggcgaagctccatttactagccacgagaccctatgtggttgggttcgtgttgccactgcggctgaagctcttgatgggcttcaggatctttctatacagaccgtctcaccagtcacgactattccttttccaattgtggcaaattgattacatcaacgaagcccgagtcttcaacgaggccataaaggaacgtgctctcaggctaaattggagaacactcactccttctcgttaattcaacagcgataattcgcaagtcactcaacatagcctgcatgacctttctatgctatcgctctagtcaccactcactttggggttctttgcggtgaaagaaacatagaagaaagttcaatcaacgcggaacgtatgctctacttccatcattccaccttcggacagacgtttccggctactactttatcatacctgttgtgtcttg

SEQ ID NO: 23319 - DNA, 267 bp, Glycine max
ttttaaaaacaattttacacttaatcttttccaattctaaattcttcaataactttcctaactcacactatttctccatcaaaatcctttaccttaaacatttccttcccctcaactttatttaacatctcattaaataaatatcaaccattaattttattaatcaccccatcttttttacaatactttattatattatttttccatccatacaaatatttacactttttctttatttttttatttattacaactattttacaaaat

SEQ ID NO: 23320 - DNA, 387 bp, Glycine max
gggggtagccggcgagacacaggggattccttaattctccatggatatggtgctctgttctgtacccatcatctctctttttctttttcctttttggtttattagtgtgccttggatttgatttttgataagcacaggggaagaaagaaggtgaagcccccgtgttgtggttcgaaacctctgactctgtctgttgccaacaccagtttgaacccgatggtcgactctccgtagtgattgttgatgattccaggcccctataccaaaggatggctggatctttcatgaataaatttttcccctcaggatatccgtacagtgtgaatgaaagctatcttagatacacgcagtttcgagctttgcaacatgttaccagggcagcactat

SEQ ID NO: 23321 - DNA, 345 bp, Glycine max
ccggcgttgacagcgcggcacctgacggaagagcagtgggaggactactgatatatctcggagctggcgatccaaggggactatgaaacgcgcctgatggacacggaggagatgaaagagcggagcgtgtagcagaccacgcaggggacggagtgtatggaacagctggcagcgatggaagggatgagtgaatggctgaggaaggctgaaggagcggcggaatacggctcggagatatgacggagacttgtctatttgtcacgtgcggcacagacgccaggggcattgaccaggcgtaagacatgaacgccattcaccggctggaggaaaagccttcagtgaggg

SEQ ID NO: 23322 - DNA, 196 bp, Glycine max
  modified_base (91)..(91): a, c, g, t, unknown, or other
  modified_base (94)..(94): a, c, g, t, unknown, or other
  modified_base (110)..(111): a, c, g, t, unknown, or other
  modified_base (114)..(115): a, c, g, t, unknown, or other
  modified_base (148)..(148): a, c, g, t, unknown, or other
  modified_base (151)..(153): a, c, g, t, unknown, or other
  modified_base (160)..(160): a, c, g, t, unknown, or other
  modified_base (179)..(180): a, c, g, t, unknown, or other
ggagcacgcaaccgaaccaggcaagaagggaaaccacagcgcaggaaaaggcacaagcgagggaaccgaagcagaaagaggagggacagcnccncgagcgcaccaaggcnncgnnacaccggaacgacagcgagaacagagccaaacnccnnncgcagcnaaaggggggacagacaggnngcagaagccagccacc

SEQ ID NO: 23323 - DNA, 326 bp, Glycine max
gattccaccttaaacccatttccataatcacttgggggtactttcttctccatgcatcccttgactaattaattatccctcacaactaccaatggccgaagagaaacaccacaagcaccgcctcttccaccaccacaaggactaggataataagccagtagaaaccgatactggttacgacaacacatcatattccaagccttctgatgactatgactctggtttcaacaagccatcgtatgagtcttctggcggtggttatgaaagtggttacaacaaaacatcttattctagtgattagccagcttctggtggtggctattaaa

SEQ ID NO: 23324 - DNA, 460 bp, Glycine max
cgacagaaggggacaccaacacatccattcattgtcttaatgttagcaatgtcttcctcttgctccatccatttcttcctccggctctcaatagcccttttctcagtttgttgcttagcagcatctcaagctcccaccaccaaatcacacccctatatccttcccattaagaaagaccccgcaacaaatttgtactacacttcagttggcattggaactcctaggcacaactttgatttagtcattgatctttctggtgaaaacttatggtacgattgtgacactcattacaactcatcatcctacagacctatagcttgtggctcaaagcaatgccccgaaattggatgtgttggttgcaatggccccttcaaaccaggttgcacaaacaatacatgccctgctaatgtaatcaaccaattagccaaattcatttacagtggtggcttatgtgaagatt

SEQ ID NO: 23325 - DNA, 385 bp, Glycine max
atatatcgggctcaatcctgtggctccctccttgagaaggaaggggggatccatgcgacttggttatgaaacccaaccctaaacaacttggtctcaaacaagttgattttgattaagtgaatagggtctgaacatctaaatttgttttaaactttttaaaactgaggttttaaataaacacacaatacaaattatgaaaaatcaccttgaagctagtcacttagctggcgtatcatgaaagtgttatggcgatattgcttaacaattaagtactcaatctcaataagtcaacaatgacattcgaagaaattgaaatacgttatggaagggaagtcccatagtcaatgtgtggagggcaatcgaaagaaatggaaaccttaaactg

SEQ ID NO: 23326 - DNA, 429 bp, Glycine max
gacggcatcttgctagtatacgtaggaaaacttggacagggtgctaattaatttctttattattttccaaattccaatcaaaatttccagtacgacagtttggaaagcgaacattgaaattcagatagggttcattgattgatacgaataaaaattgaacacgacttatcgtctgaagcatctggcaggttgattagttagtcccttttgtgacaatgatttggtgattttgaatcttcgggtgcagcaagataatcgtgaaaattgggtctccaaaatttgtttgaggggattttgtttcttgagctaaaccaaaacatgaatgaaaatactgtgaggtctgctggtgcagatctgacagctgctatagtaccattgttgaagctgctatgcctaacagtcattggactacttcttgcaaacccaaca

SEQ ID NO: 23327 - DNA, 289 bp, Glycine max
gacaattgagactagagaacagggaggtgcttgtaccctagtcgtgagaagaaaggaaagggataagaggaaaatggtgtgcataacgaaagcgacggttaaagaccttatgtcgatgcacgcatgcaacctgttctgccttcctgagaactaccagacgaagtactacctctatcacatcctgtcctggccccaactactctacttctgcgaagactacaacgggcgcatcgatcgctacgtgctcgacgagatggaggaagaaaccaccgactgccacggccacatg

SEQ ID NO: 23328 - DNA, 201 bp, Glycine max
  modified_base (1)..(2): a, c, g, t, unknown, or other
  modified_base (13)..(13): a, c, g, t, unknown, or other
  modified_base (31)..(31): a, c, g, t, unknown, or other
  modified_base (88)..(88): a, c, g, t, unknown, or other
  modified_base (97)..(97): a, c, g, t, unknown, or other
  modified_base (108)..(108): a, c, g, t, unknown, or other
  modified_base (120)..(120): a, c, g, t, unknown, or other
  modified_base (135)..(135): a, c, g, t, unknown, or other
  modified_base (171)..(171): a, c, g, t, unknown, or other
nnccacctcaagngaaggggcaagaaaacangccccagaggagaaggagcccagcgcaaaagaaagacacaagcccacgggaaaaacnccaacccgngagaaggggcnagagaaccacanccggagaacacaggnaaagcacggggaaaacaaaaaacacacagggcaagncacgccaagggaggagggacgcgggaccca

SEQ ID NO: 23329 - DNA, 410 bp, Glycine max
gatttagtgaaggtgaagatccctacttttaaaaggatttatgatccagaagtgtgtcttgagtggaaaatgaaggtcgagtatgtctttgcttgctacaactacaatgaagagaaaaagatcaaattggcctccctggagtttgagggatatgccttagtgtggtggaatcaagtgaggagtgatgttgagagaatgaaaaggttgttaattgatacttggcaatacatgaaaagagttttgagagagagatttgtgttgtcttattatgggagagaccttcacaacaagcttcaaagactaattcgaggaaataggagtgtggttgagtattacaaagagatggagatttccttgattaaggctcaaattgataagtctcaagaggccaccatggcaaagtttttgca

SEQ ID NO: 23330 - DNA, 419 bp, Glycine max
  modified_base (5)..(5): a, c, g, t, unknown, or other
ggggngactggataaaataaaactaagcccataaaataggatagagtgacagacagattcgggatttaccatttaccacaccaaaaccaatcggatcgtttcctctgcggagtcagaaatccatggatccctacaagaatcggccatcaagcgccttcaattctcccttctggactactaattccggtgctcccatctggaacaacaactcatcgctgactgttggatctagaggtccaattctgctggaagattaccatctggtggagaagcttgcaaactttgacagggaacggatccccgaacgtgttgtccatgctcgtggagctagcgcaaagggtttctttgaagtcacgcatgacatttctcaccttacatgtgccgattttctccgagcccctggagttcagacccctctc

SEQ ID NO: 23331 - DNA, 297 bp, Glycine max
ttgtcatatacagcctcttatcacattgaaaatggatgtggacattcatctagatgtgcaaattcagtaaccagtgttaagaaaatgtcctggcatacaggagttaaatggaacttaacccttgtacaagaaacgtgatttctgatataaagttagaaagccaattttaaaacatatctagcatcaagcaggtaataactcatcagaaacagcatctaagacggagttaatgtttacattttcaggatataaatgaacataaaaaaatgaccccttttattagtacttgacaatgga

SEQ ID NO: 23332 - DNA, 200 bp, Glycine max
atatcaatgatgatcatgtgtggctatttttaactagaggattaactgctatcttaatttactttaaaatggactcaaataatcaaattttaattgtcattcatcctactgatcatttgtttaatcatcaccaatgtctatcacttataacaaatcttatttcatttgattttaaacatttcctattttatcattaccat

SEQ ID NO: 23333 - DNA, 232 bp, Glycine max
  modified_base (7)..(7): a, c, g, t, unknown, or other
  modified_base (15)..(15): a, c, g, t, unknown, or other
  modified_base (25)..(25): a, c, g, t, unknown, or other
  modified_base (43)..(43): a, c, g, t, unknown, or other
  modified_base (85)..(85): a, c, g, t, unknown, or other
  modified_base (93)..(93): a, c, g, t, unknown, or other
  modified_base (108)..(108): a, c, g, t, unknown, or other
  modified_base (110)..(110): a, c, g, t, unknown, or other
  modified_base (160)..(160): a, c, g, t, unknown, or other
  modified_base (169)..(169): a, c, g, t, unknown, or other
  modified_base (171)..(172): a, c, g, t, unknown, or other
  modified_base (174)..(174): a, c, g, t, unknown, or other
  modified_base (176)..(176): a, c, g, t, unknown, or other
  modified_base (224)..(224): a, c, g, t, unknown, or other
ggcgcanagaagggncgaaagggcngaaagagaacgcgggganaggcggaacgaaaccgggggggaccggaaacaaaagaacaangaaccggncaaagcaaaggcaananaacaagaggaccacggaaacaaaaaaaaagaagggaagagaaggcgaaangagagacangnngngncaccacagagaaaacgcgagacgggggcaaagaaagaaagcgagacancgcagcaa

SEQ ID NO: 23334 - DNA, 369 bp, Glycine max
  modified_base (46)..(46): a, c, g, t, unknown, or other
  modified_base (62)..(62): a, c, g, t, unknown, or other
  modified_base (100)..(100): a, c, g, t, unknown, or other
  modified_base (164)..(164): a, c, g, t, unknown, or other
  modified_base (168)..(168): a, c, g, t, unknown, or other
  modified_base (176)..(176): a, c, g, t, unknown, or other
  modified_base (205)..(205): a, c, g, t, unknown, or other
  modified_base (216)..(216): a, c, g, t, unknown, or other
  modified_base (233)..(233): a, c, g, t, unknown, or other
  modified_base (254)..(254): a, c, g, t, unknown, or other
  modified_base (273)..(273): a, c, g, t, unknown, or other
  modified_base (279)..(279): a, c, g, t, unknown, or other
  modified_base (284)..(284): a, c, g, t, unknown, or other
  modified_base (306)..(306): a, c, g, t, unknown, or other
  modified_base (339)..(339): a, c, g, t, unknown, or other
gagaagagaacgcggaagaagaagaagaaggaacggacgcaggaanaaaccggaccgagcancgaaacgggagcaagagcgaagaagaaaagcgaagagngcggggagaagcagcagccacagcagagagaaggagaaggagaagcagagagagagccgcacgncgcngaaacccnggcacgcgcaccaaaacgacgccgcagcngagcggaagcnccaccaggaggagcccncgcacgacaaggccagagacnacgacaaccgcacgccgcnccacgnggcgncgcaccacggcaggaacgacgncgccaccaggcgcaaacgaggcggcgccgacgncaacgcgcaagaacgcgggaaaaacacccc

SEQ ID NO: 23335 - DNA, 424 bp, Glycine max
ggcccaaaaatctctcaagaaatcatagcgaaagggcaactagcacttcaaattcgctgtctcagtccctcgtatccaactattttgcttaggattttccttcttcatcacaacctcgtaataaattcgttaagttcctccttgtttggtcccaaacaatctgagaaccctctttcaattcctcttcctcaactccatcgttcatcgccgtccactattattagcaattggtatttagtaattaattaattactaacattagttaataataatggaccctgcagagctgaagcgcgttttccaattgttcgaccgcaacggtgacgggagaatctcattgaaggagctgagcgattcgttggagaatctaagcatcttgatcccggacaaggaccttgctcagatgatcgagagaatcgacatg

SEQ ID NO: 23336 - DNA, 392 bp, Glycine max
  modified_base (13)..(13): a, c, g, t, unknown, or other
  modified_base (26)..(26): a, c, g, t, unknown, or other
cggggccaaccgncgaagacatgggncagaagaatcagggcctggtcgtcttcacttccaaatcagccaatgaagcttctgagggcattgcctatcagtggacatacgtagtataaaaccaatatggagatgatggcatgaaagctgtgtcttgtccaagccgtgcagaatcacccgcattgaacacaaagtctagatcatcggttctggtcaactactttcattctgcttcaaatcgatcttaagcctgcgcttacaattctgcttcactacttgacatgatgaagacttgtcactaaacagccggtaaccgttgggccaatttcattgctgctgattattaccaaaggagtgattgcgcaagagcaccactagccgatgattaagcaaat

SEQ ID NO: 23337 - DNA, 344 bp, Glycine max
  modified_base (5)..(5): a, c, g, t, unknown, or other
  modified_base (14)..(14): a, c, g, t, unknown, or other
  modified_base (59)..(59): a, c, g, t, unknown, or other
  modified_base (69)..(69): a, c, g, t, unknown, or other
  modified_base (74)..(74): a, c, g, t, unknown, or other
  modified_base (89)..(89): a, c, g, t, unknown, or other
  modified_base (95)..(95): a, c, g, t, unknown, or other
  modified_base (97)..(97): a, c, g, t, unknown, or other
  modified_base (107)..(107): a, c, g, t, unknown, or other
  modified_base (125)..(125): a, c, g, t, unknown, or other
  modified_base (127)..(127): a, c, g, t, unknown, or other
  modified_base (131)..(131): a, c, g, t, unknown, or other
  modified_base (138)..(138): a, c, g, t, unknown, or other
  modified_base (173)..(173): a, c, g, t, unknown, or other
  modified_base (175)..(175): a, c, g, t, unknown, or other
  modified_base (179)..(179): a, c, g, t, unknown, or other
  modified_base (204)..(204): a, c, g, t, unknown, or other
  modified_base (216)..(216): a, c, g, t, unknown, or other
  modified_base (221)..(221): a, c, g, t, unknown, or other
  modified_base (231)..(232): a, c, g, t, unknown, or other
  modified_base (256)..(257): a, c, g, t, unknown, or other
  modified_base (295)..(295): a, c, g, t, unknown, or other
  modified_base (298)..(298): a, c, g, t, unknown, or other
  modified_base (321)..(322): a, c, g, t, unknown, or other
  modified_base (332)..(332): a, c, g, t, unknown, or other
  modified_base (334)..(335): a, c, g, t, unknown, or other
gaganaccgacagnggcagagagagaaagacgaggggagggggagagaagctctcgggncagccctaanggccnacgctggcaaccgcngaaacngnaggcgccagncgcgcaaagaaacagagngngccnaagaaanagcaagagcggagagggaccggaaagaagaacagnangggngaggaagaaccagcgaacgaaggcncgaagagcgacncagangagaagagcnngcaggagaacacccgggaagaaannaccgagaaaaaggacccggaaaccgaaggaggaaaagnccnggagaacaaaggaaacaaagagnngaaagaaaanannggaaaagaa

SEQ ID NO: 23338 - DNA, 190 bp, Glycine max
gccttacggccagggcctgggagagaaaaaccatgaccgggtcagcgacgcggtcgggtcagccctagtggccttcgatggcatcctctataactggacgctccaggtgcacaaccaatcagagggtgctggcgagaaagctaggtcgtgtacaaaccgtgcataatatcacgctgggtgcacaagaacc

SEQ ID NO: 23339 - DNA, 449 bp, Glycine max
aagaatggagtggacattgtctctggcacacgcggcatgtctcactttgccaaacccaattggcgcagtgtctacaagcgcattgcgcttaatcatccagatgcccgagttggggtattttactgtgggccatcagcccccacccatgagcttcgtcagctagcattggatttctctcacaacacatccaccaagtacgacttccataaagaaaatttctgacaagataggggaattatcggagatcaggtgaaggatgatgtggaacgagctaaggcgtccaccttgatccccattccccaccacctagatgattgcctataaataattaagtttctacatatggttggttgttatggctttgtaaaagcacgaaggctggcggctgctaaatggttgaagtagtgagttggctaccaattacaaaaagtgtgggcgtctggttggat

SEQ ID NO: 23340 - DNA, 317 bp, Glycine max
gacgattattccacgcacatttaatacttgatattcatgcactgtttctttgttccggtgcctcgcatggcatcaactactctcttcagcttcagactctctttgaacccactgcaccatcaacagacaactaggccaaaatctctgctctcctctcctcgcaccaatccacgcctcgcttctttcattaacaatcatttggccctcacacatgtcacatacccgcttctccaatctcactctgctcctaagcgcaaattccatgtgtattctgatggggaaagctcctagtcgcttgtttctgactctacatacca

SEQ ID NO: 23341 - DNA, 360 bp, Glycine max
agaaaaagaaaagaagtgttcggaatcaaatgatgctcttggttctcctgaaatctcaaaggaagaattgtctgcagttgctgatatggagcaaaataatcctattagctgcaggagtttagttattgaagcaaatgaaactaatctattgggggatgattctcctaacatcgaagatgaagaattctctagtgagtgtaatactttgaaaccacatgacctctctcatgatgattgcggggaagaaatttcaaatacaaaagatgagatgggtcagtctacaattgaacaatcaatgctctctcatcgaagactaagatgtaagaaagaatttcaacttgatatgcctatgaagtggtc

SEQ ID NO: 23342 - DNA, 432 bp, Glycine max
  modified_base (414)..(414): a, c, g, t, unknown, or other
gaatgatctgttgtgaattgttttatgctgtcagagcttataatttgaatgatctgttgtgaattgttttgtcttgtgatgtcaatattctgataagttgctctgcagtgtattcatttattgaagcattaacattattccttaattcaagtaatctttgagatatatcagagtagagttttactctgtaatctgattatgtttaatcactttacttttacagttgctggttaggttctgtcagttgtatatagctgtacaagagaatgcctaaagactaagagttagttacagagtacagctgtcacacaacagacagcctaactgacaacattaaaagtacagtggttacacatattacatagtaaaactctattctaataaaggtagataattgatggttaatgatatttntaaatgaataatagtttg

SEQ ID NO: 23343 - DNA, 382 bp, Glycine max
gaattatctgttgtgaattgttctatgctgtacagaacttataatttgaatgagcgggttgtgaattgttttgtcttgtgatgtcaatattctgataagttgctctgcattgtattcatttattgaagcattaacactattccttaattcaagtaatctttgagatatatcagagtagatttttactctgtaatctcattatctttaatcactctacttttacatttgctggttaagttctctcacttgtatatacctgtacaacaaaatgcctaaagactaagagttagttacagagtacatctttctcacatcaaacaccctaactgacaacattattattacaattactacacatattacatatttaaactctatttta

SEQ ID NO: 23344 - DNA, 420 bp, Glycine max
  modified_base (383)..(383): a, c, g, t, unknown, or other
gggaagcaaagacagacactagctattcgaatttgaggtctcccaaataactaggatgatttggatagcactttttttagtttcactggcttttctgcggttatggagaagcaataagaatgcaaagaaattaccacctggtccaaaagggttgccaattttgggaagccttcacaagttgggaccaaatcctcatcgtgacctgcacaaactagcccaaaaatatggacctgtcatgcacttacgtttaggttttgtgccgaccatagttgtttcttcacccaaatctgctgaattgttcctcaagacccatgaccttgtctttgctagtagaccacgtttcgtggcggatcaatacatcttttgggggcagaggaacttangctttgctgaatatggttcttattggcgcaacatgcc

SEQ ID NO: 23345 - DNA, 376 bp, Glycine max
ggttcctctctctctctttctctctctcctggcggtgttttccagtggcgcattgcatgaaacgagggggagagtttcattgtgaaggtataacccagcctttgtttgcaccattccctcaaaccatttacatcatcatccaccactctctcctccctcctttctgctttcttctttctatttcaacaacccaagttatagattatttatgcgtgcgtgcatcttctattttcctctcactagtgaatgctctagtggttggtattaagttttaagagactaaacacccgttttttcaacgaaatttgtgcatactttgtcaggtaagttacagcgtgaaataaaaccctatttcactccatgtaacatacacaca

SEQ ID NO: 23346 - DNA, 250 bp, Glycine max
taaggttctggttctatgtttcataatgtgttcaagatgtacataatcattgttagtttaaattgtttgttttaccccgttttgtggtttgcattaattcttttgttcattttacatttttttttgcttattttaagttttgtttttaataataatcttaatttgctttttatttatataaattttacttatattattttttattgaaaatctttttacatttaatggtttgaacttttattatttaatt

SEQ ID NO: 23347 - DNA, 316 bp, Glycine max
gaaacagggctgggctatcgactctttctaggggtctacgaattcacgtgtaggttgtcagtgaatgttattgagtttgcgcatgccgcgttgcagatatgggatcttgggcggtactttgcaacgggaaagcacttggcaggagcaccagctaatggggtatatcactttcacgctggatcagatcctgacataccttctaatgtcactatcatcatcagctgacactagagcctatgactgggaggccaattgccgtgaagacaagttcccttacatggctaatgcatatggggctttgacctcggttgctttt

SEQ ID NO: 23348 - DNA, 412 bp, Glycine max
gacctcaccgagtcgcagcgatcgaagtttcacatgagccttatccagtttagggtttcggttccttaccctacctttgacgtatcgaaaccttaaatttgggattaggtctgagcaatctggttggtagaacctttggtcttagagagtcaagttttatgtctggattagacgatcaaattcctactgccttcgatccttttgctgatgcaaatgctgatgactcgggtgctgggtcaaaggagtatgtgcatattcgcgttcagcagcgaaatggtaggaaaagcctgacaaccgttcagggattgaaaaaagaattcagctataacaagatacttaaagacgttaagaaagagttctgttgcaatggaacagttgttcaggacccagaactaggacaggttattcaact

SEQ ID NO: 23349 - DNA, 412 bp, Glycine max
ggcacaagtgagtttgttgatcgagataactagggacagtgtgatgaaaatgaaggtccttgttttcttcgttgctacaattttggtagcatggcaatgccatgcgtacgatatgttccctctccgaatgaacactggctatggtgcccgtactccggaggtgaaatgcgcaagttggaggcttgctgtggaagcacacaacatctttggctttgagaccattcctgaagagtgcgttgaagcaacaaaggaatacatccatggcgaacaatatagatcagactccaaaacagttaaccaacaagcttacttttatgctagagacctcgaagtccatcccaaggacacatttgtgttcagtatagatggcaccgtactctctaatattccatactacaaaaaacatggatat

SEQ ID NO: 23350 - DNA, 415 bp, Glycine max
gtgtgaattattgtacatttcctatataatgtgtgtgttttaatttgacagatatgagaatagcttgccgagagtggacatgtttgtgttcacggcagacccaatcattgagccacccatgatggtgattaatacagtgttatctgtgatggcttatgactatccagcagagaagctcagtgtgtatctctcggatgatgcaggctcagacataactttttatgctcttttagaggcttctacctttgccaagcattgggtgccattctgcaagagatttaaggtggaaccgaggtcacctgctgcttattttaatacccttgtatcaacaaactcacacgaccataaccatgccaaagacttagatgccatcaaagtgcggagtaatcacatttttttaggctcatgtcacttg

SEQ ID NO: 23351 - DNA, 426 bp, Glycine max
caatatgctacggagtgactcaactcgttctagtggtcttctaatattgatacgttgaatatatcaggcttgtatacttgcaagcgtaccctacataataataataggactactcaaaagtctacatatcaaatccaaaatatcaacagcattcctaattatttaagggaattatactcacagttgaggctgattaaaagattctttcaatacacttactgttgcaggcaccagaatctacctccagattatatgtgctacacaggctgatagttatgataagaatgatcaagggtattcacttgctagaaccaagattataccaattcacgttctaatcaactaacttgtacacttaattatcgactactagaactaactcatgcctatgaccaataccataagatgctataactctttgctcaa

SEQ ID NO: 23352 - DNA, 388 bp, Glycine max
ataaaaaataaacatatattgagaatggagggttgtgtgaagaagttgctatgccttgttgggtttgtggtgcttgtgagtactattggtggggtggagagtgctggtgaatgtgggaaatctacaacccctgataatgaggcttataagcttgcaccatgtgcctcagcagcacaagatgagaatgctagtgtttctcagagttgctgtgctcaggtgaagaaaattgggcagaaccctagttgcctctgtgcagttcttctctctaacacagccaaaatggctggcgtcaaccctcaagttgctgtcaccattcccaagcgttgtaacctggctaatcgccctgttggttacaagtgtggaccttacactctgccttgaaagagtt

SEQ ID NO: 23353 - DNA, 401 bp, Glycine max
agaagggcaacataagtcatcgaaaggatctcgaagacccaccagggcacgaaagccgggatctttcagaaaatggattcctattcgaagggtgcataaccgcatggataagctcacactaacccgtcaatttgggatccaattcggttccttaggaggtatcgggaaggaattttggaatgtaataatatcgattcatacagatacagaagaaagggttctctattgattcaaacgctctacctacgagatagggatagagaaagaggaaaaaaccgaagatttcacatagtacttttggtcgaaaaatcgatctgatttttttcgtacttttcgctcaatgatgaaatgggtcagattctacaggaccaaaccttgtgggagttaaagaatgatggaag

SEQ ID NO: 23354 - DNA, 114 bp, Glycine max
ttttattaaaatgtatgatctcatatattacttttctacaatttatatatcatatcaattccatgcttactatatattccctctccgaattaacactgtctattgtgcccctac

SEQ ID NO: 23355 - DNA, 347 bp, Glycine max
ataaaaaataaacatatattgaggagggagggttgtgtggagaagatgctatgccttgttgggtttgtggtgcttgtgagtactattggtggggtggagaatgctggtgaatgtgggaaatctacaacccctgataatgaggcttataagcttgcaccatgtgcctcagcagcacaagatgagaatgctagtgtttctcagagttgctgtgctcatgtgaagaaaattgggcagaaccctaattgcctctgtgcagttcttctctctaacacaggcaaaatggctggcgttaacccttaagttgctgtcaccattcccaagcgttgtaacctggctaatcgccctgt

SEQ ID NO: 23356 - DNA, 400 bp, Glycine max
ggcgccactcccatttctcgctctcattcttcttcagatgccaaacctaacctaacctcccaaacaaactcaaccttatcatcatcatcgtcgtcgtttaaataaattctgatctccacgcacacgctctgagtcagatcatgctgcgtttgtgctacggccctctggattgctgcttccgacgccgccgtgccgactgactcctctggcacaccgacttgaagccccacgcctccggcgacttctccatcgccgtcgcccatgccaattactgtctcgaagatcagagccaagtcttcaccttcccctacgccacctacgtcggcgtctacgacggccacagcggccccgaagcttctcgattcgtcaacaagcgcctcttcccttatttgcacaaatt

SEQ ID NO: 23357 - DNA, 413 bp, Glycine max
ttcctttaatttttttcattatatctattcattgagtaagtgatgatccaacagttcttactcagggaatttttggacttcgatttaaggtttttttgaatcatcgtggttatagtatgaatctgatgtttttttaattgattcatagggtcctaacaagagaattcctatcaataataaaaattcaataataataaagaagacaacagtaaaatcatattatacacaataaaaaatgaagtaaatagtagaatattcaagaggccttaaaagatcaagataaagacgaaagaaccgacttgatattttagcattataaccaaaaagaatagctttcggatctctattttttattatcgtcaaagaaaattagaatcataggattaaataaagaaatttcaaactttctatta

SEQ ID NO: 23358 - DNA, 414 bp, Glycine max
ggctcacaaacatcacaactatgtccttgggaatggttcgatcccgagcgatttcattggcatcgaagcgattcctctgcaccaatgccgcttccgcttcccctcctcttccccctcctccttccgccgcctctcccagccgctggagcttcctcaaatacgccctcgtcggcgctctcaccggaggcactgtctttgccggttacgcctcttacgcttacagcttggacgaaatagaacagaaaacgaggtcgctccgtgaatcggccaagtacactgctggtgatggagtcactgctcttgataaatttcaaggtttgctatactcaactgcaatgacagttcctgctaaagcagtagagctttatttggatgcaagaagggtaattgaagaacatagtaagaagtatactg

SEQ ID NO: 23359 - DNA, 423 bp, Glycine max
gtgttgctcttgttaaccatagttacatggaggggtggtatagaacaatcagggttattgcttctatcatctattccggaacattgctcaatatagaactgattagagagagagagaaaaaaaagcatgtatgctttttattgatttattgttacgtgaaatcaggtgaggaagtcaatgtgtcgcatcaagcatgtacttactgagagagcaattgaagaaccagatcccaggaggtctgctgagatgaaaagaatgataaatgttctttgatgacttaaaattgacctgttcttgtgatgacattactgggtatgttgttagaataggacatctacatttgcggatgtaaggttcgctaacttgaagcattgtccaaaaatattgtttatgaaggagtttacccgtgaatgatttttgctt

SEQ ID NO: 23360 - DNA, 417 bp, Glycine max
gagggcggtgttactccttctctcgttgattcggatctagagtcttttttcactcttcagttctcgttgttgttcttcgctttcctgaaactagggttttcaatttcgattcattcgttaataattaaagatgtttgggagggcaccgaagaagagcgataatacgaggtactacgaaatcctcggcgtctcgaagaacgcttcgcaggatgatctgaagaaggcttacaagaaagccgccatcaagaatcaccctgacaagggcggtgatcccgagaagtttaaagagctggcacaagcatatgaagttctgagtgaccctgagaagcgtgagatatatgatcagtatggtgaagatgcgcttaaagaaagaatgggtggtggcggtggccatgatccgtttgatatcttttcatc

SEQ ID NO: 23361 - DNA, 404 bp, Glycine max
gggtggagagtggtgagtagtgaccaaagcaaacgcacgcactctattattgaagggaagatgaaagatgaagatggcacaccccaaagtgcaggtaagggacagtacaagttgtgggtgttgggtgctatcattcttcttgctctttggtccatgttcactgcttctctcactctcaaatggtcagctgggaacctcaaccgtgacttcgattctgccactctcaacgatttcgatgtcctggaagtggaggagagggagaaagtggtgaggcgcatgtgggatgtgtatactcaaagcaagagtggcaggggaagtggcttacctcgtttttggagtgatgcttttcatgcggcttacgaccacttggtcagtgatgttcagagcgttcgaaatgctgctgt

SEQ ID NO: 23362 - DNA, 392 bp, Glycine max
gaatgtgagataaccatcaaacgctctttccagaacttgttccataactgacaacctgatcttcatgaatttgagaagtattgccacacccactgtttcctgtaaagcgggaagcaacaacaatttccttttctggattttggtttgcttcttgctaccaagttttctgggagctcctgaagtatatgctcatttccaattgataaagctcatttggggtgtgatcttttggcaaggcacacccatttgtggtgtcattttctgaagtttccttgtttttatcaaaggaccatggtttccgcccagttctctatcttgaatgaaaatggttcacagaagcctttcctgaatcagttgcttctaccaaatgggccgcctgatcgtttgccttc

SEQ ID NO: 23363 - DNA, 369 bp, Glycine max
ctcacacaagcctacagctgggagaacacgacatacagcgaatgctagataaccatcgggcgctgtttacagaactgggtacataactgacagcctgatcttcatgaatttgagacgtattgccacacccacatgatgactgtcatgcgggaagcaacaactcttaccttatctggattttggcctgcttgttcctaccaaactcactggcagctcctaaactatatgctcattttcaatagagctatctcatttgacttgatatcatctgtcgaggcacactcatttgtggtgagcttttctgaagtttactagtgaatatcaaaggaccacagttgacgtacagttccctatccctaatgaaattgg

SEQ ID NO: 23364 - DNA, 330 bp, Glycine max
gattccaatcctgtctttctttccctcttggtctgtgctttcaagtagttccataaggcactttgtgttgtgtctacaatttttaagtcacttgtcaaccttatcaaattaaccccctacacatttatttagctagctagcctatgtattaattaggcacataatgtgaagcccagaatccaatctgctacccggttttatgattcacccaacctatgagtaacttattgttgaataccttagtaaaaaggtaccaattcatacccttgaccgtttacattattgctgaggttgatatctacaaattggatccatggagacttactatct

SEQ ID NO: 23365 - DNA, 416 bp, Glycine max
tcaaaaaatggagagtaatccgtatcatctttcggggggacgatatactgatgtatactatggctgaagttcgaacaacacgcaattcattttgggccgttttcactttgttagggtcattggctttaatgttcgttgcaatttccacctatctagctatggatctcgctctttatttctgagaaaattaccgattacctcttctattactgactctatttatactacatttattccacaaggggccacgatggctttatatggaatcgccgctctctttagtagtttacatttagcgtcaattattttttgagatatataccgtggttttgatatcttcaattaaaaacggaaaaaggcactttttgatcgatggggattacctgcaaaaaactgttggattattctcgaaatac

SEQ ID NO: 23366 - DNA, 415 bp, Glycine max
ataagcagcatcaactaaacctaaaatcttctgcgccacccagcattgtagcatagtgattctgctcactacaatgccatcatcactatcctcattcctccgtatggctcctattctctcccttcttgtactctcatgtgtgattagttctagtagtgctcagggaccaccttcacctggctactatcctagttctaaaattagtcctgttagtttttatcaagggtttagaaacctctggggatctcagcatcagagactagaccagggctcattgacaatctggcttgactctaactcatgaagtggattcaagtcacttcactcttatcgatctggttactttggtgctgccattaagcttcaacctggttacactgcgggagtcattacatcattatatctttcaaacaac

SEQ ID NO: 23367 - DNA, 325 bp, Glycine max
ctttcactacccttattctgatatatcatcatttgctgttttttaaaacatgggaaacatcaccacacaattaataagttctacagcacaattttaattattcaatttaatgtcatatactaatgaacttattctaacccaatattttcactacccactattacattacaatgcaccaattgtttaccttctacaaactaaaaccctcattttaccctatataccactatctttattctcattccaactcttcaacaaaaccttctctcacattactcaaacttagtctcttcatctcattcatcgctatagcttgctaattttt

SEQ ID NO: 23368 - DNA, 402 bp, Glycine max
ggcacaagtgagtttgttgatcgagataacttggaacagtgtgatgaaaatgaaggtgcttggtttcttcgttgctacaattttggtagcatggcaatgccatgcgtacgatatggtccctcttcgaatgaacactggctattgggcccgtacttcggaagtgaaatgcgcaagttggaagcttgcttgggagcacacaacattttggtttgagacattctgaaagtgcgttgagccacaaggaatacattcatggcgaacaatatagatcagactcaaaacagttaaccaacaagcttacctttatgctagagacctcgaagtccatccaggacacatttgtgttcagtatagatggcaccgtactctctaatattccatactacaaaaaacatggatatg

SEQ ID NO: 23369 - DNA, 210 bp, Glycine max
ttaaatcaatccaaattaaacatttttttgaacatattatatttttcttaaaatgtttacgataattttatatcactttgaaatcaaatatttatattattgatcctcttccttccatcaacaatacttattctcttttcttacaacaaatattacaacttcaaattaaatttaactatttacttaaacgttttttttaccttttcaaat

SEQ ID NO: 23370 - DNA, 423 bp, Glycine max
gaccctattcttctctctcactcactcacaggcaggacaaaagaaaaattcatagctatgagtggtgctgaagcgcgaccttgtgactactgtggcaactccacagcacttctctattgcagagccgattcagcaaaactctgtttctcgtgcgatcgcgaagttcactccaccaaccagctcttctccaagcacacgcgcacgctgctctgcgacgcatgcgatgatccccctgcgaccatactctgttcaaccgacacctctgttctgtgccagaactgcgactgggagaaccacaaccctgcgctctccgattcccttcacgagcgaaggcccctcgaaggcttcactgggtgcccttccgtctccgaactcttgttcatcgtggggttttcggatatcagcaaaaaatctctgcttttt

SEQ ID NO: 23371 - DNA, 411 bp, Glycine max
ggcacaagtgagtttgttgatcgagataactaggggcggcgtgatgaaaatgaaggtccttgttttcttcgttgctacaattttggtagcatggcaatgccatgcgtacgatatgttccctctccgaatgaacactggctatggtgcccgtacttcggaggtgaaatgcgcacgttggaggcttgctgtggaagcacacaacatctttggctttgagaccattcctgaagagtgcgcttaagcatcacaggaatacatccatggcgaacaatatagatcacactccaaaacagttaaccaacaagcttacttttatgctagagacctcgaagaccattccaaggacacatttgtgttcagtatagatggcaccgtactctctaatattgcatactacaaaaaacatggata

SEQ ID NO: 23372 - DNA, 412 bp, Glycine max
gtacatagtatagatacggatacccggttagtgtatgggtatgtacgtgattcatcacttttatattgttataagacacttttttaaaaaaagaatctggtatttggtaattggtacgttgaattcaatacaaggtacacaggattattgacaaagtctttgtttggatatatgttacttgagaaaccacgtcggctataactgttgaaaacatgtcccatatatgtaagcaaacacgtttaaaattctttaactatgattttgactgcctctgccagtgacatgattagaggtctgcctatatgagaatttggaccaatgacatgcagaaggaatttatttgattgcgtttttctatagtatgaaatgaaataaatggaatttaattttcagaacacattattgactaatt

SEQ ID NO: 23373 - DNA, 350 bp, Glycine max
aaacggtcctcggccgtgaacaatatgtcttggggggaagacggcagtggtggtggctgcttctgaacgatgtggtaccgtggcatgaggcgcatgccgtgggggcgttacgcggcggatataagggacccttaatcttaggagcggcgattgctgggaaccttggacacggttgaagaagccgtttgcgcctacgactgctctgctagagccatgacgtgtctcaaagctcgcaccaacttcgtttacccaacttttatcgtaaccttctttcgacaccactgaacacttgttccctaacttcaataacttcaacatctttcacatacacttactcttcaatcaccatc

SEQ ID NO: 23374 - DNA, 71 bp, Glycine max
ccactctccctataaatgctcattaatcacggcttatttttacttactcacaacttgaccactatactttc

SEQ ID NO: 23375 - DNA, 272 bp, Glycine max
aattccctcgtcgacccactcttacgtactgctacaaaaacccccaaaagggactctttaatcttattcagcttccaccatccttgaagaatatcaataatcttaacactaataatcatatatacatataaacttactcatacactctttctactttattcaacccaacatacttaatttaatcctttcatacattcatacattaattatatcatttattcctatgtttaattatacaaacactatcacccttatcaactcctacttaatta

SEQ ID NO: 23376 - DNA, 410 bp, Glycine max
ttgagggggaagcacaagagaagagaagaggggagaggagagggggggagaaggggttgcagagagagagagagagagatgtcatcatcttcagacctggacaggcaaatagagcagttgaagaggtgtgagcctcttaaggagtctgaagtgaaggcgctttgcctcaaagccatggaaatccttgtcgaagagagcaacgttcaaagggtcgacgcccctgtcaccatatgtggtgatattcacggtcagttttatgacatgaaggagcttttcaaagtaggaggggattgccccaaaactaactatttgtttctgggggattttgttgatagagggttttactcggttgaaacgtttctgcttctgctcgctcttaaagtgaggtatccggatcggataacactcat

SEQ ID NO: 23377 - DNA, 421 bp, Glycine max
gtcggagatatcgaactgcagctacagcaaaggggcaccggtgacggtgacggcgcagttctcggcggcggatagggaggctagagtgttgaggtacagggagaagaggaagaaccgaaagttcgagaagaccattcgttacgcatcgagaaaagcgtatgccgaaacgaggccaagaatcaaaggaaggttcgcgaaacgcactgatgcggaccctctggctggatacggcgtcgttccgtcgtgttgatgattatcatatatatcatatatgaatatgaatgcttacttttttgttttcttatgtttgcttttgctgctgtatatatggactacgccttcttttgtttgaattatgcaatgtaaagttgcaaaaaaaaaaatttaatataaaaaaaaaaagcggccgttttaaaggatc

SEQ ID NO: 23378 - DNA, 399 bp, Glycine max
attatataaacatttgtagaccatctcatgacgaaagatctaacaagatagagcatagatgagataatcaacattggacgtctgacaagcaagtctcatagggcaccatatcatgtagtaaccacagaggctccaataagtgacatagccacaattagaccttcaactgtgggttcactttgtaattgaaactccctttctatgtacaacataaatcctgcatgcgaactcaggttattggttatatcaaccaattttaattcatcgcaaaataaataaaatcaattcaccatacctgcaataatctcattatcccatccttgtaataagttacctatggcatcagcaacagctacaagaacagctacactcatcgtttcagttagtttcctaatcaat

SEQ ID NO: 23379 - DNA, 401 bp, Glycine max
gagagagatagtgtgtgcagaggatgtggctattcggcagagaaggggcttctgggttttcatcatcatccactgcagagcaagtcactgaaggaattgatggaactggtttcactgccattgtcacaggggcatccagtggtattggcactgagactacgcgtgttcttgctttgcgtggtgtccatgtgattatgggtgtgagaaatatgcttgctgctaaagatgtcaaataaacaatactcaaggagattccctccgctaaagttgatgccatggagttagatctcagttcgatgaactctgtcaggaaatttgcatcagagtttaagtcctctggtcttccatcgaacatcttaattaacaatgcatgaattatggcttgccctttcagtctctct

SEQ ID NO: 23380 - DNA, 395 bp, Glycine max
ggttcaccacagtttacactcacgagagtacccagtttctcttctcaatttctcaagtgtgccgagaaaatcatggtggacgcagcagaacgtagatacttggaggatgatgattcatctctcatgaaaactatcaagggcgcaacaactggtttagtggctggaactatctggggtactgtagttgccacctggtatgatgtcccccgtgtcgagagaaatgttgctcttccagggctgattaggactatcaggatgatgggcaactatggtttgacctttgctgccataggaggagtctacataggtgtagagcagttggtgcagaactataggatgaagagggatttagtcaatggagctgttggcggatttgttgcaggtgcaactattct

SEQ ID NO: 23381 - DNA, 411 bp, Glycine max
ggttgccactagtgactactatgaattttataaaggtggcataagacatattcttactaacttcttgggtgccaatgcacagaagcgacaccatatccaccgagaaaccatgatggaaaatattttgagccaatttagtgaacatgtcaagaccttctctgatttggcagttaattttatgaaaatattcgtaactcaactttttggattagcactgaagcaagctctgtgaagttatggatagaccatttatgtgtaggagcttgcgagtacattatcaaaagaggacatatataagattctagaggttgatataatggagggtgcaactgaagtgtattgacgagatttctttccatacttgaagtggatatcaaataggaggctggagatgaaaattcagaatcttta

SEQ ID NO: 23382 - DNA, 408 bp, Glycine max
ggttctagtgtatgtgattgttgtgactcgttcttgttcgtcgttatcttcttcttttgttgtttgtgtgtttgttttttctctcacctgaaaatgtcttgctgcggtggtaactgtggttgcggaagcgcctgcaagtgcggcaacggctgcggaggctgcaagatgtacccagacttgagctacaccgagtcaaccaccaccgagaccttggtcatgggagtggcaccagttaaggctcaattcgagagtgctgaaatgggtgttcccgctgagaacgatggctgcaaatgtggagctaactgcacctgcaacccctgcacttgcaagtgaggtgttggagagctaaagcttcaagcagaaatggcccttagaaataatgataaaaactatatgtaggttcaaaac

SEQ ID NO: 23383 - DNA, 410 bp, Glycine max
gaatggacatggtgctccaaaatctagataaggggcttaattgaattgagacatgagtgagaatagtaaaaccctgcgtttcggcatcttaagctgcgccaacatcgccagaaaagtggctcgagccattgctctcgctccgaacgccactctctgcgccatcgctagccgttccatagagaaggcggagaagttcgccgacgagaacgggtttcctgcgaccgtgagggtttacgggagctacgatcaggtgttggaagatccatgcgtggacgccgtgtacctgcccctgcccacgagtctgcacgtgcagtgggcggttatggccgccagtaaaaagaaacacgtgctggtggacaagcccgtggctcttgacgtggcagaacttgatcgaatcttggatgcagttg

SEQ ID NO: 23384 - DNA, 418 bp, Glycine max
tgattgttcaagagtttgttgcgagctataaggtggtttatcgcgaggagaatatgaagttgtctgttttctttgttgctgcactaattttggtagcatggccatgccatggcgcatgctaccaaaggttccctctccgaatgaaaactggctatcgtgagcattcttccgaagtaaaatgcccacgttttaagcttgctgtggaagcacacaacatccgagcctttaaaaccatttctgaagaatacgtttaaccaacataggactacattaatcgctaacaatttatatcagactctaaaacagttaaccaacaagctttcttttatgctagtgaacgcgatgtccatcacaacgacatatttatattcggcaatagatacaccgtactctttaatattccatactatgaaaaaca

SEQ ID NO: 23385 - DNA, 383 bp, Glycine max
gagcgcagagccgcctcaacatctgaaacagactcgatccctaatccctatcttcttctctggtctctccgcacgctttggctcctctgatctcagtttctggttttgaattgtaggtgctgttggcttggtatccgtgcaagttctgctgtagccgatttgaaggtgagggtgtcaccttaaaggttctctcatgttagatcacgctactatccatgcgggagcaactgagctgctaggagagtatggtgcttctcctagaaaaaattacagaccctcatcccacagagttagctgtatgcattgcgagacatatcacaaattcattcagctttctggttgcggatggccaccttccattatactcgagggagattcttcaa

SEQ ID NO: 23386 - DNA, 403 bp, Glycine max
gttacaaatccgcatgttagaaggtaatgctttgcttcaggcccatttctctaggcaatttgttggtgggaaccttgcattggaccagaaggaggtgcttctttctgcaaatagactgcttcaggcaatggtagatgtgatatcgagcaacggttggctgagcctggccttacttgctatggaagtcagtcaaatggtgacacagggaatgtgggaacgcgactccatgctgcttcaacttcctcatttcacaaaggatctggctaagaaatgccaggagaacccaaggaagagtatagaaactgtgtttgatttattagaaatggaggatgaggagaggcaaaaattgttgggcatgtcagatttgcagttgttggatattgcccgattttgtaaccgattc

SEQ ID NO: 23387 - DNA, 406 bp, Glycine max
gttcatccaaaaacccctttatgtgactcactcgagccaacaacctctcagacgcgaccaacccccccataactcataaggccaaaaccatttctcacaaaacccttcattacacacattattatcatacacacacaaaaaaaacctctcatttcaaagatagagagagagatttcacagaccaaattgcagaggacgacaaagttcacaacttcaaggaaaatcgaaatggcccaagtgagcagagtgcacaatcttgctcaaagcactcaaattttcggtcattcttccaatcccaacaaacccaaatcatctaattctgtttcattgatgccacgcctttggtgtccctcaaaatctcgcatcttggtgaacaaaactggaagccttatgggaaattctaatg

SEQ ID NO: 23388 - DNA, 416 bp, Glycine max
gacaatcaatcccattattaaagggataagccttgaagcttgcaacacaacactacaacctaaggtctgcactacgagaatgtctcagggaagaggcagtgcatctttacctattgtggtcactgtggtttcactactgtgccttttggttcttttggaacgtgctgatgcagcaacttacaccgttggaggacctgggggatggaccttcaacactaatgcttggcccaaaggaaaaagattcagagctggtgatatcctaatcttcaattatgattcaacgacccacaatgtggttgctgtggacagaagtggatacaacagctgcaaaacgccagggggtgctaaagtgttcagttcagggaaggaccaaatcaaactagcaagagggcagaactacttcatatgcaactacc

SEQ ID NO: 23389 - DNA, 397 bp, Glycine max
gaaccaaacacaacacttcactctcaagcttcaagcatgactcctttttacttcctcctatttgccttcatccttttcctctccatgaacttcttgatccaaacaagaaggttcaaaaaccttcctccgggaccattttctttccctataatcggaaacctccaccaactcaagcaacccctccaccgcacgttccatgccttatcacaaaaatatggccctattttctccctctggttcggctcccgttttgtcgtcgtcgtttcgtcgccgctcgcggtgcaagaatgcttcaccaagaacgacatcgtcttggccaacccgcctcacttcctcaccggcaagtatatagggtacaacaacaccaccgtcgccgtttccccctacggcgaccact

SEQ ID NO: 23390 - DNA, 416 bp, Glycine max
tataaagatggcagagacattcctatttacctcagaggcggtgaacgagggacaccctgacaagctctgcgaccaaatctccgatgctgtcctcgacgcttgcctcgagcaggacccagacagcaaagttgcctgcgaaacatgcaccaaaaccaacttggtcatggtcttcggagaaatcacgaccaaggccaacgttgactacgagaagatagtgcgtgacacctgcaggaacatcggcttcgtctcaaatgatgtgggactggatgccgacaactgcaaggtcctcgtcaacattgagcagcagagccctgatattgctcaaggtgtacacggccaccttaccaaaaaacctgaagaaattggtgctggtgaccagggtcacatgtttggctatgccactgatgaaacccctg

SEQ ID NO: 23391 - DNA, 420 bp, Glycine max
tataaagatggcagagacattcctatttacctgagaggcggtgaacgagggacaccctgacaagctctgcgaccaaatctccggtgctgtcctatacgcttgcctggagcaggacccacacagctaagctgcctgcgaaacatgctccaaatccaacttggtcatggacttcggagaaatcacgaccaaggccaacgttgactaccagaagatagcgcgtgacacctgcatgaacattggcttcatgtcaaatgatgtgggactggatgccgacaactgcaaggtcctcgtgaacattgagcatctgagccctgatattgctcacggtgtacacggtcaccttaccaaaaaacctgaagaaattggtgctggtgaccagggacacatgttaggctatgccactgatgaaacccctgaatt

SEQ ID NO: 23392 - DNA, 373 bp, Glycine max
ggtagatgaaggatggagcccaagatgtgctgaaggatgatggtaactactgcaaattctgacacgtacttgcttaatgtgatcgggaatatgctgtgtttgcatctgtagcgcaggagaaagtttctgatcctggaggctgagcactgtggtctaaacatgcctgcgaattggtacccaccatgccgtggattcacgcatatcctagatggaatctagtatgagctgaagagcagagttcctcaattggagatagtctatgcgtccattgaagaacactaggatgcctttaatagcttgtatgcagacatgccttcgatagcaataacaatctcggatgtggaaacatggaaattcttgaccagaaactact

SEQ ID NO: 23393 - DNA, 396 bp, Glycine max
atctaactttataaaacaagcatcctttcaacgagtgttttcctatttattaaaatgacaatagttgattcagaacacaagcaatactatataaaacataatgaattgtattgtttttatacacagattttataacacctagtacaatttatttattttctatatatctccattgcgtatcatccatcatatcttacacttattttctttttcatacttctctcttagttgaacagaagtaatgtacaaatagaatttgtcttgcataatgttaaaattttgatacttaaaaggtgcaacaatttaacatgtaaaatttctcaccataccactatcccaatgaagaatcttcagggttgttcaaagggtgaaaaaacaagcttgtagctactactg

SEQ ID NO: 23394 - DNA, 359 bp, Glycine max
acaccacatatggtataaatattgcagagacattcctatttacctcagaagccgttaactaaagacaccgtgccaagctcttcaaccaaatcttcgatactgtccttgacgcttgcctctaacaaaacccatacagcaaagtttccttcgaaacatgcaccaaaaccaacttgctcattgacttctgaaaaatcacgaccaatgccaacgttgactactataatatagtgcgtgacaccttcaagaacatctacttcgtctcaaatgatgtgggacttgatgcctacaactgcaaagtcctactcaacattaaacatcataacccttatattgctcatggtgtacacagtcaccttacc

SEQ ID NO: 23395 - DNA, 407 bp, Glycine max
caaatggatacatccatctatggcggactggtccaccaagtctagcttcatatgcaaaatgaataggcagatgctccattaaatcaaaaaacccaaggggaaatattttctccaacttgcacagaattaatggaatattttgttccattctactcaagtcatccttcatcaaagttgtagaacacaaatatttaaagagatgaattatttcaataagtagatttaagacatgtggcgaaaataagccaaaaacaataggaagtaagcactccatgaatacatgacaatcatgaattttcatcccatgcacagttcccttatcaacattggcacatatggtcaagttagaagaataaccatttgacattcatagttcttttatccattgacatactaactttgtttgg

SEQ ID NO: 23396 - DNA, 400 bp, Glycine max
  modified_base (379)..(379): a, c, g, t, unknown, or other
gatccaaagggaaaacaagaagctcaattgtctagttgaagagcttcaaaacaagatttacaagagtaaaaggggaaatgggtattgcttatctcaacatgccaggcttcatgagggcaatgtttattatgttatgtgctatgatgatattgccagaactaacacatgcaaagcatgcaagagtaactaggcactacaagtttaatatcaaaatgcaaaacttcacaaggctttgccaaacaaagagcattgtaactgtcaatggacgatttcctggtcctagaatcatagcaagagaaggagacagaattgtggttaaagtcgttaaccacgttcaatacaatgtcacccttcattggcatggaattcgccaactaanaagtgcatgggcagatggacc

SEQ ID NO: 23397 - DNA, 304 bp, Glycine max
tactcttaaggggcttcgtttctttttacgggtgattcatcttccctttgtggttccctccacccaaccagatttagacaccgaaaatggctttcaaactgaaatcactacctctcctttgctctcttcacttcccttcccgcctaaaccctaattcaacactctcaaaccatcacttttctcgtctcttcttcacaccttccattcctcccaccctgttcctatctcacgcaacctcatcttccacctttcatctccattgcttcttcgtaaccgttctaaaccaagactaataccatatcac

SEQ ID NO: 23398 - DNA, 386 bp, Glycine max
ctgttcatggctagcgacactagaggtattgcgctgttgtcagattcgcctgatgagggaggaaatttcagctgcgtggattagctcaggacataaaccttgcccgtgcaactatcgggtacacgataactgcttcaattcctatgggggcatggaataggtcgaattcgctatccaagcctgggcatcatgttaagtgctataccgtgaacaacccttgaatgatcctttttgcctgcatgacagatcgacgcttatccagataccagcatggtcataagctctggtggctctccattgctgcagatttatgtgttgtgcacagtcttccattggcctaaggctctcaaaatctaacttgtcacctgggggacagccttgtctgt

SEQ ID NO: 23399 - DNA, 167 bp, Glycine max
tatacctatggtctagacattcttatctacctgagagggcgtttactaaggacacgctggcaagctatgacaccaaatctacaatactcaactttacgctcgccttcatccgaacccatacatcttatttaccttcacaatcattcacctaaaccaactttgtcatt

SEQ ID NO: 23400 - DNA, 417 bp, Glycine max
gaaagaaaccatcttgctcgacggctgctacttcgggcactggctcgtcgtcatggagaagcccgagggcgaccctacccgcgatgacatcatcgatagctacattaaaaccttggccaaggtcatcggaagtgaagaggaggcgaggatgaagatatattcggtttcgactaggcactactttgcgtttggggctcttgtgtctgaagagctttctatcaagcttaaagaattgcctggagttcggtgggtgcttcctgattcttacttgaatgttaaggaaaaggattatggatgtgagccctttattaacgggcaagcagttccctatgatcccaagtatcacgaagagtgggttagaaacaatgcacgtgccaatgagagaaacaggcgcaatgacaggccttgtaatgctga

SEQ ID NO: 23401 - DNA, 149 bp, Glycine max
caaaattcttaagacgtttttatttatgtctaggcaaacattatcttgtctattttaaatatccatcattcatatgctccttatgtctttatataaatactccctatcattttcaataatttaaattatctccaaattttcaaccaatt

SEQ ID NO: 23402 - DNA, 417 bp, Glycine max
gaaagcaagtttgttattcagagagagaactcggtgtggctggccgacagaaaattttctattggatgacaaggaagttggctatccattgcttagtgtaaagcgaagaagtgtgaacaaatatcctcagaagctgccttttcaaaagcaaatacatttcgatttataaaaaagattgtactagtagtagtagaaaccaatattaaaaaggaaagaaagaaaaataggagaaaaagatgaaaaatcacacatagaccctttcctctctcgatactataactgcgaatgcgtaggggacagtgagagccagatgtctcctctatatagttcgtaacgcctctttcttacctctcattcatgcattagcaatatttctcaatctctcttcttacccatttcctccccccctctttctct

SEQ ID NO: 23403 - DNA, 403 bp, Glycine max
gagtcctgatgttttctggaaatgttgcttgctggacgcaacccgttagaagcctcttaccagagactaaaagtgaaggtggatgacacagagcccacaaagtatttcatttgtcacagctgttcaaaaggaagtgatttgttgctgagtagttttgatggggcaaggtgttcctgtagaaaattgatgcaaaagaaaatggagctgctggaagagtccaaggacgaggcttctgtggtcgacggtattttcgataaaggggatgccatgttcttgatctttgatgacttgacagtgctccgaagcttcccaagtgactctgtacaacggcccctccaacttggacacaaaaacttcagcagcaagctggaagaaaagtatagtgacgttggcacgaaggaga

SEQ ID NO: 23404 - DNA, 400 bp, Glycine max
cactaggtttggaactcatttgcgagcattcttatcattgggaattacgaaaacatgttggagctaagagaaataccctttgtattgtagttgtttcttttcccgcagaaactcaaaactgttttagaaaaataacgatctcagactcgttaaccgttgtattattgtgaaattttaatatgtggtttgcgattcatttccgcacatctttaccattgggattttcaaaataacatctgttggggggagaaatccccatcgcgtgtagacagtggaatggaggcttcaatccattctccttctctctaacgtttgggaaccctattagagtagtcagaggaatctcaggaaatcgctagagatgctgctattgctgtcacaatacacacgtgagttcgct

SEQ ID NO: 23405 - DNA, 392 bp, Glycine max
ggcatagggagggattatcttattccctccattgtccgtgggcgcagcgttgagtggcggtgacaaccatggcctactcatctcaagaccttgaccaactcctcaatagtgctttggatgattttcagtccttcaacctcaatcctccccctccaagtggggaagcaagtgcgaacattaagaaggagagtccttctttggcgtccgaggtgcaaggattgatcatggctttacccaatttgagaacgacgaataaggggaaacagaatgctgattccaaagacagccacgtgtcggaggctctcaacaagcttacggagcagaccaaagaggctgccatagggctggagtctatttccacacccactgccgattattttgcgaaagatgcc

SEQ ID NO: 23406 - DNA, 424 bp, Glycine max
gatgattgaagtgcaagcaaatgccatggagcagagtgggtgggccaatatgcctcacgagcttctcagagaggtcctcctccgaattgaatcgtcggagtccacgtggccgctgcggaggagcgtcgtggcttgtggcggagtgtgccgcacctggaggaggctcatcgtcaaggagattgtcaagccacctcaattctcttccaacataaccttccccatctctctcaaacaggttcagtgctctttctctctattcaaattaaatcaattttgtttattttcttgctttaaatttggcagcctggcccgagggaacatctactttagtgctttattaggcgcaacagtgcctcacagacatattatctgtttctcaggttatctagtggttagtacttagttaatactacttgagcttata

SEQ ID NO: 23407 - DNA, 418 bp, Glycine max
tgggatgattgaagtgcaagcaaatgccatggagcaggggtggtgtgccaatatgcctcacgagcttctcagagaggtcctactacgaattgaatcgtctgaatccacgtggccgctacggaggagcgttgaagcttgaggcggagtgtgccgcacctggaggaggctcatcctcaaggagattgacaagccatctcaattctcttccaacataaccttccctatctctatcaaacaggttcagtgctcatttctgtctattcaaattaaatcaatcttgtttattcacttgctttaaattttgcagcctgtcccgagggaacatctacttcagtgcttcattaggcgcaacagtgccttacagacatattatctgtttctcagtatatctagtggttagtacttaggtaatactact

SEQ ID NO: 23408 - DNA, 410 bp, Glycine max
cagatttgaaagctcatttagagcacaaaatgtggtgctcttctctccctctcccctcattcatctccttcttcctccaagctcttatccatggcctcctatggtggtgagcttcttctagactcatcttctccttgaagtagcgtctcctctctctcttcctttccccattccgctgccattcatcttccaagaagcaaaggaatccattgatgaagaagatcctaggcctacaagctccaatggagcttacatcatgtggtatcagagcatcttcatctaggtgatgttcttttgcttcctctatctttatgtttggagaattctctttaattccttgttcttcatcttattctccatgtatatactccattgtcttgtggtttggtgcttgctaaagtagattaatt

SEQ ID NO: 23409 - DNA, 418 bp, Glycine max
  modified_base (400)..(400): a, c, g, t, unknown, or other
ggcccactcccagaatctactcttctgttcttgggatgggtttccttcttcaccctcttccctgaaaccacataaccccatggccatggcactcgacgcggcactctggatcgtgaagatgacgtggattgctctcagtggctggatttcttcttgtttaattgttgctgacgaatttgcctcttctctacgctctggcgatattggcccctttcatgtaggttgatccaattacgctctctttcgtccaagatgggtactttacttattgggtatgctgcaagttttgtaattttatattgcccttcaaaataggcttggtttgatgtagtgggtatgaatcaaaatctctctcttttttctttttttataagtctggcttgtgtgtttttgagctggngtgaagtgggtggtcatg

SEQ ID NO: 23410 - DNA, 382 bp, Glycine max
ctctaccccaaaaaaacaacaaaagggtcccctcttgttttttttcttgcccaattgatggtccagcgtgagccatgatcatttgctcataaggattcaattcttccctttgtccaccactttcgtagtatgaaccttgtagcactattagaggaaattgtggtaactcttcaccgtggtttttccaccaataatcatttggcatgaacccttcctcataaagatccctcatcacatcatcaacaaacttgaaaacattatatttgcatttcttgcagggacaccttgtttgttctccttgcatttgaaacatgtcctgactagtaacaaactatacaaattcaaacactccttctctaaacttatttgtccaacatttatt

SEQ ID NO: 23411 - DNA, 415 bp, Glycine max
attcttatttgtacaaatggtacttcggggttggaacgagtatgaagaaattaacgatacttctttaccttttgagttgttctgccggatcggtcgctcaagacctttggtctctacccggacctgatgaaaaaaatgggatcacatcttatggactcgttgagaataattctgatctagttcatggcctattagaagtagaaggcgctctggtgggatcctcacgtacagaaaaagattgcagtcagtttgataaggatcgagtgacattgcttcttcggtccgaaccaaggaatcccttaaatatgattcaaaatggatcttattctatcgttgatcagagatttctctatgaaaaatatgaatcggagtttgaagaaggggggggagtcctcgacccacaacagatagagga

SEQ ID NO: 23412 - DNA, 56 bp, Glycine max
atataaactcacatatcatcttaatacaaatatctttttaatatccccccctacaa

SEQ ID NO: 23413 - DNA, 217 bp, Glycine max
cctcccacctctcgggagacacgagctttgctggggatttgaatcgaaagtgtttgttaatgggtgaggtgaatcagagaagtcataagacagagaattgtaatccttatgagttattggcggtataaagctgctaccattgatgcgaggaaatttacttcgatctcatacaattctgtccgattatttcagacttcgattaccttcaacagatatg

SEQ ID NO: 23414 - DNA, 404 bp, Glycine max
  modified_base (22)..(22): a, c, g, t, unknown, or other
  modified_base (28)..(28): a, c, g, t, unknown, or other
  modified_base (37)..(37): a, c, g, t, unknown, or other
tgtgtgaatttggaagttgcangcatanggacacgcncgacattcaggggaggaggactggtggggaaaatccctttgtagctaagttcatagggttttgtttatgttctttctctatcaatcagaatggtatatggaaccaaaaccccaacaagttatgcattctccactgctgctagctgcaatctgctatgtatctgccattctttttcatttgcaccaatgcccaattacgtagccacttgatggcattgaacatcaaatgcaccgtgtggccccatccattttcaaaggatggagatagttaatgcttttgtgcactttgttttaaatgattttaggtttatataattaatcttaattaaaattactgattaaaagtgtattaaaaacatatcaaaatc

SEQ ID NO: 23415 - DNA, 303 bp, Glycine max
  modified_base (10)..(10): a, c, g, t, unknown, or other
  modified_base (12)..(12): a, c, g, t, unknown, or other
  modified_base (17)..(17): a, c, g, t, unknown, or other
  modified_base (32)..(33): a, c, g, t, unknown, or other
  modified_base (35)..(35): a, c, g, t, unknown, or other
  modified_base (74)..(74): a, c, g, t, unknown, or other
  modified_base (104)..(104): a, c, g, t, unknown, or other
  modified_base (129)..(130): a, c, g, t, unknown, or other
  modified_base (132)..(132): a, c, g, t, unknown, or other
  modified_base (134)..(134): a, c, g, t, unknown, or other
  modified_base (139)..(139): a, c, g, t, unknown, or other
  modified_base (150)..(150): a, c, g, t, unknown, or other
  modified_base (152)..(152): a, c, g, t, unknown, or other
  modified_base (160)..(160): a, c, g, t, unknown, or other
  modified_base (168)..(168): a, c, g, t, unknown, or other
  modified_base (170)..(170): a, c, g, t, unknown, or other
  modified_base (172)..(172): a, c, g, t, unknown, or other
  modified_base (190)..(190): a, c, g, t, unknown, or other
  modified_base (199)..(199): a, c, g, t, unknown, or other
  modified_base (226)..(229): a, c, g, t, unknown, or other
  modified_base (261)..(261): a, c, g, t, unknown, or other
  modified_base (263)..(263): a, c, g, t, unknown, or other
  modified_base (278)..(278): a, c, g, t, unknown, or other
  modified_base (284)..(284): a, c, g, t, unknown, or other
  modified_base (289)..(289): a, c, g, t, unknown, or other
tcccaatttnanttttnattctcaccatcctnnanaccttatcaaaattgatcaatttcattcttttttcaacntttttcaaccttaaaatactccttacatcnattacactcccttccaaaatcaacnncntnctatnacttttcctananaaaatatnaattatcncnanaaccatttcccccctcancaacaaaantttcactctattatcccaccacccaannnntatttaactccttttccatttccaaaaaaccntnattattttccatatncaaatncttcntacaaaaatcttac

SEQ ID NO: 23416 - DNA, 248 bp, Glycine max
  modified_base (61)..(61): a, c, g, t, unknown, or other
  modified_base (93)..(93): a, c, g, t, unknown, or other
caaaacggggatagcactaatttaaccgccgcatatcaaacattcggcgtgttacttttanctaacactttctgcaataattgcacgtactancatccaaacaagctcttcatcacgggcaaaaaaaatttaatcttttttcatcgctctcttctcaaaagactattcatcatccacattgtgcatgaaagagctgacaaagatctttaattttcttcaataaacaaatccaaatctcctccctcttt

SEQ ID NO: 23417 - DNA, 297 bp, Glycine max
  modified_base (62)..(62): a, c, g, t, unknown, or other
  modified_base (66)..(66): a, c, g, t, unknown, or other
ggtcatgaccctgatgcttttaagagttcactccatccgaacaatgggcatggggaaaatanctgnattgatccacgggtgcaaatacagcaacaccttgaagctgtgaggcagagaagagagttaggagatactgttacatcatcatatctaaacatacctgcatctgctggtgctcatgaagagagttcaccacgaggttttatggaacgacttcatcaaaaactgggcgttcaatccacacaaccatcaactgttgataaatggcatcctctttcatcaaaaagtgacaaatct

SEQ ID NO: 23418 - DNA, 420 bp, Glycine max
cgagtctggccaggtccatcgccacaggttcctgagtgtatctgctattggagcaatatctgcatcctttgtcattgttttaggagtgattgctgttagcctacttaatgtttctgtaaggagaaggctaacatttgtggataatgctttggaaagcatgtgctcaagctcctcaagatcaggaagtccagccacaggaaagcttatcctgttcgattcccattcctcacctgattggatcagcaatcctgagtccttgctcaacaaggcatctgagattggagaaggagtctttggaacactctacaaggttccattgggatcacaaggtagaatggtagcaatcaagaagcttatatcctcaaacataatccaatatccagaagactttgatagggaagttagaatcctagggaaagc

SEQ ID NO: 23419 - DNA, 413 bp, Glycine max
  modified_base (72)..(72): a, c, g, t, unknown, or other
  modified_base (107)..(107): a, c, g, t, unknown, or other
cctaccggttgcaaaaaaacaacaaaagggtccattttggggtttatttcatctattccatgaggcgaacantgggagatacacgttacaccacgattttgaatcanaagagatatttcaagaaatggcagatctattcactctatcaataaccgagccggatctggtgtatcataagggatttgctttttctattgattcctccggattgggtcaaaaacatttcttgaatgagttattcaactccagggatgaatcgaaaaatcactctttattggttctacctcctctttttatgaagagaatgaatctttttatcgaaggatcataaaaaaatgggtccagacctcttgcgggaataatttggaagatccaaaacctaaaatagttgtatttactagcaacaacataat

SEQ ID NO: 23420 - DNA, 400 bp, Glycine max
  modified_base (27)..(28): a, c, g, t, unknown, or other
ggaatccatccgtcacctagtaaccannttctgccgagctctcacttgcagaggagaaagttctaaactttcccctggttaaatcctaaccccagttttcttcctctcactttaagcactccccaatttgacaattttcccctctctcctcaaaaggggtgtgagccactttctctctcctcaattggggtgtgaaagtttctaccttttttcctttctatttttccattatctatgttagttttgcattgtgtgttgtttggcttgcaatcttattgcatgctggttgttggtgttggtgtcccaattcactctcaaatttcaaggttcttagaactagtaggaccttgcgaccatggctgccaaaaaagcatgtgagacattctcaaagtccttgatt

SEQ ID NO: 23421 - DNA, 308 bp, Glycine max
  modified_base (63)..(63): a, c, g, t, unknown, or other
tgttacaaaaattataaagggggggtcattatcgcgggactagctaatttatatataatccanatgagaacagtaaccttttcttattgattgttctgggttgaatcattgcgttataatttaaaaataatatagtacattgaactttcgtgcttgctttattgcttggaagagccaattctaaacagttaatgaagaccgatttgtgtaaattgtgacgcttctattttaaatgcgtaagttatagttgaaattaattctcggggaaaatatgatttcttttggtattaacattaaattgtggcttt

SEQ ID NO: 23422 - DNA, 314 bp, Glycine max
  modified_base (8)..(8): a, c, g, t, unknown, or other
  modified_base (11)..(11): a, c, g, t, unknown, or other
  modified_base (50)..(50): a, c, g, t, unknown, or other
  modified_base (53)..(53): a, c, g, t, unknown, or other
  modified_base (55)..(55): a, c, g, t, unknown, or other
  modified_base (59)..(59): a, c, g, t, unknown, or other
  modified_base (61)..(61): a, c, g, t, unknown, or other
  modified_base (66)..(66): a, c, g, t, unknown, or other
  modified_base (87)..(87): a, c, g, t, unknown, or other
  modified_base (89)..(89): a, c, g, t, unknown, or other
  modified_base (98)..(98): a, c, g, t, unknown, or other
gattcccntanttatttcggcggactatttttgaatgggaaaaaccaaanaancnttancnaactnaacaatgtaaaataaattaanangaaccctcnatttgtgcttttcaattttctaccccttttctttctttgcgttgatttaattaatactatcaactaagcccttttctgtttgcaatctcgaactattagttcttcttccccacatgtttttccaccaattcaagaaattatgcttgagttccgtgctaacaaaatgtttcttgacgaaaaaataattcttccccatacacttaaaccacttttttc

SEQ ID NO: 23423 - DNA, 296 bp, Glycine max
  modified_base (8)..(8): a, c, g, t, unknown, or other
  modified_base (11)..(11): a, c, g, t, unknown, or other
  modified_base (22)..(23): a, c, g, t, unknown, or other
tttcttcnttnctacaattttnntagcatggcaatgccatgcgtactatatgttccctctccgaatgaacactggctatttttcccttactccggaaaaaaaatacgcaagttggacgcttgctgtggaagcacacaacatctttggctttgagaccattcctgaagagtccctttaatcaacaaaagaatacatccattgcgaacaatatatatcacactcccaaacagttaaccaacaatcttacttttattcccacaacctccaaattccatcccaaggacacatttttgttc

SEQ ID NO: 23424 - DNA, 245 bp, Glycine max
  modified_base (56)..(57): a, c, g, t, unknown, or other
  modified_base (59)..(59): a, c, g, t, unknown, or other
  modified_base (68)..(68): a, c, g, t, unknown, or other
  modified_base (71)..(71): a, c, g, t, unknown, or other
  modified_base (149)..(149): a, c, g, t, unknown, or other
  modified_base (151)..(151): a, c, g, t, unknown, or other
tttaacctccgacatctaaaacatcccccccctttttaaacacgcgcggccccccnnanacacttaanctnatttaaacattctttgataacccaaaaaaccaaccacaaatttttaaacaatctccgcccccatttttttatcctggncnttaaaaaaacaccaccaaatttcctcatccaatggaaataaaacttttttcacttttttcaacaattctaaacaaatataaaccttcaattatt

SEQ ID NO: 23425 - DNA, 482 bp, Glycine max
  modified_base (7)..(7): a, c, g, t, unknown, or other
  modified_base (105)..(105): a, c, g, t, unknown, or other
  modified_base (131)..(133): a, c, g, t, unknown, or other
  modified_base (154)..(154): a, c, g, t, unknown, or other
  modified_base (179)..(179): a, c, g, t, unknown, or other
  modified_base (198)..(198): a, c, g, t, unknown, or other
  modified_base (216)..(216): a, c, g, t, unknown, or other
  modified_base (231)..(231): a, c, g, t, unknown, or other
  modified_base (283)..(283): a, c, g, t, unknown, or other
  modified_base (352)..(353): a, c, g, t, unknown, or other
  modified_base (419)..(420): a, c, g, t, unknown, or other
  modified_base (442)..(443): a, c, g, t, unknown, or other
  modified_base (476)..(476): a, c, g, t, unknown, or other
ggaattncccgggtgcgggccgacgcgtaccgtagcttgcgagaaagacgacccagaaggggaattgcgaatcaaattagtgtcaattctcttttgcgcggggtnccctacctctccggtcgaggatgcannnatcttcgtcaagaaccctcanccggaaagaaaccatcacccttganggtggaaagcgtctgacanccatcgacgaacgtcaanggccaagtatccagngacccaaggaaggaattcctcccggatccagcaacccgtctcaatcttcgcnccggaaagcagctttcgaggaccggccccgtaccctcgcccgactacccaacatccagaagggagtcannacccttcaccttgtcccttcgtcttccgtgggtggcagtgcgagaatcttcgtcaaagacttctcnnactggcaaaaccccataacccnntagaggtcgaaagctttctgacaccattgacanacgtca

SEQ ID NO: 23426 - DNA, 423 bp, Glycine max
  modified_base (65)..(65): a, c, g, t, unknown, or other
ggtgaatagtgtttgtgttgcctttatctgcggcggttaatttaaccaggcctaccctttttatnaacatatgaaaagatcggttttttgtggttcctccactcattgttgttgaagggtctcgcgaaatcaatcaagtttttagacctgttttctggtagaggtgtaagtacaagatcttaataataaggattttgtacaaaggaaaagttgagaataagatgggggaagatggttattcttggattaggaggacaaaattttcacacactgtctgccatcgtttggatcctgctaggttaggctctattcctatcagtgttcagtcagagcaaaaatcaaggcctgctgcctcaaaggctcagagacaccccataacaaacaagcagagatctttgtcaccattgcctgagacttatcttt

SEQ ID NO: 23427 - DNA, 265 bp, Glycine max
ttctattgattcctccggattgggtcaaaaacatttcttgaatgagttattcaactccagggatgaatcgaaaaatcactctttattggttctacctcctctttttatgaagagaatgaatctttttatcgaaggatcataaaaaaatgggtccagacctcttgcgggaataatttggaagatccaaaacctaaaatagttgtatttactagcaacaacataatggaggcagtcaatcaatatagattgatccgaaatctgattc

SEQ ID NO: 23428 - DNA, 393 bp, Glycine max
ggctgaagaaaaacgcaagctgcttgtttgggagggaagagaagggggagagaaaacaaagggcggtggtgagtgcttctgcttcatcatcatcagagaatggcggctactgtgtcttctgcttggtcaaagcccggcgcgtgggccctatattccgaggaacacgaagccgagctccttcaacagaacaacaacaaccccaacgacaagcctaaaggtgttaatccgttcggagaggcgaggccgagggagcaggttttggcggaaaaagggcaggattggaagaagattgatgagcagcttgagagcgtcaggattaaagaggcaagtggtggtgatgggtttggaaagaggggttttggctcttccaacggtggtggaggacgtgctact

SEQ ID NO: 23429 - DNA, 334 bp, Glycine max
  modified_base (11)..(11): a, c, g, t, unknown, or other
  modified_base (13)..(13): a, c, g, t, unknown, or other
  modified_base (27)..(27): a, c, g, t, unknown, or other
  modified_base (29)..(29): a, c, g, t, unknown, or other
  modified_base (37)..(37): a, c, g, t, unknown, or other
  modified_base (76)..(76): a, c, g, t, unknown, or other
tatttacaatntnttcactctcaatantntcatctcncaaatcttttaaaacgcctttatccaacctaccttctgngaaatttattccaatttctgtaaacaacaaacacctctgttacctcatctcagtcaagacaattaaaagataactttcaagacattatttttaaacaactgccaccaataattttacactctctaaagatatcaagaataacctaataacgctgattaaagtcacgtcaacctctctaattatcaaatacaatagaaaccaaccaatccaaaaaaacttatttttttcaatatcatatttatttcacaactatataat

SEQ ID NO: 23430 - DNA, 412 bp, Glycine max
  modified_base (8)..(8): a, c, g, t, unknown, or other
ggaccttntgcatctagaacatcctacggcggacttctacgggcggttaagagggagacacttaagctgattgagacattcttggataaggcagaagaccagccacaaattggtaaacaatttgtgccgccaatgatggatcctgttcttggagattatgccaggaatgttcctgatgcaagggaatcagaggttttgtcactttttgcaacaattgtaaacaaatataaagctgcaatgattgaagatgtacctcgcatatttgaagctgtttttcagtgcacacttgagatgattacaagaaattttgaagattacccagagcatcggctcaagttcttctctctactccgtgccatagccactcattgttttcctgcattaatctgcttgtcaagtcagcaactgaagc

SEQ ID NO: 23431 - DNA, 399 bp, Glycine max
gataaaacaacacaaagggaaattaaatatttaaattaataaaattaatcatccgcgattctattttatgaatccctttttttttacaatacctaatcctaatcaccgaacttacacaatcagctagaatgggttataaagatatctatagatatatatagatttatttatctatcgatatctctaaaaaaaaaaaaactaaaataaacaaataacacctctcattttatttatactaaaggggaattatgagacaaaaaataaatccgcttggtttcaaactttgtacaactcaaactcatgattctatttagaatgctcaaccaacaaaatattccgacaatatacaaaaagataaaaaaatacgatattgtatcaaaaattatatacaaaaaaata

SEQ ID NO: 23432 - DNA, 243 bp, Glycine max
  modified_base (50)..(50): a, c, g, t, unknown, or other
  modified_base (52)..(52): a, c, g, t, unknown, or other
  modified_base (59)..(59): a, c, g, t, unknown, or other
atgacagttcttcatcatcccgctaactttataaagataacacgcactcnanatcacantaaatatattcgattattaatactacaacaaaataataatcgcaacataaaatatgcggcaaaaaatattttttacgcattcatttactaaaaacacaaagccacactccttaggacaaaaatgcttatatctctcaacaaatcattccattcctattctttctccagatcttaatcctcttca

SEQ ID NO: 23433 - DNA, 315 bp, Glycine max
  modified_base (7)..(7): a, c, g, t, unknown, or other
  modified_base (11)..(11): a, c, g, t, unknown, or other
  modified_base (32)..(32): a, c, g, t, unknown, or other
  modified_base (35)..(35): a, c, g, t, unknown, or other
  modified_base (37)..(37): a, c, g, t, unknown, or other
  modified_base (101)..(101): a, c, g, t, unknown, or other
ccactcntccntacaacttcacaagactacanaanangacacgcacctctttcttatcgccgctttatatcacacgctctcttcaatttctatgagttttnctattactttacctccgttccccctttctcacaaaaacaacaccttttctcttctccttcctatctatttttttcctttaatttttaaaaaataaaatccattcacagcttaattcaattcttcattttaatccatctatctaaccatcacttaattacctaatccaatctaaaagttcaaaaaaaaactccactattaaaattactaaatcaa

SEQ ID NO: 23434 - DNA, 421 bp, Glycine max
  modified_base (22)..(22): a, c, g, t, unknown, or other
  modified_base (25)..(25): a, c, g, t, unknown, or other
  modified_base (28)..(28): a, c, g, t, unknown, or other
  modified_base (76)..(76): a, c, g, t, unknown, or other
  modified_base (80)..(80): a, c, g, t, unknown, or other
  modified_base (82)..(82): a, c, g, t, unknown, or other
ggcattgctgaaaatgtcgcanttnttngaaggcgccaaatactatggggcggagaaactcaccaacatgcccaanccanangcgagtgtcaccgacgtggacttcaagcgcgtgagccgcgacagcgtcgagtactttttcaatgtctccgttcagaacccttattccacttccattcccatttgtgagatcaagtactccctcaaaagtgctggcagggagatagcagtaggaacaatacctgacccagggtcattgaaggcaaatgacacaacaatgttggatgtgccagtgaaggtgcctcatagcatattactgagcttggcaaaggacattggtgcagattgggacattgattaccaattggatattggacttgttattgaccttcctgtcattggcaacttcaccattcctctt

SEQ ID NO: 23435 - DNA, 421 bp, Glycine max
  modified_base (28)..(28): a, c, g, t, unknown, or other
  modified_base (72)..(72): a, c, g, t, unknown, or other
  modified_base (81)..(82): a, c, g, t, unknown, or other
  modified_base (84)..(85): a, c, g, t, unknown, or other
  modified_base (89)..(89): a, c, g, t, unknown, or other
  modified_base (94)..(94): a, c, g, t, unknown, or other
  modified_base (97)..(99): a, c, g, t, unknown, or other
  modified_base (102)..(102): a, c, g, t, unknown, or other
  modified_base (108)..(108): a, c, g, t, unknown, or other
tgggtgttgtaagttgcaatggatatanacggcgcttttttttatgaggggggttttttacttctctaaacnctttactanntnntcanaaaancannnttncctttncaaaaataacttttaagaagccacacataatatttcttgatgagccatccaatcatctggtacgctgctgtgtctctccatcattgtttgttgcttcttggtgggctagtggaccaatggcaactagtttactgacttatttgttgcagggaaagtacatgtgtctattgaatctttgtttttgttttttgtcatggttgtgcttattttctctgttaaaatggtatgccaacaacttatgtgaggagaaaatagctgaacgtggtcctatgatcgtctcaattaagcttctgacttgaccttgtcattttaa

SEQ ID NO: 23436 - DNA, 407 bp, Glycine max
ggacaacgttgcttgaatttggagtgttcgtttttttacgtgacgtgagtgtcaccgataaatcggaacaaaacaaacaaccttagcctgatgcctgagttctccgagcccgatcatgcatttcatcgtccatgtccatggatatgaagatgaacatgcttttctttctcgtcctttttgcttctgcaatttcctcttctcttgccaagggttccttgcaacaaacccttcttccttcagaagaattcaatgacggtagtaatgcaagcagtgcaaggcatttattagaggatgagtctcaggctcagacaagtgttgatttggcacaaggatttatgtccaatgatgaacttgaatgggccatccaagaatttggacaaagatgcaacaacatttccagggtatac

SEQ ID NO: 23437 - DNA, 446 bp, Glycine max
  modified_base (122)..(122): a, c, g, t, unknown, or other
  modified_base (134)..(134): a, c, g, t, unknown, or other
ggccgaatcccggtcgagcgaggctccccaacctcctccggttcaaaaaaccacaagggcctcaaaataacccaagcgagcacaacacagcgcagcacttcttaattcccttcacactctanacagatttacangtgcttacacttaaatggctttgaagctcttcaatcacccaccacagccactccatcgttagtccctttgaagaaaccagtctcagttacttagagacaccgtggacgaaaggaaagcgttctaagcgtagccgcacggagcaacaactgcaacacccttcatgcaccgaggaagagtacctcgctctttgtctcatcatgctcgctcgcggcggcgccggcagtgtctccaccgccaaacccgctgtctccgacaacaattctgcgccgctatccgccgccaaactgagctacaaatgttcggtttgcaac

SEQ ID NO: 23438 - DNA, 400 bp, Glycine max
  modified_base (43)..(43): a, c, g, t, unknown, or other
aaaaaaacaacaaaaagggcctcaattcacaattccttccaanttttatcagacggctttctaatctttgcgggtgcgaatcttcttcatctttttttgtcccttcgaaaagctaaggaattggtgaattggtgtatgacatgaagccttctgcaaggagtttatagattttctcttcttagaataatcaattagaaccaccttgaagttgagacaagagtaattgcagccttattttaattagacaatatcaggacaaatcactattcaagagatattatgatcactatggatgtaaaaagtataaaatgggttggaaatatgtaccagaaatttgagaatatgttcctggaggcagaagacgtgatgtacgaggatacacttaaatacatagagaatc

SEQ ID NO: 23439 - DNA, 358 bp, Glycine max
gacaccaggggcttctatttcatggagtcatctctcatctgaaacacaacaagagaaacaatggaactcttgcaaaatggccacaaaaatttggtcagcatcaaaccctccgagttacccctcttgaatggggccgcgttaactctcctcaactcgctctccgaaactcatgagtactatggcaacatagatccttccagagtttttgtcaccaaagtgaagcgtatcattgtaaaagtactgcttttaatttatcattggtttatattatttattttattcatagaaatcaaactcaaactctaagacaagtttatatcaatttatatatcagtactatttctcctttttttaatcg

SEQ ID NO: 23440 - DNA, 356 bp, Glycine max
  modified_base (138)..(139): a, c, g, t, unknown, or other
  modified_base (258)..(258): a, c, g, t, unknown, or other
  modified_base (269)..(269): a, c, g, t, unknown, or other
  modified_base (277)..(277): a, c, g, t, unknown, or other
tcaaaacacaaacgcggtttccttcctaacattattttccccgattttttaccgggagtcttacaccacacatttctcattacttaactaaaaaaatttccttaccattttcaaaagcatttatacttttcttttatnnccttaacaaatcccttttcatcttttcctttcaattctaaattctttaacaataacctctcatctcataatataatactctacaaaacaaaacaactctaaatcttaaaacaatatggntcacataatantttattgntaatcaaaagttaaatatatacctttaataatattttacgctcatattttctgagatccaatttcacaccccacaccct

SEQ ID NO: 23441 - DNA, 295 bp, Glycine max
acggcgctagttttaattcggggttggagagtccaaaataaacaaaaaaaattgaccactttcaaattactcattccggaattatgtacacaattccagaaacatttgtttatacatgcaaaagctttgatttcgaattatgaatgcttacacaagtttgtcaatttgagttgaaataactcttctaaataaattggatttcggcagaatcctaccaattattaccttctatatatgcaaaagccttgattttcttgagagatatactacactaaattgtttgagcttcttattc

SEQ ID NO: 23442 - DNA, 463 bp, Glycine max
  modified_base (10)..(10): a, c, g, t, unknown, or other
gcccgaaatncccgggcggccgcgggcttccgtacggttgcaaaaaaacaacaaaagggggccatcattagaccaggaatgaatcattcctcgtggtcctgatcctaagtagggttagggttagggtttatgcaatcgaattcctgagacggtgcatttgtacgtaatcgatggcgaatcgcacggatcctgcagctaagatcataaggggcacgaaccctcagaacctggtggagaagattctccgatcgaagatataccagaacacctactggaaggagcaatgtttcgggttaacggcggagacgttggtggacaaggccatggagctcgaccacctcggcggcacctacggcggaaaccgcaaacccacgccgttcgtgtgcctcgtcatgaagatgctccagattcagcccgagaaagaaatcgtcattgagttcataaaaaacgaggattacaagta

SEQ ID NO: 23443 - DNA, 455 bp, Glycine max
  modified_base (93)..(93): a, c, g, t, unknown, or other
  modified_base (107)..(107): a, c, g, t, unknown, or other
tcctaccggttccaaaaaaccaacaaaaggggccactaacctttggcacaaacacacacccatcggcggcatccttatgcgggcgaactctanctacctgagcacanatttgtagccatgttggggaagaggccccagccgcggattggaaaaatctgcgaattattggtctcttgcgactgcaccaccaagctttttgatgccctcggaagaagccctagaagcccgtttgacatgatgaacttgaagatgcaatcaccaaagggtcttaaaagctatgaccttggtggtgtaggtctaggaattgtggtggcccttgataaaaaatcatcatccgaggaacaaggccatgacgttgtgcccaaacacgccgttatttgcacgtcaaattcaaaccgatccgtaccaatcccagttaaaaaccatcaagggtttcaaaagggtgtgaatgaaat

SEQ ID NO: 23444 - DNA, 425 bp, Glycine max
  modified_base (66)..(66): a, c, g, t, unknown, or other
cagaaggtatatcctgaagatatgatcaatcagtgcggggggcacctgagggcggcaggtaaatanccggtataacttccttcactctctggtagcgagaaagcttctgtaaatcagagggtagaaggtgaagcggtggtggtgatctagtcttcaaaagaaaatctcgaagaactagacaatactttacttaccagccttactaggcaagacagaaaccaatcctagaactacaagatgatacgacttctcctaacgacaagtaaaggcatacccgaacataaaggagagcggctttccctctattagaaaacaagaatggaagtccatataaattagggggaaaggagaaagctcaagcgcgtggcacaaaacagtgggttcctgatcttgtcttccttcaggctaaagcttcaagtctcaat

SEQ ID NO: 23445 - DNA, 248 bp, Glycine max
  modified_base (65)..(66): a, c, g, t, unknown, or other
tactattctttcccaaattatattcctaactggcgctccttattacttgggggctgccttatttnntaaaaaaaaaagttggtttaaccaattttctaatatttcaagttaatgatatttgcgctcttggattatcctttttttcttaaacaaatctttaacttttagggtcctacttctaactgaattttttttgttccacaattttttttctttttaattttttaaattaaacacccttaaaataa

SEQ ID NO: 23446 - DNA, 387 bp, Glycine max
gacatcttcttgacgtattgaatcggagaattctctaaaagagatctttttctgctctttgaagaaagaagggtctttgcttgattttggagatgtctctgctctcagatctcatcaaccttaacctctccgataccaccgagaaggtgatcgcagagtacatatggatcggtggatcaggaatggacctgaggagcaaagcaaggactctcccaggaccagttagcgacccttcagagcttcccaagtggaactatgatggttccagcacaggtcaagctcctggtgaagacagtgaagtgattttatacccacaagccattttcagggatccattcagaaggggtaacaatatcttggttatctgtgatgcctacactcctgctg

SEQ ID NO: 23447 - DNA, 330 bp, Glycine max
  modified_base (8)..(8): a, c, g, t, unknown, or other
  modified_base (10)..(10): a, c, g, t, unknown, or other
attttaanancattttaattgacaaggcggattatgaggttgtcattctgccccaccacaaaagatctttttgtagaaatgttctaattgttgtgccagcaaagaaccttattttgttatgctataagaatattgttctgttccctgtccctccccttctattatatgctttactgggatcgggaatgttccagagtaatgaatgctgtttagctttatatcttcctccattatgtttattcaaagttttctattttttctctacatgctgccttcttaattcaactaatattcaatcaactatcttgcttacatttttcatatttatta

SEQ ID NO: 23448 - DNA, 402 bp, Glycine max
  modified_base (16)..(16): a, c, g, t, unknown, or other
gtggtcatcataatangcctgtccgcgatttttctgggggaggcttacatttactgtatgaaagggattgcagacacccattttgccctcctgctttgtggctttctcctgctagaaaaagccggccaccaattgcagttgctgccagaactcatgaagttttagcaaccaacctgagatctgatgattcatcagcttcactgagtgtaggttctgttgtcaccattgttcctcatgttttcccttttgaggaaagagttgagatgtttcgtgaatttatcaagatggacaaagcatcccgaaaaatggctggtgaaatttctgaacctggttcacgggccattgagatagtaatacgtcggggccatattgttgaagatggatttcggcaattaaattccc

SEQ ID NO: 23449 - DNA, 132 bp, Glycine max
ttttcacctttttttttacccccctcattttatttcccccccttttttttaaccgcccgcccccccctttattttttttttttttttttttttttttcctcttctctttatcttcctttttctacttttttt

SEQ ID NO: 23450 - DNA, 332 bp, Glycine max
tttacccattatggaaattgagtggtaggggggattatttttttaaccagtcttctggtggtgggcttaaaactttttggattaaaactgactgggatactcaaattgggaaataactagacattggagccattggttatattactcattatatggttccaaaatcagggattcatgcttggaacttttgattttgcagagaacactcgtgcagcatatcctattgagtacatacccaatgctaagataccgtgtgttgctccccatgcaaagaatgtcatccttctagcttgtgatgcatttggggtgctccccccagtaagcaagctgag

SEQ ID NO: 23451 - DNA, 243 bp, Glycine max
  modified_base (8)..(9): a, c, g, t, unknown, or other
  modified_base (12)..(12): a, c, g, t, unknown, or other
  modified_base (15)..(15): a, c, g, t, unknown, or other
  modified_base (60)..(60): a, c, g, t, unknown, or other
  modified_base (226)..(226): a, c, g, t, unknown, or other
ttaacatnnttnctnctcactactacaaaatactcaatgtaaatcatccacccactcatnaatatattatttaactcttataacaaaaaaacaatcaaatcccacccagataagaaccttcaataccctcttaataaacaacactttcaacccaaatttaaacaaatttcttatccctatcatctccttattcacccaaaaaaccgccagatctatgacttttacngtcactattcccttaac

SEQ ID NO: 23452 - DNA, 354 bp, Glycine max
  modified_base (6)..(6): a, c, g, t, unknown, or other
tctccnaaaaaagaaagcggtttaggcctttttaatctcaaggactggaaccttgcgcttctttcccgtatcctgtttgactttcattgtaaaaaagattctctatgggttcggtgggttcaccattactatttcagagggagcgatgtgtggaattacaattcttcttcatcagattcagttttgataaagaaaatcattcaaataagggactttattatctctaaagagctaagtacggaagaggccaaaaagaggattcaatcatggagcaccaatgaacaatttcttattgacaaagtctatgaatatattagaggtgtcaagcctactgttaattggtcttctgttata

SEQ ID NO: 23453 - DNA, 413 bp, Glycine max
  modified_base (36)..(36): a, c, g, t, unknown, or other
  modified_base (85)..(85): a, c, g, t, unknown, or other
  modified_base (95)..(95): a, c, g, t, unknown, or other
  modified_base (122)..(122): a, c, g, t, unknown, or other
acacctgcaaaaacacttcataaaaccgttctactntataattccgcgctcttttaacacccccgtcttcttttcttattctctntttatatttnttttttctctcacctcaaaatctcttncttccatattaacctcccttacataaacttttttttttctgcaacaaataaaaacgctgcaaaatgtacccacactttagctacacttagtcaaccaccacctagacctttgtcatgggactctcacctcttaatgctcaatttcatgcttcttaaatcgctctcccccctgaaaacgatagctacaaatattgaccaaacttctccttcaaccccttcacttccaactaaactttttctataccaaacttcaaacagagataccccttaattaccaataatgataaacta

SEQ ID NO: 23454 - DNA, 384 bp, Glycine max
accagcattttctcaaagctgccatgatatgatgagcatgtggaagggaatggtgtcatcagatggaaaatgtgagattgacatttggcctttccttcagaatttaactcgggatgtaatttctcaaacagcatttggaagcagctatgcagaaggagaaaaattttttcgaaatctgagaatgcaggggtatcttttaatggcaggaaagtacaagaacataccaatattgcggcatctacgtacaactaccaccaagaggatggaagcaattgaaagagagatacgagattcaattgagggtatcataaaaaaacgagagaaagccatggagaatggtgaaacctctaatgaagatttattaagcatacttttggaatcaaa

SEQ ID NO: 23455 - DNA, 428 bp, Glycine max
  modified_base (77)..(77): a, c, g, t, unknown, or other
agaagggggaaaaaaagagtgaagaaaagaacgcataaactgaggtaaaatatggcagggcgcgagggttaaatacnatcgtcaactcaaaatatggggtgaacaaggacaggcagcccttgagaagtctagtattggcttacttaactgttgttctactggttctgaaacacttaagaatcttgttcttggtggggttggaagcatcactgtagttgatggatctaaagttgaagcgggagacctcggaaacaattttttgggtacatgacttcttgttgtacactggttatgtgtttgtaaatgtcttttggttctgatttttgtcccatgtttgtagtggatgaagcaagtcttgggaagtcaaaggcaaaatgtgtatgctcatttcttcaagagctgaatgatgcagttaaagcaaaatttgt

SEQ ID NO: 23456 - DNA, 411 bp, Glycine max
cagaaggggggtgtttgtaacgatgaagaagaggacaataacaacgccaattttaataagaagaataacaattataacgttgtggatgacggagatgctggaggaggaaagtctttcggttcagtgtcgtgttccatttgcctcgaggttgttttctataatggggatagatcctggtctaagcttcaatgcggtcatcaatttcatctcgattgcattggttcggcattcaacataaaaggagcaatgcagtgccctaattgtcggaagattgagaaaggtcaatggctatatgctaatggttgtcggtcatatcctgaatttagcatggatgagtggactcacgatgaggacctttatgatcttagctactctgagatgtcctttggagttcattggtgcccttttggc

SEQ ID NO: 23457 - DNA, 361 bp, Glycine max
gacaaggcacaggcttccctccctcctttgaagaggcaaattataagagggtggtgtgttgtgttgaaataccaagctagcaaagatgtttggcatcttaggaggcaataaggggcacaagatcaagggtactgtggtgttgattagcaagaatgtgttggacttcaacgaaatagtgtccactactcagggtggtttggttggtgctgccaccggcatcttcggtgctgccaccggtattgttggtggagttgtcgatggtgctactgccatcttcagtcgcaacattgccatccagttgatcaatgccaccaaagactgatggacttggaaatgggaaagttggaaagcaaacctattt

SEQ ID NO: 23458 - DNA, 191 bp, Glycine max
cataattttcttcttatacaacaatacccttttatacaccctttttaattcctatattgacttatttttcttttcaatcctccataaaaaaacattcttattccatacctcataaactcattttcactacttatccttcttacatccgaaataacaattttcttaaaaatctacttattaaaacaaacaac

SEQ ID NO: 23459 - DNA, 288 bp, Glycine max
ccatttcattataatactacataattctcctccctctacatccaccttttcttatactataattcctatcatccaacatcctcacacattttatacttcacctcttacaaaatcatactccaattccccttaacttttatacttcaaattacctttttatatcatcaattacactcctctaacaatacacctctcctattattactaactcacccatattcaaaatttccacccatatatcactccaacattcatcctacatacctctctttttatttcccaccttac

SEQ ID NO: 23460 - DNA, 444 bp, Glycine max
cccacgcgtccgacatacttgtgatgataaatatgtgacaattataaaatatttttatgagagtaatagtcagtgcaaagaaagactattatttgacaaaactaattgtcaatatttgatcttgagagtaccaattataaaataatttttctattcaaagattaggaactaacgttgtgccgagtatcttgtggtgagtctattatttaaaatattagttgtcttgtttatatatatatatatataaacttgtttgttatttgtaaagatgttaaatattaggaatgattctttgttattgactaagtagatatatgacttatgacagaaataatgtcaatgtacaaaatattgattttgatacaatattagtatatatcacattatctatgggtgtaggtggtttggaaattaacaatgactgatttcattctactttttttt

SEQ ID NO: 23461 - DNA, 120 bp, Glycine max
taagtaataaaataatctatgataaaaagatcacaattttctcattaaagaaaatctttcttccttcacggatgattaaataaaaacgaaacacatcataaaaagctttaatccacttct

SEQ ID NO: 23462 - DNA, 370 bp, Glycine max
  modified_base (8)..(8): a, c, g, t, unknown, or other
  modified_base (10)..(10): a, c, g, t, unknown, or other
  modified_base (13)..(13): a, c, g, t, unknown, or other
  modified_base (95)..(95): a, c, g, t, unknown, or other
catacttntnatnccaattatttaacacttataaaatatttttatcccggtaattttcaaaccacagaaacactattatttcacaaaactaattntcaatatttgatctttaaagtaccaattataaaataatttttctattcaaacattagctttttactttctgcccaatatcaaatcataaatctattatttaaaatattacttgtcttctttatatatatatatatataaacttgtttcttatttctaaaaatcttaaatattaccaatcattcttttttatttactaactagatatattacttatcacacaaataatctcaatttacaaaatattcatttttaatccatattaatatatattaca

SEQ ID NO: 23463 - DNA, 385 bp, Glycine max
  modified_base (215)..(215): a, c, g, t, unknown, or other
atacaacatacttatgatgataaatatcttacaattattaaatatttttatcaggattatatttaaagcggggaaagactattattttacaaaactaattgtcaatatttgatcttgacagtaccaattataaaataatttttctattcaaagattacgaactaacgttgtgccgagtatcttgtgatgactctattatttaaaatattaattgncttgcttatatatatatatatataaacatatttgttatttgttaacatgttaaatattaataatgattctttgctattgactaaatagatatataacttattacacaaataatgtcaatgtacaaaatattgattttcatacaatattaatatatattacattatctatg

SEQ ID NO: 23464 - DNA, 257 bp, Glycine max
ggatcactcctctaggctcgtgttggaggtggcgcagcattttaatgagggcgttgtccgaaccattgccatggattccaccgaaggggtcgttagaggttgtcgcgttctcaacactggctcccctattaccgatccattttttagtgctacctttggccgtatcataaatgtcattggagatcctattgatgacatgcgataaatcaattccaatcatttttttcccattcatagaaaatcttttgctttttttt

SEQ ID NO: 23465 - DNA, 342 bp, Glycine max
gataaagaccacaggaaaaaaggatggcgttttaataaaagagaagctcagaattgaatcgataaatcgccatgaatcccaaaatcctcttcgggtttgctcttcttctgaatctcgtatccaattcgttccaaaaccctaaccctaaaacccctaaatcaacgccgtcgcaggctcacgtggagctcgtcaactactgcttacccgtcggtcttctccccgccaccacggtcttgggctacgccgggaaccggacctcctgcgaggttaccgtgcagctcaacggctcgtgcaagaacacgctcccgccggacaactacttcggcacctattccgacacca

SEQ ID NO: 23466 - DNA, 211 bp, Glycine max
cattaaatcaaaatccttctgtcggcataaaaaacaaatcagaagcaccacccaccttattctttttttaacaaattaaaaattattattctccacataacattattttttcgtcattttatttaactactatttgcacccacattcttcatttccactacaaatttccttctaaataacaatacttctcatttaattttaaaatattatt

SEQ ID NO: 23467 - DNA, 383 bp, Glycine max
ggtggtcacaactcacaagctcacagagcaggaggactgttccaatacggaatctaaggcaaagcaaaccaaacatcttgaatcatgggttcaacaggtgagactcagattaccccaacccacgtatctgatgaagaagcaaaccttttcgccatgcaactagccagtgcttctgtccttccaatgatcctcaaatcagcacttgagcttgatctgttggaaatcatagccaaggctggccctggtgttcatctttcccccactgacatttcttctcagctcccaacacagaaccctgatgcacccgttatgttggaccgtatattgcgcctattggcttgctacaatatcctctctttttctctccgcactctccctgatgg

SEQ ID NO: 23468 - DNA, 173 bp, Glycine max
ggatcactattcgaggctcttgttctatgtggcgcgaaattacgaggagaactacacccacaccacttccatccatgctacctaacttgatagtagataccgtcccatacataacactagctcctctatcacccattcatttcctaagcctacaatatgaccattcatatata

SEQ ID NO: 23469 - DNA, 379 bp, Glycine max
ggtttctgatttctcactcttcgtttctcgggcgggtcatcagcgtgtgtctcagccatggcgtttccctacatggaagccgttgtcggatttatgatattaatgtacatttttgaaacttacttggatgtgcgacaacatagggccctcaaacttcctactcttccaaagactttagaaggtgttatcagccaagagaaatttgagaaatctagagcctatagtcttgataaaagccacttccattttgttcacgagtttgtgacaatagtgacagactctacaattttgtactttggggtattgccctggttttggaagaaatcaggagattttatgacaatagctggtttcaatgctgagaatgaaatactgcata

SEQ ID NO: 23470 - DNA, 280 bp, Glycine max
tcattccactccaacttaccggctgaaaccccatacattagcctctccacatcttcactgcttcttccatacaaatcctaaaccagactgaattcacaaaaaactttaccatgtcggacgatgatagatattataattaattttatctcacttctccctaagttgtcactaattacaacatctccgcttatattattaacaattcctttcatttatttattttttaatttaaactaaacacaaaaattgtttaccttttctataaaaggtattcttatat

SEQ ID NO: 23471 - DNA, 372 bp, Glycine max
gtcacgaacgccattcagtgttttctgagaaccgtagcacgatatgtatagatcggaatgaatttacttcagatactgtcttctggcaagaacaaattggtcattactggagactgatgaatattggggagacagaaatacgcaatgtgatggatatgaatgcctattgtggtggatttgctgttgcgctcaataagtttcctgtttggatattgaatgtagttcctgcaagcatgaaaaacaccttatctggaatttatgcccggggattgaatggaatttatcatgattggtgtgaaccatttttaaattactctttgacatattatttttttgttgcccactacccttttttccacttcaaaacaaaaa

SEQ ID NO: 23472 - DNA, 363 bp, Glycine max
gtttgaaccaacagaaaacgaggtcgctcaggaggggatttggctcatgcccttcccctggggtgcttggttttggccattattgtgatcggttctctgtgaaagtgtgcagggcttttaggactgaggatggtggggatgtaaaggagaaaaagttacgaaatttgaagaaaaatgaagagaaaaccaaaagggaaagtgggttttggagttccctcaagtctatcttgttgaggaatttcatggtgggttcaaaatcagatgatgagtatcgccaagctgtggccaaggtggagggtctcctatcctcgatcgccattcaaaatggaagatatattgtgactatgatgagcacttgggtca

SEQ ID NO: 23473 - DNA, 394 bp, Glycine max
ggacgaggaacgcagagtgaatctgagcagggagacgtgtccggggttcatatcagacggttacgggagggtgacggggacgaatgaagcatacgagaagatgatggagggtgatgagggacagggaccagtgttgctggtgaataaggtgaacacagtggttccgcacgcgtcgttcacgtgcttggtgagggtggtgcaatacgcgtgtgggagggagagaagctctctcacggtgccctgcgacgtgtggagaatggactctggtgggtttgcatggagattagacgttgaaactgcgcttagcttgagactgggttactaattcacaaaggtatcacgaactccgaacgcaaaacggcgtcggtttatggtcatagaactatatataact

SEQ ID NO: 23474 - DNA, 343 bp, Glycine max
  modified_base (67)..(67): a, c, g, t, unknown, or other
ggggttctattttgtaattgtttgttgttgaaactggtcgttctttttttgttgtcctgtgttcgtntttgttttttctctcacctaaaaatgtcttgctccggtggtaactgtggttgcggaagctcctgcaagtgcggcaactgctgctgaggctgcaagatgtacccagacttgagctacactgagtcaaccaccaccgagaccttggtcatgggagtggcacctgttaaggctcaatttgagggtgctgaaatgggtgtgcccgcttaaaacgattgctgcaaatgtggaccaaactgctcctgcaacccctgcacttgcaagtgaagtgtttggagag

SEQ ID NO: 23475 - DNA, 275 bp, Glycine max
  modified_base (61)..(61): a, c, g, t, unknown, or other
ggagacgagggtaaggtcgcgttgtgttgcgtcgggtggtgcgctgttcctctgtctgtcntttttgttttcagaccaaaccctagctccgcatcgcaaccatgtctaccaagcaaggtggaaaagctaagcctttgaagaaacccaagtctgataagaaggattacgacgagggtgacatggcttacattcataagaaaaaggaagaggagaaggcgcttaaagagttgaaagccaaggcgcaacacaaggggagcttttgaggttctgggctc

SEQ ID NO: 23476 - DNA, 355 bp, Glycine max
ggtttctgatttctcactcttcgtttctcgtggggttcatcagcgtgtgtctcacccatggcgtttccctacatggaagccgttgtcggatttatgatattaatgtacatttttgaaacttacttggatgtgcgacaacatagggccctcaaacttcctactcttccaaagactttagaaggtgttatcagccaagagaaatttgagaaatctagagcctatagtcttgataaaagccacttccattttgttcacgagtttgtgacaatagtgacagactctacaattttgtactttggggtattgcccctgttttgaagaaatcaggagattttatgacaatagcttgtttcaa

SEQ ID NO: 23477 - DNA, 294 bp, Glycine max
  modified_base (27)..(27): a, c, g, t, unknown, or other
  modified_base (30)..(30): a, c, g, t, unknown, or other
ccggggcgccgacgcgtacgacagccncanaacaccacaaaaaggactttctaatttctcactctcaacttatggctcgcgtgattattaaatgtggcaaccatcaccttcacctacaactaaacctttataatatttataatattaatgtacatttctcaaacatacttgcatttccgacatcataaaaccctcaaactacttactctttcacaaacttaacaaatcattatcagccaacaaaaaattaataaaactacaacctatattcttaataaaaaccactcccatatt

SEQ ID NO: 23478 - DNA, 271 bp, Glycine max
  modified_base (202)..(202): a, c, g, t, unknown, or other
gggttatctcttgccattgattgacactataatatttgacgacaaggcctcgactcatgtccatgtcacataccactagtacctaagcaacctaaatgcttgccatgagtacgtatggggagtcattgcactagcgtgcctctacgaccatctctcctatgcgagccaatataccagcaagcagtatggagggtatatgatngtactcatgctaaagaaattattttagtattggaattattttttattattgaaattaatatttttttta

SEQ ID NO: 23479 - DNA, 277 bp, Glycine max
  modified_base (15)..(15): a, c, g, t, unknown, or other
  modified_base (93)..(93): a, c, g, t, unknown, or other
aaaccatacccattnctacttgatcagccacattattactatgatcactcatacctacaaccatcccatcattcaactctataaaccattcantttttttgcttcaaaaccgttctttgaatctacccaataatatagtttccttcattgatcaagcatccaaaccccctattgttatggaaatttcaaatgtccatcctcaatttaagcctcctttttttgtgttcactaatactccataaatattgaactctaaatacttcattattgtaatcat

SEQ ID NO: 23480 - DNA, 373 bp, Glycine max
  modified_base (53)..(53): a, c, g, t, unknown, or other
cattcatatcttttcaatgggcgaaaaaaaataatggggtggctatcctacantggggagttctaagtactggtggatttagtccataatcttcatggtctaaaattcctctgctagctacattttacatttgcttgcatcgtgattgtaaattttttaattttatatatacatacatatatataggggctatggggcgttcgggttctactacaaaaagacatcattttgaaattccgaccacgtcaatgttatcggtgtttagcgaagttcataaaaataacatcaattttataaaaaaataacttttacaacatcacatttttaatggtttttctaaggaagtgcaaaaacattcctttacgattcccaa

SEQ ID NO: 23481 - DNA, 218 bp, Glycine max
  modified_base (170)..(170): a, c, g, t, unknown, or other
aaaagggacaccaccaacaccaacaaagaaaggggaaaagaaatactcaaacacaaaaagcaccctcctctcttcttcttcccctttttctctcttcttcactctcacccttatctttttcttcaaatccaaaaacaaaccatccccatttcatttcaaaagaaaccctnttttcttcaaagcttctcggaaccagtgtgcttttttatttcttttaa

SEQ ID NO: 23482 - DNA, 303 bp, Glycine max
  modified_base (9)..(9): a, c, g, t, unknown, or other
  modified_base (11)..(11): a, c, g, t, unknown, or other
  modified_base (50)..(50): a, c, g, t, unknown, or other
  modified_base (95)..(95): a, c, g, t, unknown, or other
  modified_base (102)..(102): a, c, g, t, unknown, or other
  modified_base (105)..(106): a, c, g, t, unknown, or other
  modified_base (108)..(108): a, c, g, t, unknown, or other
cgacggctncnaaaacaccacagagggtggtgtgagtagtgagaatgaantttcaagggttgccggtatttagcagggcgtgggatactctctcncactacnccnncngacgtgtgtaggttttccgtcttatcaaagattttccgttcggccgctgaatcggactcttttgtggaaacgttttcttccttccgattaccattccatcatttcccagtctcctttgcctctcaactattctttcaagaaggagctctatctcgctctctcggatcgccctatcatcatctatcatggtaaaaa

SEQ ID NO: 23483 - DNA, 398 bp, Glycine max
  modified_base (14)..(14): a, c, g, t, unknown, or other
  modified_base (58)..(58): a, c, g, t, unknown, or other
cactaatctcatanattcgggccgttctttttctaaaaatcgccaaaccttccaatanattctctatttaaatccacatatttaacttttaattcatttctcatcaaattacgtcatataaatcacaatatttctttcatctaaccaatttttttctgatatacttaacactctcatttatatcattctttttataaaaaacactcacattttttttaatttttatctattccacttacttttctttatcctaaaaattaattatcctcttatattttcaactcttctatatattttacatttttcactatactaaaatttcattttactttttacaaattttaaaattttttacatattcttatttctctattcattttcttcttttaaaacctttt

SEQ ID NO: 23484 - DNA, 412 bp, Glycine max
  modified_base (98)..(98): a, c, g, t, unknown, or other
gtgtgtgatttggtttgttgttgtaggctcgttctttcttcttttggtggtgcgtgtgtttgtgtttgtttttttctctcaacctgaaaatgtcttgnctgcggtggtaacctgtggttgctggaagctcctgcaagtgcggcaacggctgcggagggtaagattttcgttgtaacattgtttttttcttgggaaaatagagtttttccgggaaaattttctttttggatttttaattgttattatggttacccttttggttcaattgcatgaaaaaactatgctttgtttattttcttgcatgggggggagattctgatcacccgaaccctttttttgcttttacagaacatgtcgaatttgttttcttttcatgggatggttttctggggtgttatatgcttggcttttt

SEQ ID NO: 23485 - DNA, 275 bp, Glycine max
  modified_base (29)..(29): a, c, g, t, unknown, or other
  modified_base (32)..(32): a, c, g, t, unknown, or other
agggccattgttgttgctattatcatccncanctgcgttgattctcaccgcagacagtgagccatggccgtctgaaagaacaagcgcatctccaaggggaagaagggtggcaagaagaatgcagctgatccctttgccaagaatgattggtatgacattaaggctccttctgtttttcaagtgaaaaatgttggcaaaaccctcgtctctcgtactcagggtaccaagattgcttctgaaagactcaagcataaaatgtttgaagtctccttggc

SEQ ID NO: 23486 - DNA, 403 bp, Glycine max
  modified_base (17)..(17): a, c, g, t, unknown, or other
  modified_base (53)..(53): a, c, g, t, unknown, or other
  modified_base (57)..(57): a, c, g, t, unknown, or other
  modified_base (62)..(62): a, c, g, t, unknown, or other
  modified_base (256)..(256): a, c, g, t, unknown, or other
aatgcataaaaagcaanataatgtacgtataatttgatcaacacgtgcaaatntaangcatntatattcccccttggggtttgagctaaaaatccaaatactattgtcaaatgagaacttcaatagttcaagtttttaacctaccaacatttttggcatctgagaagctaaggcctggaattcccctttgttgttggaacccataacagactgccatgtacattaatgcccttgctacatcccctctaaccttaangaggtaacatctcaaacgttgttcaaacaaaaaataaattaattgtccatgttaaaaaacattataaccaattataaatataataaatacatccttttaaactttcaccatctatccaagatcctttaaacttttttttttgttttt

SEQ ID NO: 23487 - DNA, 443 bp, Glycine max
gaaccttttcttatcacatcttgatatcgggttgagaagggacccaagtaatttgcgcccaaggatcaacaaacttgattcaaccaaggacagagaacaaaagtctgccgggtcttattattaccttgatgactgagttcatactttggggctgttctttcaccaacacaaccttgcatctgtttgagcttttcatgggatctcagatttggttcagttcatgccttgaaatataagattgccatttttgccgatgaaagcatctttcccaatgaatagaggagcctgcatgcaattgcaagccctatgttggttggtgcattttgtatatttacccttatatttagtgcagttactcatcaccaggtttgctacgacttgtgtgggtgaattttaatattacatgagttttatattggtcatggttttcatttcatgtccta

SEQ ID NO: 23488 - DNA, 166 bp, Glycine max
  modified_base (30)..(30): a, c, g, t, unknown, or other
  modified_base (33)..(33): a, c, g, t, unknown, or other
  modified_base (45)..(45): a, c, g, t, unknown, or other
  modified_base (125)..(125): a, c, g, t, unknown, or other
cccgggccgacccacacgaaacaaaccganaanacaacacaacanagcgatattctttacttatactcctatatcatcggcgcgcctttttattaatatgatcccacaccaaaccttcactctancttcaactttccactcctcttccattataccttcctattta

SEQ ID NO: 23489 - DNA, 334 bp, Glycine max
ctattatacgcagtgatggaaaagtgaggagtgagggcaaatattgtttgaaagattatgtgggccgtgacaataagaatgagacttcaaccttacaacgtcatatggggaaatgtgatgtatatttgaaggcattctaatagtgatgttggaaatattattcttgatcatgctgggagattaagaaataaaaaaattgatcaaagtgtggtacatgagatgatatctatgatgattattgagcatgatcttccattctcttttgttgaacataggagggttaaagagttattacaatatttgcatcttgatatgaaagttccctttaagcatg

SEQ ID NO: 23490 - DNA, 332 bp, Glycine max
gacccaagtgaccgttgagtattacaatgacaagggtgccagggttcctattcgtgtacacaccgtgctaatctccacccaacacgacgagactgtcaccaatgacgaaattgctgctgacctcaaagagcatgtgatcaagcctgtgatcccagagaagtaccttgatgagaagaccattttccacttgaacccttcaggccgttttgtcattggtggccctcatggcgatgctggtcttaccggccgcaagatcattatcgatacttattgaggatggggtgctcatggtggtggtgctttcttctggaaggaccctaccaaggttgata

SEQ ID NO: 23491 - DNA, 287 bp, Glycine max
ttacagtaaggggtgctgtgacaacctactacggcgggtgctctatagtactactgtggtgctgtattcttcgacgttcggaaatgcttgactttgagtggtggttgcttgtcctcttgagggtgctacctcgctgtgatgaccactacattttctgccctaacgactatcccatctgcaacacttatgcttgaacttgtctcaagagcaagaacaacctattctgagtgaaggcattgatgcgtactctggcttaaccccattggacctttgtgcgtaagaacaag

SEQ ID NO: 23492 - DNA, 346 bp, Glycine max
  modified_base (338)..(338): a, c, g, t, unknown, or other
ggcacttcatcatcaacttcatcctattctttgaggttgtcttcttccaagcctcacagtgtcactataaggaattctcaagctgaagggcctataagaaggccagtggcacctccaataagagaaccatcatcatcatcatcaagtgcccctcagcttcagaagccaacacttccttctcagcctccaccatccccttcacccccacagaagccagctactgttgttggagatgataagaacgtcattacgttggagtttcagaggcaaaaggctaatgagttgcaggaatacttcaaacagaagaagcttgaacaagcagatcagggtcctttctntggttcat

SEQ ID NO: 23493 - DNA, 291 bp, Glycine max
gaagggcactggtaagtggactgttcagcaagctgctggattatcaattgctgctgccactattgaagcatcattggatgcaaggttcctgagtgggttgaaggaggaaagagttgaagctgcaaaggtctttaaatcaggtggtattggtgatatcgtgactgatcaacctgtagacaagaaaaaattggttgatgatgttaggaaggctctttatgcagccaaaatctgtagttatgcacagggaatgaatttgatccgtgcaaagagtatttaaaagggttgggattt

SEQ ID NO: 23494 - DNA, 359 bp, Glycine max
agggctgcgagggagtgctcctgatactcaaatacaggggtggtgagaactagcttatactggattcctactggataagctacttgtccttacaagtcccatgagttgtgaacgtcaaaggactacctcacgattaccgagcattcattctatgttctgaccaatagttacttaagctcaaccccaatgtatatgtatccgtgcttgctgctcgagatccaagaactgtagactctgttgccattattatggatttggaagataaggattctgaccctatggtgcgtgcgcgtgctattcaccaaaaagccatgcattttcgagctgcctctatgggttccttatatatacagactttt

SEQ ID NO: 23495 - DNA, 438 bp, Glycine max
  modified_base (5)..(5): a, c, g, t, unknown, or other
  modified_base (44)..(44): a, c, g, t, unknown, or other
  modified_base (47)..(47): a, c, g, t, unknown, or other
ctgcnataaaaccacagaaggttggctcattaccactaatcttnttnattcgagtaagtcttactctaaaaatcgagaaatctttcaatatattctctattataatccacatattttatgtttaattcttttttcaacataaaaaggtagagaaatcacatattattttttctatctatcctatatattactctaacttcttatcatatgttattaatatcttactttataaatttaaacacttacaatttttttttaattttttctattccacattctttcttttattccaatttatttataatctcttatctattttatttttcttttttttttttttcattatttactatctttttatttttcttttacttttaaatatatcatttattcttattttatattttattatttttatttttttatatttttatattt

SEQ ID NO: 23496 - DNA, 335 bp, Glycine max
gggcacatgaccactaatcttgttgattcgggtggggcgtactctagaaatcaagaaatctgccaatagatgcgctagtaaaatccacatatttaaggtgtaatgcattgctcaacaaaagagggagagaaatcacaataatgcttgcatctagccaagtttgtacggaagtgctaaacagggtcatcaaaggcatacttaaaaaggaaaacactcacaatgtttttgagtttgatcgatgcgacatacggttcttgatccaaaagataataaaccccgagagaggtttcaacctgctagagatttcactgtcagactagactaaaggtggtgtg

SEQ ID NO: 23497 - DNA, 303 bp, Glycine max
gataccaaaaacaaaacacaagccaagtgaaagttagaaaaaataaaaatcaaagagcataatgtcagggatcattcacaagattggggagacccttcatgtgggagggcacaagaaggatgaggagcataagggtgagcaccatgctggagaatacaaaggggagcaccatggtgaacacagtagtgagtacaaaggagagcatcatggtgaacacaaagctggaaagtaccatggtgagcacaagccagagcacaaagaggggttcctagacaaagtcaaggacaagatccatggttaggg

SEQ ID NO: 23498 - DNA, 326 bp, Glycine max
agggctgcgagggagtgctactgctactcaaatacaagagggggagaacaagctcaaactgtattcctactggataagctcctgttccttccgagtccgatttgctctcaacctcaaaggactaccttacgattacctagcagtcactttattttctgaccctgagtttcttaagctcacccccattgtatatgttcccgtgcttgtcgatcgagatatcaaaattgtacactctcttgccattattatgtatttggaagataaggatccttaccctcctgtgcttgctcgtgatattcaccaaaaaaccatcaattttcaagctg

SEQ ID NO: 23499 - DNA, 272 bp, Glycine max
ccgaacggttccaagaggactacaaagggggacccacacaactcatcaactggaagagtgaggctatctgtacttggagttttattggatgaggcaatgggggtgacagtgtacatgactagtgggagtttcaggggcactaccactttcaggcctgtagatgctgtgtactttacaatggtaactctgggcactattggatatggagatattggtgctgactccacgattaccaagatctttacatgtggtttcattttggagggatttgg

SEQ ID NO: 23500 - DNA, 306 bp, Glycine max
gtcaaattcgaaatcaaagaccgactcatccgtctggttgttctgtccaaacaaaatgactgtgttttggatttacaagacgttttcaagagattctcgttcgacagcatttgtagattctccttcgggttggaccctatgtgtctggagctgtctctgcctatatcggagtttgctatgtcctttgacttggcgttcaaactgtcctcggagagagccatgtcgggtgtcccctctaatatggaagatcaaacggttccttaacgtgggctcctagaagaagctgagaaaagctattaaaatgat

SEQ ID NO: 23501 - DNA, 211 bp, Glycine max
acaagaggtctttcaagtatgcctgggtgctggacaaacttaatgctgagcgtgaaagaggaatcaccattgatattgctttgtagaagtttgaaacaactaagtattattgcacatttattgatgcgcctttacatatggatttcattaataatatgattactgggacatcccaagctgtctgtgcttttcttatcattgattctaccac

SEQ ID NO: 23502 - DNA, 361 bp, Glycine max
tgaggggaagaacttgatggttgacattcgaactgcaagccaacaagtcactcggggataccaacatctctatattcaacggattttatttattgccaaaaactggcagcatattgaaatggtttcatgctcatgagtatcaggaatcatcatctttctcacaatccttgtgtgttgaataaccatcctcagtggttctattgtcattcaagtataaagtttgttttgttccccttggaaacatttgaatggttttggacatggataacatgtttattataacatctaaattttcatcatataatttcatgttgaaaaaatacccatggtatcttttatttttttcccagttcacttataa

SEQ ID NO: 23503 - DNA, 307 bp, Glycine max
catcaatccagctgaagttgtctgatgccgcgcgcgttgtttctcgcgtgtgggcaccatcatacaatccgagatgttccagcattcattgatgcatcatgacccggtaacgtaagaagttaccaactgctgtcaatgcgttttcctcccaaacaactcgatcatttgcaccagactatacaacaagcttgcatcgccaactcatttgttatccaaaagttgtatggttgtttaccagattctattttcagtctacttgaaattactatttttatgcttaaacattgattgatctacttatatttta

SEQ ID NO: 23504 - DNA, 235 bp, Glycine max
aagcttggaggcattgacaagggtgttattgagaggtttgagaaggaagctgctgagatgaacaagaggtctttcaagtatgcctgggtgctggacaaacttaaggctgatcgtgaaaaaggattaacatttgttttggcttggggaaatttggaaccaccaaatattattggacaagtattgattccccttgacattaggatttcatttagaatatgatttctgggacattcca

SEQ ID NO: 23505 - DNA, 209 bp, Glycine max
ctagactacggtaggctcttacatgcttatgcattattgctctgactatactactaagcttattaatcctcatcatcatatatagcatgacttcattattacagttgcttatgctcatggagctatataccctattatacattatcatcctcaactgtatgaagatcttgtcttagcaagagtgtatgaccattaacaacctatcatat

SEQ ID NO: 23506 - DNA, 381 bp, Glycine max
cccacgcctccgcatttgtgtatttgagcttaggaatagaagtagagggaactactgaagggatgacgaagacggaggcgggttggagtatgacttcttgcacctcttttgcatcctttctcatttcttcttcttcatttccttcattgtgcttcgcgcaaacccactcaatcacatgtaaacaacgcttcccatttccttctgtaaagggaagaagaaagttctcaactttatcattttcatccaccaaaaagctcgttacaagagccgctgattacaaattcccagaccctatttccgaatttgcagatgccgagactcaaatattcaaaagccaccttcttaaaaagctctcatagaaagatatgtatggagaatcaa

SEQ ID NO: 23507 - DNA, 396 bp, Glycine max
gaatggggcagacgccgtgactagacacgcatctcactcgcgccatcttagggtttctccttttgtttcgcaacatggttgccgctaagaaaactaagaagacccatgagagcatcaacaacaggctcgctcttgtcatgaagagtggcaaattcaccctcggttacaagaccgttctcaaatctcttaggaactccaaaggaaaattgattatcattgctaacaactgcccccctttgagaaagtcagagattgaatactatgctatgttggcaaaggttggagttcatcattacaatgggaacaatgtggatttgggcactgcatgtggaaaatattacagagtgtgctgccttatcattattgatcctggtgattctgatatcatcaagacac

SEQ ID NO: 23508 - DNA, 298 bp, Glycine max
tctgaaaggggttctagtgtgtgattgtctgttgctgtaactgtatgttcttctcgcggtgttctgtgtttgagttagctttttctctcacctgaaaatgtcttgctgctgtggtatctgtggttgctgaagctcctgctagttcttctactgctgctgaggctgcaagatgtacccagactagagctacactgagtctaccaccaccgagaccttggtcatgggagtggcacctgttaaggctcaatttgagggtgctgaaatgggtgtgcccgctgataacgatggctgcaaatgt

SEQ ID NO: 23509 - DNA, 288 bp, Glycine max
gatctctgcggatgaataaatcgatttcaatctttgcagtatcgaacatctctgcacacttcattcccaaatcccactcgtttctctgttggttctgcactgatttgaggaggttgaaggggaaaagtgggtatcaaatgtggcttagcagaagtgcattcaactctagtttcttctcttccaagcatcagggtacatggatgcacaatccatgaaaaaatagcattgtttagtgcgtaatggatatgcccttaataagggaaaacgcatagaaactacccttggaag

SEQ ID NO: 23510 - DNA, 58 bp, Glycine max
tgggttaagaaattcaaccaagcaagggtggtgagtgaccgccaagcagaggttaacg

SEQ ID NO: 23511 - DNA, 379 bp, Glycine max
gggttcttatacctatcatgtctccatctttttataggacatcctttctcttattaaataaaagttattaataaaaataaaaaataattaatatgaaaattaaaatttaaaacaatcaaaagcatcaatatacttactaacaagaattgattgaagaaaaatgatcctgtgaattgttttcttcttatttcatctggatcttctataaatgactgtctttcatttcttcaattgcgcgattctcaccttctgcccccactccgtctactattcttccacacccttatctgaatattatacacttctcacctttatcaaaacctcttgtgtttatctttcaactgcatttattaaacttatatatctaactacttttttt

SEQ ID NO: 23512 - DNA, 427 bp, Glycine max
gtgcgcctacgcccatcgcataccttcaggtgagcccattcatgaaggccgagcctactagtgacggcatgatcaccacggaggcaggctctatcaccactggtggcctcgtggtgatcctcagcctatgcctcacaatctatgggatttcatcgttctaacgaacgacacccatccactgacccgacactgaccttgacaggccttatgaaggagcccgatcagctccaaactgctgatcagtgggccacactcaccggatgcttactctagccaggcatttcagatgctattaccgtctacttgcttctgtacatgccgaaccttacttactacatcgcctgattaacgtgctgattatctagaaagacatgtatggagaatccattgtgtatgaatggacaatgggtctaaaatgatcctcact

SEQ ID NO: 23513 - DNA, 429 bp, Glycine max
cccacgcgtccgaaaaaatgtcaagcttccccaacacggtggcggaaggccgcatgtccaggaaggcaccggaaaaatgcactttttctcagacttgcagcctcttgagccagttcttgaaggagaaacgtgcttctgctgattccacctttcgaattggtgggaaaatggaacccatagcgagtaccaagggtttgttaggaagcctgcaaaactctgatggggctttgaaactaagcgcttctgccatggaatttcttccccagcttgtggaaaacccctgcattaagaagtctagatcacagggacctgaaactccccaattgacaatattctatgctggaaaaatgttggtgtttgatgccttttcgccggagaaggcgacggatgtcatggagatggccaccaagttggccttggacaacttcg

SEQ ID NO: 23514 - DNA, 294 bp, Glycine max
ggtgttgggaacaaaaaagacatttatgtgataggtttgaaacgctctgtatcttctcctcctcatccttggtctagttatatatacctcactcacggattgaagaaggcaacgctcatttcagctcaaatctgcaaactaggctttttcccaacgggttcagtttattcaagttttacaatttcgtggctctgaaactattagatggggaattgtttgcgcaaggctcatgctgatgatgattctgatcatattgtggagctcgcttctgggaatgtgcaacttattactacc

SEQ ID NO: 23515 - DNA, 356 bp, Glycine max
aattcgagcggccgctttttcttcttagggtggtgtttttttcatgctaaacaactttaagttgaagaattaatcgatgggaacattttgccagtcaatcatgcattgaatgattaatcactactcgcgatgggaatacgcgatttaaataacgaataatccaatattttaaaatctgatctaaaatgactggaaaagtggaaacaagaccagatataatttgatcattttgagcaaatccaaaatctttatagacgaaaccaatcactagttcccaaccatgggttgaatggaatcctatacataaatcacttaatagaagaatcgaaaaagcttttattgtgtcacttaaatta

SEQ ID NO: 23516 - DNA, 451 bp, Glycine max
gaacgcagaaaggggaaaaaggggattagggtttaggaagcagcgacaacaatggatttcagagcggagaagaaggaatcagagagcaacaccgaaaatgctcatccaacaactttagattcttcttctcaattggcatcggcacttgattccagcaacaaagaaatcgaagaacgacaagctcgtgaactcaaagccggtcttcaccccctcaagcacaagtttgtcttctggtacacgcgccgaacacctggagttcgaaatcaaacatcatacgaggacaacataaagaaaattgttgaatttagtacggttgaaggattttgggtctgctactgccatcttgctcgtcccgcttctttacctagtccaacagatttgcaccttttcaaggaaggaatccgtcctctatgggaggactctgctaactgcaatggtggtaaatggatta

SEQ ID NO: 23517 - DNA, 389 bp, Glycine max
  modified_base (59)..(59): a, c, g, t, unknown, or other
gaaattaattatctggggcagctgcgtcatcctaatcttgtgaaactgattggttactncgtagaggacgatcaacggcttttggtgtatgagtttttgaccaaaggaagtttggataatcatttaattaggagagcttcttactttcaaccactttcttggaacttccgtatgaaggttgctcttgatgctgctaagggtcttgcatatcttcatagcgatgaagcaaaagtgatatatcgagacttcaaagcttcaaatatcttacttgattcgaattacaatgcaaaactttctgattttggcttggcaaaggatggaccagctggtgataagagccatgtctctacaagggtaatgggcacatatggctaatctgctcctgaata

SEQ ID NO: 23518 - DNA, 334 bp, Glycine max
ggaaaaatccctagataacaaggtggaggagaaaaaggttgaagatgaagaaaagaaagtagaagagaataaatcagatgagaagaaattcaaggagaaatctgcgcctcctgaaatcgtgcttaaagtgttcatgcattgtgaaggttgtgctcgcaaggttcgtcgctccctcaaaggattcccaggggtcgaagatatactcacagattgtaagtctcacaaggtggtcgtgaatggagaaaaagcggatccgctgaaggttctagagagagttcagatgaataaccatataaaggttgaacttctcttctccgattccaaatccaccctc

SEQ ID NO: 23519 - DNA, 424 bp, Glycine max
ctacataagttttttttatccatctactactctatatttaagtctattctaaaaaaaatgtgcctcattctcctaatcttccattatatcttcttatcaatttacattcaattttaaactcactcttttacctctctacaactcatttttatccacaatcttttatataattcatcacttcatttaaacctctctcccttttttaaacctatttcaattcatcttaactcttaactactacctatattaaacttattaacattaattttatacatcttcactatacaaatccaatcacaaatcactctatctattaattctaaacaattattataataatcaacctttatcatttaattacactattaatataccttcacacatttacctttatttttcaattccacctcctatttttattttt

SEQ ID NO: 23520 - DNA, 354 bp, Glycine max
gttttggtttccaaaacctcgtttcttctcaatacaaaaaaaaaaaatgctgcagaagctgggggtgatggcttctcatggaggccctcccggactttctttgcagcaagagctggccatggttggctgcaccattaccaagggttgtaaaccattattgccttctcctgtattgaaactagaaattatcagatatgggtcctccctaaatccattcgaggagtctagcatgtcccagaaagatgtgttcaattctaatcagattgtcaacattaacttgtctacttaaaggcctatgcctcattgatggtcataaacctattcaaacccattatatttttgcttttgcattct

SEQ ID NO: 23521 - DNA, 419 bp, Glycine max
gggagaaggaaacggcggaaaacggcggatacgactgtgatgactatgccgcgccggagtgtgattcgccggacagtgaaattaccgattcaggatctcaggaaatgcaacccagtgtgatgaacaacaacatatgttctaatcatgaagaatgcgaaagacgttcttcacagataaagctgacaaaaggtttcacagcaaaggagtccgtgaaggggcatatggtgaatgttgtgaaaggattaaagttgtatgaggatgttttctctgaatcagaaatctgcaagctgactgattttgtgaaggagattcatgctgctgcccagaacggggagctctcaggtgaaacttttatactgttcaacatacagatgaagggaaacatgagattgctgattcagttgggtgttccgatattt

SEQ ID NO: 23522 - DNA, 387 bp, Glycine max
aggcttctgacaccacaagctctgtgctgggcattgcctgagggcactggagactgaaaaggatacatatattagattcagatagtgacaaaccaagcagatatatgttgataccaccacattattaattgtcaaaccaaaaataacttgtttgcttggtttttgcaccttaagtgttgttgtacatgcattttcttcagataagaaattatcaagagctctcaaggaaccgaacttctgtcctgacccagactcaataaaattctgcagaaaaaataactttataaaagtcattgtaagaactttaagccacaagccttgatcatcttgcagtcttacacttttgtgacttctttacattttttaggtacactggaagtgcaagac

SEQ ID NO: 23523 - DNA, 361 bp, Glycine max
cacacacatcattgattctcattcatccatcctatactctctctaaatacactcactctcactcacccacacttacatacattctaacattcacagacaatcttattcataacatttataacaaactgctgatataaacaacaactctttcaatcattacctccatactacacaaacttcttactgctcatcatagaaacatcactcactcatattacttctttgaaataatatacaacaacatattattactcacacattgattcacctccacatacataattacattcattaatattattactactacatacataccttactactctgctcttatcatcatttataccaccactggttt

SEQ ID NO: 23524 - DNA, 432 bp, Glycine max
tggtggcgtgtgcagaagagcgtctcagttagagcggtaatcagaagaggcgcagcttcaagcgagtgacagccaccagccatgggtcgtatgcacagccgcggtaagggtatatcctcttctgctttgccctacaaaaggacacctcctagctggctcaagatctcttcgcaagatgtcgaagaaaatatctgcaagtttgcgaagaaaggtttgaccccgtctcagattggtgtcattctcagagattctcacggtattgctcaggtcaatagcgtcactggcagcaaaatccttcgcatcctcaaagctcacggacttgcgcctgaaattccagaggatctgtaccatttgattaagaaggcattttcaattatgaagcatcttgagaggaacaggaaagacaaggactccaagttcaagttgattctt

SEQ ID NO: 23525 - DNA, 245 bp, Glycine max
tcgggagttcaattccaatatatgaccactctctctgtggaatggcctaccttctacgttcaagatgcatatcttcgacaatacccttaccggctagaccattacccttgaagtggacatgctctgacaccatcgacaacgtcatggccaatatccaggacaaggaatgaatccccccgatccatcaacttctcattttctcctgaaagctacttgatgtactgccgtaccctttctgactacaa

SEQ ID NO: 23526 - DNA, 388 bp, Glycine max
cccactcgtccatcaatgcatgtactttgctctcattggacatctctaataatatcgggagtgtacatatttcggggtgaatccatcacttgtctggatgttctatatattcattgaaacaattatatctagacatgaatcacatcatatgacacactaccctacctctcaatattctcatctttaacataattatatctttatgcgaacaagctaaatggaaagatttcaatagatattaaattaccacctcaactggacgtactatatatgcaatcaaattccttatatggactgctcactgattatcatactgctaatatgtctaagttacacatcatacacttatctgacaactctatatcgccctttgcatttagccaaaatt

SEQ ID NO: 23527 - DNA, 452 bp, Glycine max
  modified_base (384)..(384): a, c, g, t, unknown, or other
gcttgttggaccatatcaaacatcacagctggtaataaacagcagattcaggctgtgattgaggctaatctaattgctcctttggtcaatctgcttcaaaatgctgagtttgatatcaagaaagaagctgcttgggctatctcaaatgctacatccggtggttctcatgaacaaatcaagttcctagtaagtcaagggtgtatcaaacccttgtgtgatcttctcatctgtcctgatcctaggattgtgacagtttgtctggaaggccttgaaaacatcttgaaggtgggagaagctgataaaaatataggcaatactggtgatgtgaatctatatgcccaaatgattgatgaagctgaagggctggagaaaattgagaacctncagagtcatgacaacacagagatttatgaaaaggcggtcaagattcttgagacatactggttggagga

SEQ ID NO: 23528 - DNA, 381 bp, Glycine max
gtcttatctcagttgtcagtttatggtggtcaaagtggctttcaatccatgatgaaaagcgatgcaaagaaattggctgaacaagatgaatcagtattgaaaacctcaggaattccttacaccataattaggaccggtgcattacaagatacacctggtgggaagcaaggctttacctttgatgagggttgtgcagctagtggaagtattagcaaagaagatgctgcctttgtttgtgtagcagcttttgattgtgtcccacaaactggattcatttttgaggtggccaatggggataacaaagtttcagattggaaagaatgtttggccacattgatggagaaagcaagtcaaaaacttcagtgactattgacagggaat

SEQ ID NO: 23529 - DNA, 440 bp, Glycine max
gcttgatggaccatatcaaacatcacagctggtaataaacagcagattcaggctgtgattgaggctaatctaattgctgctttggtcaatctgcttcaaaatgctgagtttgatatcaagaaagaagctgcttgggctatctcaaatgctacatccggtggttctcatgaacaaatcaagttcctagtaagtcaagggtgtatcaaacccttgtgtgatcttctcatctgtcctgatcctaggattgtgacagtttgtctggaaagccttgaaaacatcttgaaggtgggagaagctgataaaaatataggcaatactggtgatgtgaatctatatgcccaaatgattgatgaagctgatgggctggagaaaattgagaacctccagagtcatgacaacacagagatttatgaaaaggcggtcaagattcttgagacata

SEQ ID NO: 23530 - DNA, 199 bp, Glycine max
tttggttgcattaaaaaacataaccttcctactcacggccggctatctacatgcgtgctgccatgtatctcatcctacatcccactcagaatcacccataagtacctcaaccaactatatatcaacgtcaatcactcattactcacacatttcagacatacttctcatccaactaccttgccttttgtttatctaaccc

SEQ ID NO: 23531 - DNA, 371 bp, Glycine max
gagatcacaaccaaggccaacgtggactatgagaagattgtgcgtgacacatgcaggaacattggttttgtctctgatgatgttggtcttgatgctgacaactgcaaggtcctcgtcaacattgagcaacagagtcctgatattgctcaaggtgtgcacggccacctcacaaagaggcctgaggagattggtgctggtgaccaaggtcatatgttcggctatgccactgacgagactcccgagctcatgcccttgagccatgtccttgccacgaagctcggtgccaagctcaccgaagttcggaagaacgggacatgcccttggctgagacctgatggcaagacccaagtcacttgtgagtactacaatga

SEQ ID NO: 23532 - DNA, 290 bp, Glycine max
gagatcacaggcaatgtctacgtggactatgagaagattgtgcgtgacacatgcaggaacattgtttacgtatacgacgatgttgtgtcttgatgctgacaactgatatgttgcttttaacattgagcagacatgatcgcttatatagctcaaagtgttcactgcaacctaacagagatatctaaccagatttgtactacctaccaaagtcttatgttcggatataccactgtcgatactccagagctcatgcaatttagcaataaactttcctcgaataccggattcaa

SEQ ID NO: 23533 - DNA, 434 bp, Glycine max
gggagtttaaatccccacaaaattgcatcaaattgagccatagatcctcaaagacaattagttattagttaacaaaattttaacccaaagtttttacctgaatagctttgtgttctctgttagaagcaagacagtctgaacaaagggctccattcatacaatccgagcaatacgtgttgcattcacttttgtggaaatctgtgtggactttgcattgaacaaaaaaggcttgtttggagaaatggcctaagccatggtggccacttgttttcttcttcattctttccaaattccaattgttgaatatgctgtaaatttctagaatcatcacaatagaattttctacaagaaaatactacgctagacaatactctcagaaatagattaatctagaaagttcatgtatgaaagtcttaaaaactgagatcttgaac

SEQ ID NO: 23534 - DNA, 327 bp, Glycine max
taccgatgggggtttgatgcagggtgtaataccacaggggagagcggcaattagcaatctgaaactgaacctgacaacttacagaccaattgtgaagctgatgacagatctgagtctcgagactacaacgtgcgataggactggtgcacattgagatcaggagccctgatattgataaacgtgtatacagactacttatggacagatcgactgagataaagacttgggacctagggaatcaacgcagatattccactagccagactaaattgctaacgaggaccacacatgggatcctgaataagatggaacacaagctccacggat

SEQ ID NO: 23535 - DNA, 144 bp, Glycine max
tgctattgctttgccttcggtccccctttcttacaaaaacaacgccttttctctttctccttcgtatctattctttgcgtttgggttttgcctgaatgaatgcattcacagcgtaattcgttgctgcattttaatccagttatc

SEQ ID NO: 23536 - DNA, 325 bp, Glycine max
tttaattgttgacaactcttaaaactgcctatatactacagttatgcctaacattattagctttatgttatatgacacttgatgtctacactagtacgctaccctaatctcttaatgctattgaatctttgatgagtacatacattggcatagatattactttgttcaggatgcatgacaacgtgacataattggtcctaaatctggaacgcgatttggtccgtctattgggcattaaaatattgagacctatatcgtttgagaaaacccttttctttttatcgtcattaactgatctcataagttcataccgagatgtcacttt

SEQ ID NO: 23537 - DNA, 439 bp, Glycine max
  modified_base (393)..(393): a, c, g, t, unknown, or other
gacacgcacctctttctgattgccttcaaatcacacactctcttcaatttctagggttttgctattgctttgcctccgttccccctttctcacaaaaacaacgccttttctcttctccttcgtatctattctttgcgtttggtttttggttgattgaaggcattcacagcgtaattcgttgctgcattttaatcgatttatctaaccaggactgaatgacctaatggagtctaaaggtgggaaaaagaagtctagtagtagtagtagtaaatcaattttttacgaagctcccctcggatacagcattgaagacgttagaccaaacggtggaatcaagaaattcagatctgctgcttactctaactgttctcgcaaaccatcctgatacacatncggattgatagttcgttgcatgcaaccatagttttattaggatttt

SEQ ID NO: 23538 - DNA, 423 bp, Glycine max
tgcattcaaaatgttagttaattttattagcttatcatttaattgttgacaactcttaaaattgcctatatactagagttatgtctaaaattattgcatttattttctttgatattttaggtctacactagtttgcttttttaatctcttagtgctattgaatctttgatgagtacatacattggcattgatatttctttgttcaggatgcatgacagtgtgacatatgtggttctaaatctggaaggggatttggtaagtatattggaaattaaaatattgagtcctatatggtttgagaaaacccttttttttttatcttcatttcctgttctcataaataattacagaaatgtcactttgtttcctgtttccaaagatttgtgtaagaaactataaattggagattttttggttccacta

SEQ ID NO: 23539 - DNA, 441 bp, Glycine max
gacactaaacaagttaaaagaagagcatcactgaactaacaaagcaaccctatgtcgaaggtggtttgtgtcaccggagccagcggcgccatcggatcatgggtggtcctactcctcctccagcgtggttacaccgtccatgccaccgtccaagatatcaaggatgaaaatgagacgaaacatttggaggaaatggaaggagcaaagagtcatctccatttttttgaaatggatcttcttgacatcgactccattgccgctgccataaagggttgttccggcgtaatccaccttgcatgtcctaacatcattggtcaagtcgaagatcccgagaaacagatattggaaccggcgataaaaggaacggttaatgtgttgaaggcggcgaaggaagcatgggtggagcgcgtggtggcgacttcatcgatttcgtcgattatg

SEQ ID NO: 23540 - DNA, 446 bp, Glycine max
tgaagatcctgctacaaaaacatcaactccacaagagaaacgtgctggctctgaaattgaatccaaaagtttcaattccaaacaagatgtttccaaaaaccagaacactcctatagtttcaacttctccaccatcaacatcacctgtagggggaagtgttaagaaccaatcaggattcagtttcatggggtcatcagaacttgatggaatcacacaaggaagtcctaaaaagccaaggaaccatgaaattctacgctctccaaaccgtgtcccttcaatcaacatggatgtgaaagccaatgaggcaaacaatgagcaacaactctctatggatcttgagaagcagaatagggatggctacactttcatggggaaccaaacaaacttcattagtggttttggacaataccctatggaggaaattggtaggtttgatgctgagcaat

SEQ ID NO: 23541 - DNA, 395 bp, Glycine max
  modified_base (349)..(349): a, c, g, t, unknown, or other
gataattgcattgaagaaagaggaagctgtggtctctagctattaatattagtattaatattaggcacggtttgactacaaataaaaggaaccatcgattcgtgtcagcccgtgaggcagccaagtttcagatggagacgagccagctttttaatgttcttgccatttttcttctctcggacccttttgctgttgtgaatgcaaactctgaaggtgatgctctgttcgcgttcagaagagctgtgaaagacccaaataacgttctagagagctgggatccaactttggtggatccttgtacatggttccatattacctgtgatgatgataagcgagttacccgactagnacctcgacacgcaaaactgtctggccattttgttccagagctaggg

SEQ ID NO: 23542 - DNA, 419 bp, Glycine max
gatgagttctaatatatcattcggaagtttttgaaatgttgtcaccccttcttctatttctatgcctaactcttcctttgtttttgttgtccttcttcaaataccgtaaaaccttcaagaatccaccacttccaccaggtcctagaggccttcccataatagggaatcttcatcaactagatagtccttctcttcatgagcagctatggcatctctcaaagaaatatggtcctttattttcccttcaatttggattaaggccagccatagttgtttcctctccaaaattggccaaagaggtaatgaaagacaatgaccttgagtgctgtggacgacctaaattactaggccaacagaaactaacctataatgggttagacatgggattttcctcatacgatagttattggagagaaatc

SEQ ID NO: 23543 - DNA, 244 bp, Glycine max
gacactagacacgttaaaagaagagcatcactgaactaacaaggcaaccctatgtcgaaggtggcttgtgtcaccggagccagcggcgccatcggatcatgggtggtcctactcctgctgcagcgtggctacaccgtccatgccaccgtccaagatatcaaggatgaaaatgagacgaaacatttggaggaaatggaaggagcaaaaagtcatctacatttttttgaaatggatctttttgaca

SEQ ID NO: 23544 - DNA, 415 bp, Glycine max
gatatctcatctccttcagcaaccacaacaaaccacttcaaaggtcctatattgctgatccttgtttctaaattcctctgcatggccaacaatggtgcaaaggatcccttgctgtcaggatcacttgatgcgactcaaaagactaaacagcagttattaaacaagagaaggctcctccgttctagaagtgctcctcacgcagagcttgttcctacagagacaaattgcaatgaatcaattcctcgtactgcatccatatttcagaatttgcatccaagttttaaaagaatggctatctaccttgcagtctatttaggtgtaagtgctttaatcttctaccttgtcagaaaccagattaaggggcagaaaacagatggaattcttgatgctttatacttcacaattgtgacaatga

SEQ ID NO: 23545 - DNA, 412 bp, Glycine max
ggaaaacagtgaggagcaacaaaagtacagagtccggaaattggagatctcggacaagggcaaaggcttcatcgagttactgcaacaactcagcgtttgcgattccgtctccgacaaggaattcgaggatcgatttcgagacctggatgttctcggcgatgaccacgtgatcggcgtgatcgaagacgaggcttccggaaagatcattgcgaccgggagcgtgtttatcgagaagaagtttttgagaaattgcggcaaagttgggcatattgaggatgttgctgtggattctagcattcgcgggaagcatttgggaaagagaatcatcaagttcctcacggagcatgcgcgttcaatgggatgctacaaggagattcttgattgcagcgtcgagaacaaggcgttctacgag

SEQ ID NO: 23546 - DNA, 386 bp, Glycine max
ctaataccttccccatgtgtaaacaactgccgaacccttattttcaaaatccatagacccctttttggtttttctaatgttttcctcaaataaacgttggtggcgactcccgcgcatcttcttcatgagaagatgcactttcctattttgccttgccctcctatcgaagggtaggttgcgacacacacaaaatgcaacaacttctctgttggagtctttgtgagctgagcccaaattaaggctcatcggtaacatgcaaaatgtctcccttattgtgtgcattctaagtttggcggtgtgcaatttttcttaattctatatttttgtagtactcttatcgaaaatttgattataaattctaatactagacaaaatagtcttggtca

SEQ ID NO: 23547 - DNA, 433 bp, Glycine max
tgggcggttatcagttggctggatgtttgcgggcaaggcaatgcatgtaataacttcatattggcgaacaacatatatcatacctttgatgtcttcgttatcaacaatttgtattgctataaacttgagcattttgtaccccactacttgtgggtatcaaaatgaaagatagcatacttggtccaattgttgaaattggagcctttggtggatcattcttttcaaggattcaagtgcatggccttgctttctttgaaagaacatcaggtgggggaattgaaacagatccccttcatctgttttgattatttgaccattgtagtgcactaaccaattgatagatgaggatgacatgttgtgtaatagagaaagaaatatgacaaagggtttatgtttgcaaagttggaaggaagttacatagaaaaaatatgtt

SEQ ID NO: 23548 - DNA, 426 bp, Glycine max
gaagtgccttcattcgggactttcactagccgcaggagccttatgaggagaatacggatgtctcacaggaagttcgagcacccaaggcacgggtcactgggatttcttcccaagaagcgtgctgctcgtcacaggggaaaagtgaaggcattccccaaggatgacccatccaaggcacccaagctcactgcattcttggggtacaaggctggcatgactcacattgttagagaggtcgagaagccatgatcaaagcttcacatgaaggaaacatgtgagcctgttacaattattgagacccctccaatgggtattgttggcgatgggggttatgtgaaaactccccgtggtctccgaacattgaacactgtatgggctcatcactcgagtgaggaactgaaacgtaggtgttataaaaactggtgc

SEQ ID NO: 23549 - DNA, 435 bp, Glycine max
gagaaacatggcttccttaagctccttagtgctgctccttgcagctctaattctatcccctcaagttcttgcaaactatgagaatcccccagtgtacaagcctcccactgagaaaccaccagtttataagcccccagttgagaagcttcctgtttacaaacctccagttgaaaaccccccaatttataagcctccagtagagaagccaccagtgtacaaacccccagttgagaaacccccagtgtacaagcccccagttgaaaaaccaccagtgtacaagcccccagttgagaaaccaccagtgtacaagcccccagttgaaaaacccccagtttacaagcccccagttgaaaaacccccagtgtacaagcccccagttgaaaaaccaccagtgtacaagcccccatttgagaagcccccagtttacaagccccc

SEQ ID NO: 23550 - DNA, 426 bp, Glycine max
gaagatgaagtcctcgaagtctgaatccgagtcgccttgcgattccgactccgacatacgccaccgtagtagcagccgccggtcgtggcgggactccgacggcgataggaagaagtcctcgaggagcatcacagaagaggaaattacaaagtacatggccagaaaggcccaatcgaaggcaatgaaagtagcgaaaaagttgaaaaccagtacggtatcgggctattccaacgattcgaatccgtttggtgactctaatctcaacgagaaataagtagtggtcgctcatatgccagatctatatagattataaacctacacaaatgttatttataggtttgtctggcgcaagaagattgagcgcgatgtttcacaaggtgtgtctattgatgcgttttcaatgaaggcagagaaaaagaaacagag

SEQ ID NO: 23551 - DNA, 383 bp, Glycine max
ggaccaacacctgtgcagcaattctctgtcaccaaatttgagcgttctatctttctgactttggcggcaatgacagaaacggtggtctctgataattccaagggcttaatactggcaatgggttctaatgcattcataggatccagattcatcttgaagaagaaaggtcttaagcgcgctgctgcacgccgtactagtgcaagagttggtggatatactcatctactagagccgctatggctggctctcatggcgacaatgataattggagagattgcatactatgatgcttatatctatgctacggcagttatgggtactgcccttggtgcacttactattattagcactgcatgattggctcactacttgttgaatgaacg

SEQ ID NO: 23552 - DNA, 374 bp, Glycine max
  modified_base (302)..(302): a, c, g, t, unknown, or other
gtttatggcacaagaaagaaattataaaacaataggtatctgggtgtactgaaaattgatactttggtctttgtgattactgattagtacttgttgactagtgatctgacatttgtggtaagttgtatgtttattgaggaattagtgacagtaacttctgaacctttagggatgcacttgaaaactgttgttaattagcttagcagtaccagtgtttcacactgtatgtctgtcttgcagaagactgaggatgattcaggtgcaaatcgatcatcggtgtccgaatttggggatgacaattntgctgtcgggagttgggagcagaaagaagtaatgagccgtgatggtcacatgaaacttcagacacaggtctt

SEQ ID NO: 23553 - DNA, 325 bp, Glycine max
caaagggtccgattggattaaagcggcgattaccacaacatgggatgccgacagtgctgatcctatcatagcatcaatacctgcaacatgggaatctcaacttcaccaagatggtcaagaacaaacacatgctctgaacgaattcaccatagtggtaactcatatgatttactactgcaacaaactggatcctactacaccaaagtggagttacaacaaggacaatcacacctgggatgaggcatcttcatacaggataaagatgccatctatctgtgctcacaaaatcttacaattcaccatataattttgccacaaacatcat

SEQ ID NO: 23554 - DNA, 416 bp, Glycine max
  modified_base (360)..(360): a, c, g, t, unknown, or other
ggtgtgctgttgatggatcccaagggctcaaagcagcagcagccacaggaggtggtaccaaaattcctcagcctcccccaacaccactaccaacaacaagggaattccaacaacaacaacatgggagagaacaaaccatcagaggttaaggatttccagatagtggtagctgctgagaaggacgagagcaagaagcagcaacagttggcaccaaagaggagttccaacaaggacaggcacaccaaggttgagggcagggggaggaggataaggatgcctgctctctgtgctgccagaatcttccagttgaccagagaattgggccacaaatctgatggggaaaccatccagtggctcctncagcaggctgagccatccatcatagctgccactgggactggcacaatcccagcatc

SEQ ID NO: 23555 - DNA, 429 bp, Glycine max
gaaccaattccattattaaagggataagcctcaaccttgcaacccaacacaaccaaaattcgctacttgttaagggctgcactataccagaatgtctcagggaagaggcagtgcatctttgcctattgtggtcactgtggtttcactactgtgccttttggaacgtgctaacgcagcaacttactccgttggaggacctgtgggatggaccttcaacactaatgcttggcccaatggaaaaagattcagagctggtgatatcctaagtaagtaaatttaattatttttttatcatcattttcatttattagttttgttacaaatattacttaaagaattcaaattcacgatttctctctccttcttttttccttaattatttttcaatcacttatcaatttcatatctcataactaattaaatttaatc

SEQ ID NO: 23556 - DNA, 417 bp, Glycine max
aaactgtgaacccgttcaattatatttcaactcctgttgaatcatcagtttaactcgttttgaattatgatccaaacccctgttcagtctctgttcggtttttgaaacattggttttctgtgcattgtgcgaaccacagacctttagtggcttatgataacaatctaagcgaaaaataaggcacaagctagtttgcgattaaagtaataagatagtgggacacttggatggataggaaggatctgtataggtctctgcaagaaaatgttaggagactcgaggcaggtgaatgactatatagtttaggttgtacatagaaatctcttgcaggaaaatgcaatttgcatccaaaggggactacccagttgcagaaagctcctgctgcatggatactattactcttttgaagggaagaat

SEQ ID NO: 23557 - DNA, 440 bp, Glycine max
ctgtcaagcactattttgtgcctgcatcttgttggcatggggttttctctcttgtaacaaagattcgcagtgatagcggtgacaagggtgatggaggtgcccaaacgttccatcctgaccatgtttgatgatgccaaaggaaaagggtggggacctaatcttagtatttctgattgtacaattgaattttctaattctaaccaaaacaatagtgctgtgataaacagtagtgggagcaataacaatccttcaaaaaccaatcctatgtatgcttgctttttatgtatatgtaacttcacaagagatgaatgagaaaaatgtgattcgaatcaaagattccactgaatgtgatcaatcagattttataattaatggaaattaatcatccgctgaacctgtggataccttgcaccaaactcttatttataataatgttcaat

SEQ ID NO: 23558 - DNA, 260 bp, Glycine max
gagcgatattggagcttattatcaatccattggggttcgcatactttggcatgacatgaccatatcaaatgaaaattcaacatcagaagattcatacccgtctagacttttttggcaaaactgcacccttattctttatctgaacaacagtactcttccacaatttttatcacaactcaatgcgcagaataaaggactcatcgagtttacaaacatgaatctagatataacttgtctcaaatacaaatatcaatgctatt

SEQ ID NO: 23559 - DNA, 266 bp, Glycine max
gcttatggaacaacaccctaattctcgggcattgggcttattcttgaactgatcatagctcactattgacttcatgattactgattaacaattacagactactgctctgacttacccatgtatatggatctatattgatcaattagagcacccaaactatcatcctttaacgatcaacttcacaactgtacttcatctgattaactgagccattgctcttcagcacttatactatgttccagatgacttaatctcattcatgatca

SEQ ID NO: 23560 - DNA, 300 bp, Glycine max
cgggtgactgaggacccgttcaagtgggtttgaactcctggtgaatcatcagtttatctcggtctgaattatgatccaaactccctgttgagtctctggtcggattatgaaacattggttttctgagcattgggcgaaccacagacctttagaggcttatgatgacaatctaagcgaaagataagctcaagctagtttgcgattaaagtgataagatcgtgggacacttggctggataggtaggatctgcgttggtgtgtgcaagaacatgtatagagactcgatgcaggtgaatgacta

SEQ ID NO: 23561 - DNA, 427 bp, Glycine max
ggttctagtgtgtgattgcttgttgttgtaactcgttcttcttcttttgttgttctgtgtttgtgtttgatttttctctcacctgaaaatgtcttgctgcggtggtaactgtggttgcggaagctcctgcaagtgctgcaacggctgcggaggctgcaagatgtacccagacttgagctacactgagtcaaccaccaccgagaccttggtcatgggaatggcacctgttaaggctcaatttgagggtgctgaaatgggtgtgcccgctgagaacgatggctgcaaatgtggaccaaactgctcctgcaacccctgcacttgcaagtgaggtgttgggagagcaagcttcaagcagagatagcccctaattaggaataatgatcaactattaatgtgtagctaataacttatgtattatgtctgagat

SEQ ID NO: 23562 - DNA, 412 bp, Glycine max
ggaccagagacagatgatgatggagatggcgaagcgagacgctgtcgttgcggcactcgcggcgttggtgctactcgcggcgagtgtggcggtggatgctcaggagaactcggacgtgaagacgctggtgaagtacaagcacgggaagaagtactgcgacaaaggatgggaatgtaagggctggtcaatttactgttgtaacctcaccattaccgattatttccagacctaccagttcgagaatctgttctccaagcggaactcgccggtggcgcacgcggtcggattttgggactaccactccttcatcgccgtcgacgcgctttttgagccggaagggttcggcaccaccgggaacaagacgatgcagatgatggagatcgccgccttcttcggacacgtcggcagcaag

SEQ ID NO: 23563 - DNA, 437 bp, Glycine max
tcggaggttctgactctaaattaaagtcatgcacttcctctattgatgatgatcagaaggttgatcacatgaatgagggaaccattgagaatgaggaattgttggttccaaaagctgttgcaagtgttaagtctgaaaatgaatcaggtgaaaagcaagctgagttatcctcaggcgtggataatgagaaccagatttgttcagaaaaagcaacaggtactggtatactagtgcaaaaggcctctccaattgcagaaaactgtgagtccttatatttaaaaaaggagtcacctacttctggtaatgctgtaatggtatctagggatgaaaatgctgatgacatgaagtcagttgtgattgagcctgatgaacgaagaatggagcaggatttatcagtttcagatgatgttaatgaatgtgctgaagatactatgggc

SEQ ID NO: 23564 - DNA, 388 bp, Glycine max
gaagacgacagaaggggagacggccaatagaggaaggtatagcacctttcaatgagttgcttgataaatccctgtattaatttcccaaagaataattaaaatgcagttgagaaacaaaagctagaaacatgttcaaaacatcagaaaggaaaagtgacaaaaaacaagggattaggaattacagtatatttaaatatgaaaggtttccaatatttgatggtatgcctccttggaagtaattacccctcaagtacctttaaatacacaatcagatgagacgagtcagccttcagcatgacataaaagcagtgaactaattaggaaattgctaagtagttcattagtagtgaaccaattcacttacagtgctcttagctcaatacaattg

SEQ ID NO: 23565 - DNA, 326 bp, Glycine max
agctccggcaacagtgatttgttgtgcggatgacgcagctttgtgtgccaaatgtgacgttgaagttcatgttgcaaacaagcttgcaagcaagcaccaaaggcttcttcttcaatgtctatcaagcaagcttccaagatgtgacatttgccaagacaagccagcattcatattttgtgttgaagacagagcactcttctgtcacgattgtgatgaaccaattcattcaaccagaagcctttctgcgaaccatcagcgcttacttgctactggtatccgaatggcatcgagttctaattgcaccaatgacaatgaaaaaaagtaac

SEQ ID NO: 23566 - DNA, 412 bp, Glycine max
ctcgtataatctatcagataactatttataagtagggttatatctttataaacatcttatattactttgtggtccatttctgcaacttcatccattactcctttaaaccattcaaaagatccaggttccctagtgacccagtagaaataagcatttgtagtccttcgtgatctcttatttcctcctggagttacatttgaagatgtaaagctattggagctctcgtctgatctggttgtttgacttgtttctgtgtttgactcctgcacctgaccttatgaaaattgaaaacttaagataaaagtggaatcaactttctgaaaagggaagcagagtttggatattagtaccactagttcatccattgctctggtgttattgagaagatctctgagaatgctgatgaaaggag

SEQ ID NO: 23567 - DNA, 426 bp, Glycine max
  modified_base (392)..(392): a, c, g, t, unknown, or other
gatagaccaaaaatgtgctcttcgactctatcgggctattctttcctcacaatcagctccacatttttcaaatcccaattttgccctcctcccttcccctctcgcgtggtggcgtgtcacgttggatccaattccaatgttcaaaagcacgttgccaccgacctcaagttcgtcctccacgacgccctccatgactctggaatcaacaccactcatgccagagaagctagggagcatttctgctcacaaattaggagattcactgatattgagaagggaaccagtatttgtatcaacaggtgtgttgatttggggagaactgctctctacatagctgcagaggatgattctctagtgtcacattcatcagttccacttcctgtcgatgattntattacgagattagatgatctttcgatggactac

SEQ ID NO: 23568 - DNA, 312 bp, Glycine max
taaggactcggagttcagcactggtgtgcaagttgccaaggggagacacgctacttgcagtggtaacagagggactaaaagtgcttttaacaactctggatcggaaaaacaggattccggatatgctatgtccaacactggtgctacgtactactaacttatataagacctatctcttggaggggctgcacttgcaaaacatacatattaatcataggtatggggaataaaaatcacaagtgctcatttgtgggacatgtgtaagatgcgtatacgtaagtggatatatgctaataatgatgatactggttc

SEQ ID NO: 23569 - DNA, 276 bp, Glycine max
attcggggacgacctacgcgtccgtgcgagaacacgacaaaagggcgactaaagcagtcgtctaactaataagctaactaggtgggtgtaacattgtgtgaccgtgaacaaattatgatgtccaagaaggacatttttacacctaaataggcggatactgttatataatgcaaatatcaagcttagacagattccactgctagtgcacttgctgcaggcacatctgaatgggctgtatcttggaaacttacttaaccatatctaatcatcctttcg

SEQ ID NO: 23570 - DNA, 356 bp, Glycine max
cagcatgaccgaacggtcggaattcattttaaccgaaattaacggatgatacaattcaaacgatcggtggaaatttattttatttttagattaggcgagaaatgatttaaataaatggcttaagcacgtcaaaagggggtataaaaagcgaatgaaaatgagaataaaaatacatgaaacaaaatgtggaccaccacgggtacatagaatgaattaaaaagctcggtttgaggtactttgatggaagcttgcttgtggggcttctatggaggctggatctttgagcttcaatggggtcctttaatggtgattttccaccatggagatgcagcggaagacaaaggaaaagaggtgag

SEQ ID NO: 23571 - DNA, 405 bp, Glycine max
gactcacaaaaaccacttacaaagtagtactacttggtttcaatcaaaacaaaaactcacactttggtggccacagcaacaataacaatggcagcctcactacaagctgcagctaccttcatgcaacccaccaaggtgggcatggccactcgcaacctcaaatctacacaatgcatttctaaggcttttggcttggaacccgctgcagctaaactcatttgctcccttaagcccgatctcaaagattttgctcaaaaatgtgtcgacgccaccaaaattgcaggattcgcccttgccacctcagctctcgttgtttctggagcgagtgcagaaggtgttccaaagaggctaaccttcgacgaaatccagagcaagacatacttggaagtgaagggaactggaact

SEQ ID NO: 23572 - DNA, 233 bp, Glycine max
gaacttacataatctactaccaatcaacatcaaagcaagttcacaaaattcagtgcgtcctacattgaccctttagcccctactactacactaactcgcctttcttgttcattataaatcacattcccaaagcgaccaactacaacacaacccttcaatggcattcatcaacactttcttcacccaaacctccttcaactcccactctctctacaaaaccttttatacccatt

SEQ ID NO: 23573 - DNA, 425 bp, Glycine max
tggtaacttatcctaacctttaatagaagtgtattggaatatatttatcattttacctctcttttcaacaatctacgtttctaaaattaacaacaggtgacaaaggtgttctcaattggaaacaacggtatgatataattttaggcacagcacgaggactagcatatctacatgaggaatttcatgtgtccattatacatagagatataaagactgctaatatcctcttagatgatgatcttcagcccaaaattgctgattttgggttggctaggcttcttccacgggatcgttcccatcttagtacaaaatttgcaggaacattgtaagtaaaaaacaatgtcattcacattaatttcttgacctttattgagcaacaagttgtagcagaagagatacattaattactaaaattaatggaacat

SEQ ID NO: 23574 - DNA, 356 bp, Glycine max
ctggggcaccgcttgagcagacttaacatcagggcaaagcgtcatactgggtgctcaagctaccatgtctatatctatctttactagtgcctccttgccacaagctaaaatggcccaagagactctcatattcacatgcgaatcaactaacgaggggcaccctgaccagctctgtgaccagatctccgattctgtactcgatgcatgcttggagcatgaccctgacaagcaacgatgtctgtgaaacctgcaccaataccaacatggcgacggaattccgagagatcacaatcgaagccaaagtgtactatgagaagaatgtacgtgacacatgcgtgcacataggcttagcctct

SEQ ID NO: 23575 - DNA, 182 bp, Glycine max
  modified_base (61)..(61): a, c, g, t, unknown, or other
cacacctgtcatctatacctaccctattttcaaaacacttatcaacaaattcaaatccgtntatttttaaaaatcctttcacccaacaaaacacaaacataaaatgatcaacctctccttcctaaaaacttaacttactcacattaattactttttacaaacttaaaaactctccagtacca

SEQ ID NO: 23576 - DNA, 345 bp, Glycine max
  modified_base (17)..(17): a, c, g, t, unknown, or other
  modified_base (55)..(55): a, c, g, t, unknown, or other
ccacacgtgtggtctanaactagcctatgctcgtgaagcttgtcgacgaattcanatcgacgcgtttagagattggtggggccgactaaattcatgtcgcgcgatagtggggtttatcgccgatagagatggcgatattggaaaaatcgatatttgaaaatatggcatattgaaaatgtcgacgatgtgactttctgtgtaactgatatcgccatttttccaaaagtgatttttgggcatacgcgatatctggcgatagcgcttatatcgtttacgggggatggcgatagacgactttggtgacttgggcgattctgtgtgtcgcaaatatcgcaggttcgatat

SEQ ID NO: 23577 - DNA, 198 bp, Glycine max
  modified_base (14)..(14): a, c, g, t, unknown, or other
ccaaaacccaaaanacatggatacctgctctaaattctcaatctaaacaacacctatggcaccacctgctcagacaaattcccgaacacaccaatatcattttgccacaactcctgaatctgcctttacccacttccaaacattgcatccgtcttgcttgctatgctcccccaaagctcctggaacaaaagcttcaaa

SEQ ID NO: 23578 - DNA, 396 bp, Glycine max
gataataaatcacattcatacctccgctatgttttacatgatctttggcagggagagagaaaaaatgcagaagcatggttttgcatcaaagcgtaacgtgttgccgtatcaaacgccgaggctaagggaccactacgttctggggaagaagctgggacaggggcaattcggtacgacgtacctgtgcacccacaaggttacagggaagctctacgcgtgcaaatcgatcccgaagaggaagcttctatgccaggaggattacgatgacgtgtggagggagattcagatcatgcaccatttgtcggagcatcccaacgttgtccagatacaaggcacgtacgaggattccgtgttccgtgcaccttgtcatggagctctgtgcagggggagagcttt

SEQ ID NO: 23579 - DNA, 195 bp, Glycine max
aacactcccttaaccctccctcccacctttttgattctccgcttctccaaaaatcttatgggttcatttctcgacaactctcacctcacatatcgcttcactttctacctcaaaaacttacacaaaagcgaaccttcaaagactcaccctcatgctcactttcataatcaccttgcattaaatagcttaaattcc

SEQ ID NO: 23580 - DNA, 283 bp, Glycine max
acccttgggcacaacataactcaaccttcccatggccaatggcctcattttgttccacacataatatcccaatcctttgtccaagcaccctcttttctacacctctatccttccattcattccttattttccggctttcatatttgaactgcaccctctcagacactctatttaccctcagtcatctacggacaatcttctcaacctcctcagaccatatttcctctttccccttactataatgataacttagagctcctttttgaaatatgtcatttctgat

SEQ ID NO: 23581 - DNA, 380 bp, Glycine max
ccgtacgccagaaaactacacaattgttttacagcaaaactatcaaatcagatcgtcttgtttccatatatcgcggctccaacatatcatgtgttggaatcatagtgtaccgccgtctttactttggaatgtatgattctctgaaaccaatggtcttttttggtggattgcacgataacttctttgctagttttcttttgggatgggggatcacaataagtgccggcttggcctcttaccccattgatactgtgcgtaaaagaatgatgatgacatctggagaagctgtaaaatacaagagctctttcgaagcattcaagataatcgtcgcaaaacacggtactaactcactctttaaaggtgctggtgcaaacatatta

SEQ ID NO: 23582 - DNA, 212 bp, Glycine max
gatccttctgtgcggggaagggcaaaaaatggccggggtgcaacttctctaggaatcatgcccccggctgaacacatcatcacacaacaagtcaagcttctctacaaacacgcaagaacactgctttctccggctcaagaacatcttcatgactgtgctgttcacagccgtgatgcttcactgtcgctggactccacaagaaggagcttgtc

SEQ ID NO: 23583 - DNA, 159 bp, Glycine max
ccaatatgaatttctgtgtaactgatatccccatttttcccaaagtcattttttggcatacccgatatctttcgataacccctttttttttttacttttcgatccgatagaccactttggtgacttcgaccattctgtctctcccaaatatctcacttt

SEQ ID NO: 23584 - DNA, 263 bp, Glycine max
ggccgggagctcgggcccccacacgtgtgggctatactagcccattttcgagaagcttgtcgacgaattcaaatggggagccctgctaccatgcctgcagcgactcatggtcgctcggcagcttcttgctcctaacagtggaggccagacttaggcacagcacgatgcccaccaccaccagtgtgccgcacaaggccgtggcggtagggtatgtgtctgaaaatgagctcggggagcgggcttgcaccgctgacgcatttgga

SEQ ID NO: 23585 - DNA, 412 bp, Glycine max
gaacgccaaaacacaactccttcattttattctcgtcttctctccccactcccactttgctcattcttcgcccctcttctctctctctcacttccactccactcttctctctctctcacacacaccatgaactcttcttattatatgctgcaagctggtgcttcttcctcttgaacagtgaaatgggtttgtgttcttctgtccaccgaatcgagcaaacaaacatgaagcatctaacgctctctttcgagtccaaaactgaacgccttgagattcctccatcacccttcaaagacaaagacaaagccataaacggaaactttgcggtggctgaagatgatgctgcgtttaaggctcagcagtggtcaccctttccgtcaaccacaaccttgttggtcacagactgtgggga

SEQ ID NO: 23586 - DNA, 423 bp, Glycine max
gatccctaactcataacacaattacactgtctctgtcttttccaaaattagggaaacaacaaggacgcaaaatgacacaatagcccttcttccctgtttccagcttttctccttctctctctccatcttcttcttcttcttcactcagtcagatccaactcctcagataacacaagaccaaacccgctttttctgcatttctagactagacgttctaccggagaagcgaccttagaaattcattatggtggcaacagctgctacttcatcatttttccctgttacttcaccctcgccggactctggtggagcaggcagcaaacttggtggtgggcctgcaaaccttggaggactaaaatccaaatctgcgtcttctggtggcttgaaagcaaaggcgcaagccccttcgaaaattaatggaac

SEQ ID NO: 23587 - DNA, 202 bp, Glycine max
aacagatgtaaaaacacaatataaagggattcttaactcataacacaattgcgctgactttgtctttttcaaaattacggaaacaacatttactcaaaattactctttagcctttcttccctgcctccacctttaatcctattctctctccattttttaattctttttaacttagatagatccaactcctttgatatcacaa

SEQ ID NO: 23588 - DNA, 338 bp, Glycine max
cggggcaccgattgagcagacttaacaacagcacaaagcgggttactgtctgttcaagctaccatctctctgtctctttcttagtgcctacttgtcagaagttaaaatggcccaagaaactttcctattcacatctgaatcattgtactatgggcaccctgacaagctctgtgaccagatctccgatgctgggctcgatgcatgcttggagcaggaccctgacagcaaggctgactgtgaaacctgcaccaagaccaacatggtgatggctatccgagagatcacatccaaggccaacgtggactatgataagattgtgcctgacacatgcaggaaca

SEQ ID NO: 23589 - DNA, 419 bp, Glycine max
  modified_base (379)..(379): a, c, g, t, unknown, or other
ggcaccgcttgagcagacttaacaacagcacaaagcgggttactgtctgttcaagctaccatctctctctctctttcttagtgcctccttgccagaagttaaaatggcccaagaaactttcctattcacatctgaatcagtgaacgaggggcaccctgacaagctctgtgaccagatctccgatgctgtgctcgatgcatgcttggagcaggaccctgacagcaaggttgcctgtgaaacctgcaccaagaccaacatggtgatggttttcggagagatcacaaccaaggccaacgtggactatgagaagattgtgcgtgacacatgcaggaacattggttttgtctctgatgatgttggtcttgatgctgacaactgncaggtcctcgtcaacattgagcaacagaatcctgatattg

SEQ ID NO: 23590 - DNA, 421 bp, Glycine max
tatattataaattagaattataagtttgagaattaagtttttactcttcctagtgtctcaattaggagaaattacgatatgttctaaaataactggtgttcaaatttccaactaatctctacatgactcataacaatttaatcaatttgtttttcgctaaattaaaaaacttaattgcatgtcacgtaaattaaattatgtatgatgttagatgttagaagcaaattaaaacaataattaagatgttcataaaatatatttttctcttatttttgggaggtaattgatcgcaaaactttataataaatttgttggaagagtcacaaaccgtggtcttagtggcaccatgaaacagtagctgtggggcatccttggaataaactagaaacttaaaaacttccataatttcagtaggcgtttg

SEQ ID NO: 23591 - DNA, 234 bp, Glycine max
attccttgtagattccaagctttacatatactcattacaaacttaccttcccgggcattcgagctcttagaggtatcttcatatcacctacattcaattaaatcaccctctatctacaacatcaagactccttctaacttcaaaatatccttctaaattttcttgcaacataacaacctttaaccatataccccattatccattatttccgcatctttcctattttccaacaat

SEQ ID NO: 23592 - DNA, 168 bp, Glycine max
gatcgccagagatcatgtaaactagattactctggtcatgcgtatagactatctctgtgcatattctgcgagactagaataatgctctctctcctagttaaacgtgccacatgttatacaccactactttcgtgacaccatatattgctgaagatgtcaggatgctac

SEQ ID NO: 23593 - DNA, 403 bp, Glycine max
  modified_base (360)..(360): a, c, g, t, unknown, or other
gggtctctttttcttttagacccaccgtttctcgggtcttccctttcaacttcaactcaacaacccttcccttctcaaactcattcttgcctttctttttgttcatacttttatttttattgctacttactttttatttctatccaatcatccatggccgaggaaccccaaaaaccagcctccgctgaagaagtggtgcctgttcctgcggacacgccaccaactacccaatctgaagctgaagctgaagttgaagcaaatgcagaaagcatcgaagaagtggtggcggaagcagagaacgcccagagtggtgtagaagacaagatttcccaatctgaagctgaagctgaagctgaagtngaagcaaatgcaaaaagcatcgaagaagtggtggcggaagcag

SEQ ID NO: 23594 - DNA, 396 bp, Glycine max
ctgatcgctagaactagattgaataaaatgaaattttataccctttactagcttagatactcaaatttctttgaaagggattaaggcataacggttattcggcttatgccatgtgtgagacatttaccacttattagaaagttgcaaattacatcaaagtcaatcttatgccaattagataagtggaacccttaaatgtacattcattttttatggatattttttaaagttctcttaaatatattttttaagatgtaataatcatatgcactatacgaataaattttttaacttgtaattttaattgaatttaaatatatttgtacaatgcacatgattcttgttacaccttattactattattagcaagcatcttactcatccattcgttatatg

SEQ ID NO: 23595 - DNA, 209 bp, Glycine max
ttccttggtcggcccactcgtgacgtcacacgttcgtacacgtcctaaaagaccacccaagggtctattatacattacaactatcctgttgacgattaaactttgactcttcctagcgtctcaatttggagaaattactatatgctctaaaatcactgcaggtccaatttcccactaatctcttcgttactcataacactttaatccat

SEQ ID NO: 23596 - DNA, 304 bp, Glycine max
gactgccagagatcgagaaaacggggaaactatcgggattagtattgatcatggctattgcttgtattagaggttcgaacactgatctctctacttgttatactggccacatgctaaggagccttactgtcctgacaccattgattacataaaatttctggatgctgcagaagacataaatgacaatgatagtttcatggatgggaccttctttgtaaatagtgctgatatccttagtatatcagccatgctgcttctgaaaggtgcatacacgaggactcactatgtttcatcttatgaagca

SEQ ID NO: 23597 - DNA, 349 bp, Glycine max
gacaacatatccattttatttacaacagcggtcgcttatgttcctgaaccaaggatctcccttctaaccttattcttcttctcgttcttcaccatcattgcgcatgcaattgtttctcaacacgaatccttcaaatttgagaactcaggtgaactttgtaccctgcatcgttgagtacggtgcagattacagaatgataagcatcttcaactatccattccaagttggattctactacaccaccccatatgccttcactctagctctgcgtgtaaggcttcaacgctcggagcatctatttcattagaattgggaagccaataggaccaacccagacggagaaaatgcc

SEQ ID NO: 23598 - DNA, 437 bp, Glycine max
gattgccagggatggtgaagacggtcaaactatcgtgattccaattgatcatggctattgcttgcctgagagttttgaagactgcacttttgactggttatactggccacaagctaaggagccttactctcctgacaccattgattacataaaatctctggatgctgaagaagatataaagcttttgaagtttcatggatgggaccttcctcctaaatgtgcccagatccttcgtatatcaaccatgcttcttctgaaaggtgcatagagaggactcactcctttcgccttaggaagcatcatgtgtagagaaacactgaagaaaaaatctgtcattgagcagattgttgaggaagcagaggaagcggcatttcctggagcaagtgaagctgcatttcttgatctggtttcagtggtcatggatagtcatttggatg

SEQ ID NO: 23599 - DNA, 406 bp, Glycine max
cgattgtcagagatggtgaaaacggtcaaactatccgcattcgtattgatcatggctattgcttgcctgagagtttcgaagactgcactttttactggttatactggccacaagctaaggagccttactctcctgacaccattgattacataaaatctctgtattctgcataagatataaagctattgaagtttcatggatggtaccttcctcctaaatgtgcccatatccttcgtatatcaaccatgcttcttctgaaaggtgcatatagaggactcactcctttcatcttatgaagcatcatatgtagagaaacactgaataataaatctgtcattgagcagattgatgatgaaacatatgaaacagcttttcctgtagcaagtgaagctgcatttcttgatct

SEQ ID NO: 23600 - DNA, 469 bp, Glycine max
gccagatgacgacagacgggaagttgagtcgtattcagcatttgatatcttgaaaatgcgatgaatagattgagtaattcatcgtgtaaattcacttagacgaaaatgtaggtaattaagaaaagtgggggtgtaaattgtgattcaattaatatggggatgactaatgcacacatgtgtatttcaataacatacatatttaaatgaaaaatcaataaactactatgtgtcagtaaatcaatcatgagatagtattatcggcaaagagcaaacacgctccgtgccattggttctcattcattgttttggtaaatagcactagcttatagccttgctaatgacgcatggtttctttagaggaatacgtaaccttcttaatactatgtggacactctgtcttctctctaataaacatctgattatcaagtagtttctatctagtcatagacattaaattaatgtatatatt

SEQ ID NO: 23601 - DNA, 438 bp, Glycine max
gacaatttaagataaagaaaacaagattgtttagggtttgggttgtttcagactaggaccaaattattggatacaattttcattgttgatatttgttcttcttgtaattcaggagctacaagagtggatttgtgtggcatgatctgtgtgaagatgatataattctaccagctcatggaaatgagtatgttctcaagggttctgagctctttgacgaatcaaattcagatcgtttcagtcccattagcaatgttaaaacacaaagtgtgaagctgttgccggggccagctttttctcggagcctggatgagggctcatcctcttctagcatgaatgggaaggagacaagaatctaccaagatgacgagctttcccaagatccacacactggttcctctgatgtttctccagagtctagagctgaaaagagtgatgctc

SEQ ID NO: 23602 - DNA, 269 bp, Glycine max
gacaatttaagataaagaaaacaagattgtttaatggttatgtgtgataagactgggaccaaattattggatacaattttcattgttgatatttgttcttcttgtaattcaagagctacaagaattgatttgtgtggcatgatctgtgtgaagatgatataatatttccgtattatggaaatgattatgttctcaagggttcttgaacttctttgacgaattaaatttagatcgtttcaatcccattagcaatgtttaaacacaaagtg

SEQ ID NO: 23603 - DNA, 286 bp, Glycine max
tcatgctatatctacgagcatcagctagggacagggttatttacatattcagttcattatctcttgaacctttgcaatctacagatgatagcattcatttagctaatagatttaattgcttacctcgaagacttaatacaatatgtgcatgtatttattattgtatttatttttaatgttgatctatctgttcttaatatgtaatatggcttatcacatttgtaacttccaagcactataagcctactatctattaaaatagacctattctagatagatatatatc

SEQ ID NO: 23604 - DNA, 438 bp, Glycine max
gacaatttaagataaagaaaacaagattgtttagtttttgggttgtttcagactaggaccaaattattggatacaattttcattgttgatatttgttcttcttgtaattcaggagctacaagagtggatttgtgtggcatgatctgtgtgaagatgatataattctaccagctcatggaaatgagtatgttctcaagggttctgagctctttgacgaatcaaattcagatcgtttcagtcccattagcaatgttaaaacacaaagtgtgaagctgttgccggggccagcttcttctcggagcctggatgagggctcatcctcttctagcatgaatgggaaagagacaagaatctaccaagatgacgagcttttccaagatccacacactggttcctctgatgtttctccagagtctagagctgaaaagagtgatgctc

SEQ ID NO: 23605 - DNA, 441 bp, Glycine max
gacagacactaataataataaaaaatttgaaatctgtgcgcatgcttatgaaataaactgcaggcgtaacaaaagttgcgtagccatactctgattcattagtgaagaaaaatggcaaccatcatcgccggcatcccaactacatcgatcactcgcgcaggtcttgtgctcaaacgacctgttggagcctcgtcctctaccgttcttggattgccagcaatggctaaggcagggaaagtgaggtgctccatggaggaaaagccttcaagcagctcaaatatagggatgggggcatccttgttagcagctgcagttgccgcaaccatgtcaagcccagccatggctttggtggatgagagactcagcactgaaggaaccgggctttcctttgggcttaacaacaacctccttggatggatcctgtttggtgtcttcggtctt

SEQ ID NO: 23606 - DNA, 96 bp, Glycine max
gacatttcaatctagtgaaaccgccatcgtgcctgtgacaggttgagtcatactttgaccaaattctcggatacaatactgattgttgatattaaa

SEQ ID NO: 23607 - DNA, 224 bp, Glycine max
aggcccggaatgaccgactcgtcccacacatacacataaatttcaatctaaacgatattcacatcctttctttgtatattctctcagggttctgggcaagtttgggaagctctgaaggatatacaaagaaatttgtttatgtactaaacgctattacaataattaaatgcatctcatcctttaaaaatcatatattttaccattaaaaattattacattcttat

SEQ ID NO: 23608 - DNA, 435 bp, Glycine max
cgacctttcatgctcatgaaaacaagattgtttaggggatgggttgtttcatactaggaccaaattatcggatacaattctcattgttgatatttgaacttcttgtaattcacgagctacaagagtggatttgtgtggcatgatctgcgtgaagatgatataattctaccagctcatggaaatgagtatgtaactcaagggttatgatctctttgacgaatcaaattcagatcagttcagtcccattagcaatgttaaaacacaaagcgtgcagctgttgccgtagacagcttattctcgtagcctggatgatggctcatgctcttctatcatgaatgggaaggatacaagaatctcccatgatgacgagctttcccaagatccacacactggttcctctgatgcttctccagagcctagagctgaaaagagtga

SEQ ID NO: 23609 - DNA, 147 bp, Glycine max
tggcgactgtgtaaaacctctaattctgctggtaaattgtgaactcttaaaaactcatgattacattctcccaaattataaggaagattgtgatactcccactgtactggatgctcaaatgtctgatcacttaccttggactgtgcc

SEQ ID NO: 23610 - DNA, 430 bp, Glycine max
cgacagtgtaaaacctctaattctgctagtaaatgggtgctcaaagaaactcatgattacattcttccaaattataaggaagattgtgatactcccactgtagtggatgctcaaatgtctgatcacttaccttgggctgtgcctctcggtcttgatgaattcaatagcagggcaattagttctaaaattaagtctggcacttctggttcctctggaagtgttatgcatagagtggagcctggtggtgcagaatacaattatgcttcagccttcatgggagcaaaattattaggttctaacaaagaagccaaaggcgcctctaatatcttaagcagagacaaagataagtatcttcgcaatccatgttccgccgaatacaaattcgtcatcatagaactttctgaagaaaccttgtgagatacaatataaa

SEQ ID NO: 23611 - DNA, 130 bp, Glycine max
cactgattttaagagtgtagggtttcattgaacagttacgcatgtatagttattaattgttctacaaaagatgtataataattccattgactctactcctgtaattctattttgatctcatatttaaaat

SEQ ID NO: 23612 - DNA, 438 bp, Glycine max
gacattttatgatcaagaaaacaagattgtttagtgtttggggtgttacagactaggaccaaattattggatacaattttcattgttgatatttgttcttcttgtaattcaggagctacaagagtggatttgtgtggcatgatctgcgtgaagatgatataatgttaccagctcatggaaatgagtatgttctcaagggttctgatctctttgactaatcaaattcagatcggttcagtaccattagcaatgttaaaacacatagtgtgaagctgttgccggggacagcttattctctgagcctggatgacggctcatcctcttctagcatgaatgggaaggatacaagaatctcccaagatgacgagcttttccaagatccacacactgggtcctctgatgtttctccagagtctataactgaaaagagtgatgctt

SEQ ID NO: 23613 - DNA, 289 bp, Glycine max
  modified_base (222)..(222): a, c, g, t, unknown, or other
tggactctttaactgtaagtcaaacaaatgatttaatagaatattgttatatctataagctctataacttgttatacaactcatgcttgatacataggttattatcatatatacctgactaatgagatgaagttgaattcattaaatcacgactaaaaattactttttttaatatatatattcaccttctatatactacatctatactcttttatgccctgntgtatactctttaacatttaataatcatctccaatcttggtttattgatctatcgaatactacgcta

SEQ ID NO: 23614 - DNA, 253 bp, Glycine max
atcacactttaaaaaaatatgtttctattactttattaattacctttaaacgagggtttttgctctgtgtaacttaaaacacatctttttacctttatgctattcaatcaacaaacatatatctctctgcatcatcacatacattcccttccacttctaactctaaaactctttcaacgataaatacctacccactgatttaaactattcaattcatctttacactttttccaaaattacaacattactctaa

SEQ ID NO: 23615 - DNA, 152 bp, Glycine max
tacactttttaaaaaactacatatggcgaaacatatcattctttctttactgcgtaattctgccaaatctcaattctctctcttctaaaaaccatctttcttttgtattactaaatctccaacactcaaaattcatacttgatttgcaaatc

SEQ ID NO: 23616 - DNA, 402 bp, Glycine max
  modified_base (72)..(73): a, c, g, t, unknown, or other
tacggtttggaagcagaagtatgagaagattactgcgaagaaaggttctacttctattgactctctctctcnntactatccctcataatttgcttcatacttccattactgccggtcactgaggtttgatgataaaccagattatgcttatttgaaaagacttctacgtgaccttttcattcgtgaaggattccagtttgattatgtctttgattggaccattttgaaatatcagcaatcttcaagtgccactgcccctgcccgtgctattgtaagtgatagcatgctatcttattgtattagctgattgattgttgagatttagattatttagtggaagtgacatttgcagggtccggccgctggaccaagttcaggtgtgccaccactggttgcaaatgg

SEQ ID NO: 23617 - DNA, 408 bp, Glycine max
  modified_base (165)..(165): a, c, g, t, unknown, or other
gtattagatttgtttcattagattttgcgttcaaggatataaatatgcacatgtaatcatgaccaagaaataaataaataatcaatgaagttttttttctcaaaattcttatgagttaaatttcataagaaaagttaattctgaaataaatgttaatattatatntaatatataattaatatttattttataaatattaaaaattatatattattatatttgttcctatatataataaaaagaaacaaatagtagtgttttttactaatttaaaaattatatgagaccgcttacaagtatattgatttatgattttattcaatgcccctagtttaatgtgaagtctattagggagatatctatattgtttatgaaagtgaatgcatttattatcaatataactcacat

SEQ ID NO: 23618 - DNA, 306 bp, Glycine max
tctccgagagggcagcttgcgagctcaaggctccaaggctgtaacacgtacttggtgcaatctattcataccgtaatgccgcgactaacttccgctctagaccagggtattacttgcgacgcggaagttgataaggtctgaaaagatcccaatctccgctgaaggtttataaatcaccatgtagatacatgataaaacattggattctcgcacttactccatgacaatggataaacagattctagtcactgctctgacagaacagattgcttctgtaactggagcgttgtctgaacgacaactctt

SEQ ID NO: 23619 - DNA, 418 bp, Glycine max
gaagccacttgctattgaattaaccaaaggacatggagatggagataatttgggtcctgagagtatagtggtgttgactgcaactgaaggtgttgatagtacaatctggctattggccaatgctcatgttattgtgaatgactctggttatcatcatatcatgatccattgtgtaaatactcatgccatgatggaaccatttgccatatcaaccaatacgcatctcactgtgctccaccctatttataaacttctttatcctcactaccgcgacaccatagatatcaatggacttgctaggcagtccctgattaatgcagatggcattatagagaaatcatttttgccctgaaagatctccattgagatggctttatccgtgtacaagaattggtgttctactgaccaagccttacca

SEQ ID NO: 23620 - DNA, 399 bp, Glycine max
agggcagcttgagaggtcaaagcgccaaggctgcaacaggcactcgctgccatcccttcaatccctaattccgccactcacttccgctctcagctcagggtattacgtgctacgcggagaatgggaagtactgaaaagatcccaatcagcgctgaaagttcagaaaccaccatcaggataaagatcaaaacattggattctcaaacttacaccctgagagtggataaacagatgccagtccctgctctgaaagaacagattgcttctgtaactggaatgttatctgaacgacaacgcttaatttgacaaggaaaagttctaaatgatgatcagctactgtctgcctatcatgttgaagatggtcacaccttgcatatggttgtgaggcatcctgatcta

SEQ ID NO: 23621 - DNA, 399 bp, Glycine max
  modified_base (290)..(290): a, c, g, t, unknown, or other
ggctttttcttttcatccatcgattaaagacttgcttccaagatggttctgctagagaagctctgggatgacgttgttgctggccctcaacctgagcgtggccttggcaagctcagaaaactcaccaccctcaaaactattgatgaaggagacagtagcaagctgcagaagacgttgtcgatgccgtcgacaccgacaaccccgatgactcccacgactccaacgacaccgggatccgcgcgtaaagctgacaacgtttggaggagcgtcttccatcctgggagcaactncgtcacaaagaccatcggtgctcagatgtttgacaaaccacttgccaacactcccactgtctacgactggctgtacagtggggagaccagaagcaggcaccgctgaaag

SEQ ID NO: 23622 - DNA, 463 bp, Glycine max
gaagacgacagaaggggatctccattccttccaatggcttcaatctctcacttcagaacctcggcgaattccttcctctcccaatacgaacctctctctctgcttctcgctcctctcctctctctcctcttcgctcacgctctccgctccttcttccacctcctctcccagaacggactcaaagccacgctcctagggtttctcattaactccctcaaattagtccctggcgtgaagggatacatagatgccgaaaaacaaaaggttgtggataagttgcaatctgatggtaaatctaaaagagaaggttggaaaactgagttgccaagcacaggattagggacatctgtccttgagaaaatgagagaggagaaaataaatgatgcggtttggcaaggcaaatgctctggtacagtctacattggaggaagtgaatctgatggacatttttctctgataaatg

SEQ ID NO: 23623 - DNA, 450 bp, Glycine max
ctccaaagacgcataccaaaggtaccatgcccatcactacacaaatggaacccggtgcgatgtcacaaaccaaccacgagaaactgaggttagatttgtttgctcaaagccacccagagccatactcaattgtatcacagaactatcaacgggcaagtatgcacttacggcgcgatgcccgacactttgcaagcatatgttatttgaagaagagagaccagtgtggtacatcattaactgcaatgagcttccagatgattacaaggaaacagagaggagtgaagaatcaacagatgagattgtcatggttactgacatcaaatatccaaaaaatgaatctgaagattaatgtgaatatatctttatatgatagaagttttatcaaccaaactaaccttacacacaaagctttttcctatgtagatttttctttttcatattcaaattata

SEQ ID NO: 23624 - DNA, 415 bp, Glycine max
  modified_base (51)..(51): a, c, g, t, unknown, or other
acgctctaaatactcattccatacgtaccatacttatcactacacaaattnaaccgggtgctatcgcacaaatcaaccacgagaaacttattatatatttatttcctcaaagccacccacagccataatcaattgtatcacataactatcaacatccacgtattcacttacagttctataccccacactttccaagcatatctaatttgaataacaaagaccactatggtacatcattaactccaatgcgcttccagatgattacaccgaaacacataagattcaacaatcaacatattagattgtcatgcttactgacatcaaataatcacaaattaatctctaaattaatcgaaatatatctttattatatagaaaatttatcaaccacactaaccttacatacaaagttttt

SEQ ID NO: 23625 - DNA, 244 bp, Glycine max
  modified_base (55)..(55): a, c, g, t, unknown, or other
cccacacgtccttctaaatactcatccaaacttctctacttatcaataccacatnaaccccgcccttttaaaaaccaaccacccaaactattttaaatttcttttctaaagcctcccacatctcatctcaattctatcacaaactattaacaccaattattcacttacaatgctattccccacactctcctatcatatcttatttaaacaacacataccattatatttcattattaacttcaat

SEQ ID NO: 23626 - DNA, 129 bp, Glycine max
caatgggaccattcacgaatacaactcaacgagagcaacaggttaaatttctacaatacccggataacaacctacttccaatagtgttataaatgacaagactacaccagactacggaagacgacataa

SEQ ID NO: 23627 - DNA, 414 bp, Glycine max
ctacatgccatctagagacgtcaatcgcccaatgctgcaacagcgactctgtcaaattcgtgcaatccctactctctccactcacttctcgctctcagctcacggtatcacgtactaccacgcatattgggaagttcttgaaacatcccaatcagaacctgactgttcatatacctcctttgttatataatattctacatcggattcttacacttacacgattgatacttataaacatattcccatccctgctctgatacaacacattgctactgtaactgtaatgttatctgaacgacaactcttaatccgacaacgaaatgttctacatgattatcagatactatctgcctatcatgtttaaaatagtcacacctttcatctggatgctatgcaacctgatctaccatcacc

SEQ ID NO: 23628 - DNA, 159 bp, Glycine max
atcaattaatacatcacctcatctctaaattcctctaacatcaccttcaccccgcctttttttaacattcattaattcccatataaaccaatgcatcttccttctcaatacaccatagatccactaactctttaatgagattcaccaacatactttctt

SEQ ID NO: 23629 - DNA, 331 bp, Glycine max
tgctgggtttcgctgcaagtttctgtgttggggacactgacccacttgatgttgcggcaatcaatagtttgtacgtggctcttggctcaccactccttgagggatggaaagccacaggaggagatccttgttttgatcaatgataatgtgttagttgtgtcttctccaacattactgcattacggctggtaggcatggatttaagtggaaagctgtgaactaatttggatttcccatccatcatagaaatggatcttagcaacaaccagattggatggaccattccattcactttgcccactactttgaggaacttgtcactatcatcaaa

SEQ ID NO: 23630 - DNA, 372 bp, Glycine max
gttgtgcaggtattcaccaagccaatttacctcggggctgcagatacaagtctatacttcctttaattggaataaaacccgaaaaggctttggccttgcctggtaaatgtggccttcaatcccctcctaattgttgagtgtaatgaagcacttaatgaaagtcttgttcattacaagcacttagtgttcaggtgtttcattaacactgaagatgcttttatgtcctatggaaacatttatgtccctcgaataaagatgcatggtattttaatcagtgttttatgcctaacttgcaagcagatgtcgtgagtgtattaaaatagtcgtctgatgttgtatacaagatatctctactactcaatgagacacaac

SEQ ID NO: 23631 - DNA, 382 bp, Glycine max
gttgtgcagttattcgccaagccaatttaccttggctctgcggatacaagtctattcttcctttaattggaataaaacccgaaaaggctttggccttgcctggtaaatgtggtctccaatcccctcctaattgttgagtgtagtgaagcaattaatgaaggtcttgttcattacaagcacttagtgttcaggtgtttcattaacactgaagatgcttttatgttttatggaagcatttatgtccctcgaataaagatgcagtttattttaatcagtgttttatgcctaatttgcaagcagatgtgtgtggtgtattaaaatagtgtctgatgttgtatacaagatatctctactcctcaatgagacacaacagtaataatta

SEQ ID NO: 23632 - DNA, 217 bp, Glycine max
atcaatcaataccttacttcttccctcaattattcttactccattttcacccgggctttctgggtaattcattaatgccgaaaaacacacattgtacttccatccttatacatcatcagtaccacttactcttgacttggaggcaccaacataatctcttcaagattattaccaaagatcaaggtaaaaccaccactccctcttatatcgcattcac

SEQ ID NO: 23633 - DNA, 300 bp, Glycine max
aacattctttctttatattacattattacaatcgaaccaattccattccacacggcaattcttaaattctaagaccctcaaataccatacaatctttaccatcttacccatatcaccaatttaatccacatactccttcctttcacctttaatccttcctcttcatatcatccaaatcttctagatactcactcacacacaataccgcttcttaattcattttcaaatctatagaactctcccttatttcaacatccaccttatacttgacaatcacctacctcaattttgccttattta

SEQ ID NO: 23634 - DNA, 419 bp, Glycine max
gaagatggttcttgacaagccattgcgtaatttaaatccagacgttccttttggtcctgggctctcttcgacagttggagacgtatcatttcgatctggtttaaagccttggcaaaagcttaagccttctatagaaatcttatgcaataatcaggtaaatgaaagtacattgtcttgtctgtgtggaagaataacggtttatcctttttgctaggcgattaggcactcaaaagagttgtagtactgagttgtactttaggtttcttatttaactcaagttgaactgtaattactgttttggttcattttccatttttttacctcactttacacccttgagaagaaaacacaactttttattgaaatgatgaaaagagattaatttgtgaaaaataaataaactaatccatagacaaaca

SEQ ID NO: 23635 - DNA, 400 bp, Glycine max
tatactttatattatacgaacttgtaaggggttagtttatatgtgatctattgtcagggattggtcggagctgctaaggaatgcttccgatgcggtgatcatgaacttgctggaggtagaggaagaaaggaagcacgcgaggaagcaacaacgttgaatgcttttatgttcatacttcatagcgttggataaccacaatataaatgtcgatattatttgttgcgtatataatatgggatcttaatgagagagaccatatgttagatgccttcaacatcactcatttcttgtggctgaattcgcttaataattggtttaggcttcagattatatatctttttaaaaagcaaaaatttattgtaagtaacagaaagcacttctggtgctttgattaattcat

SEQ ID NO: 23636 - DNA, 320 bp, Glycine max
gacgacagatgggggcactcactgagttttcaaccatgggggcgatacttacacagctacatgtgctgaaggtagccaaccgtaacagcgacgtccgtgaagtccagcgcaagtactacgatcgcgacgtatgtcttctttacctcggcgaactctgtcctcacgaactcttacatttaacgaaaatggatatgggcccttgccctaaggtccactgcttgcaactgcagaaagaatacgaggatgcgaaagcaaacgggaccgatcattatgacaggcagttcgtggatgcaatagatcagcttattggtgaacgtgat

SEQ ID NO: 23637 - DNA, 353 bp, Glycine max
gtgacatcaaatccttttttgctccttctggtgggacctctgtccatgccgattccttcttgcagctcaatttgtctcgccctttgctccgggcttgtgaggccttggggtattctaaaccaacaccaattcaggcagcttgtattccattggcattgagtggtcgtgatatatgtggtagtgccattaccgggtcagggaagacagctgcatttgcactacctactttagagaggttgttgttccgtccaaagcgcatgcgtgcaataagggtcctcattcttactccgaccagagagttggcagtccaagttcacagtatgatagagaagcttgctcagtttactgatata

SEQ ID NO: 23638 - DNA, 211 bp, Glycine max
tgcttaagggggattgctctccatatttgaggagagtttatcggaatatttttaccacttacaaggacctctctttggcacttgaaaagatgtttagttgttttacactcattcaatgtgtctcatattgggtttctagtctggaaaatttaagggaaagtagattgatggatcttcttcattgttcagaatatgttcttacctattaata

SEQ ID NO: 23639 - DNA, 172 bp, Glycine max
aatacccggtcgcggacgcgtccgctacttgtactaaccttacttctcaaacctttaaccttagcctccctataccaaaccagggctacttacgaaggttgtctagcacttccaaccctaactcttcgaactcgacaaccactccgttctccccaaagcttatccacatccc

SEQ ID NO: 23640 - DNA, 404 bp, Glycine max
ggaaggcgccccatatttgaggaaagtggatctgaatagttttaccacttacaaggacctctctttggcacttgaaaagatgtttagttgttttacactcagtcaatgtggctcatatggggtttctagtcgggaaaatttaagtgaaagtagattgatggatctccttcatggttcagaatatgttcttacctatgaagacaaggatggagattgtatgctagttggtgatgttccgtgggagatgttcactgagtcttacaagaggctgatgataatgaagagttctgaagcaattgggctagcacctatagccatggaaaagttcataagtcgctactagctagtgcaatgctgtatgctttttgctctaatcctgaaagatggaagaccacatttaagca

SEQ ID NO: 23641 - DNA, 213 bp, Glycine max
tggcggaaggcgccgaatcttagaggggagtggatctgaatcgttttaccacttacataggacctctctttgtcactagaaaagatgtcaagttgttttacactcattcattgtgtctcatatagggatttctagtcagtattatttaagtgaaagtagattgattgatctacttcatgtgtcagaatattgtcttacctatgaacacatggt

SEQ ID NO: 23642 - DNA, 86 bp, Glycine max
ggaaggcgccccatatttgagggaagtggatctagaatagttttaccacttacaaggacctctctgtggcacttgaaaagatgttt

SEQ ID NO: 23643 - DNA, 209 bp, Glycine max
ggcatctgactcctatagtttcgggtgctaatggcatatccccgatttccttcactcttgaaccccgattcatttccaccagcacaagaagcatggctgcaatatcaataccttctcacatgaaagcttgtacatactctgagtatggaatatccaatgaagttctcaagtttaatcagagtgtggctttgcctgaggtgaatgaagac

SEQ ID NO: 23644 - DNA, 370 bp, Glycine max
acccactcgtccgaccacgcctccgaattctagcggcactctttttttctctttttggttcaactctcttttttttgaattcacggactcttctgcttgacgctccaacaacgttactttccccgccctattcaggatcatattgaaatcggtagaagatataatgattaataaaaattctgctgtgaaagcagtgtatggtgatgaattttggacacctgcgaggagttcacctcaggatatttggtccataaggagtgatttgcaagtcccatcttccccttatttccctacctatgcacaatgacaagggccaccccccatggttgcggagcgtttccagagtgttataagtcagcttttccaatac

SEQ ID NO: 23645 - DNA, 255 bp, Glycine max
tattattatgtatttctttatgctgtcttcctaaggcctaacgctttctaatggaacttaccatgtcaactggtagcattatgttcaaaactattaatctgaacttgaatgtctcactcatctatttatttattcatcgtcataatacattggctacatggtacatgatccatatccaacagcattcatgctgagtaccgacatcttacagcttacacatgtagtgaccaatctaactagatataatggctttca

SEQ ID NO: 23646 - DNA, 215 bp, Glycine max
ttttaactcttccacgccatcttactttcgactctcaaacaatctttctctctaattacattccaaatatatattaatatatatatcatttacatcaacatcataaagctataatattaaaccataatatgaatattaaccataacaacttttcaacccattgtaatattcatccaaattttaaatctatttccacaaactcataaatctattct

SEQ ID NO: 23647 - DNA, 233 bp, Glycine max
ggaaaatgcgtaaccgtcgctacatctcacgccgtggaccactcatcgtgtacggaacggaaggagccaaagccgttaaggccttccgtaacgtccccggcgtggaagtcgctaacgtcgagaggcttaaccttctgaaacttgctccaggaggacacctcgggaggtttgtggtttggacaaaaagcgcttttgagaagctggattcgatttatggttcttttgataagccc

SEQ ID NO: 23648 - DNA, 105 bp, Glycine max
acgaaaatgcgtaaccgtcgctacatgtcacgcgggggaccacgcatagtgtacggaacgtatggagccaaatccgttaaggcctaacataacgatccctgcgtg

SEQ ID NO: 23649 - DNA, 195 bp, Glycine max
ggaaaatgcgtaaccgtcgctacatctcacgcggtggaccacggatcgtgtacggaacggaaggagccaaagccgttaaggccttccgtaacgttcccggcgtggaagtcgctaacgtcgagaggcttaacctttctgatacttgctccaggaggacacctttggaggtttgtggtttgaacaaaaagcgctttt

SEQ ID NO: 23650 - DNA, 100 bp, Glycine max
tggttctctacatgggaacattgtggataaatgatacattgaaagtgctagatttaccctaggtaagatttttatccatcatcatctaatatattcatta

SEQ ID NO: 23651 - DNA, 269 bp, Glycine max
tccaaagattctttcaattatacactacatactatttttcaataattcaataattggatattaacatttaatgatcttatgattcatcattcaatgtataaactgttaactaaagccttcatatcattaaatactctccttataaacccttcaccatgatatcattatcatcacctttgtttattctaataatgatttatgttataatctctttcattcaagttgattaattcaccccatattttctctctctcaaccatattcctctt

SEQ ID NO: 23652 - DNA, 134 bp, Glycine max
gagagtcagacgacagagtgcagcattgctttgcgtcgctgttgatccattctggagagagaaacactttttcagttctctctctctctctctaaggtggccgacgatccaatgcccacgcgcttgtcttttca

SEQ ID NO: 23653 - DNA, 232 bp, Glycine max
cttgcaagaggccacctaagggagagagtcacaccactaattgcatcaatgatatgggtaacttttgatccattcttcatacatcaacccttttctagttcagtcattaacaatctaaagaagacggctcctacatgcccaaacgccactaattctattcacttctaattttttaatcatgctaactggttcatcaatatattttcgttacaactaaataatattcttcttt

SEQ ID NO: 23654 - DNA, 389 bp, Glycine max
ctcacaacctttacaaatacctatattactcagaccacggttatttcaacttgaggcgccgttccatgtacgtttcatcactcctcatactaaaacgctctaatgctcaaatcatctcactcactatatcgatagaccgacttgttacacatgaagagtcattttttaagaaaagataaaatgatcatatccaacttcaacgctcttaaccctctcaacaaccctttgcttcaatatccctacaccaacgccgtcaccactatactcaccaatgttgacagaatttttcacaagtggttgatccattattttaagatagttacattttatggtatcaataagaaggctcctattaatttcaatgtcaacacttttaccaattttttttt

SEQ ID NO: 23655 - DNA, 333 bp, Glycine max
tttctctctctacaccttctataatcaaaatttccttgttgctcatcaattggtgttatgttagattattttaaaagatagggtcaaatcaacataagttcccctatttttatctgttctcagttggtatgtaatttcattttattttagcctgacacatatctttccctcttataagtattattgctagttcatcatatactatcattaaccacgttcacactctaattttcatcacacattatcttttttgttaataatactatataaccatcttcaattattcttaatttttttatttttttatctaaaatttctctccaaaccatattt

SEQ ID NO: 23656 - DNA, 319 bp, Glycine max
gacacaccaaaccaaagtaagagtgagcgacttccaagaccatagtgaaatggcttccaaggctgcacttctcttgtgtttcaatgttctcttcttcaccgtggttagctccacatatgtgccatgcaacccaccccccaaaactccaaaacacccacctgtcccaaagccaccttccccaaagcaagcaagttgccccaaagacactattaagtttggtgtgtgttctgatgtgttaggtttgatcaacttgcaacttgttaagccacctaagaccccatgctgcaacctcattgagggtcttgctgatcttgaaact

SEQ ID NO: 23657 - DNA, 413 bp, Glycine max
ggtcgccacttcgacctcaatcaccctcgcgccgtcgctcttcccttcctggtggcgacaatgtcgactcctgctaggaagaggctgatgagagacttcaagaggctgcaacaagacccgcctgcagggatcagcggtgccccccaggataacaacataatgctgtggaatgctgtcatatttggtcctgatgatactccatgggatggaggcacgttcaagttgactctccagtttactgaggattatccaaataaaccaccaactgtgcgatttgtgtctcgcatgtttcatccaaatatttatgctgatggaagtatttgtttggatatactacaaaatcagtggagtcctatatatgatgtggctgctatactcacatctatccagtcattgctttgtgatcccaaccc

SEQ ID NO: 23658 - DNA, 156 bp, Glycine max
acgcgttcgaacacttccgagaagactaccgaagggtatacttcattcccttattcggttcttttataggtttcacttcttgcatttttgccagttgtctgtcggatagcaagatctctttgattaaattagtgtccttatctttacttacctttt

SEQ ID NO: 23659 - DNA, 272 bp, Glycine max
cccttttggtaatagccaatgccaacttgtagtcttctctgggaacctacaatggtaactcaaagcttgctgattgttcctcaaagtgcctccatgtttaatactacaagtactgatcaatctaagtgctgctatgaatctttattctattggtacaaccttaattttcttgttaattaataattgtgcttttaactctttccaaaataataatacgtttgaaatttttccttttcttttatccttattgttcctttattatcaattttaat

SEQ ID NO: 23660 - DNA, 432 bp, Glycine max
  modified_base (413)..(413): a, c, g, t, unknown, or other
gcctcttcttcttgagagttctgtattctgttcgtcttttctcagctatgcacccaccaccacctattctaacagtaaaaccctcccaaaacccacactgttctaaaccccttttagcactctgtttctctgcttaaccatgtcccaatcactgaagctaatcaaggaacacgccttcaaccccaaactctggttggtcattggaataggagttgccggaatcgtggttctggtggagacacggcggagaacacggcggggaaagacacacaaacaagactttggtgcttttgttgagcgttttgagctacttcccttccctcagcctcctcctcctgctgccaagcaatcgctctctgctctaactcttgccataaacgacacatttgatgtgaaagactacgtgacagggnttggaaattctacctggaa

SEQ ID NO: 23661 - DNA, 233 bp, Glycine max
gagcgagtgtagggagagttactccaggctacggattttaccgagctttaccaggcgtactagctatgtcactggtacccacttctcctaatcgacactgtgccctgctgtcctgagccaccctcttcccctgtcaccgccgtgttcacgaccgacacagctgcatgcacaaacttccaaggtctaactcttcacgttcatccatataggagttgccatagaatgagctactg

SEQ ID NO: 23662 - DNA, 377 bp, Glycine max
gacctttctctctctctccacaactctttctcacccgctagtgtttccttccatcgcatcttgatttcgcaacctcgtctagcaattctccatggagggtgctgggatggaagagaataatattattaatgatgataataagtctgaggcgcatttgacttctgccgctgcttttgtggagggtggaattcaggatgcttgtgatgatgcttgcagcatatgccttgaagctttctgtgatagtgatccctccacggtgacaagttgcaagcatgagtttcatcttcagtgcattctggaatggtgtcaaagaagcttccagtgccccatgtgttggcaacctatcagtcttaaagatcccacaaggccaagaatta

SEQ ID NO: 23663 - DNA, 358 bp, Glycine max
gttcgtacagagcgagcgatagttgaatcttaaaaacaatggcggcgaatctagacaccgactccggggcttacgatctgagcgactttctcaacgcttcttcaactgcttttcacgccgtcgactaggcaaagaggcgtttgcgtaacgcggggtaccaccaactctcttagagggaattgtgggaactgcaaccgggcaacaagtacttttttaccataaatcactccaccattgtcgccttcgtcattggcaaaaagtacgttgctggaaatggattctacataattggggctcacacagatagttcttggctcaaacttaagcctgttaccaaagtttgttaaagcttggattt

SEQ ID NO: 23664 - DNA, 186 bp, Glycine max
ctatttcagctatagctcttaagggggctttagggaagatacaaggcacttgaagtggctgtacactctttgggattcaactacttgagaattctaatgcataatgaaatctacaaacagtcactttgtcaggaaaggtgtgtgatgataggacttgttccatcattaaatgctgaatttgatcaa

SEQ ID NO: 23665 - DNA, 249 bp, Glycine max
gggtctaaagaacatggtttggagattcctttggcctatttgacaatgttttagcaatttcccatcttttgatactttcaaagactgattcttttggattcaaatcctttcaatttcgttccattgaagaaaaacttaatctggttcgtgcttttcttgcccgagttgacgtttgcaggcaacaagaaaatgagcaaaaactggaaatctagctgctttcgggatcctgcgggagacctgatccttctt

SEQ ID NO: 23666 - DNA, 355 bp, Glycine max
gacagatcaatagtatcaagcagagccccaagaggagcttaagcttgcgccgaatggccacagatggttgaaaccgatatggatgccgaaactgttgcaaatgtggctacaccaaaggagactgcaaacagtgatcccatctcttatcattcctgacacttacactcttctcttaatgagaggattatttcatccatgaccagaacatctgttgctgcacacccgcgtcacgaccttgatatagggcctggtgctccaacgatcttgaattgagtgattgagattgacaacggcagcaagggaaactattaactggacaaaattttatttcttattaatatcgaccgtgttcttt

SEQ ID NO: 23667 - DNA, 140 bp, Glycine max
aaaagacctccgaaaggtacttctttctctttaccacactaattcttcggtgtgaaaatcaggatacaatcctccttatcatggaatccaacctacaacctctcatattacatccataagcctctcatgtattccataac

SEQ ID NO: 23668 - DNA, 363 bp, Glycine max
cctgaatgcctataagtggagacctctgcgagagcagagtgaggcctacgcaagaggtaggcacaggttctacaccacaccattatatctacgtgcaagtcaaagccggctttcatacgagttacaaacatcagcgaacttccgcataaattgtcttgtcttaccacattattactgtatgaggaacagaatagtccacgatggcacagaagagatacatcatcaacgtcgcgaacgcgcacgatgccagctactgaaggccttacacaggacctagctatcgtagcacttttgtcaaggatggaatgtctgatcctattgacgtgatcaatagctgctgggacgtttatcgacagtctgttg

SEQ ID NO: 23669 - DNA, 409 bp, Glycine max
gaaagtgagaaaaaataaaaatcaaagagcatagtgtcagggatcattcacaagattggggagacccttcatgtgggagggcacaagaaggaggaggagcataagggtgagcaccatgctggagaatacaaaggggagcaccatggtgaacacagtagtgagtacataggagagcatcatggtgaacacatagctggagagtaccatggtgagcacaagccagagcacaaagaggggttcctagacaaagtcaaggacaagatccatggtgagggcagcgccgtcgtaggcgagaagaagaagaaggagaagaacaagaaggagcatggccatgagcatggccatgacagcagcaacagcattgacagtgattaaactgatgcatcacctatatatttaaaagggttat

SEQ ID NO: 23670 - DNA, 134 bp, Glycine max
ctatatgttgaggtctactcaccatacaactgtgcgcaatttgccagccacggtctcgtactcactctgaactctctctcatccatcaattcctaactgccttacgttgataccacatcatatcatactcatat

SEQ ID NO: 23671 - DNA, 84 bp, Glycine max
gtaagtgagaaaacttacaaatcaaagatcatggggtcacgggtcatttacatgatagtagatgactccttcatgtcttagtgg

SEQ ID NO: 23672 - DNA, 294 bp, Glycine max
ggagcaagagtgaagagcgaagagaatggctcccaggggtttggtctttttggctgtgttatgcttctcagcactgtcactgagtcgttgtcttgcggaggataatggacttgttatgaacttctacaaggaatcatgccctcaggctgaagacatcatcaaagaacaagtcaagcttctctacaagcgccacaagaacactgctttctcctggctcagaaacatctttcatgactgtgcttgtcagagttgtgatgcttcacttgtgctggacttcacaagaaggagcttgtc

SEQ ID NO: 23673 - DNA, 379 bp, Glycine max
ggagtgcgcaagagtgaagagcgaagagaatggctcccgagggtttgagctattcggctgtgttatgcttctcaacactgtcactgagacgttgtcttgcggaggataatggacttggtatgaacttctacaaggaatcatgccctcaggctgaagacatcatcacagaacaagtcaagcttctctacaagcgccacacgaacactgctttctactggctcaaaaacatcttccatgactgtgctgttcagagttgcgaagcttcactgacgctggactccacaagacggagcttgcctgagaaggaaacatatagaagctttgggttgacaaatttcaggtacattgagaccatcaaagaagctttggaaagggaatg

SEQ ID NO: 23674 - DNA, 360 bp, Glycine max
  modified_base (328)..(328): a, c, g, t, unknown, or other
  modified_base (331)..(331): a, c, g, t, unknown, or other
gcagcactgacatgaccacaacaagatcacatttcataacataaagagtatagagcagcaaacgtaaaagtggatccaagaaggctacatggcaagcttccactatcttcacaagcatcagaggagaaagaggacacagtagaagagtttgatgcttataataattatgcatcttggtcttcagaaactgacatgtctgaaatggtttctgctcttgctcaagttatgggaactaccaatcggaacccatacatgccacaatcaacctcctttcctttctcaacttccgtggtcaaagatcaacctcaaccgtacccatctcaacctnctncagatcaagaggtggcaaagaagccacac

SEQ ID NO: 23675 - DNA, 374 bp, Glycine max
gccgcgagcagacgactgaaggggatcgccttttcagaggaacaatggctgttacaggtttcaacgtgctgggtcttcgtgtttgctctgtctcttcttcttccttttcagatctgcgctgatgaatcatccaataaagagttcgtactcacattgtatcactctaactttcacgacactgtcaacaagcaccatttcatgcgtcaatcgagttctactctccatggcgtggccactgttagaagcttgctcccgagtatgataaagctgcttctatcttgagtagtcatgatcctacccatgttttggcttaaattgatgcctatgaggagaataacacacaccttgcatttcaatatgatcttatgggatac

SEQ ID NO: 23676 - DNA, 395 bp, Glycine max
gactcactagattttttcacctccaagtctttctggtcactatgttattactaaagggttcatgacattcgcttgaaaccttggtttgtatcaattgtagcactagtttgattttggtgccaagttcttgagctgcggtggtgctgaccctgaaaagttctccaagtccgacatgagataaggctgctgctgctgctgcttttcaaagatgttggagctggtttcaattagtagacaaatttggttgctgaatttcgtgttcatgtgtcttcaatagatggtatttttaaattgatagcatagtgacaatttcttgaatgttgcttcttgacttttgaatttatctccaagacttcaaataagttggctctcttctacaatttcttaaatgctta

SEQ ID NO: 23677 - DNA, 399 bp, Glycine max
cgatatcatatcaaatataatagtgcgatagggaaacggttgttcctagcttgtattaaaaacaatccgcaatgatatgattatagtagcgaagtgaggatatatcatagacaacacatcctgcaaataggtgctcgactgaagctacttatatcacaaacgtattcgcgtggataataatgtacaagataaagtcacatgctcaaatattaatacaatttaaataggtgaaaaaatgtataagaaaattatatgtatatatatattgtttttacctttatatagaagtcatgaacgaaaagtaaagaatttaacaacaataaataatattggttttacaggaatagaacgaaagtcgttctttgagcctaatcaaaaaaaattattcttcattcttat

SEQ ID NO: 23678 - DNA, 295 bp, Glycine max
ctccgacaagacgacacacggggataacacatcataaataatccttattgacatactgattgggaacagtcacattcacataatctttgtcctgcattcatataactttgttccattccatctatctatgatcatctccaccaccacttgttgattcattcattaagaaaccacacacttttgaattgacaacgggatacctctacctatcttgctgatctgaatccaatgtattaatctccaattcctgttcctcttccatagactatgataaaatcatcatcatcaatatcca

SEQ ID NO: 23679 - DNA, 199 bp, Glycine max
ctcacgcatgcgaacacacgtgggaggatgtgatagtacatcacacagagacccgtttcggggggtaagatcctatcggccggtcttcaagagccacacttgtgacagagttggcgagttggcatggctcatgaacaagggaggcaggtgaaccaggatggatgttgtgaaggagcccacgtatttgaagaaccgtgat

SEQ ID NO: 23680 - DNA, 393 bp, Glycine max
ggtggtggagtgtgcagaagagcgtcgcagtcgcaaccctaggcagaagaagcgcagcttcaagcgagtgacagccaccagccatgggtcgtatgcacagccgcggtaagggtatatcctcttctgctttgccctacaaaaggacacctcctagctggctcaagatctcttcgcaagatgtcgaagaaaatatctgcaagtttgcgaagaaaggtttgaccccgtctcagattggtgtcattctcagagattctcacggtattgctcaggtcaatagcgtcactggcagcaaaatccttcgcatcctcaaagctcacggacttgcgcctgaaattccagaagacctgtaccatttgattaagaaggcagtttcaattaagaagcatcttgaga

SEQ ID NO: 23681 - DNA, 308 bp, Glycine max
  modified_base (116)..(116): a, c, g, t, unknown, or other
gggagatgggaactgcaataagcaaacgccaattgatacgtgcatatcagacatctactgtaaaacacacactcgctccaaaaaaatactatatcaccaagctcacctatctgctnatctcaaggccttatacaccgagcatgcgagataacctaacacatcatgctatatacttacccatcaggattccaagcagatacttacacaggtagcagcactacaccatcaagagcatagaagcagaacgtcatcacaagaatgttccatgatgaaccaatgaaatcattggataccatgtatgaatcata

SEQ ID NO: 23682 - DNA, 364 bp, Glycine max
ggtgctctgctcgtgcctctagggttatcatttctccatttccattttctctctcacttttcaagaatcgtaagctatgggaaagtcttacccaactgtgagtgctgattaccagaaggccgttgagaaggcgaagaagaagctcagaggcttcatcgctgagaagagatgcgctcctctaatgctccgtttggcatggcactctgctggaacctttgacaagggcacgaagaccggtggacccttcggaaccatcaagcaccctgccgaactggctcacagcgctaacaacggtcttgacatcgctgttaggcttttggagccactcaaggcggagttccctattttgagctacgccgatttc

SEQ ID NO: 23683 - DNA, 181 bp, Glycine max
aggccacgcgtcacgcttccatacgacgacaaaacgacacaaggtgatatacgacgacagatgggtacgggggcaaaaagacgaccggagggaactgactcacgacatggacgacaatcttggcttaacaatctgatacatgcatgaagacgctgaatgttgaccatggagaaaatgcact

SEQ ID NO: 23684 - DNA, 376 bp, Glycine max
ggtggcagagagcgaacccaaaactagagctaccttccctgcaaaccttccactcttctctccttttccaatcaagggaataatatttcttagagatattccgaaaccatggctcacgccaatcctatgatttttgttgttggaattctaggtaaccttgtctccttctgttgctttctagcaccagtaccaacattctatcgagtttgtaagaagaaaaccacggaaggtttccaatcacttccttacgtggctgcactcttcacttcaatgctttggatattttatgcttacataaagacgggcgaaatacttctcatcaccattaacgcattcggttggttcatagagacagttacctttgcatctatatcac

SEQ ID NO: 23685 - DNA, 318 bp, Glycine max
cccactcgacccacacgttcgaacacgacgacaacacctcaccatttcacttttcagatagaaatgaatatcaagggtcaacgttaaacttagcccgttcacgatactcatcactttaccacaccatctgactcttacaaaaccttaaatttctcatcacgtctaaaaccatctctatttgtaaaacccaagttcacatacacataaatccaatgtcataattatactatctaacatctactatcaactaacctctcgctgttgcaaatcctaatgactacgataatgcttcaattgaccatgttcatcttctcgtac

SEQ ID NO: 23686 - DNA, 354 bp, Glycine max
acgcgaacacaccagaccgagcatactaacttctaaaatcatcgctcttactctctacaagggtctcaggtcactattttacgacaccaccacaccaaattctattactatctccacatatcacccaccttctaatcttactgattctttcaatttcatctgatttgatccatgactctaagactatccatttaactatcactttccctagatcgatgctactcagccaaccaatctacacatcattcagacgcctactacttcctatcacattcttccttttatacactgcttatcatgtaactaatacatatgttgactacagggcaacacttgccatcatatataaaaaca

SEQ ID NO: 23687 - DNA, 104 bp, Glycine max
catatgtttaggtgtatgttgattagagcaccgacagtggtgaaggttagggaatgtcctgggacatcattggactccatctactctggtttgaaatattggga

SEQ ID NO: 23688 - DNA, 335 bp, Glycine max
  modified_base (248)..(248): a, c, g, t, unknown, or other
gaacatggcctataactatgggaaaggggctctgtgtgtgctttcagccttggccggaaaaaatgatggtgtagttgctggacttgtggggtgtggcctgataaaatccattgtttcaattcatctgatttgatgcatgatttcaagactggccatctcactttcactttccctcgttcgatgcttctaagccaagcaattgggacagcaataggttgtgtagttgctcctctcacattcttcctttnttacaaggcttttgatgtggggaacccagatggtgactacagggctccgtatgccatcatatatagaaacatggcaattcttggtgt

SEQ ID NO: 23689 - DNA, 340 bp, Glycine max
tgctagaagacgacggcagaagatgacctctccaatttgcaaaaaccaattaccacctggatatcacttaactcctattaaactcacactcaccccatataaaccctccttacacaactcaaatcttcctatctgaacaccttttagcactatcattcgaataacctttacacatcaagattcaaacttactcactaagttacccgttcaaatttcaactgccttcaatcctttccctatctgcatactctaatcaatacgtcaccacaaaaagggacaatgttcataaaatcatacaattgcataccttgtttgaatcaccttaaaacctttaccctat

SEQ ID NO: 23690 - DNA, 127 bp, Glycine max
cgacagatttcaatttagagctagactatatgaaactgataaatgtcaaagctaggctaacatctacatacacattaattagctccatcatcatacttcatatcctatccacataaccaatagccat

SEQ ID NO: 23691 - DNA, 366 bp, Glycine max
gcatcggagtttggaaaatcgccgggctttggcggtggtttcgaggtggaacacgaactttcgacaccaccgggccaaatcctctggggatcgccccaaaacacccaccttctagccttgctgagagctacacaaactcaaaaccctaaccctaaccctagtcccatgtccctcaaggtagaaggaaccctattgggccacatggtgagcactgatcagcccttgggttcaaacactttgctgagctaccgaaccttaggctatgatgctgttgcgcaagttccttcttcgcttggtctgactgggagaaacaatcaagatcaacaacaacataatggagggttcctagttcgggaacattacaac

SEQ ID NO: 23692 - DNA, 375 bp, Glycine max
gaagtgtggaggtgcgtgcttttgtgggggcaaatagtagatagtagatctgtcgcagagcaaagaatcgtcggcgacggcgaggctgcactataaccgcgattaactatgattagccttcgccggagcgtaaacaagatcccggcgaaatcgaagcgattcaaatgccgattggtgaagttcgaggagctgccggagtacttaaaggacagcgagttcatattggactattaccgctctgaatggcccgtgaaggaagccttgtggagcatcttcgcgtggcacaacgaaaccctaaacatttggacgcatataggaggatttctcatattcgccgtgttggcgtcgatgagcaccacctcggaactctggaat

SEQ ID NO: 23693 - DNA, 309 bp, Glycine max
gaataatataactatataagcggttcttccatttgactcttgttctgaacgacttttcaagagaatcaaaccatggcagtgaaagtatacggtccccactgtgcttccaccaagcgggtgctggtttgtctggttgagaaggaagtcgaatttgaggttgtccctgttgatgtcactaagggggagcagaaggatcctgagtacctcaaactacagccatttggagttgttcctgtcatcaaagatggagattataccttatatgaatctcgtgctataatgaggtattatgcagaaaaatacagatct

SEQ ID NO: 23694 - DNA, 52 bp, Glycine max
acgcgtgcgaacaccacagaaaagacctcatactttgattacctatcacacc

SEQ ID NO: 23695 - DNA, 375 bp, Glycine max
  modified_base (36)..(36): a, c, g, t, unknown, or other
ttgtaatgtggtaagagtttaaatataaaaagttanatggagcaaacgatacatattcaatatatttatttgtaaatgacgaagtgcattctatttttgctgaataatgacggagtgcatttgcacccatgttctttttatcgtaattgcacccatggttataatgtctttatattttatcaaaattattaaaatttcgaaataagtagaatttgtttgtttgcattttcatcaatgaattgaacttattgactttgtaccgaatatgtaaaattgtaaacacgctgcggtattgccgaatactccctcataggctaacagatactattgtaaattatatacataatttattatatcaatttattaagagtttta

SEQ ID NO: 23696 - DNA, 426 bp, Glycine max
  modified_base (384)..(384): a, c, g, t, unknown, or other
ggttctagtgtatgtgattgttgtgactcgttcgtcttcgtcgttatcttcttcttttgttgtttgtgtgtttgttttttctctcacctgaaaatgtcttgctgcggtggtaactgtggttgcggaagcgcctgcaagtgcggcaacggctgcggaggctgcaagatgtacccagacttgagctacaccgagtcaaccaccaccgagaccttggtcatgggagtggcaccagttaaggctcaattcgagagtgctgaaatgggtgttcccgctgagaacgatggctgcaaatgtggagctaactgcacctgcaacccctgcacttgcaagtgaggtgttggagagctaaagcttcaagcagaaatggcccttagaaataatgantaaaactatatgtagtttcaaaacttcaaaattatgtaatat

SEQ ID NO: 23697 - DNA, 224 bp, Glycine max
aatggggtaagagtttaaatataaaaagttagaggaagcaaacgatacatattcaatatatttatttgtaaatgaggaagtgcattttatttttgctgaataatgagggagtgcatttgcacccatgttttttttatcggaattgcacccatggttataatgtctttatattttatcaaaattattaaaatttcgaaataagtagaatttgttggtttgcattt

SEQ ID NO: 23698 - DNA, 325 bp, Glycine max
gatcatccaacatcacacacaactacaagaaagaacttcgttataaccaaaaccaacaacaactatggcaagttatcagaagcactacgatgatcagggtcgcaaggtcgacgagtatggcaatgttgagaggcaaactgacgaatatggcaacccggttcatgccactagtgtcacttatgtagccaccaaaagtgttggtggctacaatgatgacgctaataagcaacatgatattactggtgtctatcccgagaaagacaccggtagacatcattttggtcgtggttacgacggtgacactaacaagcaacatgatgctact

SEQ ID NO: 23699 - DNA, 263 bp, Glycine max
atgagaccacacgacgggacgatatgatataagacctacattctacaaggtgcttagaatcatccatgacatacttccattatcattcgttcacataagacatacacaatactttgtcctaataatgacgattatcactttccatagtatctaactcacaattattgcaaccttagtgatgcccatagtatatttacattaatcttcttaaattgattcatgttcatcatattacgctgttaaggtcgtacatacatctgatg

SEQ ID NO: 23700 - DNA, 223 bp, Glycine max
caattcccaattcgaccgacgcgtcacgccacccgtcacgcactgcgtacacgacagcagacaacaggacggggatcgtacactcataaatcaggtacatgggccatgatactacgacctggatctagccaaacgacacacacagctactcataactagattagcgctcaagttctactgttgaataggctgttggtaggcctttcgaatatcacacaatcag

SEQ ID NO: 23701 - DNA, 282 bp, Glycine max
agagaagggtctgagtgatttggcaacccattatgtcagcgagcatggagttagtgcaatcaggaggctgaggaaaactgataataatagaattgcaaaggcttgtggtgctgttattgtgaacagaccagatgaattgcaggagtctgatgttggtactggtgctgggttatttgaggttaagaaaatcggagatgagtactttgcatatattgttgattgcaaagaacccaaggcttgtactgttctactaaggggtgctagtaaggatctattaaatga

SEQ ID NO: 23702 - DNA, 393 bp, Glycine max
ggacccaggatgaggatcgcgtgagcactcctgggcagatccgcacaagcatgtgcatatcaaatcaagcatcctgttccttatctctgtctctgcatatcccttccttcttcttctctctctctctctaaaaccctaattctatacatggaagggaaatctcaaatctaatgactaattaattaatccatcgatcaagcatggagtccgaactcaaagacctcaattcgaagccgccgaacggcaacggcaacagcgttcgcgatgaccgtcctctgctgaagccggagccttcggtcttcgtcgacagcatcgacgatatggagaagaagttcgccgcttacatccgccgcgacctgtactgcaccatgggacgcggttagatgccttcca

SEQ ID NO: 23703 - DNA, 330 bp, Glycine max
acaagggtcctactctgctagatgcacttgaccagatctctgagcccaagaggccttctgacaagcccctcaggctaccccttcaggatgtgtacaagattggaggaattggaactgtgcctgtgggacgggttgagactggtgtcttgaagcctggaatggtggtgacttttgcaccaactggactgacaaccgaagttaagtctgtggaaatgcaccatgaagctctcacagaagctcttcccggtgataatgttggattcaatgttaagaatgttgctgttaaggatctcaagcgtggttatgttgcctcgaactcaaaggatgatc

SEQ ID NO: 23704 - DNA, 288 bp, Glycine max
cgaccgacggggaattttgaaccatataatacttttgtgcatatgtgacatgtgtgtgcatttaattaattcgtgaatgcttgcttatatggcaaggcatttgctgaaacttcaatcgtgaacacacattttgcagcatagacaaatggaagactacgatataaagacaattgctgttggagttgtatcatggacatcaactattgtcttagtgagaagaatcttttccaaacgctcgatagacttctggaccgcgttgtgtcaacactccatgcaactttagcacta

SEQ ID NO: 23705 - DNA, 300 bp, Glycine max
gaggcatcacctcgttgtgttgtgcatgaaaatggtgagcgatgtcgaagaatctctgcggatgatgcccaatatataccctttttccgtcgattcatcttctggcaagcaacttgaacaatattctggacggacattagcatttactggggacgtgaattgtatgcaagatgatgataatctactggagattacccgaactaaaattggaagtttgcttataagacactgacatttgacagatcgtcttgctagggattctgacaagataatatttgagcgtctacatatggagtttga

SEQ ID NO: 23706 - DNA, 217 bp, Glycine max
tgatgcatcacctcgttgtgttgtggttaaaaaggtgaaccgggtgtcaaaaattttttccgaagaagcccaaaaaatacccttttttcgcccattcatcttcttgcaagccattttaaccatattcttgaccgacatttgcatttaccggggaagtgaaattttatgcaagatgatgataatcgcctggagattacccgaactaaatttggaagtt

SEQ ID NO: 23707 - DNA, 189 bp, Glycine max
gactacattggggtttaaacaaatacaatctctcgatataaaacccaatgatctcaccctcactctgaatctgatttctcactcttcgcatctcgttcggttcatcagcgtgtgtctcagccatggcgtattcctacatggaagccaatgtctgatttatgatattaatgtacatttatgaaacttact

SEQ ID NO: 23708 - DNA, 391 bp, Glycine max
  modified_base (316)..(316): a, c, g, t, unknown, or other
gacagcgcagagccgcctcaacatctgaaacagactgtatccctaatccctatcttcttctctgctctctccgcacgctttggctcctctgatctcaggtgttgttggcttggtatccgtgcaagttctgctgtagccgatttgaaggtgaaggtgtcaccttaaagtttctttcatgtttgatcaggctactatccatttgggagcaactgagctgcttggagagtatttttcttcttctagaaaaaattacagaccctcatcccagagagttagctgtatgcatcgcgagacatatcagaaattcattcagttntctggttgcggttggccaccttccattatacttgagggagattcttcaagggcacaagctaccttagaggctgaa

SEQ ID NO: 23709 - DNA, 203 bp, Glycine max
cagtacatagaccgctgaacatctgagggacactatatccctaatatgtatcaggtccattactgtctccgaacaactgttgtcgtactctaatgctattgccgatgatcttagccatacatacatgccgtgctatgcgagtatataatattgatgaggaagaataacacttacttgatgtttaatcacaactaccatccata

SEQ ID NO: 23710 - DNA, 150 bp, Glycine max
aggcgtaagaccacgcgagcgtacgctaatacgacagatgaacatcatagggagtcctgatcctgaacatcaatatagaactctacattgtcattactctatcactacaataacctgagctcgacacctcaagccagacgctcagaacag

SEQ ID NO: 23711 - DNA, 234 bp, Glycine max
ggaacacaagttcgccaacgtttgatgctcgtcaagcgtgcacttacatagaataccggaacccgatccaaacgccaacttattcctacacagcttcccggaaatatggtactcgtggctgctcaagatgatagctctcaaccacgccgcattcagagcgggattctttaactacataggttacaaaatgtgcaaaccgccgtgtttacccgataagaccttttgttccgatct

SEQ ID NO: 23712 - DNA, 297 bp, Glycine max
gattgaaaatcttttaatttcagatattggtcaataaatgatcttgacctaatatattgaaaatcaattcaaaaatagaatctactgtctaaagactcattattcaaccaaacgagacagtcgtgttactctatagtgactgagcaccagaaaggttaagaatgtagcataaccaaaacaatgaaacacgtgatgtccaagatcatgctgttaacggaggtatcaatggcgatgatgcttagactataaataaccttgctatccgatctatcaaggcaggattactactttgataaa

SEQ ID NO: 23713 - DNA, 444 bp, Glycine max
gagagcctaacaattgctcagtttcctaagcattaatgactagttctaacaaaaggcttgaggttcaaacagaagatcaaactccacataaatggtgtgtttcactgggggaagaggctttcaagagatttttcagccagattaatccaacagtgcataaggtttttggtgatggatcacttttcagtccactgttgtttgggaagttctttgatccttctgatgccttccctctatgggagtttgagtcagatgtgttgttatctcatttaaggagttccagccaaaacactgtggattggtgtcagacaggtgaaggctatgtattaaaagcagaaataccaagtaagacaaccagtttttcattttactcttacttgtaagctgaatctatggtaagcaaattatgatacaatgaaactgccccatcatattgaagacctg

SEQ ID NO: 23714 - DNA, 376 bp, Glycine max
  modified_base (331)..(331): a, c, g, t, unknown, or other
ggttctggtttgtcgttctttctctcgcaatcttgactacattcaccgagcatttgcattcacattgaatatggctgagactacacaatctaatgctgagttgttggagtggcctaagaaagataagcgccgcttcctgcatgttgtgtatcgtgttggtgatcttgatcgcaccattaagttttatactgaatgttttgggatgaagcttttgaggaaaagagatattccagaggagaaatatgccaatgcttttcttggatttggccctgaacaatcccattttgttgtggaattaacatacaattatggggtgacctcatatgatatnggaactggatttggacattttgctatcgcaactccagatgtttac

SEQ ID NO: 23715 - DNA, 313 bp, Glycine max
acattgggaccttacagacatcaacatatctcatgtctctggctaagaatcgaaacagagagctcacacattggcatcagtgtatctaccaagagaacatcaattatcagtctctttcctctattgcaaaccccaaaaatgttctggttattcatccatgatatcgtcgacacctggggtactcaccttatcatgcctcactacaaaatatcaaactttgtaccattgacaatatcgttgactaagtctttaatcaatctttccctgacatatcatcaggatttgactacccacatctaacacttactggtct

SEQ ID NO: 23716 - DNA, 303 bp, Glycine max
gggagctctcgtcctgtgtatctgactggagctctgtggcccctctcacggtcttcgctatccaaatctctgaacgattcaacgacgccgtctttgagaatcgcgatttgacgctttattacgtgattctccctcctttctgccattaacttcattatcgggtttcttcaaagcgcaagttctttcagctaaacgattgaaggccgttagccattaaaaaagaccgaatcgttgtgagttttattgttaacgtttctttgtttgttacatcaaaatcttaattgcgcagtggtatttaatttt

SEQ ID NO: 23717 - DNA, 433 bp, Glycine max
taggaacttgaattgagaatagaatactccgggatcttgctgagaggctaaacctaaaacccttacctttccttaccgctctcataatgagggacagaaactgagagtgaaatgcagaaactgctacgccctattacttatccggtcgtcatcctctctatctacgtcaccgtggctactccctatctctcgttgccccccaaagtttcaaacttggtaccaatgtcatcagcgttcacttcttcttccctcaatccccaacttacttattctcgctatttgactctctctaccaacacttgctctgtctgcaagtgtctcagtctaacccactcccacaccaggaacaacaacaagacccttcttcttcttaaccactctagatacctcgtcttacattcggcttcagaaggctccttcatcacccaacatg

SEQ ID NO: 23718 - DNA, 416 bp, Glycine max
gaagagaaaaggtggtggaagataccttttgtttgagactttctaaagataaagggttttgattctgcattcagaaaggttattggttctgatatagtacaggccggccaatttgtggaatatgcatttgggcagttaaagtcttttaacaattcatatcttccgaagggccagcagtctgatattaataatgataagtatgacactgaaggtacacgggaactgagtgaatctgtttctatcttcaatatgccttctaatgaagctggtagtcaagaagcctccagagaagattgcgttgaacagaggaactcaaatgaatttcacaaacaggacaatgatactgaaaatggacatgcttctgaatcatcatcaaaagttagtgaggaagagctgtcaaatcaaattttttggag

SEQ ID NO: 23719 - DNA, 404 bp, Glycine max
ggtcttccagtcatcaacatatggcaaggttcttgttttggatggagtcattcagctcacagaaagggatgagtgtgcctaccaagagatgatcactcatcttcctctttgctctatttcaaaccccaaaaaggttttggttattggtggaggagatggtggagtcctgcgggaagtagctcgtcatgcctcagtagagaagatagacatttgtgaaatagacaagatggttgtcgatgtctctaaacaatttttccctgatatagcagtaggttttgaggacccacgtgtaacacttactgttggtgatggagttgcattcttgaagaatgttccagaaggaacttacgatgcagttatagtggattcatccgaccctattggccctgctcaagagctgtttg

SEQ ID NO: 23720 - DNA, 388 bp, Glycine max
ggtgctctgtgattcccagaccttattttttctgggatttgcttcaaatttcaggagattaattatggctcaacccacaacaagaataggccttgctggattggctgttatgggccaaaatctggcactcaatattgctgataaaggctttcccatttctgtttacaaccgaaccacttccaaggttgatgagacagtataacgagcaaaacacgaacgaaatcttccagtttatggctaccatgaccctgaagctttcgttcattccattcaaaagcctatggtgataataatgcttgctaaggctggcgcacctgttgaccataccattaagaccctatctgcgtacatggaaaaaggcgactgcataatcgatggtggtaacgaa

SEQ ID NO: 23721 - DNA, 375 bp, Glycine max
aattcgagcgaccgctttctttctttcttttgctagatgactactcttaataaatgattcggtgcaaagggatttttttttagtgaacgtgtcacagttaattactcctttttcttgtaaagacgaagaaacacttgctatttactgtactatttagctcgacgaccaagaatcaaattatcactatatttcttcctttttctacttctttttccaagtgcaggaaaaccccaaggagttgcgggtttatttctaccaattggggccctcccttcaccacccccatgcggatggtatacggggttcataactactcctgtaactacaggacgcttacttagccaacattaaaatccggtttaacctaaattttcc

SEQ ID NO: 23722 - DNA, 418 bp, Glycine max
cccacgcgtccggggcggaagaaaaaccttgtatacagactgatggaaagtctattagtgcttccacatttcattaatattagttagattagttagattgaatagtttttaatttagctaattcgctttcttaatcttaaaagtatatatatatataattatataatataaatataatttcttatatatataatttaaaatattttacaaaatttttttattctaaaatcgaatagaaaaaagaaaatctttcttttcactaacctctagtaaaaaaaatgaataggcaagctatcttccgattattttagtttttttagagaacgaatcgggagacattacgaaattttttcaaatagaaataagaaagagtataagtatgcaaatgaatctggcttgattcttttttttatactta

SEQ ID NO: 23723 - DNA, 364 bp, Glycine max
gacagcactgcactcttcgcaacacaacaaaaaaagacaacccagagagcgcgtcttaataaacgctcttctctgaaaacccccatttcttttcttctttcttcttctctttcgcttcttcgatcttcgatcttcgtcgctgaaaatgagagagtgcatttcaatccacatcggccaggccgggattcaggttggaaacgcctgctgggagctttactgcctcgaacacggcattcagcctgatgggcagatgccaagtgacaagaccgttggtggaagtgatgatgctttcaacaccttcttcagtgaaactggggcaggaaagcacgtgccccgtgcgatttttggagatcttgagcccact

SEQ ID NO: 23724 - DNA, 241 bp, Glycine max
gacacacgaaggcttgatgggtttccttgaaccattaatcaagccgaaatatttgaaagggttaccggcattgacctggggggcaatctgaagcttccagaagaagcactggttgcaaaatgccttggtagaaaaatttgtgatcaatgtggaggaaattttaatattggcttcattatcgtcaaaggtgagaatgggccttccggaatggtcatggcttcacttctttcttctgcacact

SEQ ID NO: 23725 - DNA, 363 bp, Glycine max
gaactagttgagaaaccacataactaccccattataggaacaaaatgggtatttagaaataaactagatgaaaatggtatagtaattagaaataaagctagactagttgcaaaagggtacaaccaagaagaagggatagactatgaagaaacctttgcacccgtaactagattagaagccattaggatgtttttagcttatgattctattatgaactttaaactatatgaaatggatgtcaagagtgccttcctaaatggtctaatccaagaggaggtatatgtagaacaacctctcgggtttgaagactcacaaaaattagatcatgtctatagattaaagaaagcacttatgggttaaaac

SEQ ID NO: 23726 - DNA, 300 bp, Glycine max
gattcctaggatgatgcgtctatattacgcacgacggctttctgcttttcaaattatgtgtcgccccaatcctttatgcttctcttctcgccatatccattgagcgactttgccttgccgccactatgattgaatgtagacgacaaccgacatgacagtgcgtgcttgatgttcaagacactgttgcagggacttgaactttgctagaagctgggctataggcaagtgtagtgggattctaactgcgtcacacctgatgagcttgtgcacaaggaagtatcagtgcaacaccattttggc

SEQ ID NO: 23727 - DNA, 380 bp, Glycine max
actcttcggacgatgccacattattacacactacgcctatgaacatcacaaattctgggtccacccaatcctacatgcctatctcttagacatattcattgactgactgcgcctggcccacactatcatagaatgtacactacaaccaacatgacagtcccgcctttacattaaatacactgctgaagatactacatcattactatattctgacctataacatatattacatctatgctaactgtgactcactcagtgagcttgtccactaagacgtctaagtacaacaccactacagcaatgagctctcctagatatcgaagcatttgtatgtacactacaacgcattccttagatgaaacaaacacttatgccaacat

SEQ ID NO: 23728 - DNA, 177 bp, Glycine max
tgggctcgtagagcatatcttccgactcaaagcttattgcctctataggatattcctttcatacttcctctatcttgtatactaaatctatctatttgctgattatacctgatggacgctattaaatcccatatatattacccaaccttacatgacattcttaactatcacgactct

SEQ ID NO: 23729 - DNA, 433 bp, Glycine max
gacaacaccctctattaacctttctctgtcctctgtttcctctctcttggaacaaacgacaagttatggtagtatttgtcattcatttcacaaaactggttcacctttggacccatggcttctaaaaactccacgttgttccagtctcgcttcttcctcttcggcttctattgctgggactgggagtttctcaccgctcttctcctctttagttcttcttcctaatcaaataaccttctccaccatacataaacctttttttttttgtcttttgtacttaaatttctcattactacatcaacaaaagaggcatagattttttcttcttttattaaaataatagtttgtgaggtaggtggagggtagatcgggaagaaaaatgtcgcagcagcagcgttcgatgccggcgccgttttttgacgaaatcgtatct

SEQ ID NO: 23730 - DNA, 410 bp, Glycine max
  modified_base (338)..(338): a, c, g, t, unknown, or other
gaatgtttataagagaagggggaataattgttatgtgttgtcaatagcagttagttttaataggacaacaattactattattaggagtagtttatcaggaatagttagcagttagttttaataggacaacaattactattattaggaacagtttattaggaacaattattttaattaggtagttatgggtatgtgtagaataagaaggaaaaacagaatcatattctggttatcctgaagatgtgtggtttaaaccttgggaggaagagaaccaagctctcgaaatcttggcttgtttgagtgaatattatgattctatgttctaattctatctctgntttggaaagaataattcctgcagagtgtttctataaaattcagtcattattatccaatttctatcacaatac

SEQ ID NO: 23731 - DNA, 377 bp, Glycine max
gaaaacagcacatcataatgtttggcagtataaaggcatcagcgctgccagtgtcgtcgcgttcagaggaaggaggccttcgcagacgtctttcttcgctgtctctgaagatccaagacagcccaacatggtcattttccagatccaagtccctctcatccatgggtgactatgtaaggacatgcttggcctggatcctctacaggaagctcatctttgccacagatctcgaaatgaacgaccagaaaactaaactccttggctcccccaacaggggcacttggagccatgttttctataagctgccctctgaaatcaaaaggttcatctttacttctgatcacgccacttttcccaaaacctaccacaggtcctaa

SEQ ID NO: 23732 - DNA, 351 bp, Glycine max
ggagcactgagcaggtgcaccaaacaaaaacaacgacaacttcacacacagctgacgcgtaaactaagattcaacgtctgcgctctgcagccaccatacaatagatccttcattctttctctgcaacgatcaaacaacaaaaaacactgcacctcttcttctggatttggtgaagaagaagaagaagaagaagaagaagaaagtgtgatttgatgattatgaattgaagtgtgagaggtgaagagatgaacgtgagccatgcttcggttcacccagttgaagaagctccaactactgaaggtggtggtgaccaaaacgtcaacgctcctagggtgaggatgaaagatgttc

SEQ ID NO: 23733 - DNA, 328 bp, Glycine max
  modified_base (279)..(279): a, c, g, t, unknown, or other
gtttcagatgatggagctgccatgcttacatttgaagcactttccgagacttctgagtttgcaaggaaatgggttccattctgcaagaagttctgcattgaaccacgggctcctgaatggtattttgctcagaaggttgactacttgaaggataaagtggatgcaacatttataagagaacgtcgtgccattaagagggagtatgaagagttcaaagtgaggattaatgcattggtggctttggcacaaaaagttcctgaagatgggtggacaatgcangatggtactccatggcctgggaacaatgtcagagatcattcccggatga

SEQ ID NO: 23734 - DNA, 393 bp, Glycine max
  modified_base (348)..(348): a, c, g, t, unknown, or other
  modified_base (365)..(367): a, c, g, t, unknown, or other
ggggtttggttctcagtgtacccaaaaacagaggcggaaggaggaagaagtagaagaagattagagagagtgagtgagtgagcgagggataattggcgagttagggtttcgaattgactcactgagtctttgcattgtgtcgccggtttttttttcgccggagaaaactcgtgctccgatctcctctgcttttgttttcgatagcatagctgtttgaaaggttcggttttcccggcgaggatagtgggattttccggggattccttggtgaattgagtttgggggaattcttgattttgacctaaagcaaaggtctttactcaaaagttttactggattttgtgtttntatttttattttctatnnntttttttttgcgttgagtaaaccgag

SEQ ID NO: 23735 - DNA, 281 bp, Glycine max
aagttaccaaagtttgtggggcattagctaaacggaaacaatggtaatattcggatattatatatagataggagggataagttattttaagagtaactctaaaagagttatttcttattttcatcatttaagtttttaaaatataatgattaagattaattaattaattagtataatcattaaatctaaaaaaatagatgatggaaataaataataactctaaaaaaaattactcttcagataattatatatagagagagagagggagagagatagagagt

SEQ ID NO: 23736 - DNA, 134 bp, Glycine max
aacaccgaacctgccactacacaatggggcccatgatactttctttttaccgggagttctttttcggcattaacaactaccgtatcacttgctgcttactgaaccgaacaaacgggcctcggaccactttcaat

SEQ ID NO: 23737 - DNA, 109 bp, Glycine max
acgtgtgagaacacctccaataagaccacagaacgtgacactacacatttgcgcccgtgatacttcttctttaccttcacacctttcactcttctatcaacttccaatc

SEQ ID NO: 23738 - DNA, 424 bp, Glycine max
gaaggtgcaagagtttgttgtgagctataagctggtttatcgtgaggagaatatgaacttgtctgttttctatgatgctgcactagttttggtagcatggccatgccatggcgcaggctaccaaaggttccctctccgaatgaaaactgtctatggtgagcgttcttctgaggtaaaatgcgcaagttttaagcttgctgtgcatgcacacaccatccgagcttttaatcccattcctgaaaatgcccttgacccaccaaaggactacattaattgctaaccatttaaatcagacttttaaacacttaagccacatgctatcttatatgctaatgaacgctgagtccatcacaacgacatatttatattcggcatatataacaccgtactctctaatatcccatactatgaaaaacatggatat

SEQ ID NO: 23739 - DNA, 434 bp, Glycine max
ctcacatctaataacttcagaaacagcacaagcatctggcaacacggctgaagcagtttcctgcttagcataccttgttttcaaatttgattctccatccaaattcattgtctgaatataggcaatcccacttggatcactcgtccccaacaagaccatgtcagcaggaatcatctcatcagcagagattttaatgacatcaccagcctgtatatttttccatttcttggggcagaactgagccgattgaagaaccagacactctcgattgttttcattgcgatcggacctgtgcctgcgccaatcctcataggcatccttgatagctgtgacgcaaagcacaaacaagagggggaaaagggagacagttcgcccaaaaacagcgagcggaagaagctgattgagagcggcaatggcaaggaaataaacataag

SEQ ID NO: 23740 - DNA, 438 bp, Glycine max
aatcccgcgaattacttctgaaaattacttctgaattaatgaaattttttcaataatttaagaaaaaatatttaagaactatagcatttcgcgatttattggtaatccactttgattctctattaaccaataattttggactattaccatggttaaagtgaatagtttgaagtctagacgcagtgtagtactctttctaccactatgttaatacagaaatgaaatggtttcgataaaattattagatttttttttcgatatagaacactcatgtcgataaaatggcttgaatcctatttacttacggcaagaaattgaaaaacgggttaatttaaccctcccttttgtacaatgcgtaatcgatgacctatgtataaatgaataagaattctttggatttgaagaaaaaaaacaactttgctgacatatatttgtttg

SEQ ID NO: 23741 - DNA, 125 bp, Glycine max
acgcatgcgtacggacgcctgaagacaaccgactggaaggggcaagattgttccaccatctggaagctgggttatcgctctgcgaatattaactttcctgtcaaggatcatgctgcactaggaaa

SEQ ID NO: 23742 - DNA, 266 bp, Glycine max
ggtttggaaggcagcggaaacaaacatgtcgaggggttactgcgctaagcctatgactttgcagttgccgttgcaaccaagagcatcatcatcattccattcccacgttggaggagtaacagtaacatcctcaacactgtctcttcgactctcttctactcttgttttcacccacaaccttcacttccaacccagactcatacgcgctttcacaaccgttcgatgctcctcggcattgactcctcaattgaagtctaccttggatc

SEQ ID NO: 23743 - DNA, 370 bp, Glycine max
gcgaaattaaaattgtatcaaaagaaattactactaagcattaactttataactttcgttaatgggttatttctattattacaatgtatataataatttgtataaaataagcaactaaagagaatattatttaaagtacaattcacgttcattaataaagtacaattgatatgtctggtgtcaaatatcaaaagtgcgttggtacaggaaataaaaatttgtgtacgatttacggttgatatgaaagtttaatttaatatagcattacactaccttttttaatctaccacaatattgctaacaaacaccaaccggttttttcttttgatcatatattgtttatcatagtatgctagattcaaatattaac

SEQ ID NO: 23744 - DNA, 366 bp, Glycine max
ctggagtcacggcctaatgtggggaaaacggacccaaccactaaggcagacaacgggacacatgttcatcaccatccgcaaccacattactttgcttcaacggagtttgatgtcaatgacagtgcgctcaaattcacccacgtcctctacaatctctcccccgctgagctgtatgagcaagcgattaagcacgacacaggatcattcataacagcaacgggagcgttagctacactttctggagcaaaaacggtacgctcttcccgagacaaacgggttgtcaggtactacaccaccgagcatgacctctggaggggaaaaggctcagccaatattgaaatggactaacataccttcttaatcaac

SEQ ID NO: 23745 - DNA, 256 bp, Glycine max
gggaggattgttctaccatagggaaaatggtcgtaacctctcccaaattaacctttcctgacatggatcatcttcaactagaaaaggaccttgttcaattggattttgatccctctgacaaggcacctgggtcaaagtcttactacttaaaaattaaacccttttatttaaaaaagcatcttttaaattcgcactttgtttaatcaataaaataagctttaactccattaacactacctgaacttttccaaccctc

SEQ ID NO: 23746 - DNA, 344 bp, Glycine max
gaactcgttctagtgtgtgtgatggctgtgactcgttcttcttcgtcgttatcttcttcttttgtcgtttgtgtgtttgctttttctctcacctgaaaatgtcttgctgcggtggtaactgtggttgcagaagcgcctgcaagtgcggcaacggctgcggaggctgcaagatgtacccagactcgagctacaccgagtcaaccaccatcgagaccttggtcatggcagtggcaccagttaaggctcaattcgagagtgctgaaatgggtgttcccgctgagaacgatggctgcaaatgtgcagctaactgcacctgcaacccctgcactcgcaagtgaggtgtt

SEQ ID NO: 23747 - DNA, 163 bp, Glycine max
gggagtcacggcctaacgtggtgaaaggggacccagccactaaggcagagaaggggacacatgttcatcaccatccgcaaccacattactttgcttcaacggcgtttgatgtcagtgacagtgcgctcaaattcacccacgacctctacaatctttcccccgc

SEQ ID NO: 23748 - DNA, 374 bp, Glycine max
tgacatcatatcaaatataatagtgcgaggtggaaacggttgttactagcttctattaaaaacaatccgcaatgttatgattatagtagtgaagtgaggataaatcataaacaacacatgctgcaaataggagtacgactgaagcttcttatatcacaaaagtattcgtttggataataatataaaagataaagtcacatgctcaaatattaagacaatttaaataggtgaaaaaatgaataagaaaattatatgtatatatatattgagagtacctttatatagaggtaatgaacgagaggtaaagaatatagtaacacgaactaatattgcatttacaggacaagaacaaaagtgttttatgagcctaataa

SEQ ID NO: 23749 - DNA, 412 bp, Glycine max
ggcactgcaaatcacttttctactttgagtcttcgggatccttctttttctgcttgaactcaaacatggcagatgaggtggttctgctagatttctggccaagtccatttgggatgagggtcaggattgcacttgctgaaaagggtatcaaatatgagtacaaagaagaggacttgaggaacaagagtcctcttctcctccaaatgaacccggttcacaagaagattccggttctcatccacaatggcaaacccatttgtgaatccctcattgctgttcagtacattgaggaggtttggaatgacagaaatcccttgttgccttctgacccttaccagagagctcaggctagattctgggctgattatgttgataagaagatatatgatcttggaaagaagatttggacatc

SEQ ID NO: 23750 - DNA, 346 bp, Glycine max
gcgaaagacgacagaacggggggcgaggtttttgtcttgtgattatccttgcagacacagattgtcttgtcggcaaaatcttccaccaacaacacacagccatggcaggctcaaacattctttctcactctccttcccttcccaaaacctacagccactccttaaaccaaaacgcgttatcccaaaagcttttttttctgcccctcaaattcaaagccaccacaaaaccacgtgctctcagagcggttctctcgcagaacgctgtcaaaacctcggtggaggacacaaagaacgctcattttcagcactggttcaccaaatccgaagatgggtatctgcactgtga

SEQ ID NO: 23751 - DNA, 353 bp, Glycine max
tccggctgcaagaagacaccaggaggggataagaaataagttataatatattttacattgtaccttatttcttataaaaagaatcaaagatagataagattaagcaacttagtatctttatacacaccatgcacacaccatggatatatatatgtattgtagtaactactatggggaattatcggagatagagctatgcgattggtgccaaagcgagggaagaaattactcgagatcacatagctccaattcgaagaaattagcggtggccggaaacgacgccggaaccacgacccgttcggaatattccggcgagaaaatcaagcaccatgatcgtgatcaagagatgagtg

SEQ ID NO: 23752 - DNA, 393 bp, Glycine max
agtctgttgatcgatatacaagaccagactttagagagggtgggccgatggcaattgattcatgtaaacacccaatcctggagagcatacacaatgacttcgttgccaataatatatttctgactgaagcctccaatatggcgattgtgatgggccccaatatgagtggaaagagtacttaccttcaacaagtgtgtctcatagttattcttgctcaagttgggtgttatgttcctgctcgtttctcaactgtgagggtagttgatcgtatgtttacaaggatgggtgcagctgataatcttgaatccaactctagcacgttcatgacggagatgaaagaaacagcttttatcatgcataatgtttcacaaaggaatctgattgttatggatg

SEQ ID NO: 23753 - DNA, 400 bp, Glycine max
accggttgttagaagacaacagaagggggccattggggcggctattatcatccgcagctgcttttattcgcaccgcaaacagtgagccatggccgtcggaaagaacaagcgcatctccaaggggaagaagggtggcaagaagaaggcagctgatccctttgccaagaaggattggtatgacattaaggctccttctgtttttcaagtgaaaaatgttggcaaaaccctcgtctctcgtactcagggtaccaagattgcttctgaaggactcaagcatatactgtttgaggtcttcttggctgatcttcaaggggatgaggatcatgcattcaagaagattaagttgagagctgaaaaagtgcaagggaagaatgttctgacatatttttggggaatggga

SEQ ID NO: 23754 - DNA, 221 bp, Glycine max
  modified_base (64)..(64): a, c, g, t, unknown, or other
  modified_base (69)..(69): a, c, g, t, unknown, or other
  modified_base (73)..(73): a, c, g, t, unknown, or other
gggagtctttgtgatgaaatgagtttgaatgatacgtgtgattgtggaggtgctagagtgtganccacnttcnaggagggccatagttaatggatgtgttgatgtacttggccttcttgcaactttagctggatgaaaatggagccttttgggtttgcttttaaaaatttgggcagttctagggccttgaacagttctggagtctcagataggaaccaaag

SEQ ID NO: 23755 - DNA, 391 bp, Glycine max
catgaccaagaacaatgcccattctaatggatgccgggacaagtttacaactttggagaagccagccatgtttgctttctgtttgaaacctaggggtctggaatcactgaacaagggattgaaacatcgatcccaaaagaagatttcagtctctgggcatgcaaacagtaatctagatcaggatggcttccacactttcagaagaagacagaatgctttaccttttggtgatgaaaagttcctataccaaggccacaattacgattcttttgatgattcatcattggctctgacctcaccaagggtattcttacctcgtgatgctggcagcttgaaatactatcctactagtaatggagcgggatatagaaatcatatcccaaaatttcac

SEQ ID NO: 23756 - DNA, 118 bp, Glycine max
ctcaaaaaccgacagaacgggaagccgacacatttaaaataaagaaaccctctctctattttacttccattgcatccacattcacattcttcaactcgcccgtgacacatccattatt

SEQ ID NO: 23757 - DNA, 357 bp, Glycine max
ggtagagagaagaaagacttgtttattgatccggaaggccgtccaaaagaggcacacaaacgcagaaatagagaaacgcgattttcaaattattattattattttttccgactttgcattttgcaacctaagctcgcatttatttttcttttttttttttcctcttcaaagcactcatcgttttgttcttgttgtttcattagctgcctccgctttctagggctgcaaaccaccgaaacattttccgaaaaattagacaaagctagattgatcgaactaaattcaaataaaaaaataaaaaaaaataaggaaaagttcggaaacgcggagaagaaaaactgaattgacaattcaaaa

SEQ ID NO: 23758 - DNA, 386 bp, Glycine max
ggtaggagacaaaatgaaaaaggaagatattttgtttgattagtttaaaataagaaaaaagtacatttataaaataatatcaacatccttaaataaatatggatatatggtagtataatgaaaggttttttttttgtcctttcaatttaaagtgtctgactcctctttccaactttattttgtttaggtaagaaaagaaaaagaaaatgagtaaaaactatataaaaaaaaagtgagatgaatcatagattgtttggtacaagaaaaattgaaagaaagaaaaatattttctctcttgtttgattgtagatatgaataataaattcctatttatgggtatcgcttgcacatcttttttttttttttttctaactttgacgataaat

SEQ ID NO: 23759 - DNA, 270 bp, Glycine max
gatcactcacaaaaaccacttacaaagtagtactgacttggtttcaatcaaaacaaaaactcacactttggtggccacagcaacaataacaatggcagcctcactacaagctgcagctaccttcatgcaacccaccaaggtgggcatggccactcgcaacctcaaatctacacaatgcatttctaaggcttttggcttggaacccgctgcagctaaactcatttgctcccttaagcccgatctcaaagattttgctcaaaaatgtgtcga

SEQ ID NO: 23760 - DNA, 380 bp, Glycine max
gaagccggcacaagaaaaataaagaaaccctcactttagtttacttccattgcatccacattcacattcttcagctcgccggtgacacatccattatttccgccatgtcctccaattccgagcaaccttagattgtcgtcaacctctctcacctttttcccttatttcaacagaaaaagagagagagtgatttttttttatttttttttatataaaaaaacgatacgatatgtacgttgtgcctccaccccagcgtctggatccgggttcgggatccggtgatttgcgggtctaccaagcgtggaaggggagcaataaattttttcttcagggcaggttcatatttggaccagatgcaagatcattggccctgacaattt

SEQ ID NO: 23761 - DNA, 360 bp, Glycine max
catgaacgaaacgtaaaattgcttgttcgaacacatgattatatctcaagtagtataataatgtaatttaggttatactgaaagaaaatcctgtaatttagaaacgaattttatacaaatgcactttaattgtgtctgtttatctcgtagtatgagcctctcttgttgctagtaaaaggagaaaattcagatccatttaggtatacttatgagtccatgattgtagtttattcaaggggaactaaaccttcttgttttgtagcttccctttctcgtaatctcatctatatttttttggtgatattttgtgtagagcccaaacaaaacttgggaggtattatacaatactttcgatgagta

SEQ ID NO: 23762 - DNA, 290 bp, Glycine max
gagagtcgaaccagacacacttccacgtcaccaccacggtggaaggtggagcgtgaggctgtttccggtaacctctcccggcggcgctgagtggtgatcaaggaaatgggtcagacgctgagttgcgtgcaacagcacgaggaccatggtgtgctcttccctgcacttgcaagtggagaattggaggttgttgaggccatggtggaggaagaccccactgtgttggaacacaccattggctgtgacaggctttctcctctgcatgtcgctgctgccaatggtcggatcga

SEQ ID NO: 23763 - DNA, 371 bp, Glycine max
ctacacaatgagcaacactaagtctaaatactgggcggccacatccacatgtaaagtcaccaacgcaaactgctgtaaaattttcaacatttagactcatgttagatacgataatactggtcaaagcattctacaaagataaaaatctgtagtgcaaccacccaatgtcaaggagattgatcctgatttcactgcaagcaatgaacctctacattgaaagctctcaattacccaattcaatggttgattaacatgactgggtttcgaaaaaaaacccttttccagagttaacagatagcgtattaccatctgatatacaatataccatctccagatctgtactcaattgatatgaacatgggttcatggta

SEQ ID NO: 23764 - DNA, 266 bp, Glycine max
taggtacttcttttagaagacgacatataatttataaacagcccgtttttatttgtatgaaactcccaacacaattttgtggtctttttgccattcttatctaaagcttgtgtctttctgcttcgattgcatcttctgctgcgtaaaattgattcttttctgattcttccttatatttcatctctgaaactagttctaatactttatctacatatctctatattcttattcaacgtttactttttatcccacttctcacttttcta

SEQ ID NO: 23765 - DNA, 371 bp, Glycine max
  modified_base (341)..(341): a, c, g, t, unknown, or other
  modified_base (344)..(344): a, c, g, t, unknown, or other
ggccccgctttattgcatctcgcaggccaattctttcgccgcttcttctctctttccaacgcttccccctgtggtgttctcgtgttgctggtaacaatatggttgttgacgctttgaatgaggatttgagaatcaacggagcagttgaaccgttgcctgaggactttgatgcaacagctgtaatcatagatcccgtgcctttggcagttgtagacaatggcattgtcaaggaggaggcgcagatcattaaaggaaaagagaaaagagaaatagtactgggaagaaatattcatacctcgtgtctagaagtcacagagcccgaggcagatgatgaggtcacntgngaccgggaagctcatatggcaagtgtg

SEQ ID NO: 23766 - DNA, 393 bp, Glycine max
gccgaccaaccattttacatttacagtaacagtggtggaatttcggaaaaaatggcgatggctttcaagatggcgacgactggaatgtgggttacagatgagtgcaagaactcgttcatggatatgaaatggaagaaggagcacagatacattgttttcaagatcgacgaaggatcaaggctcgtcaccgttgataaactcggtggccccaccgagggctatgatgatctcaccgcctccttgcccaccgatgattgccgatacgcggtttttgacttcgacttcgtcaccgttgataactgccgcaagagcaagatcttcttcattgcatggtctccaacagcatcaaggattagagctaagattctatacgcaacttcgaaggatgggctg

SEQ ID NO: 23767 - DNA, 398 bp, Glycine max
gagtgttctaaagtgtcgagtttttatatacgtggtagatcgttcttgtctctgtatacctaaatggtataatttctaattgtttttaacaaaagttatagctgaacaatttctatatttttaaccaaatactttttactctacttttctaacgagtatccttgagtactcgttatcaagcgacccttaactttacagaagagattactgactatataactaatcgacgaggcactaactaattagttgtattttagtgaagacggcataaactctagcaagtcaaagttccgaacagaggcctctaagcttgatttataatgggggcattgacaaatgactaaccgaccacaccagtatttaattatgacgttttatgacactacgcagcatgcatg

SEQ ID NO: 23768 - DNA, 139 bp, Glycine max
  modified_base (18)..(18): a, c, g, t, unknown, or other
  modified_base (60)..(60): a, c, g, t, unknown, or other
  modified_base (110)..(110): a, c, g, t, unknown, or other
  modified_base (128)..(128): a, c, g, t, unknown, or other
attaatatcaacacgggnaactctaattcttacccccccacatctctcaaattacttatncacctacatctaattattatccttttttatattttcttctccctcctaancacatttaaaactctttnttcacctaaat

SEQ ID NO: 23769 - DNA, 379 bp, Glycine max
agacatggggggtcctatgggaaaatattaaatataaggatcagaaggaattttgcttttattcagtttgaatcccaagaggacgctactagagctttggaggccaccaacctgagcaagtttatggaccgtgttatcactgtggagtatgccattagagatgatgatgacagagacagaaggaatggatacagtcctgatagaagaggccatgactctcctgatgggagatatggtcgtggtagatcccctagtccttatcgtagaagtcggggtagcccagattatggtcatggatcaaatccatcttccagaccagatccaagaggaagccccaagtatgaacgagctgaaagcccaataaataatgggagatata

SEQ ID NO: 23770 - DNA, 387 bp, Glycine max
  modified_base (309)..(309): a, c, g, t, unknown, or other
gagagcaggataaaatatcacgggatcgaattgaattaagatatttgaaaagcaaagctaagaagaaatgagaaaataaaaaggatagcatatcatatgatatcagaagtgagtgtctcataatggaagcataacagcgaagtgatccaaagaagaagaaggatgcaggagaactactcataccaatcgtatccagattccggcgagtcctcaccacgatccagagagatagacttcgacaaccctcctccatgggacgaccaaaactacaaagccaagttcatgtgcagctacggcggcaagatcctncctcgctcccacgacaaccagctctcctacgtcgccggcgagaccaaaattctcgccgtcgaccgctccatcaagttc

SEQ ID NO: 23771 - DNA, 384 bp, Glycine max
ggcagcgcttgatttgaggccaggcgagccccactcaaccaccacacctctcctcgttcacgctacccctttctgctcttcttctacctttcaagttttaaaagtataaagatggcagagacattcctatttacctcagagtcggtgaacgagggacaccctgacaagctctgcgaccaaatctccgatgctgtcctcgacgcttgcctcgagcaggacccagacagcaaagttgcctgcgaaacatgcaccaaaaccaacttggtcatggtcttcggagaaatcacgaccaaggccaacgttgactacgagaagatagtgcgtgacacctgcaggaacatcggcttcgtctcaaatgatgtgggactggatgccgacaactgc

SEQ ID NO: 23772 - DNA, 397 bp, Glycine max
gactattctaaaatatacgtctttttatatacgtggtaggtcgttcttttctctttatacctaaatattataatttctaattttttttaacaaaagtaatagctgaacaatttctatatttttaaccaaatactttttactctacttttctaacgagtatccttgagtactcgttatcaagcgacccttaactataaagaagagattacagactaaattactaatcaacaaggcactaactaattagttgtattttagttaaggtggcataaactttagcaagacaaagttccgaacagaagcctctaagcttgatttataattgcggcatttacaaatgactaacccaccacaccagtatttaattatgactgtttatgacactaccagtcatgca

SEQ ID NO: 23773 - DNA, 339 bp, Glycine max
ggttctagtgtgtgattgtttgttgttgtggctggttcttcttcttttgttgttctgtgtttgtgtttgttttttctctcacctgaaaatgtcttgctgcggtggtaactgtggttgcggaagctcctgcaagtgcggcaacggctgcggaggctgcaagatgtacccagacttgagctacactgagtcaaccaccaccgagaccttggtcatgggagtggcacctgttaaggctcaatttgagggtgctgaaatgggtgtgcccgctgagaacgatggctgcaaatgtggaccaaactgctcctgcaacccctgcacttgcaagtgaggtgttgggag

SEQ ID NO: 23774 - DNA, 357 bp, Glycine max
gaccatagaagaagcacaaagagaagcaggggcgctaggagcagcaacaactagtctcagctgaaatggcctcttcagtgatggcatctgtggccctcaaacctgcccctttcactgttgagaaggcctcagtgagaggccttccctctctctcaaggaactcttcttcattcaaagttgtcgccagtggcaagaagatcaagactgacaaaccttatggaattaatggcggcatggctttgagggatggaactgatgcatctggcatgaaaggaaagggaaagggagtttaccagtttgcagacaaataccgtgctaatgtcgatggttacagacctatctacgacaccaacgact

SEQ ID NO: 23775 - DNA, 90 bp, Glycine max
attgcctataaagtaccagcgaggaaaaatgagtactaaaccttgctaactcttgatgaccttgatgtagtgattaaagactactatgaa

SEQ ID NO: 23776 - DNA, 285 bp, Glycine max
  modified_base (72)..(72): a, c, g, t, unknown, or other
  modified_base (100)..(100): a, c, g, t, unknown, or other
agaagaccacagaacggaacacatctaatttttatcacatgtatctctaattgtcatttcgctttattttantaaatttctaacccatccattgcctaanaaatctcctgcaaaaagtagacataactcgaacatcaataatcattaaccattattagaacctaacctcccttttctcccaaaaaaaaaaaagaatcctgaaaactaaccattccaaccctattcaaaattccgcgaattcttaccaccatccaaaaagattgacttcaacaacccttcttcatt

SEQ ID NO: 23777 - DNA, 255 bp, Glycine max
aagacctccttaccagataacatttacaataacaccgcccgcattttttaaaaaatacctcatcctttcaacatccctacaacttcaattttacttacacatcacttcaacaactcatccatcgttattaaatacataaaggaacacatattcattcattttaacatctacgaaacatcaatactccttacctttcataaactacatccccccacccacatctatcattatctaaccttcttcttacccaccaat

SEQ ID NO: 23778 - DNA, 325 bp, Glycine max
  modified_base (65)..(65): a, c, g, t, unknown, or other
gaattaatgaccctgtcattgtttcaacaggacagggtcgtgagcgtacttgtattgagaagtgnttgcaagcagggcacgggacctgccccaaaacacagcagactctcactagtactgttctcacacctaactatgtattacggagccttatatcacaatggtgtgaagccaatggcatagagccaccaaaacgacctagcgattcacaacctagtaaatcagcatcagcctactctcctgctgagcaaagtaagattgaaagtcttctccaaaagctcacatctgtgagtcctgaagaccagagatcagctgctggcgagat

SEQ ID NO: 23779 - DNA, 354 bp, Glycine max
gtggtcatcataataggcctctcggggagtgtgctgtcagatgcttacatttactgtatgaaagggattgcagacacccattttgccctcctgctttgtggctttctcctgctagaaaaagccggccaccaattgcagttgctgccagaactcatgaagttttagcaaccaacctgagatctgatgattcatcagcttcactgagtgtaggttctgttgtcaccattgttcctcatgttttcccttttgaagaaagagttgagatgtttcgtgaatttatcaagatggacaaagcatcccgaaaaatggctggtgaaatttctgaacctggttcacgggccattgagatagtaa

SEQ ID NO: 23780 - DNA, 341 bp, Glycine max
  modified_base (65)..(65): a, c, g, t, unknown, or other
tgggagagcaggataaaatatcacgggatcggattgaattaagatatttgaaaagcaaagctaanaagaaatgagaaaataaaaaggatagcatatcatatgatatcagaagtgagtgtctcataatggaagcataacagcgaagtgatccaaagaagaagaaggatgcaggagaactactcataccaatcgtatccagattccggcgagtcctcaccacgatccagagagatagacttcgacaaccctcctccatgggacgaccaaaactacaaagccaagttcatgtgcagctacggcggcaagatccttcctcgctcccacgacaaccagctcttcta

SEQ ID NO: 23781 - DNA, 427 bp, Glycine max
  modified_base (379)..(379): a, c, g, t, unknown, or other
agaacctacagaagggatcatatctaataattttcacatttatgtctaattgtcattttagtttattgtagtaaatttctaaggcatccattgcctaagaaatctcgggcagtaagtagacataaccgtaacgtgaataatcatcaataatggtgataaagtatctttcctttccgaaagaactaacatcagaatgtccacaaatatcagtatgcacaatttcaagaagctgagtgcttcttgtagctcatttctttgtgtgttttatttgttttcccttgatacaatccacacaaatatttagatccgtaaaatctagatcaggaagagtttcattctttattaatctttctatcttttctctaaaaatgtgacctanacgtttatgccacaagaaagcagatcgttcattcactaaactacgtta

SEQ ID NO: 23782 - DNA, 381 bp, Glycine max
ggcatctggcggcttctcagttctcaccagcggggtggtttcacttggagctacctgtcctctgtgctgttctatgttcatggtgtttgtcactttgagtttggctggggacatagtacaccctgatagtattgctcccagaacgcctggctagaacaacaactttgtcctgcttaaagtccctacttgcattgatggtgtggaaagctctgagtatgtctgctttggtgcaagatttgaccctacattacaatcaacagaaaaacatgctatccatactagagttgcgatagcgaaccctactgattgttgtaacaagcctaagaataagctcactggcgagatcattttggcgcaccgacgacaatgtagtttcacaac

SEQ ID NO: 23783 - DNA, 336 bp, Glycine max
gaggggggggaccgatttgattcttgtcttcctcgccactgttcccctgtctccataaccaaccaaccatacattaacaccaacactcaacctcactcagtcgctcgctcgctctcttcacaatttcgagatctgaaatcgaaatcgaaaccgaaactgaagagagagacaaaaaaatgagggagccatcgtcggtgggattcgaaggcaacggcgccgtttcttcgccgccgcaagctctcctcgagagactgaaagactacggtcaagaagacgctttcgccctctggtacgagctctcttacgaggaacgcgagtttctcatcaaggacattg

SEQ ID NO: 23784 - DNA, 399 bp, Glycine max
gacctacaaacagtatatgtaggtaaaaccttgtattctaatttaaatcctccatattgcacacactctctcaatctctctcactcatgcttgtctttctttttcagaaccttccacaacctaagccactactcctcctccctccgccaaacaccaccgcttccactgcaacttacgccatctccctccaccgcaacttgccaggcaggactccatcaccactctcatcgacatcactaccacaccaaaaccctatcctccaacctcacctccgttctcaaacaactccaaaggcgactctgcgctagttttctcccccaatgttctccatgtttggatcctctgtttcgttgctccacctttcttcgttccactctcgcgccgttgatcttcttctac

SEQ ID NO: 23785 - DNA, 402 bp, Glycine max
cccactcgtccgcccacgcgtccgtcgagtagaccacagaagggatccctatacagggaagctttgagttaacttgagccttccacattgtcttatcttcctctcttccaaattgtcttctttgttccatggaaaatgttccaagtgaatcatcaactccaagtgcttcaatcaattgatcaacccaaataaagtacccacaatatccaacttcatcctgaaaagccccaaatagaaaccctaaatcaaaacccccaatgtgaaatcaaaaccctaaatcaataaatgtgaaatatacataccttattaattgaacaagtgaaaaacgcccttcctctgctaatatttgttccagcaacacgcctaacagcccttctaccacaaccacaaaaaagaacaact

SEQ ID NO: 23786 - DNA, 425 bp, Glycine max
agaagactacataagggggttctagtgtatgtgattgttgtgactcgttcttcttcggccgcatcttcttcttttgttgtttgtgtgtttgttttttctctcacctgaaaatgtcttgctgcggtggtaactgtggttgcggaagcgcctgcaagtgcggcaacggctgcggaggctgcaagatgtacccagacttgagctacaccgagtcaaccaccaccgagaccttggtcatgggagtggcaccagttaaggctcaattcgagagtgctgaaatgggtgttcccgctgagaacgatggctgcaaatgtggagctaactgcaccttgcacccctgcacttgcaagtgaggtgttggagagcttaagctttaagcagaaatggcccttagaaataatggataaaactatatgtagtttcaaaac

SEQ ID NO: 23787 - DNA, 400 bp, Glycine max
aaccggacaacgctcatgataaaaaatattcccgatgggtatacttcaaagatgcttcttgttgccatagatgagcaatgtcgaggaacttatgattttctgtatttgccaattgatttcaagaacaaatgtaatgttggctatgcattcatcaatatgattgatcctggacaaattattccattccaccaggcttttcatgggaaaaaatgggagaaattcaacagtgaaaaggtagcggtactcgcctatgcccgaattcaaggaaaatctgctcttattgctcattttcagaattcaagcctaatgaatgaagataaacgttgccgccccattctcttccatacagatggcccaaatgctggtgatccggagcctttccccttgggtaacaatatta

SEQ ID NO: 23788 - DNA, 403 bp, Glycine max
gaggaatgaagagagagaacaaagcacttagcggtaggcaataattacgaaaaaccaacagcgagtgttgtttttgtttggtccaggctggaccagggaatgaatagagatgagaggctttcggttgaagagaactgagttaagcggcgaagccaaacgcagaatcggcggcagaaattgccaccggaagcacgtcgaagacgggtgaaccaaacacaaaattccatccaccacttctcttttcaatccccaactcaaatctgtgaagaaaatctcaatttctaaattgtaattcttagcactactgctagtagtagtaaaaaaaaacaattagaaagtagtagagtgtttttttttctttttttccgttgttttacttttaagatgggtgagaagagcaacg

SEQ ID NO: 23789 - DNA, 383 bp, Glycine max
aagatgttcagttagtggggtgggcccttaacaggttgcttgcttggctgatacttcttgtacaacctttttcaaaacaagtatttccttttgttgtgttttttattattaaaaaaggatttgttacaaataaagtgttggctatcattgacttatgtttattaactatgtaggacaaaaagggggctgagggaccggcgaaactggtggatatgctggaactagatgacaatcttctatactagataacattaatgattccagtttttcctcaagcctatgcaggtgttatggaattcaactgtgtttggggtgtataatgatgacgtccccttgtacataaaacattaagatctttctgaaattgcacatagtggtcaatg

SEQ ID NO: 23790 - DNA, 348 bp, Glycine max
gttagacacagtcactccagtagagagtagcatggtggggactacaacgacacccctttcccacacggttcgcgtgtccaacatcccccaatccgcgaccgcgaacgacctcctcgacttcctcgaatcgacgttgggttcctccacggtgttcgccctcaaaatcttctccgacaacctcaactggaagtcccgcggcttcaggcgcgtccagttcgagactctcgacgccaggtcccgagccctctcgctctcccaactcaaccagctccttttcaaccgccactttctccgcctatccaaaaccgactccgacatcattttccgcccccaacaccgacttcaaaa

SEQ ID NO: 23791 - DNA, 80 bp, Glycine max
cttattttacacacacacttcactaatcaccacccgcctttattttactacaactcccacccctctctccttttatatat

SEQ ID NO: 23792 - DNA, 342 bp, Glycine max
ggtgtgcaactagaaagtttttgctgtggggctgtgttgtgaggttggcctagctgaaacaggagatcctcctatggtgacactgacctaacaggaagttgtgatcgtgttcggtgtgaaaaaaaggttgagaggttgatcttgattgatattggagtctgtgctttttcttgagttaatggaatgagtttgagttataacggtgatggtggaggtgcaagggtgtgaggcaagttggaggaggaccacagtttttggatgtgttgttttacttggcctacatgcaattctagctgggtgaagatggagggttcttctgggtctgcttttcacaattcttgc

SEQ ID NO: 23793 - DNA, 310 bp, Glycine max
tacggtttttataatactacagattggggtctccattcgggactgtaactatcccgagcgcgaggagcaaccttatgaagaaaaaaatttctcacaagaagttcgagcacccaacgcacggttcactgggatttctttccaagaaacgtgctgctcttcacaagggaaaaaagaaagcattccccaaagatgacccattcaaggcacccaaactcactgcattttttggttacaaagccgggatgactcacattgttagagaagttgagaaaccacgatcaaaactttacaaaaaagaaacttgtgagcc

SEQ ID NO: 23794 - DNA, 323 bp, Glycine max
ggtggcagaaagcgaacccaaaactagagctaccttcccttcaaaccttccactcttctctccttttccaatcaagggaataatattccttagagatattcccaaaccatggctcacgccaatcctatgatttttgttgttggaattctaggtaaccttgtctccttctgttgctttctagcaccagtaccaacattctatcgagtttgtaagaagaaaaccacggaaggtttccaatcacttccttacgtggctgcactcttcacttcaatgctctggatattttatgcttacataaagaccggcgaaatacttctcatcac

SEQ ID NO: 23795 - DNA, 381 bp, Glycine max
gaccagatcacattgctcaaacgccgagccaaccctatccttttcctcatcaagtttctatttaggctaagatgaaaaagagctcattgacaagaaccaccattaatccttgagcagctccgcaaaaaggattgcatcatgtccataagtcagctgaaatggtgtacaactagtagctttggttggagtatttcggcaaacccacaatgcttcttgcaatgttttgtgccatcttttcagatttttctctaaactcttcttgaagatctaccaagatcttgttagtggcttccgcttgttcatttgcttggtgcccattggcagctgctcattttgtgcccaggtgacaatctagtggtttggttttgtcctttgcggaag

SEQ ID NO: 23796 - DNA, 386 bp, Glycine max
  modified_base (219)..(219): a, c, g, t, unknown, or other
tagatcagaaaatgatggtattctgtgtcccatgccgcagtaccctctgtactcagcctcaattgccctccatggtggctgcctggtaccttattatctagatgaagcaactggctgggggttggaaatacctgaactcaagaagcaattggaggctgccaagtctaagggcatcaatgttagggctttagttgttataaatcctggcaatccaacggngcaggttcttggtgaggcaaatcagcgagatatagtagagttttgcaagcaagaaggtttggttcttttagctgatgaggtatatcaagaaaatgtttatgttcctgagaagaaatttcactctttcaagaaggtgtctcggtccatgggatatggtgagaatgata

SEQ ID NO: 23797 - DNA, 329 bp, Glycine max
gctgggagaaaacaaccgacaggacatattctcatagtataccatttaattaccttatatgcttgatggggaaataagataattaacgaaccccctactattggcataattacaactgttgttaaccaaggaaaataattcgtgataaaaataagatatacttagactagaaaaacccgcgctcaaaataaaaaaagatcatcttttttatttcgagcgcgggtatttaccattaaaaaaacacacttgtgtgtcgttctttttgaaacgtatcaattatctagacccatgcttcgagttgattcatgccatatataaactctaacact

SEQ ID NO: 23798 - DNA, 307 bp, Glycine max
cgacggctggataagagacaacaagggtatctattactgactgttacgtttactctttggggcgggatgggtggacctattgtataaaaatttgatgattgtatacatgtggctaaagccaccactgtgaacacctttgctctggatgacactatgtattttgtaaaactcccatattgtggacagctattaaatgatgaatgaacttatgtacaaccttgttatttgaaaagaaagcattagcatactttatttacaaaaaaagttaccgatcccattttaatttattattatcacgtaactacct

SEQ ID NO: 23799 - DNA, 169 bp, Glycine max
cacaaaaggggatttgcaactttatcttatgattgctagcggttggttacttatgattgctagacccttgactgtctctacaggatttggagctgacgaacgatggatgtcgaaatgtttgttttaagatgggggtatataatcaaaaaaacactcattttatttggcc

SEQ ID NO: 23800 - DNA, 355 bp, Glycine max
  modified_base (64)..(65): a, c, g, t, unknown, or other
  modified_base (95)..(96): a, c, g, t, unknown, or other
gaaccatcgtgacctaggagcttttaacctacccatgtattcacttgctacctcatggtacctnntgattatttatatatatatgagtatatatnnaagttatctttgctcgagccaaaaaaaaaaaggggacctaagtctttgtggatgtgctatactagcacctggtccaaggacctcccttgtaacaaataacaacaacgaaaacaagcaagcctttttctactagatggcatcggctagatggactacattagcaagtgttaaactgttaataaattataattaaggaaattatgctattatcttgtttgacaattgtgggaatgatttcgggatgcactctaactatgat

SEQ ID NO: 23801 - DNA, 263 bp, Glycine max
  modified_base (98)..(98): a, c, g, t, unknown, or other
  modified_base (127)..(127): a, c, g, t, unknown, or other
gtcgggtctatttttttttttattcttttctttaaagaacacttctcttcccccccagatttctttctttactcaccctcaatttcccttctattttncttcctgctaccttattatctatatgaancaactgcctggcgtttggaaatacctttactcaataaacaattggagcctcccaaatctaatggcatcaatgttatcccttaagctgttataaatcccttcaatccaacaaatcaccttctttattacccaaatca

SEQ ID NO: 23802 - DNA, 289 bp, Glycine max
cggaaggaaggcccggactccgacgccacgcggtcgcagtacggctagcagaaaggactacccattgcccactggattcctgatcttcgtggatttagagggtaagctacccttggaatgacctattctcctaattgcggcttctacaattatcctgcacacatgcatgaatcacccaaaggcaaagatctaccttttttttattctacaaaaggtactaccccaacttcctcactagataaattattcctaatctggactagaatatcgactcatatatgcaacattc

SEQ ID NO: 23803 - DNA, 402 bp, Glycine max
aaacacaccaaaaggggcccgtttgttaaactaccttaacaattctaaccgcgggacaccaccattattcatatctaattctctaacctttcactctgccttactcactctctactttgctcatcatcgtagatgaaccaacacttctagtctctcttactttataaccatgtaaaaatgagtcacctaatgaaaaattagtagcttcttgttgtgctttttattttgtttgtgttgagataaatttgtttgtttgtttggtattgttttgtgttttatgaattatttgatgggtgaagaaagagaagtggtgagaaagcaaggacaaaggggtgttggtggagataagtggtacttgtatagctgcttacaagactgtaaatattggtgctgtttaataca

SEQ ID NO: 23804 - DNA, 459 bp, Glycine max
  modified_base (67)..(67): a, c, g, t, unknown, or other
gaagaaagaccgacccacgccacccgtccgttcctataatactacatacagattttctaacacctgngctactatctcccacgcccggttctttttttactcatcctcaattgcccttcattgtggctgctctctaccttattatctatatgaagcaactggctggggtttggaaatacctgtactcaataaacaattggaggctcccaaatctaatggcatcaattttattgcttaatgtgttatatatcctttctatccaacatgtcatccttttagtgattcatattttttatatatattataattttccatctaaaaaagttttgctcttttaacttcttacttattttataaataaagcttattttcctttacattaaattttaattcttttaaaaaaattttttccttcccttcttattattttaataaattattttcatctttttatttttt

SEQ ID NO: 23805 - DNA, 326 bp, Glycine max
ggtggacaccatggccaacaacaacgaagaggaggaggaagcagtggcgccaatggtgaagttgggttcttacggtggtgaggttcggttggtggttggtggggaggaatccgctgcggaggagaccatgctgctttggggtattcagcagcccacactttccaaacccaatgccttcgtctctcaagcttctttgcaactctccctcgactcttgtggccactctctctccattcttcaatccccttcctcattgggaacgcctggagtaactggagcagtgatgtgggacagtggagttgtactgggaaagtttctagagcatg

SEQ ID NO: 23806 - DNA, 383 bp, Glycine max
gaaggtgcaagagtttgttgtgagctataagctagtttatcgtgaggagaatatgaagttgtttgttttctttgttgctgcagtagttttggtagcatggtcatgccatggcgcaggctaccaaaggttccctctccgaatgaaaactggctatggtgagcgttcttcggaggtaaaatgcgcaagttttaggcttgctgtggaagcacacaacatccgagcctttaaaaccattcctgaagagtgcgttgaaccaacaaaggactacattaatggcgaacaatttagatcagactctaaaacagttaaccaacaagctttcttttatgctagtgaacgcgaagtccatcacaacgacatatttatattcggcatagataaca

SEQ ID NO: 23807 - DNA, 409 bp, Glycine max
gaaagaagggcgggaccacaccttcgtccgggctgcaaaaagacaccaaaaggggcccgggttgtgaacctacttaaccactccaaacccagcacaccaccattattcatatctcattctctaacctttcactctgccttactcactctctactttgctcatcatcgtagatgaaccaacacttctagtctctcttactttataaccatgtaaaaatgagtcacctaatgaaaaattagtagcttcttgttgtgctttttattttgtttgtgttgagataaatttgtttgtttgtttggtattgttttgtgttttatgaattatttgatgggtgaagaaggagaagtggtgagaaagcaaggacaaaggggtgttggtggagataagtggtacttgtatagctgcttac

SEQ ID NO: 23808 - DNA, 395 bp, Glycine max
tttgactcacacgtaacttcatctgggttgcagggacgaagaataataaaatgggttccgataataccaacttggagttcttgaaggagatcggtttgggctcctccaacattggttcttacattaatggccaatggaaagccactggttcttctgtcacttctgttaatccttctaacaatcagagcatagctcaagtgactgaagcgactttgcaagattatgaggagggattgcaagcttgcagtgaagcagccaagacatggatgactattccggcaccgaagagaagtgagattgtgagacaaattggtgaagcattgagggccaagttggatccttttggtaaactggtgtcttttgaaatgggaaaaattttcccaaaagaattggga

SEQ ID NO: 23809 - DNA, 352 bp, Glycine max
gactactggttattccacattcgaagaaataaactcacccactaagcactacacaaatcacacagagttgcaagagaaagataaaagaagatggcgactcttgattccgacgtgcctatggttcccgccggcgagccctcgagcagcgccggtccttcttccaagaagcccaagcgcttcgagatcaagaagtggaacgccgtcgctctctgggcttgggacatcgttgtcgataactgtgctatctgccggaaccacatcatggatctctgcatcgagtgccaagccaaccaggctagcgccactagcgaggaatgcactgtggcttggggagtttgtaaccatgcttttc

SEQ ID NO: 23810 - DNA, 351 bp, Glycine max
ggtgtgagttcattaacatatgcaaattctctgtgttgtgttgtgtacttgtgttaattgtgttgttgttgtaggaaatttaagtgaagagagaatgatgatgaagtctgctatgtgtgcattggtgcttgtggcactggttgtggttgaagtggggcccatggctgaggctgcggtggcttgcaacccaacacagttgactccttgtcttccggcaattaattcaggttctgcaccttcgagtgcttgttgccagaagctgaaggagcaaaagccatgcttctgtggctacctcaaaaaccctagcttgaagcagtatgttaactcttctaatgccaaaaaaaaccgtag

SEQ ID NO: 23811 - DNA, 77 bp, Glycine max
ccgaaaccccaaaatttcagtatctagtcatcaatcatcaacacatatctcagcgtgtttttatgtgaatccacctt

SEQ ID NO: 23812 - DNA, 176 bp, Glycine max
ctcacacatacaccacataagagaacactatttaaaaagaaagaacatgttcaagaagcagtgtgagccatggagaaaagaaaaaaaaaaagaactgaactccttcaattagatcattccttcttttcttcaaatggtagcatgaatacattgttaatttctgagatggcgagtta

SEQ ID NO: 23813 - DNA, 153 bp, Glycine max
agcgtttaatgaagaaacaaccacttctgactattggtcgctcactgtgaccggcttgatgcagcaaatatatgcaaccagagatctatccgattacttgtgggactccacagatgttgcgaacaatatcaatgacagattatagacgaatgc

SEQ ID NO: 23814 - DNA, 233 bp, Glycine max
tggaaggaccgacccgagcgacgcgtaccgctgacaaaaaaccaccaaaagggactcgatttatgaaattaaaacaaagctttaaacgcacgtgactttcgagtttcaaaattccttaaacacccacccactttaggtcactcaatctgttctaccatcaaaaccttctttacaccaaacctacatgtagctctttctatataaccatacaacactgcctgatcttattataa

SEQ ID NO: 23815 - DNA, 315 bp, Glycine max
ataagacaacaacagaaagcacgtctaacagccggaaactctgtcttttctgttcggtctttctccgatcgcatcactcccaacccccatcacgccttcccgaagaagaactcttttgaaggtcatcattctcggtgacaacattgtggagaagacagattcgatgaaccaggctgtcaataaacattttagttattaatgcagagcaaccattggagcggattgttctaccccagaagtgcaatttggaaataagcttttcaccttacacatttgggatacagcttgccaacaaagatttcaataccttggagt

SEQ ID NO: 23816 - DNA, 177 bp, Glycine max
ggtgtcagatgagaacatcatgatgttacatggggggaataatttgctcacagagttagcaatacacattttactcttatttcttatatctcttcctaagaagaatctaattctaaacttcattacacatatatctacagatttcttactttctatctcaatcttttcttctttctt

SEQ ID NO: 23817 - DNA, 443 bp, Glycine max
cgcttgtttacgcaacgcaagcgattgttagttgtattcgatggactacgatttcagaaggaggtcgggcccacaacctccgatgtaccgtccgccaccgccaccgtcaccgatgtaccgtccatcaccgtatcaacagaatcctactccttcttcaggacttggcgttagggttggtataaagccggaatataggatcacaccgtcgcctcatttatcatcacttgctggagataatccacggagcaacttccaatttgattttggattggagagaaaaattttagctgaagcagagaaggataacccaaattggagcaaatttggatcagaaaatattccaactaaagtttctgattcatcaacagcaaaggttactgctttggatcccattgtgagcaaatttatggccatggggcttagccgagaggctgttctcattg

SEQ ID NO: 23818 - DNA, 446 bp, Glycine max
  modified_base (409)..(409): a, c, g, t, unknown, or other
  modified_base (429)..(429): a, c, g, t, unknown, or other
cacacactctcttcaatttctagggttttgctattgctttgcctccgttccccctttctcgcaaaaacaacgccttttctcttctccttcgtatctattctttgcgtttggtttttggttgattgaaggcattcacagcgtaattcgttgctgcattttaatcgatttatctaaccaggactgaatgacctaatggagtctaaaggtgggaaaaagaagtctagtagtagtagtagtaaatcaattttttacgaagctcccctcggatacagcattgaagacgttagaccaaacggtggaatcaagaaattcagatctgctgcttactctaactgttctcgcaaaccatcctgatacacatccggattgatagttcgttgcatgcaaccatagttttattaggattttntcttctttgttttcaattangtttttttggtgctctc

SEQ ID NO: 23819 - DNA, 437 bp, Glycine max
  modified_base (402)..(402): a, c, g, t, unknown, or other
agttaactcactaacaatcacatggcttctgaactcaccaaactgatccttccatggaaagttcgctgactcatttccctcctttccaccctcgccgacacctctcgccgctccaacgccaccatcaaccgccgcctctttaacctcgctgaccgccagtcactgccaaaccccacccccgtcgacggcgtttcctcctccgacgtcaccgtcgatcccgcccgcaacctctggttccgcctcttcgtcccctcctcttcctccgccaccaccctcccggtcttcgtctacttccatggcggcgccttcgctttcttctccgcagcttcaaccccttacgacgccgtttgtcgtctctactgtcgctcccttaacgccgtcgttatctccgtcaactaccgnctcgcccctgaacaccgctaccccttccaatacga

SEQ ID NO: 23820 - DNA, 436 bp, Glycine max
  modified_base (387)..(387): a, c, g, t, unknown, or other
cccacgcgtccgtccaactcatttcttcactctgattcttgccccaagctgtaactgtaactgatccgcggaccgtaaaccacaagagagaaatgggatctgctggagcccttaggaacattgttcgctctctctcagtcgcatcatcaagagctttattgcctcgaatctccaccaatgcttcgatggctccaatttgttttgctctgccatctccctgcaaacctcctcaacggcttcttcccctttggagtcacttccacagcttgacagacactcgcttccccaagagacgcccctctgaaagacctcgtcgaaagagggccagcttgagaccctctgggccttatgcttgggttcaatatacacctggccaaccgatacttncaaacaagcctaatgaaaggagtgtcaaaaggagaaatgagaagaaacg

SEQ ID NO: 23821 - DNA, 442 bp, Glycine max
  modified_base (421)..(421): a, c, g, t, unknown, or other
ctcgtgaggctgctatggcagttcaaggaaagatggtagattctcagcgtaagaagagcagggcaagtttgcggaagcttgagaaacaacctgaatggttgaagggtggagagctccgtgattatcaacttgagggtctgaattttcttgttaacagttggagaaatgatacaaatgtcattttagctgatgaaatgggccttggaaaaactgttcagtcagtatcgatgcttggttttctacagaatgcccagcaaatccatggtccttttcttgtagttgttccattgtccactttatcaaattgggccaaagaattcaggaagtggcttcctgatatgaatattatcatatatgtaggtactcgtgcaagtcgagaggtttgtcaacaatatgaattttataatgagaaaaaacctgngaagccaataaaaatcaatgc

SEQ ID NO: 23822 - DNA, 446 bp, Glycine max
ggaagactccagtccaagtgtaccagagtttctgtgagagcttcaagtcttcattctctccgttcatgggctctacgatcatgagcatttccatgggtttaggaccggatggtgagctacgttatccatctcacccccagctgccgagtaatggaaaaactcaaggtgctggggaattccagtgttatgaccaaaacatgctcagctttctcaagcaacatgctgaagcatctggaaatcctctgtgggggcttggtggtcctcatgatgcacctacctatgaccagcccccatacaatggcttcttcaatgatggggcttcttgggagtccacatatggggacttcttcctctcttggtattccaatcagctcatagctcatggagattgcctcctttcattggcatcttcaacttttggtgactctggggtgacaatctatgga

SEQ ID NO: 23823 - DNA, 412 bp, Glycine max
  modified_base (387)..(387): a, c, g, t, unknown, or other
cggacgcgtgggtgagaggccaagcccaagtcctccagaggccgcctcctcgcggtgtccggacagtgtacccacttgcccttgttctctcacctactagggagctatccatgcagatacatgaagaggctaggaaattttcttaccagactggggttagggtcgttgttgcttatggtggagctccgataaaccaacagcttcgggaacttgagagaggggtggatatccttgttgcaactccgggaagactggtagatttactggagagagctagagtttcattgcaaatgattaggtatttggccttagacgaggcagatagaatgctggatatgggttttgagccacaaataaggaagattgtagaacaaatggacatgcctncaacagctgccagacagactatgct

SEQ ID NO: 23824 - DNA, 449 bp, Glycine max
gttctacacaaggccaaataggagtgacatccacctctcagcagaggaagaagccaccatggaggcaaagaccagagactactttgatggggttgcaccacaacgccacacaaagcctcaacgaagtgagtattcagctcaatatgtggatgctttctccaatgcccatcactcttcttcttcttcttctataccagaattcatgcaattccaacgcctcgagaatgatccccaagagaagaaattggagtacaatggaagtcaagtaccggaagaatttgtggaaacagagtattaccaagatctcaacagcgtggacaaacaccaccatacgacgggaacaggatttatcaaagtagagaaaaatggaaatgactttcacatagaaccagataatgacactggttgccatcactcttgcaagtgcaatccagcaaccaatgattggg

SEQ ID NO: 23825 - DNA, 177 bp, Glycine max
cccacgcatccgatattgtccaatcaatgcatcgtctatatgtaaccatttttcctttcagtaaatgtgctaaaatcataatccagtttgttaaccttgtcttctttaaatattttgttctattaaccctttttccatattaaacctgcattttctttcaaacctttttttaacttt

SEQ ID NO: 23826 - DNA, 328 bp, Glycine max
  modified_base (66)..(66): a, c, g, t, unknown, or other
ggcagataactcaattagcttattttctccatacaacaagatgggcaaattcaacctctctgatanggtggtattggctcccatgaccagatgcagagcgctcaatgggactccactggcagcacatgctgaatactacgctcagagatcaacaccgggtggatttctcatcactgaaggcaccttgatctctccaacttcttctgggtttcctcatgttcctggaatatactcagatgaacaggtagaggcatggagaaatgtagtggacgccgtgcatgccaacggcagctttatcttctgtcaactcttgcatgtttgccgtgca

SEQ ID NO: 23827 - DNA, 435 bp, Glycine max
cccacgcgtccgccgagcttgcagcagcgatttctcatttcatttttcacacttcaacaatggcgaaaaccttcaaatacatcatcctcggtggaggagtttccgctggttatgcggcgagggagtttgccaaacagggcgttaagccaggggagttggctatcatttcgaaagaagcggtagcaccttatgaacgtcctgctctgagcaaggcttacctttttccagagtcccctgctagacttcctgggttccatgtctgtgttggaagtggaggagaaaggttgcttcctgagtggtacacagagaaagggatagagttaattcttagcacagaaatagtaaaggtagaccttgctgcaaaatctctgatcagtgctggaggagaaacattcagttatcagattttgattgttgcaacttgctcaacagtta

SEQ ID NO: 23828 - DNA, 449 bp, Glycine max
cccacgcgtccgatattgtccaatcaatgcagcggctatatgtgaccatgtttccctgcagtgaatgtgctaagatcataatccaggttggtaaccttgttctgcttcaagtatatgttttgatgaaccattttgcagatgagatctgcattttcttaacaaagcatcatataacttttatgagagtagtacactagcacctgccttccttactctgtgaattaaatatagttgataaattgcttcatctgtcttagttccttctcctgtgaggtctgttatgtatgctgaattggtatcatttacaactgttacattgtcattatgctcaatactacagtaggcggccttatgaggggggaaacttaggttgtaatgtgaataactgctttttagtgttaagttgataaaaattgccataatttatgatttttgtattagctgataat

SEQ ID NO: 23829 - DNA, 441 bp, Glycine max
gggttatggggtttgctttccatgtattaagttttctgatatgacgattatgatctgtttgagacctatagcaaataaggttactaatataaccgatggagtgaatttggggggaagttttcctgtgatttcactttttttcttagggttgaccaatatggcattaaaattgaagtttcaatgaataacttggttacaaagaaaattgcttctatgtggctcaaatttcagtacccttcacgattggttgctttgagctttcttttattcttgattgggattccaatccatcctttgttgtttccttgcccaattttgttatattgttaaaactcaaatatattgtattgcttgccacaagatcagtgcacattgttgatctattgaagaatattttataatataggcattctttatggactataatggcatatgacttaa

SEQ ID NO: 23830 - DNA, 455 bp, Glycine max
cccacgcgtccgctccaactcctcctcctactttgcagactgctgatacttcaaaagtacgggggcatcaaatgcctattgtcacaactttgacaaggcttttcaatgagacatcagacgcccttggaggttcacgtgcaaatccagctaggaagcgggagatagaagacaactcgaagagacttggtggattgtttgccaagttaaatagtggagacatatcaaaaaatgcttctgataagctccttcagctttgtcaggcattagacaatggtgattttggtactgccctacaaattcaggttcttcttactactaccgagtgggacgaatgccagtcctggttaggttcactcaagcggatgatcaagacaagacagagcgtgagactaagttaaaaaagttacagatatctttttgctgattttggaaatttttcatgtgattagcatctt

SEQ ID NO: 23831 - DNA, 448 bp, Glycine max
cccacgcgtccggtcattgatacttgttgtgctacttttgctgaaatacaaaagagaggcaaagatttttgggccgaatttgagttgtatcttgcagatcttctcgttgggcttgttgttaatgttgctttggtaggtatgttggcaccctatgctcgattagggaaaccatcaatatctagtggattccttggtagaatgcagaaagcttatgcagccttgcctagcagtgtatttgaagcagaaaggccaggatgtaggttttctgtacaacagagacttggaacatacttctacaagggtataatgtatggtgctgttggatttgcatgtggtattataggccaaggcattgcaaatatgatcatgactgcaaagcggagcataaagaaatcagaagaggacatacctgtgccacctcttgtgaagagtgctgctctttggggcg

SEQ ID NO: 23832 - DNA, 84 bp, Glycine max
attccctagtcgacccactcttcctaaaaaaaaatacaatatttaaaaaataaaaataaaaaaaaaaacacaatcactctataa

SEQ ID NO: 23833 - DNA, 451 bp, Glycine max
ccgggcaatgcgcgtggccattccaccaaccgatttacgggccccagacgccgccgttaggttctcctaacggcgacgccggggttgacggaatggttattaacttggccacgcttctcgctggcacagttaccaaccctttcaacaacggttacttccagggtcccccaacggcgccgttagaggccgtttcggcttgcactggtgttttcggaagtgggtcgtacccgggttatccgggtcgggttctcgtggataaggcaaccggggcgagttacaatgcgcatggtgcgaatggaaggaggtatctcgtgccagcgatgtgggacccgcagacttcgacatgcaagaccctcgtctgaagactgccacgtggcgaggttgtgtaatggttgtagatattggtcgatgggaacggaagcagggaatggataatagagggggtgatgga

SEQ ID NO: 23834 - DNA, 447 bp, Glycine max
attggataccaggaattaaggaaattcggttgaaggatcttcccagcttcattagaaccagcggatccagatgagttcatgcttgatttcatacagtgggagtgtgggaggactcgaagagcttctgcaataattttgaacacctttgatgccttagagcacgacgttttggaagcgttctcgtccattttgcctccggtttattccattggtcctttgaatttactcgtgaaacatgttgatgacaaagacttaaacgcaattgggtccaatctttggaaggaggagtctgagtgcgtggagtggcttgacacaaaagagcccaacagtgtcgtttacgtgaattttggtagcatcgcggttatgacaagtgagcaattgattgagtttgcatggggtcttgctaatagcaacaaaacctttttatgggtcataagaccagatctt

SEQ ID NO: 23835 - DNA, 334 bp, Glycine max
aattctcggatcggccgactcgtacgcccagaatcccccttttcacctcttttaatgtctgatcctaaaaatgaacgctcccattcgcaaacttttaacagacctgggggtcattctgatgatctttcacttaaaatgagtgaaacaaatgatgctaggcatctaaaacaaccctcagttcggatgctatcatatcttaattttacaaagtggctttatgctttgttatgaagcatatgtgctgctatctttggttctttcaatcccctatttgcttatgttattggcctctttgtgacatattactatagaattagataatctcatcacttac

SEQ ID NO: 23836 - DNA, 420 bp, Glycine max
ggtgtgtatactaaagaatataagatagaagattggggttagggtttgatcggacgcaatggctggcaccggcatccacccataccaccagcaatgggctccggcggctgccgctcctcctcctcctccggcagccgcgggcggtcctcctcctcaccctggggaggaggttcgaacgatattcataactggtcttccggaagacgtgaaagagagagagctgcagaatctgctgagatggctgcccggtttcgaagcatctcaactgaatttcaaagctgagaagccaatgggttttgctctcttctccgcaccacaccaagcactcgccgccaaagacattcttcaggacatgctcttcgatccagacaccaagtccgtccttcacactgagatggcaaagaaaaatctattcgcaaa

SEQ ID NO: 23837 - DNA, 444 bp, Glycine max
gcggaggatcggcagggaacaagttccgcatgtcactgggtctgccggtggcggcgacggggaactgcgccgacaacaccggcgcgaagaatctctacatcatatcagtgaaggggatcaagggaaggctgaaccggttgccgtcagcttgcgtgggtgacatggttatggccaccgtcaagaagggaaagcctgatctccgtaaaaaggtgctccccgccgtcatcgtccgtcagcgcaagccgtggcgccgaaaggacggtgtttacatgtacttcgaagataatgctggggtcatagtgaatcccaagggtgaaatgaaaggttctgctatcactggtcctattgggaaggagtgtgctgatctgtggcccaagattgcaagtgctgcaaatgctattgtttaagctgggtttttagtttatgtaatggttctgcttcttg

SEQ ID NO: 23838 - DNA, 99 bp, Glycine max
aatggataattttttttacctcttgttagatattgtatgctagttggagatcatccgctgggttctgtgatcaatgcaactgcgcaaaaattttataca

SEQ ID NO: 23839 - DNA, 348 bp, Glycine max
aaattgtaccaagatatggaaagccgaatataaaatgcagctaatgtggttcaagtacccggagaatttcaaacaaagggtaaagcattttatcagtactattcatatacttctcgacgtaaccattacacaattcttcaaatattacttcatgtaaaggactctattactcaaaatgtatatagaaatgatattcccatattgttatattttcctctctaaaatataccccaaattgcacataacttcaaaacttggatcaataaattcattgtcaatggtgtaatcaattattatcaatgtataaaatatccttaaattaaaattgatacatttacttaaacaatt

SEQ ID NO: 23840 - DNA, 365 bp, Glycine max
agcggttttatattagtctgttatgcagttggaatgcgggcacggtaccttaccagtatcctcacgttatttcattcattttttatgtgatggatgatcagtgaaactataagtaaaatactagaacactaatcatacttattttctggactaattaagatgatgatgatgataaaagaaaacgagtgtgtattggtaaaacaaatgctcatttaatttttctattttcagaaccataaatttacttaatgcagcgatatcttttaagtattattatatcacatattgaagtaaagcatcaaccatttaacatgttttttaagtgtagattaaagttagcattattaacatgtctggggtgcaat

SEQ ID NO: 23841 - DNA, 336 bp, Glycine max
gagtctagggtctgagtgaggtgcttgttgcgtgggtgtggagacctctattcatttcgtaatcgcagaacattcgaaccagataagagaacgattactatatggaactacgtcgtcacagctcacaaactcaccaacgtcacccactcctgcgtcggcaatttcaccagtccttgagacctctatctcatcatcgcgaaatgcacgctcatctagattcacctgctttctccccaaggcttgcaggttattttgcataccttctgagcatttattgtatcattgtttggattatgataactacaattgcatatggcatttttctgtgctagttat

SEQ ID NO: 23842 - DNA, 378 bp, Glycine max
tatctaatcagtttcttggaacaaatatagaaccagaatggatggttttatgtcttttaccagttctttctccctaattgagaccgattattcaaatcgatgggtgtaaactaatgagctctgatattaatgaactatatataagagatatttatctgaattatacttctatcgaattattaacaacaagtatatctacttccatgttaattagtaatgtgtcatgataaattggtttcatagtatccttgtatacacttctttgtttatggaatcctctgacaacctattatgtactgacattttaattgtttacaaatcattttttgatataaatttaatcaaaaaatgtaatatttctcgatactttactttttt

SEQ ID NO: 23843 - DNA, 329 bp, Glycine max
actgtattgattgtccaagactgcctgactcttgggtgcgtggggggatgattattgattcagatctgcaacaagactcaactacaactgagaaggaattactatgctcggttaccaccacattcaaccaattatccgatctagtgctttcctctaaacttatagaacttggattgtctggtgttggagtaaaaggtctttttcaatttcaaatcatagaacatgggatcaacacagaacttgctcctttaaacttggatctaacttatgctgacttgtgggatctacctgatcttgagttcatatttaatggccccatcaatttttta

SEQ ID NO: 23844 - DNA, 407 bp, Glycine max
tgaggtttgaagattcacacattgaattgaggtttgggaattttacacctggcccacaccatcatggcctgcatcgacaaattttggtttttcgccctctctcttctcctcctcgcttaccctctcctccaagttgctaggtgccagtcatactctgatgatgtattggatgctgctgaataatcatgtgatattgtcattgttggtgatgatgtccaagactttgttgatgggactttcccttctgctccatgaattgaaacaataagtgtattttccgaaaaatagtgcaagatttataacagctggataagagtcatagctgcttgttgttgttaaaaatgatgtggattcaatctttaatgttatttgctatcaatgctattgttcaccttcctttttaccac

SEQ ID NO: 23845 - DNA, 387 bp, Glycine max
tgtgcggcgacaacatgaagttggggaaatattgagaacaaaaataagttgtctcatgatgtatgtaagatgcacaaatgcatccttcaacgttggccttatttttcactactcatttagaatcacccatgaatctacaaattttaatcaaaaccaagtcatcattgattagcattaaacaaatgaattttatagtgaaccatccaccaattgagcatcttccttatctgcatgctccatcatagaaagataaggaaagacaatacaagcgtgttatagatatttttaaacaactgcagattaacattcctttttctgaagcattagagcaaatgccaacatatgctaaattcatgaaggattttcttatgaagatgaaaaaaatta

SEQ ID NO: 23846 - DNA, 389 bp, Glycine max
ccgcccaggcgttctcccacgcgtccttactgctttaagactacagaaggggtattagttatctgtaattgtaaacaactgatcccttcaaaattccctctatgcaaatccattggatagtgatattttttatgtacttgacggtagaacttatcttaatcgttaaaagatctattagtatattatactcctttctccgtatttattaatttatacatttttttgttgtatttatgaaaaacaatgttacttctacgtttaattttttatttctagaagtaaactgtttttttttatatatttactttacactttttcttcaacctaataaataaagttttttttatattttttactatcactcgctttcatatttttcaaacttacca

SEQ ID NO: 23847 - DNA, 432 bp, Glycine max
ttttgactttatatcaactaaagaaaaccattggtggctctccctcactccatctctgccttagccaccacactcacactctccttcccaataaccaaaccccataaagttaacccctttcccttttcctcgaaccgaaattcacaatttttaacgaaacaaacgcgacccataagcagaataaacctctccctaacccctgcacgctttgcatcgccaccctcaacggttgaagccgatcgattatacccagatgccgaaaataactaaactgacgaagagtttagcgactagagctctttctctaaattcactttgatggatcactggtaccctttctcgttaactgaaaaacttaaccctttctttcccacacctatttaaacttttggttctataaatccgatctctggtactacaagttcattttcc

SEQ ID NO: 23848 - DNA, 96 bp, Glycine max
ctacataattttacttttcaaaatcaagaaaacaacattgggcatcgtttatatttaaacagactataaccaaattatctaatacaatactcatta

SEQ ID NO: 23849 - DNA, 88 bp, Glycine max
  modified_base (5)..(5): a, c, g, t, unknown, or other
  modified_base (13)..(13): a, c, g, t, unknown, or other
  modified_base (27)..(27): a, c, g, t, unknown, or other
agccnagcggagngcgagcaacaaaanagagccaaccaaaaaaaaaaaaaaaaaaaaaaaaaaaaaagcggccgcacaagaggaccca

SEQ ID NO: 23850 - DNA, 420 bp, Glycine max
ggcacttctagatcagacttaacaacagcacaaagcgtgttagtgtctgttcaagctaccatctctctctctctttcttagtgcctccttgccagaagttaaaatggcccaagaaactttcctattcacatctgaatcagtgaacgaggggcaccctgacaagctctgtgaccagatctccgatgctgtgctcgatgcatgcttggagcatgaccctgacagctaggttgcctgtgaaaccttcaccaagaccaacatggtgattggtttcggagagatcacaacctatgccaacgtttactatgataagattgttccttacacatgcatgaacatttttttttgcctctgatgatgtatggtcttgatgctgacaacttcaaggtccttgccaacattttatcaacatattcctgatat

SEQ ID NO: 23851 - DNA, 440 bp, Glycine max
  modified_base (331)..(331): a, c, g, t, unknown, or other
aaagcaaaaatgatgaagcaaagttagcatgtgaaacatagattgaaaaagttatgatggaggaagaaggtgacccattgataaagagggagacagcctacgaaaatacagtgaagaatgtgagctgcgaagacaattttcttgataacccaataacggagttgatcaagaaggaagttgaaggtggagatgcaaccaagcctcattgtcttcaagattcagattttcataaaaagatcggtatgatgaaacagaaatcattgctggacccagatatgatcatgaaggtggttggaaaatcaatggtgctggaatcttggaatttcaactngctaagtgagcctcttgcattaaactttgttgcatctatggctgacagcttaacaatggagcttaagcagaaggaatgtactgaggcagcatggtgattaaaagtatat

SEQ ID NO: 23852 - DNA, 209 bp, Glycine max
tgttatggttattactgctattcatgcatccggcttgagcctgcctagtcccgtttgatgaacaccagttctgtttttgtgaatcagcttttagtgtcaaacgatgacaataatcaaattattctccatgccttcaactatgtgccctatttaagctcccaaactaatttgacagtgtcaaattacttccttgttgaatcttataaata

SEQ ID NO: 23853 - DNA, 274 bp, Glycine max
atgattttacacattcacttcagtcagtgtttactgtttaactttgtacctctgctctcacttccttccttccttccttcaatcgttctaactcttatcatccatggctagcaccaaagttcatagggttatgactcaacccattaacttgtattttagtgttcttcatagcaaagcacgcattcatatttggctattttagcaaaatgattttatgattgatttcataatcattgtttttgattaatacattaatttttatcttgtatattct

SEQ ID NO: 23854 - DNA, 318 bp, Glycine max
cggacgcgtgtgcggactcgtgggaagacttctagaatgtggtggtcttctacgagctgataggttacaagtcaacaacataccaaggatgccaaagctcgtgatcgatggtccttatggagctccagcacaagactacaaaaactactaagtaatccttctcgtgggactaggaattggtgccacccctttgattagtattctcaaagatgttgctaaacaacatgaaacaacagaatgacatataagaagggatggtagaaagtgtagtcaagaacaagaggaaaccttttgccaccaaccgcgcctatttctact

SEQ ID NO: 23855 - DNA, 184 bp, Glycine max
actatggattctaacaatctatcaaatgtattaaataaataccgatgctttacttaccaaacattataaaatacttattatactacacatgaccattataacattattttcataattaacataattaatgaataaatatatactaacatttaacctattattagaaatgaaataattactataa

SEQ ID NO: 23856 - DNA, 354 bp, Glycine max
cttttaccttcttcatgtgtaaacaactcccgaagccttatgttcaaaatccatagacccctttttggtttttctaatgttttcctcaaataaacgttggtggcgactcccgcgcatcttcttcatgagaagatgcactttcctattttgccttgccctcctatcgaatggtatgtttgcgacacacacaatatgcaacaacttctctgttggagtctttgtgagcttatcccaaattaatgctcatcggtaacatgcaaaaatgtcttccttattgtgtgcattttaagttttgctatgtgcaatttttcttaattctatatttttgtattactcttattgaaaattttatta

SEQ ID NO: 23857 - DNA, 215 bp, Glycine max
ggttctagtgtatgtgattgttgtgactcgttcgtcttcttgtttatcttcttcttttgttgtttgtgtttttgttttttctctcacctgaaaatgtcttgcttctgtggtaactgttgttgcttaagctcctgctagtgcttcaactgcttctgaggctgcaagatgtaccctgacttgatctacacctagtcaaccaccatctagaccttttt

SEQ ID NO: 23858 - DNA, 241 bp, Glycine max
ccttgtattaaaaactcaatatcaaattctttgtcccacaaaagatggtgttcactcccacaagtactgcaacatgctttctcataatatcacctctggttttgctatggtgtttcaagctactaaagtgtgtgtgtctgatgccaaatagattgtatagagcattaatgtcacatgtccttcatgttaatccctacatcctctagattgtttacacttatgaaatgtactcagttcttat

SEQ ID NO: 23859 - DNA, 247 bp, Glycine max
ttatgacttttgaaggggctctctccagttcgggcttccgtgggactaatataattgcaggagtcagtttgagtctggaatctactgctcttcctgtccttgtcatcagtgtgacaattatctcatctttctggctgggccacacctgtgtactagtacattaaacaggatacccaactggtggcctgtttggcactgctgtttcaacaatgtgaattcttattactgctgcctatattcttaccat

SEQ ID NO: 23860 - DNA, 286 bp, Glycine max
tttaacatcacttcatcaattccgaacttagttctcctgacatggagacctgaactattattatccgatattatattgcataaagcatcttcttcctctcaactacatcaagacacagcattataacttggcactctaactggcatcttcagagttattacttgcacgttttgcaaatgcatagtacctaacagaccatagtactgaaatacttgacaactgtccaaagaacattcagcttaatattacaatattgaattatcaagcctaaatttatgtactataa

SEQ ID NO: 23861 - DNA, 301 bp, Glycine max
tgtggtgttcagtcattcgccaagccaatttagctttgctctatatatacaagtctatacttcctttaattgtaataaaaccctaaaaggctttggccttgcctgttaaatgtggtctccaatcccctcctaattgttgagtgtagtgaagcaattaatgaatgtcttgttcattacaagcacttattgttcaagtgtttcattaacactgaagatgcttttatgttctatggaagcacttatgtccctctaataaagatgcattttattttaatcattgttttatgcctaattttcaagc

SEQ ID NO: 23862 - DNA, 189 bp, Glycine max
tttcagttattacaactcacaattccataaaggcaccagtctatatttaaacggatacattccaacacctcaactatacacgacccaaacttacatacacttacatccaactacaaatctctactatcaccaaacctaacatcaattcactgaccgtcattatacaccctatcatacttctaaaaccct

SEQ ID NO: 23863 - DNA, 266 bp, Glycine max
cctatattcaaactcataatatcccatattcactatatcccacttacaaacctaccttcataaccatactatatttcccatacataattccaaatacaactctaaaaattatcttatcatacaacatttatcatatcttcaaaatcacattaatttccacactaaaattaatacacactaacttcatatttaaaaacatattaaactatcaactcatccaaatcttatacttcttcaaaaaacacttcacaaatcttaattattat

SEQ ID NO: 23864 - DNA, 297 bp, Glycine max
tgctgcattaaactacagatttacaggttttcatcctatggactcaaacatcatattttgtaagttttataaggtgatctccaatgagatgaataccactccttcaagaatattccttttataactaatgacattcaatttaataatgttttgacaaactttctttaaatttacttcacaacttacaattttatatttttttctactaaaatttcaatactttaattaaatcttatttttattttatatcctcttataatttatacatttttaaatttctctttatttacttttact

SEQ ID NO: 23865 - DNA, 324 bp, Glycine max
aaatttggttttcagagatcgtcaaaactgtcaagcgatcgggattcctattgagcatggctattccttgccttatattttctaacactgctctatttactgcttatacttgccacaagctaaagatccttactctcctgacaccatttattacataaaatctctgtattctgcataagatataaagcttttcatatttcatggatgttaccttcctcctaaatgtgcccatatccttcatatatcaaccatgcttcttctgaaaggtacatatataggactcactcctttactcttatgaagcattatcttgtatagaaacac

SEQ ID NO: 23866 - DNA, 283 bp, Glycine max
ccactcttccttactactgctttaatacattttaaaagaaagctttctaattgtcctatttgccaatgtttatagggagctcctgctccttttcttccataatctttaaataaaaacaaataaattatacttatatttacttcttttatattcatcctattcaccctaattttctttttaattctacaacacattatatctttaaatatatctacaacatcttctaattaaattcaacttatataaatattctattattttcaaaaactatcaacatattatc

SEQ ID NO: 23867 - DNA, 328 bp, Glycine max
aatttcgatttccagagatcgtgaaaacggtcaaagtatcggtattccaattgatcatggctattcctagcctgatatttttgaatactgctctttctactgcttatactgtccacatgctaaagagccttactctcctgacaccattgattacataaaatctcttgatgcttcagaagatataaagctcttgaagtttcatggatggtaccttccttctaaatgtgcccatatccttcgtatatcaaccatgctttttctgaaaggtacatatagaggactcactcctttcatcttatgaagcatcatgtgtatagaaacactgaat

SEQ ID NO: 23868 - DNA, 329 bp, Glycine max
gcacttgatccaaacttcaataagctctcaatggatcacatattttcagcttacaagcttacggcaactatagcaatccttcttgactatgatggtacactaatgcctcaatcatccaccattgataatattccaagcattaaatccattgaaattcttaatagtttgtgtatagataagaacatcatagttttccttgttagtgctataaacccaaagattcttttccaatggtttttcttccttgttaaaatcttgttaatttcatcttatcatttttactttcttaataattaaactaaaattaatatattttaaacacatttttt

SEQ ID NO: 23869 - DNA, 119 bp, Glycine max
tattgactttctctaataataataacaaaattgggctctggttttcattcaaatggactacaaccaaatcattacatactattatcattcatactataatttattacttaataacaata

SEQ ID NO: 23870 - DNA, 148 bp, Glycine max
ctcatacataatctcactcctctactactcataatcaatacaccaaatcccttactacccctcaacctccaaactatcattaaatattataatatatcctacatttaaccataaatatattatcatacctaaattcactatacctcac

SEQ ID NO: 23871 - DNA, 192 bp, Glycine max
aaacagaacaggaactgactcttggaaaagggctctcgggctctataatctttcttttttcatttaacaataattacacattaaataacaaaatccacaattataattattcttatccaacttaattttattaatcattcttacatacaattttttatctttaaaataccaactattaactttaaatttatc

SEQ ID NO: 23872 - DNA, 254 bp, Glycine max
tattcattctctattgtcactttgctaccggttctttcaagattcatatcttcttcaagaccctcaccgtaaagaccattacccttgacgtggaaagctctgacaccatctacaacctcaattccaatatccatcacaattaatgaattcccctctatcatcaacctctcatctttttctaaaatcatctctattactttcgtaccctctcctactacaacatccataatgattcaacccttcaccttttcctt

SEQ ID NO: 23873 - DNA, 348 bp, Glycine max
ttcaactctgtcacttataaaggatcttttgctactgtttatcggcataaaacccttctctctgttattaatataatttcttcatatcttaaacttcacacttttgaagaagtggcaaatcacaaccataccaatgattgctgtctcatcatttctttcaatgtgtattatgtcacccctttcatgtatgatcatcccttatgtgatgaagttttgttatctgcaacatttaaatattcatccaattacttttaatattttattcacatttattctgctataaatattatttaaaaatactacattttttaatatttattccataaccctttccactaaaacgtacct

SEQ ID NO: 23874 - DNA, 246 bp, Glycine max
actttctctttctaccaaattgtacttgataaagtttgttattcatacccacacttcacctttcattcaaataacatgtgatcaatcatcattttaattattaatctacttttaattgataccctatttataatagtcttcttataatctaaagttttctctaaaattttccacttattttcatatctaatatttttcttttcttttttactcttgtaatcatttttttaaactttattattattt

SEQ ID NO: 23875 - DNA, 317 bp, Glycine max
tgctctttaaatgttccgtaaatatgctgcacactaggtcttttagtgcatggtcgtatttctcttcctccattcaaccatcctgctcctattccaatcaagcgcgagggaggatatgaaagactaagggttggttatattagtagtgactttggtaatcatcccttgtcacatctcatgggatctgtttttggtatgcacaacaggaagaatgtttatgtgttctgctatgccttgagtgttaatgattgtactgaatggatgcaacgtattcagtcttaaacatatcactttgtatatgtatctgccatgttatt

SEQ ID NO: 23876 - DNA, 329 bp, Glycine max
ctgcagagacacagaagggactttttcaatttctgtcatgcgatcatccttgcctccttgcaactgtatttcgggcgaaatgattcaatcatatttcctaatcttcatccacccataataaaaagaaagatagatcaaagaaacaagataatctacagaaaaaagccattcacaaaaagttgtacataatattgtatgcatgataattgaatgaaggtgttgaagactctttatcatcatccatcgtgtacagcatggattcatcatcttcaggatctcaattattttaacacccacaactcccaccttgttttctatttctaccccac

SEQ ID NO: 23877 - DNA, 191 bp, Glycine max
atgtgtttctgatttcatgtaaatgtttgatgttggtgtaccagctatggtgagaaaggtgtttcatgaagcaaggcattgttcacctagtatagtatttattgatgagattgatgcaatttgtctagcaaggctgtttagtttttctggttcaaatgattaacgtgtatgtactttaattcaattgtttt

SEQ ID NO: 23878 - DNA, 318 bp, Glycine max
aatgtgggtttttccgtttttactctactccctatttctcggtgacttgctatctttatatagctcttctactaatcaaacacatatttacatactcacctatctttcaattctatttattcaatttttataatctctaattatatacccactctttttatcactctatattaaaaccttctaactaaatattacttctcacatatacccttctacattctcttattcattattccatatttatttatataattctattaatctcttaacttattgctaaaaatatttaatcctacataccttaacttttataaaata

SEQ ID NO: 23879 - DNA, 402 bp, Glycine max
gtacgcccacgcgtcctactgctgcttttacggctttatgggatcataatgaagaaatgtgatctttgaaaaagtacgtatggttagagtgacaatgttcatgtgctttttgcatggatctcaaattcttttttctattgcctgcatcctttttttaagacattattgtcaatatgtaattattacctatcatgggaaacttatatctcactgttctatgttgtattggttatcactctttactttgaatccatcgacctgttttcgacttcctgtatgaccttttccttacttttgttaaggttttttcttgttttactttctaagtaatttatgctaatttttgaaaattatatcttaataatctctattacataattctaattactaacttactaaatt

SEQ ID NO: 23880 - DNA, 251 bp, Glycine max
tttaagaggtttgaaggggccagtgacaatggttgtgaatttacaaagttgagtgagccacggagaatgataagatcctttatgatggagaggtgggggtttgagaagactaatatcatgaaagaggattggcttattgtttatagtgatcaaagttttgtcatgctcataactagacctaaaggtggaattaggtctctttgcatttacttggatgaagttaatgcttgtatagatcttttattttattt

SEQ ID NO: 23881 - DNA, 321 bp, Glycine max
ttataaggcttgcggtaaccatgacagttggtgccttcttgatcagggcctacagggttctcaactcctccaactttctgcttctctgcactctcagtggtggtggtgtagtggcatactcagaatcacaatcaggacctgaacgtcctattattgaagctaatgagcctgccaaaaagaaagtggcggttcttgtaacaggatgggctgctcccagtttccttaaggatctggatgcttcattatatgatgttcaagttgcttcaccttgtaactactttgcatttactcccttattacccattgtcacttgtggtacaa

SEQ ID NO: 23882 - DNA, 428 bp, Glycine max
tcgaccgcgcgtccggccacgcgtccgcgacagaaggggacttgggttatacaagataaaaaccatacaccaaactcagccacaatggaaaagttttttataaaaaaaaaataagaggtacaaaagttggaaggaattgggataattaagttccatggttatgtcatggtgtcatttcacaccaaaataaaactaacttacaataagttaattatataaattctatcacaatcttatattaatttaccttaaaattaggatcaagatgttgaacccttgtcctttaaagcattacctccactttaagagaaatttgaactcatgataagaggatgggttattttacttgatatgttatttgaaatggaaactataaacaaaaaataattggagattattaatgaacaaagtcaccaccccttaaaaac

SEQ ID NO: 23883 - DNA, 211 bp, Glycine max
cccaataggaaaacaacactgagaaatctgggaagttttaaaggcagttcctcctccttcaccttcttcttccatggactttaactttgatatcaactgttcctctccttacatcactgcaccttctaaccctcaacgctttatcaacttctactatattactcccactatccctactctcatacacttctcttctttcactcctaacacc

SEQ ID NO: 23884 - DNA, 299 bp, Glycine max
ctacggcacgcatacgcccactcttcctcccacgctttcatagcttttctataagacgacagaaggggataacttgaccggttaaatagagactttatgagccctaaaaaaacaataacaaaacataacgtgtaggataaaaaagatagaatgatcgcttaaacttctctctctttctttgatgcttctttccctatattcatcccttgctctgagtcgccttaacacaaaaatggattataaataaataaccaccctacccaacaacaacttttgttctttacaagacataacattct

SEQ ID NO: 23885 - DNA, 177 bp, Glycine max
attcacaggaccactctacatgaatatgaggttctgataaagggtattatctcctatgccactcttatccctcatctcatactttatcaaaaactcataaagatggatcacatcatattgtgatgttcacatccgcaaagctatgttaaactaaattataattactcgaacacaatc

SEQ ID NO: 23886 - DNA, 382 bp, Glycine max
  modified_base (25)..(25): a, c, g, t, unknown, or other
ttggtttttcacaaagctctggcanaactgagagccgtgagctagctatctaagatttaacacacgaaaattgaagcaaaactacacaagatatttatttcttgttgaattcaccaatattctttatgcaatttcaccctctaccgagtaggtcacgcgtgcagcatggaagctgaaaccaattctccagaagatgcatctgctatggtatgtctttctaccaaagtttttaatgactggattcatgcagacttcgcttgctattacatgtatttagctgaagtaaatactttgattagttatctctgtccaaagtcttatgtatgtttctgctagatgctccttgtatatttggttatgctgtaatatttcttccggtcta

SEQ ID NO: 23887 - DNA, 371 bp, Glycine max
tgcacagtagtctctcatcttcggcctgctccacgatcctatctgcgacgccgctaatatcaaagtggggagattcgtatttcgtaacgctatccaccttctctttcggtcattcaattttatctctgtaagaacttatgccttcaaaactgctgggcagacgggctcaaggaaatgctagaggatgagactggttatggatttatatctatcactccattctttgtcaggtgctgattacacttcccttgcacactacccaaaatagtgtctaatctcctacattccctccttggtttcttaatgtgtgctatcatgacaccgctaagttgggagatgagctagtgcagatcatccttggtccaggtctg

SEQ ID NO: 23888 - DNA, 194 bp, Glycine max
tgttatttaattctccttgtgggagcgagaccttgtttgggggggatgttgttttcaaagttaaatcactccaggtaagatttatttgttaacttaaatcttatctttgattgatggattgaggtaaagccacgtgtgtgttgcttaaagctatgatagcacccaaaaaattacaaattctaacctggttacgt

SEQ ID NO: 23889 - DNA, 345 bp, Glycine max
cacccgcccaccttaaattcactcttacattttttatatctaattaaaaataacttaacatacatataaacatttttatcgttatttctactcaaccaaatcttactcttattcccactatcaaagacctaattgaaaacactctctcttctcaccataacaaactcatttctctcctctccacgtatttatctcaacacaaaacatttttcaaccccataatttcattaatcaacttgacaacatccttttcgatgatcaatcaatatttgatcttaaaaatattctcttttcttaaatctttaatttcttaaactaaaccatacttttacctcctttttttac

SEQ ID NO: 23890 - DNA, 374 bp, Glycine max
gaaaatctgattcaagctgaggatgttcaactgtcaaaatctgaggattcacagggaccactctacatgaataaggatggctctgataaaggggtattatctcctaatgccagctcttatgccccttcatctcatacttcatcaaaaactcatgagaagatgggatcacatggagatttggtcgatggttcagcatcgggcaaagctaatggggaaacgaaatctgtaaattcacggggaacacaatctgggtcagatttggttggaagcattccagcatcttctgctcttggtttatctccaagttcatcagttggttcactgtcttctgaaaaatcaactctgaatcccaatgcaaaagaattcaagcttaa

SEQ ID NO: 23891 - DNA, 387 bp, Glycine max
gaatgcacagtagtctctcatcttcgtcactgctccacgatcctatctgcgacgccgctaatatcaaagtggggagattcgtatttcgtagcgctatccacctcctctttcgttcattcaatttcatctctgtaagaacttatgccttcaagaaagctggacagacaaacaaaaggaaatgctagaggatgagactggttatggatttatatctatcactccattctttgtcaggtgctgattacacttcccttgcacactacccaaaatagtgtctaatctcctacattccctccttggtttcttaatgtgtgctatcatgacaccgctaagttgggagatgagctagtgcagatcatccttggtccaggtctggaacctggaatt

SEQ ID NO: 23892 - DNA, 347 bp, Glycine max
ggtggcagagagcgaacccaaaactagagctgccttcccttcaaaccttccactcttctctccttttccaatcaagggaataatatttcttagagatattccgaaaccatggctcacgccaatcctatgatttttgttgttggaattctaagtaaccttgtctccttctgttgctttctagcaccagtaccaacattctatcgagtttgtaagaagaaaaccacggaaggtttccaatcacttccttacgtggctgcactcttcacttcaatgctttggatattttatgcttacataaagacgggcgaaatacttctcatcaccattaacgcattcggttgtttcat

SEQ ID NO: 23893 - DNA, 439 bp, Glycine max
acggattcggaattccgagccacgacccacgcgtacgcgcgggtgcttgcaaaaaagacgacagaagggaaccatgaagagatatttgaagttctggcagcagtggctgcatctttgggggatgtaatagatgatgtgaacactttgcaggtaacacctttaaagggggcaatgaccaatgaggtttttgaggtaaattggccaaccaaaagtgatggtcatcaaagaagggttcttgttcgattatatggtgaaggtgttgaggttttcttcaacagggtggatgaaatccaaacctttgagtgcatgtcaaagcatggacagggtccacgccttcttgggaggttcaccactggcagagttgaggagttcattcatgccaaaacactctcagctgcggaccttcgtgaccctgaaatatctgctttgatagcatcta

SEQ ID NO: 23894 - DNA, 387 bp, Glycine max
  modified_base (378)..(378): a, c, g, t, unknown, or other
gaagaaatacaagcacataggcctacaagcaggaaagagttggactcgcctaatcttacagggtcttgtttatctacatgaacatgatcctccagtaattcatagggacctcaaatgtgataacatttttgtcaatggccatcttggacaagtgaaaattggtgacctgggtctagcagcaattctccatggttcccaaccagctcacagtgttataggcaccccagagttcatggcaccagaattatatgaagaagaatacaatgaacttgttgatgtgtactcatttggcatgtgtgttctggaaatgcttacatctgattatccatatagtgaatgtgctaaccctgcacagatatacaagaaagtgacatcggngaagctacc

SEQ ID NO: 23895 - DNA, 65 bp, Glycine max
gaaagttttttttttaatttgttaaaaaaaatatgtgttacggattaatttaaaattaattattt

SEQ ID NO: 23896 - DNA, 386 bp, Glycine max
  modified_base (350)..(350): a, c, g, t, unknown, or other
gaaataccactacttttaacgttattttactgattccgtgaatcggaagcggggcactgcccctctttttggacccaaggtcggcttcggccggtcgatccgggcggaagacattgtcaggaggggcttttcaggtcaaagaagtgcaacagagtgagatctgactcataatttggcgacactcttgaaaaaagaggttacttggattttgtgaggttgtcttgtagttggagtcatggcgggtgaggttgtgggatttgagatggttcaaggaccagtggagaatggtactgagggaggaaaacctgttttgaatgagaaggagaatggcaagcttgaaaaagatgtgngagctgctgcggatgccatcaatttggacacatgga

SEQ ID NO: 23897 - DNA, 393 bp, Glycine max
gagaccaaacaatactcagaacctgattaaggagagcgtggcacagtttagtggcaaaactttggtgcagtggttggtagcaacactgctgattgccttgttgggtggtgcacaagctgttgtgttatgtaacatcgactcaagtcaactaaacttgtgtcgtgctgcagttactggtcaaaaccctccaccaccagatgagaaatgttgtgcagttattcgccaagccaatttaccttgcctctgcagatacaagtctattcttcctttaattggaataaaacccgaaaaggctttggccttgcctggtaaatgtggtctccaatcccctcctaattgttgagtgtagtgaagcaattaatgaaggtcttgttcattacaagcacttagtgt

SEQ ID NO: 23898 - DNA, 330 bp, Glycine max
  modified_base (233)..(233): a, c, g, t, unknown, or other
atcacaattgaactataaccattaaagtttcttacaatatataacattacaattcatattttagtaaaatgtcattgcttcaatttcaaaactctatctctgtatctcacatattatgggagttactccattcaatgggttgatcgcttaatccatatatacataattttgataatttatctaaaaagcctattatcttttgctatgtcaatagttctattaacttccttaantaaaaatcaaatattgaatgactactaatttatcttaataactactaatccaatccaattctctactaaatgcattcttgatcaataaatgactata

SEQ ID NO: 23899 - DNA, 279 bp, Glycine max
cagctggctactttaaaaatcaagaaaaaactaacgaactgttcaaagtttatgagaaaagtatgcgctcgttttatactggtgatattgggcaattccaccctgatggatgtcttgaaatcatatataggaagaaagatattgtcaaacttcaacatggagaatatatctctctccgaaaagttgaagcatcactatcatcatgtgattatgtggacaatataatggtttatgcagacccctttcacaattactgtgtggctctaattgttgcttcac

SEQ ID NO: 23900 - DNA, 358 bp, Glycine max
aggggcactacagatggaggaccgtattggacggagatggcgtattcatctttggatggagatacacgtatggattagaccattgatatttgtctaactgcaatgattgattgatcgatgccattcatgggtctactggaattaccatctccaacaattacatgactcaccatgacaaggtcatgcttttgggccacagtgattcctacactcaagacaagagcatgcacgtcactattgctattaaccactattgtgaaggcctagctcaaagaatgccaatgcgtacgcatggatattttaatgtggtgaacaatgactatacccactgggaaatgtatgccatacagggaagtgc

SEQ ID NO: 23901 - DNA, 374 bp, Glycine max
aatgatgccaatgaaaatcatgctgtcaaaccacccatgttgcagaggggggtgctcaggaccaactgcatagactgcttggatcgcactaatgttgcacaatatgcatatgggttggctgctcttggccaccagctccatgctctgggagttattgaccacccaaaaattgatcttgatgaccctgtagcagatgatttgatggggttttatgagcggatgggtgatacactcgcacatcagtatggtggttctgctgctcacaacaagattttctctgagaggaggggccagtggagagctgcaacacagtctcaggagttttttaggactcttcaacgctattatagcaatgcatacatggatgctatgaa

SEQ ID NO: 23902 - DNA, 335 bp, Glycine max
ttagttcaacgagatggagcaaatagggcacgcaacagttgaagtgaatggcataaaaatgcatgttgcagagaaaggagagggtccagtggtgttgttcctccacggcttccctgagctctggtactcatggcgccatcagattctctctctcagctccctcggctaccgcgccgtcgctcccgatctccgtggctacggtgacaccgaaacaccaccttcaatcagcagctacaactgcttccacatattgggtgatctcgttgcgcttattgactctgtgggtgtccaacacgtgttccttgtggctcatgactggggagccatcataggtt

SEQ ID NO: 23903 - DNA, 319 bp, Glycine max
atcactgagtttcagaccaaccttgtgccataccccaggatccacttcatgctttcttcttatgctccggttatctctgccgccaaggcctaccacgagcagttgtcggtgccagagatcacgaatgccgtgtttgagcccgcgagcatgatggccaagtgtgatcccaggcatggcaagtacatggcttgctgcttggtgtaccgtggtgatgttgttcctaaggacgtgaatgctgctgttgccaccatcaggactaagaggactgttcagtttgttgattggtgtccaactggattcaagtgtggtatcaactacc

SEQ ID NO: 23904 - DNA, 387 bp, Glycine max
gatgtaatagaaggtgtcaaaacacttggacggtaggctccatctcaaaaaaatgggtggtttagctagcaatcttcctctaattgttatggtgggtctgcaaattcattatgcagcacttgctatattcacaagagccgctttgttagatggattgagtacgacggtctttgtagtgtacaggcaaggcatagccactttggctttggcgcctatgtttttctctcctaagcggagacaatcagtgaaagattctttgggattcaggagcttctttttgatgtttgtgaccgctcttgttggagtcacagcaaatcagaatgcatactttaaaggtttattttatgcatcctctactgcagctaccgctatgagtaatctgatacc

SEQ ID NO: 23905 - DNA, 362 bp, Glycine max
gcacaagtgagtttgttgatcgagataactaggaacagggtgatgaaaatgaaagtccttgttttcttcgttgctacaattttggtagcatggcaatgccatgcgtacgatatgttccctctccgaatgaacactggctatggtgcccgtactccggaggtgaaatgcgcaagttggaggcttgctgtggaagcacacaacatctttggctttgagaccattcctgaagagtgcgttgaagcaacaaaggaatacatccatggcgaacaatatagatcagactccaaaacagttaaccaacaagcttacttttatgccagagacctcgaagtccatcccaaggacacatttgtgttcagtat

SEQ ID NO: 23906 - DNA, 380 bp, Glycine max
ttctttcctttgttcttccggtttcgctttcctttcttgttcttgccactatcattagaatttcctccatatgtctaagcttctagggcttgatcaaaggatctcatgagtttctttcattgagcctgaattcttgtacctcaagtatcccttgcaactcttccaccttcatccctttgagatttgtgccttattttattgcaaccttctcttgatcttgtcaatgatcatcacatcatatactttcttctttaatttgggtttgcaatttcagtttctttaatttgtcagcacccccataagactcatcaagaatttccctttcctcctttatagtattagcatacattactttatcaaagttatctacatctacactt

SEQ ID NO: 23907 - DNA, 381 bp, Glycine max
gggagtgaccaatctaccgtggatgacggggggtcaggggatgcagaaaataagcgagccaaaaccactgagcttgcacagttgcaggtggagcttcaacgcatgaactctgagaacaagaagctgaaagagatgctcagccatgtgaccggtaactacaccgccttgcagatgcatcttgtcacattaatgcaacagaaccagcagcgaacagaaagcacggaaaatgaggttgttcagggaaaggtagaggataaaaacgttggtgttggtggagggaaggtaccaagacagttccttgatataggtcccagtggcacagcagaagtagatgatcaagtttcggattcttcttctgatgaaagaacacgatcgagcaca

SEQ ID NO: 23908 - DNA, 356 bp, Glycine max
  modified_base (346)..(346): a, c, g, t, unknown, or other
gagagcttaaagcttagccgatctcgtggttctttgtacccctcaaagcaacatgggggttgccaatttctctgtcttcctacttattatttctctaagtttcttccagttgctgagaatttctgaatcaaaattacccaaagaagaagttgatgctcttaaagaaattgtgagcacaatgggtgcgacatattggaagtttgatgctgattcctgcaatattgaaatggttggagtaacactagaaccaccagatgaatcagagagaagaattggttgtgattgcagttttgaagacggcactgtctgtcatgttgtgaacatgactctcaagcgccttagtctnaccggcatac

SEQ ID NO: 23909 - DNA, 385 bp, Glycine max
ggatttctattgttgcagttgcattgcagccggagccaagtgatccctcattgatcttccctttcctcaaagtaagttaagttgcctttcgtcttctcctttttccatgcatactttttttctgtctttaattccgtacttctggtagtcactgtttttttccttaagaatcttgtttacagatactattttataggcttagcgtagaagttccgttaataattacaatgattttttattgcacgggaagaatttatttacttttttttcgcatccagttattttctttcaggtaatcatacaaacagtaaggtaaacaattgttgaagtgtttttctgtgaattgtaataacaagagtattgttaatatttttttaataagtat

SEQ ID NO: 23910 - DNA, 374 bp, Glycine max
gaagtggaagaagagaaacgcgcatcgcttaggtacagatacagatacagacacaacctggaaaaaattccgaccccagcccttcactcttctctctgcagcggaggttagggtttctttctttttttcgttttctcaatcttcacttcgcttgcgctatttattgctaattttttcgttctttgtgtgtccgacccaatccaccttcaatttctcgcttcgttttgtctttgacttgctttgacttttttcttcttctcacctccgagcatctgaaaccgttgtacatcctctgatttcggtttctttctcttcaataattgctcactttcgctgcaattgctacttttttttaaaaatctttttactatttc

SEQ ID NO: 23911 - DNA, 375 bp, Glycine max
catgctctgcatcagtctgctgacttgaaacagctgcgggaacttgaagagcttatagcgactgcaaaacaaggcaacaatacactgtgtgaaagtgaaacccataggtcgttgccacaaaccaaatcagtttctctgagtaatgggagctctagtgaaacttgtaagatccaagatacattgggcactcgggctgaattatgtggtgatgctactggtgataaatcagagacatgcctaaagtctgctgataattccaacttaaagcatgaatcacatgatgaatatagagagtctaataaatctgatggccaagtgaatggaagccctgatgttcttgatacacttagttacaattctgaatcatgtaatgac

SEQ ID NO: 23912 - DNA, 385 bp, Glycine max
ttcgagtggccgctttttttttttttttttttttttttttttgcaacctcagggtggggaaaacctaaacccccaactctttaaagggccaccaaccgccgcccgaataactggagtgtaagaaaccctccctttactcaatggatagcgcttatcctctttcaatcaaccaaatgaaaaatggagtggaggaaaaagaggtctttattgattgaagaggctttgcacctaggactaataaagatccagaagaatgggtctaggctttcgaaaagatgaagatgcaaagggtaaagagaaaagaaatgtcttttgaacaaccaacctggcataaggattctagctcgcccaattagagcagatggatattctccgacggggaaaa

SEQ ID NO: 23913 - DNA, 347 bp, Glycine max
ggttctagtgtgtgggggcgtgttgttgtaactcgttcttcttcttttgttgttctgtgtttgtgtttgttttttctctcacctgaaaatgtcttgctgcggtggtaactgtggttgcggaagctcctgcaagtgcggcaacggctgcggaggctgcaagatgtacccagacttgagctacactgagtcaaccaccaccgagaccttggtcatgggagtggcacctgttaaggctcaatttgagggtgctgaaatgggtgtgcccgctgagaacgatggctgcaaatgtggaccaaactgctcctgcaacccctgcacttgcaagtgaggtgttgggagagcaagct

SEQ ID NO: 23914 - DNA, 387 bp, Glycine max
ataatatgaaagactttatggtatttgtttggggtgggagtctagtatatgatttcccacaggctgttgtcatcaagtataatgtaattaattttgcatggtttcaggtcaccttaggaatttcaacgcttctttcatatgtacctgtttcactgggcactgcacatcaggctggagccttgacacttctgacatttatgttacttcttaatcacacggttcgaagaccgtctttgtcccttctcaaatctctgcctcaagttggaaaagcacactaattgtttcccgatattatattgcatcaaggcttaggccttttaagttgacaaaatctgtggctattattttttccatgctaaattttgcgttgagctccttctccaattt

SEQ ID NO: 23915 - DNA, 388 bp, Glycine max
attttaatatatcggatttttcgatatttaaatcgcggatctccatcacttgtagtgatttatcattcaatgaatgattgactgacaaaatgattcacttatcaaattttaatttaaagttttttagctaaaaagaaaataactttgctttttcccttctttttaacccccttaaatgaaaaaaagggttcccccacttggatagggaactatgcgagtgacctacctaatcttattgtagaaattttcaggatcaatgattagaccatgcaaactagaaatgctttttcttgtataaaggaagggattactcgatccatttccatatcgatcatgatatatataataattcgagcacccatttcaaacgcatatccaatttttgcac

SEQ ID NO: 23916 - DNA, 383 bp, Glycine max
ggagtgagtagtgagaatggagtttcaagggttaccgggaggtggcattgctagtatactctctcgcactacgccggcggacgtgtgtaggttttccgtcgtatcaaagattttccgttcggccgctgaatcggacgctgtgtggaaacgttttctcccttccgattaccattccatcatttcccagtctccttcgcctctcaactatccttccaagaaggagctctatctcgctctctcggatcgccctatcatcatcgatcagggtaaaaagagctttcaattggagaaaaagagtgggaagaagtgttacatgcttgctgctagagctctcagcattatttggggtgacactgagcaatactggaactggacaaccgata

SEQ ID NO: 23917 - DNA, 328 bp, Glycine max
  modified_base (10)..(11): a, c, g, t, unknown, or other
attttaaaannaaaaacccgcccccccatttttaaaacacccatacacattcatacacaatctttaaaaaatttctaccccaatccttcactcttctcactccatacatatattacaaattctaatctcctttactcaatactcaaacttcacttctcttcaacaatctattactaatattctcactcattaactaacctaccaaatccaccttaaaattcccactaaattttatctcacactaactatcaatttattctttttttcaccccccagcatctctaacctttaaacataccttcaattccctaaactattctcttcaata

SEQ ID NO: 23918 - DNA, 388 bp, Glycine max
attggttctttaagtagacatggaagggggcgatgctctcctagaacttaagtgtttgaatctaagaaaaaccatgattttcttgttaactcgaccacgttacaagcttaataaagtccttagtgatccatatcgtgtgtgtgattgcattgaataagatgatgtgcagagttggggattataacttcagtcgacttaaatgaaatacaaataactgaaacacttgtgtgcttgagagaaacactagcctcgtgagagtgaaacatagttgatctttctgtgatacttatcgtacttgctaacctacttcaatctctaagtgcattctttgcatgattccatcatgaaaaccatggcaattgtgaaattgagggttggaagctgaaat

SEQ ID NO: 23919 - DNA, 392 bp, Glycine max
gactcaatcagacatccgagtaaaaagttatgggcgggggaatttgctcagagcttgagtaatccatttcgagcgtctcgatatattacaggactcaatcagacatccgagtaaaaattttctgtcgtttgaatttgctcagagctacaacattcaatttcaagcgttccgatatattacgggactcaatcagacatccgagtaaaaagttattgtcgcttgaatttgctcagagcttcaacattcaatttcgatcttttcgatatattacgggactcaatcagacatccgagtaaaaagctattgtcgtttgaatttgctcagagcttcagtaatccatttcgagcgtctcgatatattacaggactcaatcagacatccgagtaaaaatt

SEQ ID NO: 23920 - DNA, 86 bp, Glycine max
ccggtgaagtgttcggattgcggcgacgtgagcggggcgctgcccgcgacgttgtgagaagtccactgaaccttatcatttagagg

SEQ ID NO: 23921 - DNA, 314 bp, Glycine max
  modified_base (12)..(12): a, c, g, t, unknown, or other
  modified_base (63)..(63): a, c, g, t, unknown, or other
  modified_base (102)..(102): a, c, g, t, unknown, or other
cccacaccttcntctgctgctataaactacataaggggcagttcaattccaatacagcccgcnttttctttttatttccctacctttctcttcaagattcanatcttcttcaagaccctcacccgcatgaccatcacccttgatgtgcaaagctttaacaccatctacatccttatatccaacatccattacttttaatgattttcccctgaccatcttccttttatttttttccttattagcaatttttatggacctctcctaattcttttctttatctacattcatttcatttatttatattttactttttt

SEQ ID NO: 23922 - DNA, 380 bp, Glycine max
gatcactcgggtggcgtgctttggcttcccttgccccgtcttttagcaaatgtttcaatattccaaggccatgttgcttaatttagttcttgtttcctttgtcctcttgagttctatcagagatgggagtgcagggatcaccagctctttcgttcggccacagtggccaggagttgacattcccgtggatcatgaagtatttgcagttccaaagggttataatgcacctcaacaagtgcacatcacgcaaggtgactatgatggaaaagcagtaatagtctcatgggtgaccccagatgaaccagggactcgccatgtgcaatatggcacatcaaaggataagtttaaaactagtgcagaaggcacagttgcaaactaca

SEQ ID NO: 23923 - DNA, 333 bp, Glycine max
actctttctttggaccatccttctctcagattggtctgtacggttttcagcttcaacacagttttgcaccacccaaccttggtgctccacaattttttggcaacatgcagcaaccacactttgctaatggcactactcccactccctggatgccatacttacctagtccacactttcagaacccagcgcctccttttggttatcaacccactatcccacccaatgatggcaccaccctccagtagcaacaaattccacctactgctaacatttcccaggcttagtttccaaattcaggtgcttcacaccatgcaaccaatgatccatataatc

SEQ ID NO: 23924 - DNA, 376 bp, Glycine max
gttcgttcaaaagaaataataaaattagttaagcaccgtcaccatgtgtaatcattttatgatctagtttctgctttaagaaaaatgaaggaaacccaactattgtgggatgtaagaagacgatctccactcgccctagacggagaccaaacgaaacacaatgggaactacaaaataggatattgtttcataagattaagttaaccatggggcttcatgagtggtgagcccgaaattataagctcccattggtgtttgacataagaatgtatacaatacaaaaagcacggatggaagcaaagaatgttggtcatcaagtttggcaagggacaaagtcatgttaaaaatagacgagttgatttcatctacatataac

SEQ ID NO: 23925 - DNA, 52 bp, Glycine max
gagacctcaggtcaggcggggctacccgctcggtttaagcatatcaatgagc

SEQ ID NO: 23926 - DNA, 370 bp, Glycine max
gatctcagggaggcaagaaacaaggcattatggagaaacttgatttagcgacagaatcatcatcatcgtatcctagtaatttgtgggactgtggcagcacgctatatgactcgttcgagctcaactccttcaaacgccaactcgactcagccatagctaattcccctataataagtagaaccctttccatgcctcatttaccggaacgttcacttcacgcgccgccggagcaacctcccacggtcatgtcccgaaagtccttcaaattttctcgctcctttcacaaactccttcgctccgttttcaagtccaacagtaaatccagcaccactaccaccagtttgagtttccaagtgccagagaaatactc

SEQ ID NO: 23927 - DNA, 373 bp, Glycine max
gggcagcaacaaaatcaccgtccttcttctgcaccgcaatgctcttcctcttccctccgtcattagtttgttagttagattacccttttcccttccatgcttacgtcaccaccgctcaccattcactctctttttacccctaaaccattgaatcgatctaaatctctcccaaatcgcaaaccccttttgctcaattgagtcaattctctccctaagttcctctgtcggcgtctgggtgggtaaaagttgttgttttgtcttctgggttttggagcaaagacaaaagatgggtgagggagaacgtttccagcttgggactgtgggtgcgttgactctttctgtggtctcatctgtgtccattgtgatttgcaat

SEQ ID NO: 23928 - DNA, 386 bp, Glycine max
gggctattttcctgggtgaatttatgcaggcggagtgggatatgtttcatagcttacatccaatggctgaatatcatggtgcggcacgagctgtaggaggatgtccaatttatgtcagtgacaagcccggacaccatgactttgatcttttgaagaagcttgcactacctgatggttctatattaagggctaaacttccaggaagaccaacaaaggattgcttatttaccgatcctgccagagatggaaagagtcttctgaagatttggaacatgaatgatttttctggagttattgcggtattcaattgccaaggagctgggtggtgcaaagttgacaagaagaaccttatccacgatgagaatccgggcactgtcacaggtttc

SEQ ID NO: 23929 - DNA, 386 bp, Glycine max
ctgtatgaagaaaagacatgcattaggggcacgcaacgacctcctttctttattagacgaaagataaaagcaacacctactcgtcatgagacaacatatctctaaagtcgaaggcttatataaaccataagtttttgaagattgatagagtttatcttctacgcataattttctcttactcttcttcttcaacaagtctttctgaatattttcttataaaattataaaactctcaaaacaccttgaacatcttgagagaaaaaggttatatgcttagataatttatgtgtttgtaagacaattgagtgttagtctttgagtcatctttcatcataaatttcgtctaatggcttgatagaagaaagaatactggatgttgatcaaac

SEQ ID NO: 23930 - DNA, 240 bp, Glycine max
aaaatataaaaatccattatcttttgtttatttataatcataataattatctattacaattgaatcaaaccttttttttctagagccataccactttttagatcttattctctcaaaaattcaaaatctaactctcaatttctcaaaatctcaccgctaaccgtataaccccctcctctttactatcgattaaataacgccatcactctccttaacaactacaacaaactctcttaccct

SEQ ID NO: 23931 - DNA, 244 bp, Glycine max
  modified_base (12)..(12): a, c, g, t, unknown, or other
tactgctggganagtacgatataagggggtggcatacatctaatctaaaactaaaactacctttcctttataccttacacttttctttacttttcctattattggaataatattttttatatatattttttatctataatttatctcttttcattactatttattgttttttaaattatatttataatatctttataaatttctttattttttatatttttttctttacttttaattttttttt

SEQ ID NO: 23932 - DNA, 387 bp, Glycine max
  modified_base (22)..(22): a, c, g, t, unknown, or other
ggggttttccttattccaatancgaggcgagacatcgattccaaaggtgcgtttctgctgtgctagggtttctgcatcttccacctccgtcgcgatgaaaccaggcttcatctgattccgatttcccttcgctccttctcctccttaacattcatcttcttcgattcctctacaaattatgattattattatgatgaactccatcttcgcctcgcataaccttcgcgtcttcggtcccggcttgaatcccttcgcaccttattgcatcgccaatcactcccttttcctttccctttcctctcgctaaattacaattccctttctttttcctctacaacttctccttctccagttctccgaacatgtaaattcggaggacaccgtctt

SEQ ID NO: 23933 - DNA, 395 bp, Glycine max
  modified_base (332)..(332): a, c, g, t, unknown, or other
ggattaaatcaattaataaaatcacacttggttttgtgttgaaaaccttgagatttgagaaccaaacacgacgctgcgccttgtgtagttgcccaacgccgcgccaccagatagttacacttttttcttcaactcaagagaagagcttccatggagaatgcagacatccctgagaatgccaacgagcattgcccaggtcctcagtctgaatctgctggaaaatctgatgcatgtgaagggtgcccgaatcaacaaatttgtgccactgcccccaaaggacctgaccctgatctggttgccattgcagaaagaatggctactgtgaaacatangatattggtcttgtcaggaaagggaggagttggcaagagcacgttctcttgccaactggcgtt

SEQ ID NO: 23934 - DNA, 385 bp, Glycine max
  modified_base (1)..(2): a, c, g, t, unknown, or other
  modified_base (86)..(87): a, c, g, t, unknown, or other
nnggggggcgctaggagaagggaaagggagaagtagaattatgtgagatagtgaataataataataataataataataataataanntagtagtgtggaattggatcagacctgtttgttagagagagatgtcacgggggagatctgattcgggagggtggttgaggggctgtctggtggttttcgcagtggtctcagcgttgggcgtgtgtggccctgctctttactggcgattcaagaacgccatcactctccgcaacaacaacaacaaactctcttgcccttcctgcctctgtgactgccctccccctctctcgctcttccaacttgctcctgggctggcgaatctctctgtctcagattgtggaagtaatgacccggatct

SEQ ID NO: 23935 - DNA, 385 bp, Glycine max
caagcagattattaacacttgtatgaatgatcagaaggggaggctgtggcctatgctgcaaaagcttggggtcaccatgaaatctgaggagaaggacctaatgggcaaagcattgatgaagcgtgtcatgcaaacctggcttccagcaagtagtgcattactggaaatgatgatatttcatctaccctctccatcaacagcccagaagtatcgtgtggagaatttgtatgagggtccccttgatgatcaatatgcttcggctatcagaaactgtgatcctgagggtcctctgatgctctatgtctcaaagatgattccagcatctgacaagggcagattttttgcttttggtcgtgtattctctggcagagtttcaactggtttg

SEQ ID NO: 23936 - DNA, 390 bp, Glycine max
ggttctagtgtatgtgattgttgtgactcgtgcttcttcgtcgttatcttcttcttttgttgtttgtgtgtttgttttttctctcacctgaaaatgtcttgctgcggtggtaactgtggttgcggaagcgcctgcaagtgcggcaacggctgcggaggctgcaagatgtacccagacttgagctacaccgagtcaaccaccaccgagaccttggtcatgggagtggcaccagttaaggctcaattcgagagtgctgaaatgggtgttcccgctgagaacgatggctgcaaatgtggagctaactgcacctgcaacccctgcacttgcaagtgaggtgttggagagctaaagcttcaagcagaaatggcccttagaaataatgataaaaac

SEQ ID NO: 23937 - DNA, 365 bp, Glycine max
  modified_base (68)..(68): a, c, g, t, unknown, or other
tactacaaaatgtggctttttttcttttctactcattatccgggcctcgttgttctttcgtgttaganaaacttaaacaatggtaaattgccaagccgttgacactgcaactctagtgattcatcaacccaatgccaaagtataaaggttatattggcctgttagtcctaatgaagtgatcaagaccaaccctgatcactatattgctcttcttatcttcaccacattgttctcatccacagacaatgaaaatcgctcaaataagagtgacaacaccaacaccaccaaccctgttcgccttacccgcattaagcttcttaatccaacagatacccttgtgcttgtccaactttatagactaatct

SEQ ID NO: 23938 - DNA, 384 bp, Glycine max
ggatgctgtcaaggcaatcaagccaagcgttgggattggatcatctggagcagggaaaacatttactaaggaggtggttgaaaccatggcatccttgaatgagaaaccacttattcttgctctctccaacccaacttcacaatctgagtgcacagctgaagaagcttatacatggagcaagggtaaagcaatctttgctagtggaagcccatttgatcctgttgaatatgaaggaaaactttttgttcctggacaggctaacaatgcttacatatttcctggttttggcttgggtttgatcatctctggtgcaattcgtgtgcgtgatgagatgctcttggcagcctctgaagctttggctgcacaagtatcacaggaaaacta

SEQ ID NO: 23939 - DNA, 390 bp, Glycine max
  modified_base (232)..(232): a, c, g, t, unknown, or other
  modified_base (357)..(357): a, c, g, t, unknown, or other
ctctattctttaactactacatttttataatcgggaggtgtagtgactttttcttatcctcaagtaaaataatacgatgaaggtgacgggattattcataaataaaacaaaatccgcaaaggttttgagttttaaaaataaatttgggaataaatatcaataaattattattaaataaacaaatttaaataaagaataaagaagcaactttatgtaaagatgtttgtgccgncgtatgttagtatataatttaattttaatatacttattagtctaagttttattatcaattaattaaaaaatttcctgaatataatttcaatatattattacaaaaataatattatgaattgccgntgttaactcttaaataacaattcaaagtagatc

SEQ ID NO: 23940 - DNA, 116 bp, Glycine max
ttcatttccttccttaaatataccgcaccgacttttctcaaagtaaataacataaaataaaaaaaccccctacctaaaaccctaatctctcaaaaccctacatattccgtcaactt

SEQ ID NO: 23941 - DNA, 316 bp, Glycine max
  modified_base (271)..(271): a, c, g, t, unknown, or other
gagaaataatctgtgctgtggtagtggaagcggcgcgggcatcccagcgatggcgagagtgggtaaaatgaagttgggttcacaaggcatggaggtgtctttgcagggacttgggtgcatgggcatgtctgcgttctatggtcctcccaagcctgaccccgatatgattgctctcatccaccacgctgttcaaactggtgtcacttttcttgacacttctgacgtctatggtcctcacaccaacgaactccttctatgaaaggctctgaanggaggggtgagagatgacgttgaattggctacaaagtttggaatc

SEQ ID NO: 23942 - DNA, 255 bp, Glycine max
  modified_base (51)..(52): a, c, g, t, unknown, or other
aaaataaacttaaattcacaatgcatatgacccttcttcccttcaacttgnntacattggcatatctgcgttctatggtcctcccaaacctgacccccatatgattgctctcatccaccaccctgttcaaactggtgtcacttttctttacacttttcacgtctatggtcctcacaccaacgaactccttctataaaaacctcttaaggcacgcgtgagagatgacctttaattctctacaaaattttgaatcaa

SEQ ID NO: 23943 - DNA, 357 bp, Glycine max
  modified_base (29)..(29): a, c, g, t, unknown, or other
gcgggggaaagttaacgaagaaccattcngtggaaatcggcgacgaacgaagatcatcatcaacaacctcacaccctcatcaattcaattcaattcttcgccctataaaatcaaaatccgttacatcacttttcacatccattcctaacctccccaacctgacaattacacgtttctttcagagaagctgacatgccttcagtttacatgggagataggatggataattctaactcgagcttgagttctaattctaaagaaagcagcgttgttgttaatgggaaagaaacgtacaaaaaacttctggttgcatcacggcctaaaggctttgcacagagaaattatgaacaccttgtg

SEQ ID NO: 23944 - DNA, 377 bp, Glycine max
  modified_base (364)..(364): a, c, g, t, unknown, or other
ggtggcagagagcgaacccaaaactagagctacgttccgcttcaaaccttccactcttctctccttttccaatcaagggaataatatttcttagagatattccgaaaccatggctcacgccaatcctatgatttttgttgttggaattctaggtaaccttgtctccttctgttgctttctagcaccagtaccaacattctatcgagtttgtaagaagaaaaccacggaaggtttccaatcacttccttacgtggctgcactcttcacttcaatgctttggatattttatgcttacataaagacgggcgaaatacttctcatcaccattaacgcattcggttgtttcatagagacaagttacctngtcatctatatca

SEQ ID NO: 23945 - DNA, 413 bp, Glycine max
acccacgcgtcacggactgctacaagaatacaaaaaaaggcttttaattatcagaccaaaaaacaacacaaacgttcccgctaaattttcaacctaccatttctttttcaattaattaaataatatttcttagaaataaaaataaaccatgaatcactcctatccaaatatttatcattttacaattctaactaacataatctccttctcttaatttctaacaccagtaccaacattttatcgaatttttaacaaaaaaaccacgtaacgtttccaatcactttcttacataacttcactctttacttcaatgctttggatattttatgcttacataaagactcgcgaaatacttctcatcaccattaacgcattttgtttttttataaaaacaatttaccttttcatctata

SEQ ID NO: 23946 - DNA, 389 bp, Glycine max
gaaaaacaagtgtttcgaatagattatcctagggctttgggaatagtgctgcaatggcttcaagtcaggaggaggtgacccttttgggagctactggaagcccatttgtgtgcagggttcatattgccctcaagttgaagggagttcaatacaaatatgtcgaagaaaatttgaggaacaagagtgaactgcttctcaaatccaacccagttcacaagaaggttccagtgtttattcacaatgagaagcccatagcagagtctcttgtgattgttgaatacattgatgagacatggaagaacaaccccatcttgccttctgatccttaccaaagagccttggctcgtttctggtccaaattcattgatgataaggtttttggtgctgca

SEQ ID NO: 23947 - DNA, 387 bp, Glycine max
gagaccaaacaatacttataacctgggtgaggggagtatggcacagtttagtggcaaaactttggtgcagtggttggtagcaacactgctgattgccttgttgggtggtgcacaagctgttgtgttatgtaacatcgactcaagtcaactaaacttgtgtcgtgctgcagttactggtcaaaacccttcaccaccagatgagaaatgttgtgcagttattcgccaagccaatttaccttgcctatgcagatacaagtctattcttcctttaattggaataaaacctgaataggctttggccttgcctggtaaatgtggtctccaatcccctgctaattgttgagtgtagtgaagcaattaatgaatgtcttgttcattacaagcact

SEQ ID NO: 23948 - DNA, 420 bp, Glycine max
gagaggaagaagtagcaaagcatggcgagcaaggctatggactcaaggcccgtaactaaggcccataagatgtcatccaccaacgacaagttccactgaataacactctctacgttccaactcgggttcaaatacgaaaagtccaacgccggccaccggaacaccggccacggcaccgttagatgcaactccggccaccggaaacttgacgtgtaccaccacctccaggacatcctcgtttgtttgttcctctattctttttcaacctttcttttaatttttcttttttcttttctcttagctgtttttcctttgattttgcctttggaatttcactttcaattgtgatggtgaagcatttattagtcttctttagaaatgagggtcatggaaatgggcatatcaatatctgtgaatgtg

SEQ ID NO: 23949 - DNA, 378 bp, Glycine max
  modified_base (337)..(337): a, c, g, t, unknown, or other
aatgcagttttttatgccaagtcatttgctgacaaaggtggggctaaactatatgttccatctggcaagtggctcactggaagttttaaccttaccagccacctcactctctttcttgaaagaggcgcaaccatcatcgcatcacaggattatgcacactggactgcaatggatcccctaccctcctatggtcgaggtattgatgttcctgttgggagataccgcagtttgatttatggacagaacttaagtgatgtggtgattacagggttctgtttggtgggacctaatcagtactcattccttaaattatagccgaccacatattatagaactngttggttctgataatatcataatctcaaatttgacattttt

SEQ ID NO: 23950 - DNA, 219 bp, Glycine max
atcattattcactggttttagtcaaacttttaactctcgctttctttcttcaaattcaactctcaattccaattcctatttaattatttccattttcccactaaccatctcaaatccaccttcacataatttaactttatactaatgctatatttaactctttttctatttatatccatattcattgatatttactttatcatttaataccaaaaccat

SEQ ID NO: 23951 - DNA, 226 bp, Glycine max
gtcttgctattttattaagtaattatttcatgcggatgtgtggggccttgataatagtgcataatatacaagaatgcgataaatggtgcatcaagaagtgcaatcagaaaattccataagaagattatgttgggaagtttattttttgtacaacttgctaaaatttgattaaattctttatttggtaaaatgtttttttactcaaggttataaatttatcatacaa

SEQ ID NO: 23952 - DNA, 233 bp, Glycine max
tcgaatatacgctcctactgcctgactatttctctgcagattcttgccattcgatggagaccacggtgctctagaaatgactcagtataacatcgagcctattgcccatgtccactctgttaagttctacgaaaactggtcatcctatctacaagcttgtacgtatagactagcttgctattgaaatatactcgaatgttgccgctttaatcaacaacaggtcatttattttt

SEQ ID NO: 23953 - DNA, 414 bp, Glycine max
ttttgggattgatactctgaatcattattcactgatttcatgtcaaaccttgatctctcgctttctttcttcaaattcaacttgcaattccaattcctggggagttggttccattttccgacgaaccatctcaaatccaccgccacataatgtaactgtatgcgaatgcgaatgtgaacgcggtttctatttatatccagattcatggggatttgctttagcattgaataccaaaaccacctttccatctccgattccaacgcgaatcctaaacctgcaatatgtcatgaatctggcgctccattggcttccatgaacatcaaatatcttctttaatgttcttgatacatcaatgttgatatttttacctactatgagcttaagcttgctaccaatcactttctgccccatttc

SEQ ID NO: 23954 - DNA, 392 bp, Glycine max
  modified_base (333)..(333): a, c, g, t, unknown, or other
tagctgagggagtgtcatctatggtcctcataaagatgcgggagattgcagaggcatatttggaaacacccgtagagaatgcagtggttactgtgcctgcttatttcaatgactctcaacgtaaagccaccatagatgctggtgctattgcaggcctcaatgttatgcggataatcaatgaacccactgctgcagctattgcatatggccttgacaagagaactgattgtgttgaggagcgaaacattttcatctttgaccttggtggtggtacttttgatgtatctctcctcacaattaaggataaggtctttcaagttaaggctactgcangaaacactcacctttgaggggaggactttgacacccgaatgtgaactactttgtacagg

SEQ ID NO: 23955 - DNA, 404 bp, Glycine max
gcagccacacttgcaatgatcaaagccaaaagcacaacaaaacaaattattctataaataaggagccatgaaggatcaattcctttaagacaggtgttccatgcttcatcctcatatagcaatccagcttcttcctccccctgattttctccactattcgatcttgatttgttgaatccttcatatttgaatattaaaaaagatgctagagccatggaggctaaaatccatagtgcacagaagaagaacctccaattcaaccaataacttagggtagtagagtctgaagttatggttggttgccatgtatggctagaggactctgtgaagaaactcatgagttatgtgtgctagctttagaattttatgtttcttcttgatgtgtttcttgaaacactatgcac

SEQ ID NO: 23956 - DNA, 288 bp, Glycine max
ggttctagtgtgtgattgtttgttgttgtaactcgttcttcttcttttgttgttctgtgtttgtgtttgttttttctctcacctgaaaatgtcttgctgcggtggtaactgtggttgcggaagctcctgcaagtgcggcaactgctgcggaggctgcaagatgtacccagacttgagctacactgagtcaaccaccaccgagaccttggtcatgggagtggcacctgttaaagctcaatttgagggtgctgaaatgggtgtgcccgcttagaacgatggctgcaaatg

SEQ ID NO: 23957 - DNA, 427 bp, Glycine max
  modified_base (324)..(324): a, c, g, t, unknown, or other
  modified_base (385)..(385): a, c, g, t, unknown, or other
  modified_base (401)..(402): a, c, g, t, unknown, or other
ggaagagaagagagtatccaacatagatggaaacactacaacaaaaaacgttaacacttaaaacacaaacttgtttaggggccacccctctctggggcgccattctcttttttcctttcaaaaagcaaagctaccatctttcttaccatattctctctctctctctctctctctttctcattgctaccctgttggtggataacaaaacttcagcaacccctttgcatctgatctaagaatcccaacttcaagtacccattttttgtcatttcatgatctaggtgatagatcgtgaaaatgacaaggatgacccatgattttggngatactatgcagaaagatgcagttgccgtggtgtcggccgatgtaatatttgcttctcttncgtttcctaattacannaatcgagtaaataatcagatcatgg

SEQ ID NO: 23958 - DNA, 341 bp, Glycine max
gacaacaagttcaagtattcactacatgttattgtccaccacctcaatacgaataccttcgccgaatcggaatttcgaagcaattaaagtgtgctactattccttcactatcagtttccgcctcttctgttcttcgtaacgcgtcgttttgctgcacctcttctgtccactgcaatttaccttcttcacccaaaatcttcgtcaaagggcttcctctctcaacctctgaaggacgtctgatgaaggtgttttcagagtttggtgacgttactctaggtaataataaattctttttgggttggtgttttcagagtttggtgaagttactctaggtaatacta

SEQ ID NO: 23959 - DNA, 327 bp, Glycine max
gaaggtgcaagagtttgttgtgagctataagctagtttatcgtgaggggaatattaagttgtttgttttctttgttgctgcagtatttttgttagcatgtccattccatgtctcattctattaaaggtttcttttttcttatgtaattctttctctattttgctttcttttgtttgtttttttctcttgttttatttctttatgtttaatcactcaacatttttttcctttttaaacttttctcattatttttcttttgtaattttttttcttattttttattttttttttattttattttttttcttttatttttttttttttttt

SEQ ID NO: 23960 - DNA, 373 bp, Glycine max
tatcatctgtagaagatgcccaaagtcatgctgtggaggaaccacttgctgaaacagtccagcaacaaatcactggtaatagtatttcttcctcaatggaaaagccaatgtctattgttgtagaaaacataagttcttcgggggatctcatcagcagtataagccacaaaagtaataaaaagagtatacttcaaccaagtgaagaatctgcagatagtccaggaaatgatgatataatacatgatcttggtcaaaatggaaatcctgcatcactggagaaccaggaaaagacaattgtggaaagcagcttatttgatcttgaataaagtcctgttcttgtacctggcttaccaataccatcaactgaaccaac

SEQ ID NO: 23961 - DNA, 360 bp, Glycine max
gggagcaataaattttttcttcagggcaggttcagatttggaccagatgcaggatcattggccctgacaatttttcttattgctgctcctgttgcagttttctgtgtctatgttgccagaaaactaatagatgatttttctgatcacttggggataaccataatggccattgctgttatattcacaatttatgtgttagttcttctcttgttaacatctggccgagaccctggcataattccacgcaatgcacatcctccagaaccagaaggttttgaaggtagtctagatgttggggctggtcaaactcctcaattgcggttgcctcgaattaaagaagttgaagtcaatggaattact

SEQ ID NO: 23962 - DNA, 361 bp, Glycine max
tactcaattgtcgatattgagagaaaagcaaagcttctaggctgtgcctagtatcgtcctatctatgtgcgattgcaaactccataacaattcctaaaatatatattctaaactttaagggcttaaagaggctcaagttcaacacacaatgactcacctaccttatacgatataaaatcagcttaattgttagggtgagagatttaagaattaaaagtcaagaaagggaattagaggtagtagatctaaattattactaacattctaataaaaattaatacttattaactattaaaataattattttataattatttaaatagcgattttgtaataaatcacaattataattgtattacaa

SEQ ID NO: 23963 - DNA, 375 bp, Glycine max
catcctttgacacactctcactctttccgcgagaggtttgatgaaactctcactggtcacaggaacgaaattttggcccttctgtcaaggcttgaagccaagggcaagggaatcctgcaacatcaccaagtggttgcagagtttgaagaaatccctgaggagagcagaaagaaactccaagatggtgtctttggagaagttttgagatccacacaggaagccatagtgctgccaccatttgtagctcttgctgttcgaccaaggcctggtgtatggaaatatctgcgtgtgaatgtgcacatgcttgttgttgatgagcttcgtcctgctgagtatctgcgtttcaaggaagagcttgttgaaggaagttcaaac

SEQ ID NO: 23964 - DNA, 403 bp, Glycine max
  modified_base (313)..(313): a, c, g, t, unknown, or other
  modified_base (345)..(345): a, c, g, t, unknown, or other
  modified_base (371)..(371): a, c, g, t, unknown, or other
  modified_base (376)..(376): a, c, g, t, unknown, or other
  modified_base (389)..(389): a, c, g, t, unknown, or other
tcagtcagaagctatgtctaggaatactagacaatccacactgccaaggaggttgactttacgaatcttggatcagccaagaccaactataaacatcgatgtcgcaactggctgaggattgggcccatacagagaaattccacaactatctaggggtcgtagttagagaaaaaattccaattctacataatagttggaaagatgtaccggactcgctaaaggacctagtatgggataacattttggcaaaatttgatatccctgaagcggcgaatgcaaagataaaggtgatgtccaccgtggccactagatnggaggcaattaaatcaaccatgaccactaaanttgtctatgctgactctgagaggcangatanacatgatcattcngtaaaacatggcct

SEQ ID NO: 23965 - DNA, 317 bp, Glycine max
ggtaagtttccaaatcgagcttttcaattcattctatgtacccgtggtggtccccatttgtttttacgtgcttttcattttatttactttctgtacccccttttggcgtgctttagtcattttctcatctaatcaaaaaatgaaataaatttcgaccgatcatttgaattgtaatatccgttagtttctgttaaaatgaaatccgaccgttcggtcacgccgtaactacgttggaagccaaaaaaaagggtaaaataataatataataatcaaaaatatcttttaataaaataaatcaaaaataatcaatcgaacac

SEQ ID NO: 23966 - DNA, 275 bp, Glycine max
aagagaaaaggcttcctgcaccgtgcacaccaacttgatacctgtgattctttctttgcttagaattccacagaatatggagactgttcttttcaatcactccccacctttggaattcaagggtttgagcatggaggaggaagactcattgctagggcaagtggaaatatggatgtacatgacatgcttcacggactccgtggccttgaaagctgtcataaaggctcgtatagcggacatactagaccgttatggtaaaccactatgcttgtcgc

SEQ ID NO: 23967 - DNA, 322 bp, Glycine max
gacacgcaactatttctgactacgttttgcgctacgcctctgcctctctctcaaaaatcgttctcttcgattttagggttttgttttgctgctgcctccgttccccccttctcataaacaacgcgttttctcttctgcttcgtatctattctttgcttttggttttggctgattcaaggccttcacagcattcgttgcggcattttaatcgatttatccaagcaggactgaatgaacttatggagtctaacggtgggaatatgacgtctagtaatggtattcgtctatcattggtctactaagctccccttggatacggcat

SEQ ID NO: 23968 - DNA, 405 bp, Glycine max
gacgccttctcagactcagaaaagagaagaaacagaacaaagaagagcagagagagagaggaaccatcaccaaccctaatttcttagctaaaccctattcgtttagcatttcctctcttttctcccactcgtaaatcctctcccaaacttttcagatccaaataaatcatggttttctgggtttttggctacggttcactggtgtggaaccctggattcgattacaatgagaagattataggtttcattaaggactacagacgcgtgtttgatttagcgtgcattgatcaccggggaacacctgaaaacccagcaagaacttgcacgttggaggagaaggaaggtgctatttgctggggagctgcttattgtgttcgaggaggccctgaaaagggaaaactggct

SEQ ID NO: 23969 - DNA, 414 bp, Glycine max
ggcaccgcttcatcactatcaccatcccaaaaactgcatgtgcttctgttcgttttccaaatctcctctttgtttctgaatcttcccttcgctgttgcagagatggcttcgcggtgctggccttctgatgctgagctaaatgaattgagagagagagtttcgaaaatagtggatctgaataaagaggaagttcgagttgtggtatctccctatcgaatatgtcctttgggggcacacattgatcatcagggtgggaccgttgcagctatgacaatcaataagggaatacttctggggtttgctccttctggcagtaatcaggttgtaattcgttctggacagtttgagggagaagttaagttcagagttgatgagattcagcagccaaaagataagactttggacaaagattca

SEQ ID NO: 23970 - DNA, 420 bp, Glycine max
gttgatggactagagatatggagtgctatccagacatgggttaaggactacgtctccttgtactatgccacggatgatgcagttaagaaagactcagaactccaagcttggtggaaggaagctgttgagaagggtcacggtgacttgaaagacaagccatggtggcctaagttgaacactcttcaagatctgattcacatttgctgcattattatatggactgcttcagcactccatgcagctgtgaatttcggacaatacccttatggcggtttcatcctaaatcgtccaactctaaccagaagattgctcccaaagccaggaaccaaagaatatggtgaacttaccagtaatcatcaaaggcctatttgagaacaattacaggaaagactgaggcccttgtggacctaacagtgatag

SEQ ID NO: 23971 - DNA, 422 bp, Glycine max
gaaggtgcaagagtttgttgtgagctataagctaggttatcgtgaggagaatatgaagttgtttgttttctttgttgctgcagtagttttggtagcatggccatgccatggcgcaggctaccaaaggttccctctccgaatgaaaactggctatggtgagcgttcttcggaggtaaaatgcgcaagttttaggcttgctgtggaagcacacaacatccgagcctttaaaaccattcctgaagagtgcgttgaaccaacaaaggactacattaatggcgaacaatttagatcagactctaaaacagttaaccaacaagctttcttttatgctagtgaacgcgaagttcatcacaacgacatatttatattcggcatagattacaccgtactctttaatatcccatactatgaaaaacatggat

SEQ ID NO: 23972 - DNA, 298 bp, Glycine max
atggtacactgtcactggaaaattgggttaaatcatagaagagggattggtcaatgaccatctttatcccacagacctcaaaaatcaaggtactttcttgaatttcaaggttagaataaaagacttgtaccaattcaaaatacacgtgcagttttgaagacataaagggaatgagatttgagttatgaaatgcttgaatgcatttgaaactctcatcagaaaagaaatccatatctatgaacttagggtcaatgatagaacatgacgagaagaggtttgtgtaccatgtatgtttgtc

SEQ ID NO: 23973 - DNA, 347 bp, Glycine max
agaagggccttattgagagtcagattttctgtttgcatggaggtctctcaccatctttggatacacttgataatatccgtgccttggatcgcatacaggaggttccacacgaaggaccaatgtgtgacctcttgtggtctgatccagatgatcgctgtggttggggaatatctccacgtggtgctggatatacatttggacaggatatagctgctcagttcaatcataccaatggtctatccttgatatctagagctcaccagcttgtcgtggaaggattcaattggtgccaggacaagaatgtggtgactggttttagtgcacccaattactggtaccgatgtggg

SEQ ID NO: 23974 - DNA, 420 bp, Glycine max
gggggtatccattaaccaagcaatgtgtatgttcggtttttttacaatgttataaatgcgaagtatttattgactttgtgaatcaatgactatctaaaatttattatattacctttaagggaatctttctttacaattacgtttttttcttatctacaaaacttgaatgtgagattttatcggagtccaattccacttacactaaggtaatgttgctaaggaatgctttatgttctaaatactaattattcactctctcccttgtacaatacttaaccaactaacaccactacagcaccaaacgactcctttgttgctctggcctttcccttaaagaaacagaaagccaatgcaataatgtcaggtaaaagagcacactaaattggtgctgaggactggcttataaaggttatatccctc

SEQ ID NO: 23975 - DNA, 358 bp, Glycine max
gacttcgctgcacgccaaacattgcactgcgcgaaaaggttttctccctctgcttctatcatttccttcatgttgggtatttcattcactttttttccccatcttttttcgaatccctttctctaaaaatttttaaatgatacagtctggcttggtaggtcacacaagtttaaacattacattccgtaagcgccttttctaaaatcttcgattacattctttagttttcttttgagtatttaaagcccttaattcaaccgcgacgaattatgatgcttacgaggcaaatcggtttgtgctaacgtgtttgtatttatagatagtgtctctctttgagtctctgtaatgaatgtaattc

SEQ ID NO: 23976 - DNA, 363 bp, Glycine max
ggaaaaaaaaaagagtagagtggataatggcttcgttatcgctttgcatagccatgagagcacccactccctcagcttctctcattctcactaccccaaaaccatcttcactctctttgaaccttacccgcacttgctccagcgctcgctctccgctcctccattgctccttcctctcttctccttcccatctctcttccccttcctccgtttcaggcttgtcacttggattggatttgacatctaatgttgggaccagaagaggaaaaggttctggcctagttgtgagggcaggcaaggctgctctttgtctgacttagagaagcagatcaagaaaattattggcacgcacttatgggtttc

SEQ ID NO: 23977 - DNA, 406 bp, Glycine max
gatattgatcaatccatcatttccaattaggtaaagtgaaacagtaaaagagcaatggaggaggaggaggaggcggagaaacagaagaagcacttagcaatgctggaacgcctttccaaacgcacccaaagccgttcgcaaaaccccgattcctcatcatcagaatcctccacttcctccatcctttcacgcttcacccacttaaaatcctcgattgagtcccaactcgcccaatcccaatccatttcctccgaccccttcaacctcaaactccacttcaatcaaatctccgaatcaatctccgatttagaaaaattcgtcgccgaaaactcctacttcctacccttctacgacgttcgaaccttcctcaaaaccggcttcgacttaaagcacttccttgacgacc

SEQ ID NO: 23978 - DNA, 386 bp, Glycine max
ggtgaactgtatgcatcaaaaggtgcatgtacggctcttaaggaaaaagatggaatcctaatcaatcgactttatcgagaaagattactttttttaggtcaagaggttgatagtgaaatatcgaatcaactaattagtcttatggtatatcttagtatagaagaagagaataaagatttgtatctgtttataaattctccgggggggtgggtaatacccggaatagctatttatgatactatgcaatttgtacaaccagatgtacagacagtatgtatgggattagccgcttcaatgggatcctttcttttggcaagaggagaaattaccaaacgtttagcatttccttacgcttggcgccaatgattcttttatttgagaatata

SEQ ID NO: 23979 - DNA, 427 bp, Glycine max
aagaagaactagtctaagcagaaatggcctcttcagtgatggcatctgtggccctcaaacctgcccctttcactgttgagaagtcctcagttagaggccttccctccctctcaaggaactcctcttcattcagagttgtggccagtggtggcaagaagatcaagactgacaagccttatggaattaatggtggcatggctttgagggaaggagttgatgcatctggcaggaaaggaaagggaaagggcgtttaccagtttgtagacaaatacggtgctaatgtcgatggttacagtcctatctacgacaccaaggactggtcttcaaccggtgatgtctacgctggcggtacgactggcttggctatctgggctgtgactctacttggtcttcttgcttgtggtgcactttttgtctacaacacaag

SEQ ID NO: 23980 - DNA, 231 bp, Glycine max
tgtgaatattaactagtctaagcataaatggggtcttcgttgatttcaggtgtggcgcttaaacctgcccctttcactgttgagaagtcctcatttatatgccttccctccctctcaaggaactcctcttcattcatagttttttccagtgttttctataatatcaatactgactatccttatttaattaattgtttcttttcttttttgtatggattttattcttctttc

SEQ ID NO: 23981 - DNA, 386 bp, Glycine max
ggtacaagatatatgatgctaataacaatggatggatgttacttgattgatagaagttttaattttcgaagggtccaaatgagatttccttgcagaagtacaaatgatggtttgggcgagaagacccaccacttcacattacttgatggtgagatggttattgatacattgccagattcacagaagcaggagagaagataccttatatatgatatgatggcaatcaaccaagtatcaataatagagcgtcccttctatgaacggtggaagatgcttgagaaagaagtgattgaacctaggaatcacgagcgacataatatatatcaaagcagaaatccttactatagatatgacctggaaccgttcatggtgaggaggaaagactt

SEQ ID NO: 23982 - DNA, 438 bp, Glycine max
  modified_base (423)..(423): a, c, g, t, unknown, or other
ggagggtgtgaattctaaaaggaaagaacagctgagctggtcagaaaatcaatggcatcatccttgggttttgagttcctgacgaagaagccttacagtcctccatcctgggcatcccatctccaccctttaccttcccacttcttctctcttgcccatcttcccactccaattcacagatggaaccttcccaatctgcccaccaataccgagctgtggatcaagcgagacgacctttccggaatgcagctgagtggtaacaaagtgaggaaattggagttcctgatggccgatgccattgcgcaaggcgccgactctatcatcacaatcggaggcattcagagcaaccactgtcgcgccaccgccgttgccgccaagtatttaaaccttgactgttttctcatccttcgcacctctgacctnctcgtcgatcaagat

SEQ ID NO: 23983 - DNA, 445 bp, Glycine max
agtctcttgttttgttggaaacaatgtgtttaaggaaaaagctgatcaaccagtgatattctcttaacaaatattctaaggccttatctttttcttgatcttgtttgcttgacctttaatcaatctttaatcaatttctgtttgtttaaccttaaatgtttgttgaaacaatcttatttgattatacttttggcatcatcaaaacctgtattcatacatttacagaaataatcttacctggaaaagagagtacaactctagtgagctgtttataattatttttttttctggaatatagcatatcccaaacatattgtcccccttttcttattatatctttggtcagtataatgtcattactgatttattatcattttttaatcatttgaaattctttgctttgcaggatgagagtgttataactttgcgggacctgaaaggtggt

SEQ ID NO: 23984 - DNA, 336 bp, Glycine max
gggagggagaaaagaaaagggtggtgaatgtgaaaatagagggagcatgtggaatggttgtggtcactattatatatgttgtctcttacgctttgcatgtgactttctttctttctttatatcctttatatattaagtatatgctgcaatatatttaattaaagagagaagtaacatcaaggtgcagagagaggaattgaagcatgggaagagggaaggtggttctggagagaatacagaacaagatcaatcgccaagtaaccttctcaaagcgcataaatggtttgctcaagaaagctttcgagctatctgttctatgcgatgctgaaatcgctc

SEQ ID NO: 23985 - DNA, 339 bp, Glycine max
ctttaatctacctatttttatactatatctcagtataaatttttatttttttacttcttttattgttattaatatcttctattttattttattatattcttttatttcttatttatttattcttttttatttttaatactttttattattattctttttttatttcttttttttttttttatattttttttttttatttttttttttttttatttaattattttttttttttttttatttttttttttttttttattattctattatttattattattttttttttttatttattatttttttttaatttttatttcattatttattatattttttttt

SEQ ID NO: 23986 - DNA, 337 bp, Glycine max
gaacgttgaggattattgggtgcacgggggattgggatgagactctggttagggttgggtgtttcaacaatgggttggttgaggttcacttggagaagcttcaggttaccgatgtgggacttgttgccgtgtctaaatgttttggtttggacactttgcacgttgtgaaaaccgctgagtgctccgatgtggggctttgtgcggttgctgataggtgtaggttgttgaggaaggttcacattgatgggtggaggactaataggattggtgatgatgggttgcatgcgattgccaaacactgtcttaatttgcaagaactcgtgttgattggtgttta

SEQ ID NO: 23987 - DNA, 361 bp, Glycine max
ggatgaggagtacgatgtgatcgtgttgggcacgggtctcaaggagtgcattctcagcggtcttctctccgtcgatggcctcaaggttctgcacatggacaggaatgactattacggaggagaatccacttcgctcaatcttattcagctttggaagagattcaggggagatgacaagcctcctccacatttgggagctagcagggactataacatcgatatgaaccctaagtttattatggctaatggcaatttggtgcgggttctcatacatactgatgttactaagtatctctctttcaaagctgtggatgggagctttgtgtttaataaaggaaaggttcataaggtgcccgcaaat

SEQ ID NO: 23988 - DNA, 423 bp, Glycine max
ggcaagagtttgttgtgagctataagctagtttagcgtgaggagaatatgaagttgtttgttttctttgttgctgcagtagttttggtagcatggccatgccatggcgcaggctaccaaaggttccctctccgaatgaaaactggctatggtgagcgttcttcggaggtaaaatgcgcaagttttaggcttgctgtggaagcacacaacatccgagcctttaaaaccattcctgaagagtgcgttgaaccaacaaaggactacattaatggcgaacaatttagatcagactctaaaacagtttaccaacaagctttcttttatgctagtgaacgctaagttcattacaacgacctatttatattcggcatatataacaccgtactttttaatatcccatactttgtaaaacattgattttggg

SEQ ID NO: 23989 - DNA, 145 bp, Glycine max
gtttgttgtgagctataagctattttggcgatattagaatattaggttgcttgttttctttttttctgcagtatttttggtatcatgaccatgccatttctcatgctaccataagttccctcttttaattaaaactgtctatttt

SEQ ID NO: 23990 - DNA, 421 bp, Glycine max
  modified_base (298)..(298): a, c, g, t, unknown, or other
agacgacagaagggatctataacttgaagtaacaactgcttcaactgtgggatccaagccatcataaaaagtttccaaatattcatctgactatctgagggtatagataaaaaattgaaacttggtaaaccttcttttggcatgcttgtatatgccttatcatgtatgaaaattagaaaaacttaattacatgaagcacagtgacatttatacagatttcatcctcacaatacatttcttcgagattcctagttgaatgtgccttcatcattcataaaaagttacatggtactactgngttgtaatcaaatgactcgcggtaaaacttgtgaggagtttatgaagataaagcttctaaggatcatgaacatgtgtagttctcagagcactgtgttgttcatcagaaggatatcttactttt

SEQ ID NO: 23991 - DNA, 345 bp, Glycine max
gctccgccgccgcggttgcaagcagagcacaccagtggaaatgggcgaagcgaaggcgttggttccggaatcggtggtgaagaaggagaagaggaacgaggagtgggctttggagaagaagcaggaactcgatgccgcaaagaaaaagaggttcgaaacgcggaagctgatttttaacagagccaaacagtactcaaaggaatacgacgagcagcaaaaggagttgattaggttgaagcgtgaagccaagcttaaaggagggttttatgttgaacctgaagctaagctcttgttcatcatcaggatccgtggtatcaatgccatggatcctaaaacaaggaagat

SEQ ID NO: 23992 - DNA, 432 bp, Glycine max
tgaccgaggatgaaagaaggcaattggaagatgcactaaggttggagtcgacagacttgaacaatgagagtgatgaggtgatcattgggcatcgtcacagctgttatgaagaaagagaaattcctattgaagatggaaattgtaacaaaagtggagaaaataagcaagaaaagaaaggatggtttggtggatggaggaaaaaggattctaaacctgaagcatcaaagaagattgctccaccgagaagttctctctgcgtagaagaaaaggtgagtgatttattgggggattctccttcaagaaatcagagtaagccaggaagacattctgttgagatagctgtgaggggtgatgagtcacggaggagaaaagatgccaaagcttcttctgcaaatcctgatagcagaagtcgtcaaaaggatggaaatcgtg

SEQ ID NO: 23993 - DNA, 363 bp, Glycine max
cttctttaccaagtaagccttcgttgtccagtgggttatctaatggcggaagtgtctcaagagactttgacttaaataatggaccgggccttgatgaagttgggagtgaagtcccaacacgtagtcagccaatgaaaagtactgtaccatttccaactgctgttcatggcacgagagcaaacaatgctgaatttgggaattattctgcatggtttcctcctggcaatacttattctgcaattactgttccaccacttctgtccggcagaggagagcagagttatgttgctggtgctggggcgcatcgtataatgagtcctacaggtagtgctcattttgtcctgaatctacaggggaccagtg

SEQ ID NO: 23994 - DNA, 384 bp, Glycine max
gagtgaaggatgaggagctacagaatgtgtctcgagaccttcgggcacgtgattcaactataaaagatatagcagataaactctctgagactgctgaagctgctgaggctgcatcatctgctgcttatactatggatgagcatcggagaattgcttgtgcagaaattgagcgtttgaataaagattctgagaagcagcaagagctgtttacacagaagctgaaggagtctgaagaaaagattgggggcttaagcaaagaatgagagcaattaatcaggcatagagatgctgctattcatgaagcaaatatgtggcgttctgaactggcataagctagagagcatgatgtgatcctagaagcatctgtagttagagcagaagaaa

SEQ ID NO: 23995 - DNA, 346 bp, Glycine max
ggtgtgagagagcgagcgagcgagcagtttcaaagagaggatttgggattgggaaggcgagggattgcgctgcgtctcttcctcttctctttcgattcatccctcattcataatcttccaatccaacaacctcagcctcacactcacacatacacacatctgaacgcgtatcgtccctcccatggcttcaaagcgcatcctcaaggagctcaaggacttgcagaaagacccaccaacttcttgcagcgctggtccagtagctgaggacatgttccattggcaagcaacgattatgggtcctgctgatagtccttatgctggaggtgtattcctagtcactattcac

SEQ ID NO: 23996 - DNA, 224 bp, Glycine max
tactccttagttcatcacaaccctacttcatctatgtttaacatatctatcatattcctcggattttttttccttccttcaatctactgctccaattaaatgttcctacttcactcacgctttcattttacaccactaaatttcactcttgcatacccacatcctttctcttaccattccttgtcatttttttcatctatataatctttttctctattcttttt

SEQ ID NO: 23997 - DNA, 54 bp, Glycine max; identical to SEQ ID NO: 3720

SEQ ID NO: 23998 - DNA, 430 bp, Glycine max
aagacgacagaagggggcgtgttcttctttcaaaacccggttcatctttcttttttgttgctgccatattcctcccattttttttccttccttcaatctgctgcttcaatggaaggtttggcttctctcagggttccctttcagaccacccaattccactcttccagacccagaacctctattcttccatcccaagccatttttttccacaaaagaagctccttttcatccttttctgctagtgcccaggtggagtctaatgatggttcagctacagtagccacacctggtgaatctgtgacagaggctctgaaaactaaggagtgggaagtgggaatgttccaaaacgaggttgcagctagccaaggtataagaataaggagaagaccaccatctggaccccctttgcattatgtaagaccctttcaat

SEQ ID NO: 23999 - DNA, 292 bp, Glycine max
gcagttctcaccagcagggcagttttgggaaggatgaagaattatactatctatgctgtgtcaatcaccattcgtatagtgtttggtttcatgtttattgcattgatttggaaatttgattttgcactcttcatgctgttgattattgccatactaaacgatggtaccatcatgacaatatccacggatcgagtgaaaccatctccaatgccagacagctggaagctgagggagatatttgccactggtgtagtgctaggagcttacatggcactaatgacagtagtatttt

SEQ ID NO: 24000 - DNA, 442 bp, Glycine max
ggcccacccccttgtgtctgcctcttctgaaacgccactatttctgctttctctctcattaataataatattattgccttacactttttccacaatggagttgggaagcatactccattttcttcaggacaagaacattttgatcactggagccactggctttcttgccaaagttttgttggagaagatattgagggtccaaccaaatgttaagaagctttaccttcttctaagagctgcagatgccaaatctgccactcatcgcttgaacaatgagatcatagggaaggatttgtttagggtactaaaggagaaattgggtgcaaattttaattcctttgtctcgaaaaagttgactctggtacccggggacatctctcgtgaagacttgggattggaggattccattctaagggaagagatttatgatcaaacagatgtc

SEQ ID NO: 24001 - DNA, 286 bp, Glycine max
tggggcctacccacttgtgtctgcctcttaggaaactccgctatttctgctttctgtgtcattaataataatattattgccttacactttttccacaatggactctttaagcatactccattttcttcatgacaagaacattttgatcactggagccactggctttcttgccaaagctttgttggagaatatattgagggtccaaccaaatgttaagaagctttaccttcttctaatagctgctgatgcacaatctgccacttcatcgcttgaacaatgatatcat

SEQ ID NO: 24002 - DNA, 406 bp, Glycine max
gggggcttatcgattggccgattttagtttttaagatcttgagagagaaaaacatagtactgaagacaagtctcatgttagagatgtacaaacgagaggatacaattatacaaataactgtattaaaaaaataacaaataagctgagttagagattttagaaaggtggacacgattttcattattgatgtgtggtccagtccgtcggaagaaacatgttgtcgatgctatgtcctattactctggaccatagatgttggaaagttttggtggacccatttgcattctgggataaaaagaatttaggttaaattcggagggtcttaactctttaagtcttatatatactaatatacttatgaaatgatcgaggattacttattctgaatcctgtcgtatttcgtacg

SEQ ID NO: 24003 - DNA, 391 bp, Glycine max
gattcacatactataatactacgatagcgtagactcttcccagttctgttgtgtgagtctgtgagtctttcttagctgatatggcggttgatcgctcccttacgaggtgctgtagcctcgtactgtggtcgtggatgttgctgaggatgatgatggcgcagggtgcagccgcgagggccaaccggaaggagtgggactcggtcataaagttaccggctgaaccggtcgatgctgactcggatcatgaagtgggaacacgatgggcggttcttgtggctggttcaaacggctatggaaactacaggcatcaagcagatgtgtgccatgcgtaccagttgctgataaaaggtgggctaaaagaagagaacataatggtggttatgtacgatga

SEQ ID NO: 24004 - DNA, 325 bp, Glycine max
aaagttacaggctaagattttatatcatgaacttctgagaggtattttgctccatccttagtttgaatgagcaaaatgtgatgaatttatttggtgagtcatgtcaatgaaagtcaagaaatttgtaatgccacatttaccatggtacttgtctgctgctctttctgcatatggatatccatggcctttttcagtgacaacatggagcagcacaggaccagttgttttagtacttttaacttcatttagaatggacacaatatcatctatattatgaccatcaacaggacctatttagtaaagtccaagctcttcaaataatgtt

SEQ ID NO: 24005 - DNA, 381 bp, Glycine max
aaagatagagcatgactattatcaagatataccgatgtgtgtgtctgagttctattttttaataataataatttgttgtctgtgtgcttgctcagtcagggtttgtgcctcttagcacaacataatatcgcattcacaactttaccaatagatttattggacctttgatgtaatagcttccatcctatacataaataattaatatcagggtttgatgctttgtctataatttgtagttttagtttgaaattcttcagtcaaggttaggctgttattggattgcaagtggtgtttttcatgcttgtgatctgacaatagaaatgtatttggtgcataatattactgatctaggatcattacgagttccatgtccctaactag

SEQ ID NO: 24006 - DNA, 240 bp, Glycine max
gaacacactgcagcgagaaccaaagagagatataagcttcttccagtttccgaaatcgaagcattagggttagggttttttccgatctgagaaattcgcggtccaatggctgtggaacctgagagcaccgtcaccaccggctccgccgacgaatctctgctcgatgagatcaccgataagctacacggccacgattcttcggcctcttcatcttccgactgcgactcctactccgaaaaa

SEQ ID NO: 24007 - DNA, 411 bp, Glycine max
gaaaaccattcggcacaacatcgaaatttccccattgtccgggtccgcaacgaaataactctaccgtgccctacgataaggggtttctcagagcaggagcaatgtcttccccttatctacctgccacaactgactcacttgctctcgcaactgaggccaaagacccatctgaggccatctccattctttatcgggtgcttgatgatccttcttcttcaccagatgctctgcgtatgaaagagcaagcaatcacaaaccccactaagcttctcactgatgagaataggggagaggatctgcgcagccttcttactcagttgaggccattcttcttcttggtacctaaagcaaaaactggcaaaattgttaggggaaatattgactcggttgctaaaatttcaggggcatttg

SEQ ID NO: 24008 - DNA, 461 bp, Glycine max
agacgacagaaggggacagacacaaatcacataccccatttccaaccccacattgaacctaggaaagcaatgtcacctcgaccattttccccccctctctctatttcccttctctttgtcttcctgttagcaccattactcttagctcaatctccaccttctccttctccttcttcttcttcttcttcttctgttgcctgcaaaggcacactatatccaaaactctgccgttccattctctcagccattcgttcatccccttcagacccttatggctatggcaagttctccataaaacaaagcctcaaacaggcaagaaaactagccaaagtctttgaggactttctccaacgccaccaaaaatcaccttccctcaaccatgctgagactgcatcacttggtgactgcagagacctaaaccagctcaatgtggactacttggcgtccatatccgaggagct

SEQ ID NO: 24009 - DNA, 432 bp, Glycine max
ggggaattgggagtttcattttcattaatttttatgtctccccttttctcaatgcttttcttaatgttgaatccttcacaaatcgtcaagagttagcccacccagaacaacaacgcgtttcagctggccacacacattcttaatttttttggctggcctatagtaaaaactcatatcaatgtcctcaagaacgttgaggagaagactccatcatggggatgttgatggcaaaaggcaggagcatttggagacttcgggattagattcgttgagtgagcccttgctggcagatgatgattatattgagaataagaagatatgtactcttgaagatctatgggatgatgagaggaagaaggcccagtttcattggacattcatattctcaaacctcattgcacaatgggcacagtggttagcaaatgttgtact

SEQ ID NO: 24010 - DNA, 368 bp, Glycine max
ggagaaagaaagaaggaaagcaaagtagacgagtgattgcgtggcgattgacgacgacgaggaatcatgtcttccggcggcggtggtaagccgttcttctgccacgtgtgcagtcagaggattacgtgctccgatgagtcggaaccattctgcccgatgtgtatggaaagtttcgtagaagaatgcaaccctaacaatcccaaccctaatctcttccccgacagtgatgaatcttcggatcccgaactccccttccaccgcttctcacttctccctctcttgctctcatcagtctctaggtcccgatccgaacccgacgtgttcgacccgattgtcttccttcagaaccaccttcatgacctttgcgc

SEQ ID NO: 24011 - DNA, 386 bp, Glycine max
  modified_base (366)..(366): a, c, g, t, unknown, or other
acaggagacgagttgcttcttcaagaaggccatggtagaagtgtatatggtttggctttccacaatgatggatcattggctgcatcttgtggactagactccctggctcgtgtttgggacctccgaactggaagaagtatccttgcactggaaggtcatgtcaaaccggttctcggcatcagtttttcacccaatggatatcatctagccacgggtggtgaagacaacacttgtcggatttgggatttgaggaagaagaaatccttttatactattcctgctcactctaatttaatttcacaagttaaatttgagccacaagaaggttactttttggtaactgcctcgtatgatatgacggctaangtttggtcaagccgtgactt

SEQ ID NO: 24012 - DNA, 354 bp, Glycine max
gatactcaggaaataatggactgtccgggaaagtgtctgaggattcgggtttgacggttgttgcgtttgaggtcaacccggattttgatcttcaatctacagttgtttctttctctgatcccaaggagaataatttgaaccgctttgagtttctttgtaccaagaaacatccagatttctctgtcaacaagtctgtagttgatcttttttctaaaaatctttcgaggcttgatgagttgaagtccaagattgatagcttccctcgattgattgttactggacgttgtcttggaagaccaattgcttttcttttcactttatcggtattaggtaaccagaatttctcttagaaaa

SEQ ID NO: 24013 - DNA, 297 bp, Glycine max
ccggaatgaccgaatcgatccatacgttcgtataacactacttaatgggccatgtaccaatttctttttcaaaaaatccctgggttaagggtatatggggtggcttttcacaatgatgtatcatttgcttcattttggggactaaactccctggctcgtgttttggaccctctaacttttataaattttccttttatttaaagttatttttaaacctttttttgtttaatatttttaccccaatgattatttttaaaccctgtttgttaatactacatttttttgatttttgatttt

SEQ ID NO: 24014 - DNA, 311 bp, Glycine max
acaggagacgagttgcttcttcaagaacgccatggtataaggggatatcggttggctttccacaatgatggatcattggctgcatcttgtggactagacttactggctcgtgtttggggcctcagaactggaataagtattcttacactttaaggtgatgttaaacctgttctgggaatatattttttacccaatggatattatttaaccactagtggtgaaaacaacacttgtagtatttttgatttgatgtataataaatcctattatactatacttgattactctaatattattttacatgtttaatt

SEQ ID NO: 24015 - DNA, 361 bp, Glycine max
gggctcaagctttatttcacgtagctgactttacggtcagctcaattggaatagtttttcgctatgttcgcaggcaagtgagacgatccatcaatgcccttatctgcttcgaaagaaccggtgtcatccaaacatggtgaagaggtggcaactggatcaataatagctgaaacttctactgtacagggttcggcttgcccaactgtccaagcttgagatctattttagaatatgcttaacacaacacatgcaattcgaacgttgttttcttggaaagatttgaaagtaactccgttgggttcaatgcccgctagtcccatgcatcctttctgttggtcaacaaccaaccacaagtcaatcg

SEQ ID NO: 24016 - DNA, 415 bp, Glycine max
atgttccggttatagatgggaaaatagttggtatgattgccattgtagatgtggttcgagcagtgatggagcagcagagtggagaattgaagcgactcaatgactacatcagaggacaatactattagcaaaagaattcaagcatggatacggatttgatgacacgaacgaaattcatgtaccaaaacagaatacacctttatatttcataatagattgaatttgattatattttataaattgctagtaacaggtgaataagtttccttttatttttttagaagaaaatcttttccgaaaacgtaaattataaattataaagttgataatctccattcacaccaaaacatgtaacattcgagctgtgacactaagtcagttgaaaaatgatattcaatattctcttttccccttt

SEQ ID NO: 24017 - DNA, 351 bp, Glycine max
gtacgtcgagtggtacaattcgcgtggcattagcgcacttaccttcgtcgtcgacgtcaaggagcttcttcgattcgacctcggccacgtgctcgagacccgaatctctctcctcgccgaccacctcgattcttgggtgtctcgcgaggagcacgatgggagggaacgctgtctggtttttcacactttcagcaacacggattggtctgtttatggttacattcttgcccgaatgctgggtagcgaggaactcatggagaagattaagggatgcattgctgattcgggaggaggagaacctatcaatcctaacgtatgggctgctggtttttctgcagctatattaaagaa

SEQ ID NO: 24018 - DNA, 410 bp, Glycine max
ttcgttcatcaatcagttagttgttattttagagttttaaattcgctcgatgcacccttaggggtcccttttgttgctttacacatctttatcttcattcttctaccatcaatgatctcatttccttgtgtaaagcgagtttcgaccaatcgtttgtgccgtaatctcattttatcattgtaaaataaagttttgatagatcgttcgtgccataatctcattttatcattgtaaaataaagtttcaaccgatcatctacttcacaagttgtcttttaatgagattgaaagtaaataagtgaaaccaaagttaaaatcaacatgtaatcgagcttttatccacaaaagtcgcttgaatctgtttaaggtctaacgccttatcggtctcttttacttgtatttgttaaatga

SEQ ID NO: 24019 - DNA, 362 bp, Glycine max
gacaccctttatagcaatggagttggacctctgatttctctaagtctagctaggattgagaaacaagaacaatatcaacgacaacgagttgaagagagtggttttttcaacttttaataatggcggtggagtatcagtgttgtgaaactcagtttttcttacggttattgataattctgctgcttgtgttgtttgctggattgatgtcagggctcactttaggactcatgtccttgagtcttgttgatcttgaggttctcgctaagtctggcacccctcaggatcgcaaacatgctgcgaagatattacctgttgtcagaaatcaacatttgttgctttgcacccttctaatttgtaatgct

SEQ ID NO: 24020 - DNA, 406 bp, Glycine max
gggcagacagattcaggcaccttttcaaccgttgactccttcttctgcgtcaccgtcaccatcataatcaccatccctttccttattcttcttctgtttcatccctctccccattttctcgctctcgtttcttgtcctctactcctttctccatggcttctgattcccctttccctgtcaccgctcaaaacatcaaccccaaggtttgtgttgccttcaattctctttttcagacccacccggattgttgttttttggttttttacttctggccgtgctaaagttgcaagctttgaaggcttttttttttttaatctgggcatgtgtgatgttgaattgatgtgtatggttttgctttggtttcttctcttttagtttgtgcatgatgtgtaacgtgtttatttgt

SEQ ID NO: 24021 - DNA, 435 bp, Glycine max
cccacgcgtccggcgagaagacgacaggagggggactgtcttccccgtattctctctccgagcttcactctcttcgcctctgccaaagggagtaaaatggggttctcctcctttctgggtcgtgttctctttgcctcccttttcatcctcactgcatggcagatgtttaatgaatttgatgccaatggtggacccatctcgaaagagttgattcccaaactcactgtggtgaagaaaaatttgtcctctaaattgggggtagcactaccagatattgatgcccggcaattcattgctactatcatatttcttaagggggtaggagggattttgtttgtgtttggcagcacatttggatctttcttactgcttttgcatctggcaattactactccacttctgtacgatttctataactatagacccggcaagcct

SEQ ID NO: 24022 - DNA, 378 bp, Glycine max
cagaaaagggtgttgtgaatgttttgtaggtatgggcgtctttgctattgtatcgccaaatattggacgagatagaagctaatgattacaacaatttcactagaagggcttatgtgagcaaagccaagaagttactttctttgccagctgcatatgctagatctatggttcctccatcaaaaaagttatcttctgtaatgaagacataaatcgagcaccttatggcattctgtagaaaaatggataaggaggaccacagaaaatggaaaggcacaatttgtatatgataaaacaaggcatgatattagtcaatattggattttgatattcatatttccccgtatttttttacataaaaaaagtttggactaatatttt

SEQ ID NO: 24023 - DNA, 382 bp, Glycine max
ggattgagtcagtccaacaataactaaaaacccgtgactcagcccactcttgctttgcttggcctaaccgctaaccaaaccaaagctctctcaatggcttcggagcaacacgacgccgttttccgcgaagaagacatggacgacgacgacgacgagtctcaggaggacgaagagtacgaagaagacgacgacgaagaaaacgtgccctctccctccaccgctctcgctgtcaccgtcgccgtccccggttccgccgtctccaacggcggcggtggctctccaatttcgaagcccaccgccaccgccaccaccgccaccatcgtcctcgccgactcatccgatccgaagcggcgtcgcctggagctaatcgaggagaaaaagc

SEQ ID NO: 24024 - DNA, 389 bp, Glycine max
gaaacgcagtgtggaggatgccggcacgttgtgaaatatgctgcgagataatgatcgcgatcttgatccctcctctcggagtttgctttcgccacggttgttgcagcgtcgaattcatcatctgcttgctcctcacaattctaggttatattcctggtataatctatgctctctatgctattatcttcgtcgatcgtgaccagtactttgatgaatacaggcggcctctctatgcacaatactgatgataattttagtttgtatgcctatgagtgatgctcatgttgatcgtgtgcttaattactgacaatttaagctcgtgtgcttgttgaaattgatggtttgtagaatttattgtttacgctctcgaagcttcaatgacttttatg

SEQ ID NO: 24025 - DNA, 393 bp, Glycine max
  modified_base (18)..(18): a, c, g, t, unknown, or other
gaccattcttcgcagcanacacgaaaaggttcttgctaacctcctcagtccttattccacttcaatcgcaattatttaatctaacaaataattgaaatcgcgattgattgcagtgatcgagatgctggggaagacgaggaaggtttcggcgcgtggcgaagccgtggtggcgaactacgccttcggtccctccgaagatgacgtaatcatcaaacacaggcttctcacgcgcaccaccaccaccaggggtgaccctcccttgaagaagcttcagaagaagttcaccacgttcgtctccgaagtcgacaaagacgaagacatcaactacaacgactgcgagaagctggctagagcgtttctgcaggagctgacgacatttcgaatccgcttctg

SEQ ID NO: 24026 - DNA, 395 bp, Glycine max
gtttgtaagctgttggaatgcgactttggcgaaagcaaatgtcattctcccagcagcataatgcagatgtttcaaagctcacttttctgcttgcaaccccagggtgattcgtacacgcgaagatctgcttttgattcaatgttggctggttgtatacctgttttcttccatcctggctcagcatatacacaatatacttggcatcttcccaagaattacactaagtattctgtcttcattccagaggatgatatccgcaagaggaatatcagtatagaggaaaggcttagtcagatacctcctgagcaggtgaagatcatgagagaagaggtcattagtctcattccaagactagtatatgctgatcctcgctccaaattagaaactcttaaaga

SEQ ID NO: 24027 - DNA, 389 bp, Glycine max
  modified_base (287)..(287): a, c, g, t, unknown, or other
gcacaagtgagtttgttgatcgagataactagaaacagtgtgatgaaaatgaaagtccttggtttcttcggtgctacaattttggtagcatggcaatgccatgcgtacgatatgttccctcttcgaatgaacactggctatggtgcccgtactccggaggtgaaatgcgcaagttggaggcttgctgtggaagcacacaacatctttggctttgagaccatttctgaagagtgcgttgaagcaacataggaatacatccatggcgaacaatatagatcagactccanaacagttaaccaacaagcttacttttatgccagagacctcgaagtccatcccaaggacacattttgtgttcagtatagatgggcaccgtactcctctaatat

SEQ ID NO: 24028 - DNA, 357 bp, Glycine max
gaccacactcttattgacttcttcgtatcttccttgtcactgcccgtgtgtcgccgtcatggccaccgtcaccacccaagcctacggcgcaattttccggccatgtacctcgaaatcgaggtttttgaccggctcttgcggtaaacttaaccggtaagtgactatgcggccaatggggtgccctccttctgcctctttcaaggttgaagccaacaagggagagtggttacctggcttggcctacccaacttacctcaatggcactcttcctggtgacaatggatttgaccctctggagctagctgacgacccagagaacttgatgtggtacgttcaagccgagcttgtgaatggacg

SEQ ID NO: 24029 - DNA, 405 bp, Glycine max
gtgggtacccaacatttcaacggaatcttcaaatcctaagctcaaaacctatggttcttaaatcctacttcacttaggaaaagtgccagtccttgttgtctcaacagctgaggcagctcgtgaagttttgaaaacacatgaccccgttttctccaacaaaccacatcgtaagatgtttgatatcctcttgtatggttccaaagatgtggcatctgctccatatggcaactactggaggcagacaaggagtatccttgttttgcatcttctcagtgccaaaaaggttcaatccttcgaggcagtgagagaagaggaaatctccataatgatggaaaatattaggaagtgttgtgcatcattgatgcctgtggatttaactggcttattttgtatagtggccaatga

SEQ ID NO: 24030 - DNA, 216 bp, Glycine max
aaaacttgtggtctttaaaggaacttaaactgatgatgaaggagttaaattttcaatataattgttttgtgaattaatctattgaatctttggggattttacatgtcatcaacaggggaatcttttgctatctatttaattagttgatgtgcaagatgtgtaagaacaagctgtagtaaattgctatcaattttcatttcgggagctttgctgtgc

SEQ ID NO: 24031 - DNA, 414 bp, Glycine max
  modified_base (117)..(117): a, c, g, t, unknown, or other
gaaggtgccagaatttggtgggagctttaagcttggttatcgggaaggggatattgaagttgttggtttccttggtgctgcaatagtttttggtagcatggccatgccatggcgcangctaccaaaggttccctctccgaatgaaaactggctatggtgagcgttcttcggaggtaaaatgcgcaagttttaggcttgctgtggaagcacacaacatccgagcctttaaaaccattcctgaagagtgcgttgaaccaacaaaggactacattaatggcgaacaatttagatcagactctaaaacagttaaccaacaagctttcttttatgctagtgaacgcgaagtccatcacaacgacatatttatattcggcatagataacaccgtactctctaatatcccatactatgaaa

SEQ ID NO: 24032 - DNA, 405 bp, Glycine max
tccctctcttcgagatcgaacatcgattgcaacgattcgataaacggctcattgggatagagatagataaataatgcaccccccccctagaaacgtataagaagttttatcctcgtacggctcgagaaaataaaaaattataatgtatgtagaaaattatgatgtcaaatagatcaataaaatcatcaaatcaattaaactatgacttaagtatttttctttcgtattttctttttgaaaaaaaactcctcatatttataactccataactcaaattggataattatcaaataactaaaaagagaacaaagcctttagtagctatttcatttattgagtggtctctactcccctttcttgcccgtgtttcgtttctttataatttattttttataatttttgata

SEQ ID NO: 24033 - DNA, 382 bp, Glycine max
ggagtttgtctaaaggataagctgaaactgaaactgaaactgaaacatggaagaagaacggtgctagtgtgaggcctctgttctgtgccctcaacaacaataacaacaacactgccttgcagtacagaaccctcggcgactccgacctcaacatcagcgaaatcactcttggtactatgacctttggggagcaaaacactgagaaagaagctcacgacattcttaattatgcattcgaccgtggaattaacgctctcgacactgctgaggcctacccaattccaatgaagaaagagacacaaggaagcactgatctctatattggtagctggctcaagtctcaacctcgtgacaagattattttggctaccaaagtatgtgg

SEQ ID NO: 24034 - DNA, 402 bp, Glycine max
gacatacacctcaaacaaataccaaagtgccttttcttagaatggagctcttgtggaaagatcacatgagggtacaagtaattagattggtttgtgctgtccttttggtgacactgctgagctcagaggtagctgagagcagaaaagtcaaaactgttggtacttcctttaagtacgaagctataaattgcaggactcatagtgcttcattgactgattttggtggtgttggagatggaaagacatcaaacacaaaggcatttcagtctgcaatcagtcatctgagtcagtatgcttcaaaaggaggggctcaactttatgttcctgctgggaagtggcttacagggagttttagtctaatcagccacttcactttatatctaaacaaagatgctgttcttc

SEQ ID NO: 24035 - DNA, 422 bp, Glycine max
  modified_base (388)..(388): a, c, g, t, unknown, or other
  modified_base (393)..(394): a, c, g, t, unknown, or other
aggcaggcaaaattgaagctattaagccttattgaaatcattgaaaaccattcaagtcaactatattgatatatttatatccaaaacaattatataggttcaatgaggtttgtcatcatggatgcagcattaactattctttatcaatatggacggttttggtatgttcaatgaggtttgtcatgttttacagacaaaataactcaaacaatcaagtagctaacgtgttattttcttcccttgttgcccttgtgtttttcccctaatctttttctctccccttgtgagttacgggataatttgccttctatttctttcttcctcctgcattcaatttttaatttgatgtgtttttaatgcttttttgcatatccctttgtcaatacanattannatatcatgtaactttatcatgactcaat

SEQ ID NO: 24036 - DNA, 396 bp, Glycine max
  modified_base (301)..(301): a, c, g, t, unknown, or other
gtttgtaagcttgtggaatgcgactttggcgaaagcaaatgtcattctcccagcaacataatgcagatgtttcaaagctcacttttctgcttgcaaccccagggtgattcgtacacgcgaagatctgcttttgattcaatgttggctggttgtatacctgttttcttccatcctggctcagcatatacacaatatacttggcatcttcccaagaattacactaagtattctgtcttcattccagaggatgatatccgcaagaggaatatcagtatagaggaaaggcttagtcagatacctnctgagcaggtgaagatcatgagagaagaggtcattagtctcattccaagactagtatatgctgatcctcgctccaaattagaaactcttaaagat

SEQ ID NO: 24037 - DNA, 440 bp, Glycine max
ggtataatagagagctcctccaattagggtttttgggatctgcggctacgatgggtaagggaacggggagtttcggtaagaggaggaacaagacccacaccctctgtgtgaggtgtggccgccgcagcttccacctccagaagagtcgttgctctgcgtgcgcttaccccgctgcgcgcaccatgaaatataactggagcgtgaaggccattatgagaaagaccaccggaactggaaggatgaggtacttgcgtaacgtgcctcgcagattcaagagcggcttcagagagggtaccgaagctgcacccaggaagagaggagctgctgcctctgcctaagctttgaatgaatgacagcaatttttgcttggtcagtgaaatataagagttaatagttctgtgttgtgccatactctttgaacacatttctttctgtcgttt

SEQ ID NO: 24038 - DNA, 359 bp, Glycine max
actgattcatccgaagatgagactgagaaggttcagagcccgagaagagttaaaagaaacgtgtctgagatctctcttccccctcttcctccaccattcaccaccactcctgaaaccagctcctgtgaggtgaatagcggcaaaaatgcaacattgaagggtttcattgaaggtcaaccccagagtaagaagagggttttgactcaccccccatcaacaaggaggaacacttctgggaaattcagaggtgttaggcagagaaaatggggtaaatgggctgcagagattcgtgacccctttcagagtactcgtatatggctcggcactttcaacactgcagaagaggcttcccaagccta

SEQ ID NO: 24039 - DNA, 402 bp, Glycine max
gcttcttttaaacctaattcttgggggttctggttcattcctctgaatggttttggtcaatttattacacaatgggtaaaatactttaaacttaataaattgaattgtgtaagatttcactgatctatagatagagcttagattatatatcaacaacaaatttactggttttgcagaagaaacttaatctaatgagaaaagattttgtgcaaacctcagcaattatctcagcagacactattccagtttcttctcgaagttccctaacggcagcagatttgggctcttcaccatcttcaattcccccctgagaaccccaaaagaacagtcaattttatcagaacaatttaataccataaagagatagaaaataatttacttattacaggcaacaaaaggggg

SEQ ID NO: 24040 - DNA, 410 bp, Glycine max
  modified_base (292)..(292): a, c, g, t, unknown, or other
gaatagaacaaacacaccgcaacaaccaagaagaagaatatatggaaagtttttggcaggagaaaggaaccatgctcgatggcgaaaaagatcattcacgacaccactaggaaaatgtcgcagctgtgccagaaaatcggtaaaggcgacgtccggtggggtgtcctcaaaagggtatctttcgttggacactttttccggttcatttggaacagactttttggttgctccgtcggccgaaggccatctcagtaccggaaactacccgtccgggacccctcttcttcgccgncgtcctacgctgacgacgtcttcttttccgctacaaccaccactggcggctatgactccgattccgatttggtgaacctcaagatcaagcttgtgggtgattgccatattggaaaaac

SEQ ID NO: 24041 - DNA, 421 bp, Glycine max
  modified_base (147)..(147): a, c, g, t, unknown, or other
  modified_base (252)..(252): a, c, g, t, unknown, or other
  modified_base (272)..(272): a, c, g, t, unknown, or other
  modified_base (387)..(387): a, c, g, t, unknown, or other
ggaccctatctggtgagagaggaaagaaggtgtgggatttattaaagggagaaggagaaattcctttatgggggaagtaccagccgaagccaaaccaaacattcttgaccggccccaacaattatcttttcaactggttggctctgncttctgcacaggagaaatgggtgttgggaggggaaaacagacatgatctatctgtggtcacagcaccactgtttccctgcctcacacccttatctagaagaacangaatcagcacatacacccgncacaacgccatagtcatcatcacttagaagaacttcacaatttttattttcttggatatggcgagtcttgctcttgaaaccgaggatgtaatctcagatatatacctttcactgngacttaaggaatcagacaaaggagtaggagttcc

SEQ ID NO: 24042 - DNA, 389 bp, Glycine max
gacacaccaaacgagccatttgggagttaggttctgcacgctctgcttccagcgagtgttctttcttcgtttcaacaccttaatttgcacacgctgcttcttcagcttgagaaatggcacaagaaacctttctattcacatctgaatctgtaaacgagggtcaccccgacaagctgtgcgaccagatctctgatgcagtgctcgatgcgtgccttgaacaggaccctgacagcaaggttgcctgtgagacatgcaccaagaccaacatggtcatggtctttggagagatcacaaccaaggccaacgtagactatgagaagattgtccgtgacacatgccgcgaaattggattcatctctgatgatgttggtcttgatgctgacaaatgc

SEQ ID NO: 24043 - DNA, 434 bp, Glycine max
cgacagaagggaggattgtcatggaggtgtgtctgacaagtttgatggtactgtgaatcaggccttgaatgttatgggctctgaaaccgtggctagtgctggtgaatctaatgatatggaaattgatggatctcttgagcataaagcaactgtcaatgaaggaagttcaccaagcactagtgttcctgtgttggaggagcccctgaattttgatgcctttaattcagctgccgaacttgaggttcttggcttggaaaggttgaagtctgaactgcagtcacgtgggttaaaatgtggaggtactttgatggagcgtgctgccaggctttttctcttaaaatcaactcccctggatgaacttccaaagaagctgattgcgaagaagtaaggagatttttgagaaggcagttatttctctgtacagtatttcttaa

SEQ ID NO: 24044 - DNA, 252 bp, Glycine max
gtcttgaattcccgattcgaccgactcgtacacacaagaatacatactcctcatataacactatctaacaagacacaccatactatcaattatggattttttatataaacgcgctgatatcatccattgttctctattatcttcaactactaaacttctacactctttttattattattccaaaataactcaaaaaacttctttatgcacattttaatctgaatactatcttcaccttaacactctttccta

SEQ ID NO: 24045 - DNA, 405 bp, Glycine max
ggttctagtgtgtgattgtttgttgttgtaactcgttcttcttcttttgttgttctgtgtttgtgtttgttttttctctcacctgaaaatgtcttgctgcggtggtaactgtggttgcggaagctcctgcaagtgcggcaacggctgcggaggctgcaagatgtacccagacttgagctacactgagtcaaccaccaccgagaccttggtcatgggagtggcacctgttaaggctcaatttgagggtgctgaaatgggtgtgcccgctgagaacgatggctgcaaatgtggaccaaactgctcctgcaacccctgcacttgcaagtgaggtgttgggagagcaagcttcaagcagagatagcccttaattaggaataatgataaactattaatgtgtagctaaaa

SEQ ID NO: 24046 - DNA, 429 bp, Glycine max
  modified_base (400)..(400): a, c, g, t, unknown, or other
  modified_base (415)..(416): a, c, g, t, unknown, or other
attcttctcaaatttgaagttggattttgagtttcagggtttcaaatatttcagacaatggctgtccgaattttaaacagtttcattatttaaaatatcatattaatccatattaaatatacttattttttcgtgaaatttgttaacttaaatttgattaatgtgttcccatcataacttttattaaaaaaattatttattaatttttaattattatatggagaacaattattttatttttctaaatttaataggcatgcataaatttttcattgtaacctatcagaaataatgacttttaaaaattttaattacattcttttgtattttttcttactcccttaaaaaatattaaataaaagattaaaaaaatttaatgcttgaaaatataaaataaatntaatgcttatacatnnatatataaaaatg

SEQ ID NO: 24047 - DNA, 406 bp, Glycine max
  modified_base (47)..(47): a, c, g, t, unknown, or other
gactctcaattctgttctcacatttcctatatatatttgccactctntctgtgagcttctcaacagaaagacacaatgggcaaagaaagtagtacttgtgttcttctatcccttctcattctttcactctttgtggctgaaatatatggaaatagacaagttcaagctcttaacaaactgcacaagtccaccaagttcagaggaaattcacaaattgataggagtgagtttgaggtagaggagcttgcttatgatggcattgttcactctcaagagggtctcaaagagaaagatagaattgagagtcttccaggacaaccccctgtgagtttttctcactatggagggtatgtcactgtggataaagaagcaggtcgtgccttctattattacttcgttgaagctc

SEQ ID NO: 24048 - DNA, 399 bp, Glycine max
gtggtaaaaaatgctgatgacacgtatcatatgcagtggaaatgtagattatggtatcaaagaagataaaattcccaacatcaaagtagcagccctagcagcacaaggaatctccgagcttatgcctcctgatgttgctaatgcattttggagttctgacaaagtctcttctaaggtctccaaaagcatgcgtgatattgtcagagttgctatgagtcaagcacagaaaagaacaagattatctggggatacaaattttagccggattatctgttcaagaggggattctgatccttttgatggactctatgttggtgcatttggtccttatggcatggaaatagtgcatttgaggcgaaaatttggacattggaatgaagtgaacaatgaaacaacact

SEQ ID NO: 24049 - DNA, 342 bp, Glycine max
gtggtaaaaaatgctgacgacacgtatcatatgcattgtaagtgtaaattatggcatcaaagaagataaaattcccaacatcaaactatcatccctagcagcacaaggaatctccgagcttatgcctcctgatgttgctaatgcattttggagttctgacaaagtctcttctaaggtctccaaaagcatgcgtgatattgtcagagttgctatgagtcaagcacagaaaagaacaagattatctgtggatacaaattttagccggattatctgttcaagacgggattctgatccttttgatggactctatgttggtgcatttggtccttatggcatggaaat

SEQ ID NO: 24050 - DNA, 335 bp, Glycine max
acggttaatggaattgaaattccagagtatacagcgataatctgtaatacgaggttgcttgcaactgatgagcttgattctgtatctaccgccaatgttactttagctgaaacacaagtccgaaaaattcccaatgaaactgctaatcatgcatatggtgaacatcatgcagaagacaatagtaatgacctcatatgggctcatccaggttcatgctgttatgcactgcatgcacagttgaaccctgatacagttctctagcatcaatcacctttggcccttgcgaaagctttaaagaactcagtggaattgtacggcttaaagaaagcacatat

SEQ ID NO: 24051 - DNA, 411 bp, Glycine max
  modified_base (30)..(30): a, c, g, t, unknown, or other
gaacctcaaaagagttctttcaaaatgcanacagccttaaccttcgctgcccccaacgttgtgccattggcacccacaaagagtgtctcccatattaccatctttcctaccaaattgaaagccccgcgctcctcacctcgttactctccgattagggttgcaaccgtggagcccgacacttcaactgtcgactacaactctgcgttctcagtgtttcctgcagaagcatgcgaaactgtaggaggggaagcctgcatggcggagatgtaccctgaaacgaagctacagccagaggctaagactccacgagtcgttacagagaacgttgagagagagtatcttgaatacgatgatcctaaaacggtatttcgaggagaggcttgtgatgatcttggaggaactttctgtgag

SEQ ID NO: 24052 - DNA, 416 bp, Glycine max
  modified_base (243)..(243): a, c, g, t, unknown, or other
tgcaaaaggccaccgaagggcctcttttaaaatttggactctggcctaaggtttgggcccccatactaagtgcttaatgcaattacaatttgggacatgctacattttactaagggagtatgaaaaaagttgcctcaatgagattgcaattcttgcagcagaaaacgtcgccctgatcaatttacggtagaagttgattttctccattttaatgaggagtttttctatgtaatacttctttgntgtatattgtgcctgttttatctaccgcactcattttttatcagtttttggcagctttgagatgaagcgatgaaacttgatgttttgtttcttgtgttaaaggtggtacgctacttggtcatttttctaggcagaccttgatcgtatatatcatgattttctgtacttaacaa

SEQ ID NO: 24053 - DNA, 421 bp, Glycine max
ggaggaggaaggaggagggagaccaaagcacttagtgctattcaataattgcgaaaaaccaacagcgagtgttgtttttgtttggtccaggctggaccagggaatgaatagagatgagaggctttcggttgaagagaactgagttaagcggcgaagccaaacgcagaatcggcggcagaaattgccaccggaagcacgtcgaagacgggtgaaccaaacacaaaattccatccaccacttctcttttcaatccccaactcaaatctgtgaagaaaatctcaatttctaaattgtaattcttagcactactgctagtagtagtaaaaaaaaacaattagaaagtagtagagtgtttttttttctttttttcgtttgttttacttttaagatgggtgagaagagcaacgttggcggcgacgcg

SEQ ID NO: 24054 - DNA, 402 bp, Glycine max
  modified_base (379)..(379): a, c, g, t, unknown, or other
caattacagtggtaaacttcatgactttttcttttaatttgtatatatttgattgatatctgttcttgaatttcagtttctgattgctctcttggtctgcatgttctgattgaatttatatataggctttgaggtttgtgatatgagtgaataggaaaatacccaaaacaaccaattagtattttttcaatggatatggttgtgtggtatgcttaggaaccattttcttagagcttgatttgatctactacttataagaatgactttattaccgaaaacatttttttcctctaaagaaaagatttttccttgttttgctttggtggaatgagcatgcgtgaggaagtcttattctgttgaaagtttaaatcttgcttgngtgatatgagatgaatgttgagt

SEQ ID NO: 24055 - DNA, 397 bp, Glycine max
acttcactactgcctaacctcaacaacagtggaccttctgtcaagttcaatttctggagtgtcgattttctttgcaatatcaatcgcttctgattcatcattgtgcagtgtttgttgctgcggtatttgatcagtatcgccttggacaaaggcagcagtgggcaatgttatcttgacttcttcctctgggaactgtggttctgttgcttctttaatccctttttcttcttcttgatataattgtccctcatcctcaatccctagtttctccttggcgtgtgatgcttgatcctcttcctgtttctcagtatcattggtgtttatttctccagtctcctcggtatcattttgtggaatcttcacctcttcatttaacttttctgtgaattcctcttct

SEQ ID NO: 24056 - DNA, 392 bp, Glycine max
agaaggggattcatagcaacacattcttacaatcttacatgtcaaaactaaacaaaagtgagagaaacatcggaacatggcaacccaattaaacaatgtgttcagaacttcaattctgaagcacaagatccaatcagagacccctttgaaaaccacaataagaaccacaagatttcaagtgatcaatgctaccagcagtgcaaggcagctcatagagtctggcacagtgaggccaatattgccaaaagatgcttccacagccataaactcagagggatttgttctccttgatgttagaccaacttgggagagagaaaaggcccgtgtggcagggtctttgcacgtgccaatgtttgtggaggacacggataacagtcccataactctgctta

SEQ ID NO: 24057 - DNA, 407 bp, Glycine max
gaacaattaattttcaaacacaagatctctctccagcttccccgtcctcttctacctacttctccttttgtgcaacttgccttgtacaacaacacttccatatcctttgtgttgtgttgcccactctaaaaaagtgagagagagagagagagagagagagagaggacaacatcccaccatttgtggctgccctctattttagtccctagccttaatcatgccatcaggtgctaagaagaggaaagctgccaagaaaaagaaggaaaaggaaactgaaattaacaccaaccacccttcaaccaccaaccctcaaggcaatgatgaggtgaagtctcaagatgagaaagggagtgatggtggttcaccaacacatggtgaacatgatcttgcattcaatgaagaggagg

SEQ ID NO: 24058 - DNA, 404 bp, Glycine max
cctataccaataattaaggaactgtttcgaactgatggcgaacagttcctcaagtatccaccacctaaagtgatgcaggtcgacaagtctgcatggatgactgatgaagaatttgcaagagaaacaattgctggtttgaatccaaatgtcatcaagattattgaggagttcccactaagtagcaagctagatactcaagcctatggtgatcatacctgtataataacaaaagagcatttggagcctaacttaggtggtctcactgttgagcaggctatccaaaacaagaagttgttcatcttagatcaccatgactatctcattccatatttgaggaaaataaatgcatataccacaaagacttatgctacaagaaccatatgtttcttgaaaatgatgaactt

SEQ ID NO: 24059 - DNA, 414 bp, Glycine max
gtgaagctgcttcttccatggcttattccttaatggatggcgcctgctctcacctcttttcctttgtcttccgctgcatctccatggtggaaaatcactattaaaggaccccattgaagctcaaagatccagcctccatagaagccccacaagcaaacttccatcaccattagctattttcaaacgaataccattagctatttgacaaaccttaaagtgttcttgtacctctataactgcaggtagcaaatcatcttaaccatatggtatcaacccttggaagaaatcctctaatgattttggtgcaagtaaatacgagtggaagaaatcctctgagtttctctaactccttaatagtggtcatcacaccattcctgctaatattttttcttgtgaggttgttttcttggtccc

SEQ ID NO: 24060 - DNA, 404 bp, Glycine max
gtctcgcttaaattgaagacatttattattgtttatatgataagatttgaaatgatatgaaatccacttcttgaaatccaatccattacccactctattctatagattattgcttgagctgtgaaaatttgatttttgtgcagaacgtttacttgaagctgcatcaatcgaggagggattcttcttcatctttggattcgcttttgatgcctcggagtcagagctgggatgaaagctgaattttggggaaaatggcaactctagttgaacctcccaacagaattaagccaaagggcaagcattattatacaatatggcaaacattgtttgagattgatacgaagtatgttccaattaaacctataggccgaagaacgtatggcgtggtgtgctcttcgatcaac

SEQ ID NO: 24061 - DNA, 350 bp, Glycine max
cattttcccaaaatcaccatctagagttttcgcttttccactgaaaatcaaattagggtttggatttcggaattgccacagaatcatggccactctgaaagagcttcttcctcctgcaaaatcctcctccaccgcctactacgaccacaccaacgatccatggttcaagcagcgtttctcctcagaagaggaggagaaatccgccgccgccgccgccgtcaagcagaagcccgttcccccctacctgaagcgcgccggcttcgttcctcggaaaatcgaggacttcggagacggcggcgccttccctgagatccacgttgcacagtatcctctcgacatgggaagagaaa

SEQ ID NO: 24062 - DNA, 429 bp, Glycine max
gtggagaatggaattgaaattcgagagtatacagctgtaagctctgatacgacattgcttgcaactgatgagcttgattctgtatctaccgccaaggttgctttagctgaaacagaggtccgaaaaattcccaatgaaactgctaagcatgcaaatggtgaacatcaagcagaagaaaatagtaatgacctcatatgggctgatccaggttcatgctgttatgcactgtatgcaaagttgaaccctgatacagttctcttgcatcaatcacctttggcccttgcgaaagctttaaagaactcggtggaattggacgggttaaagaaggcacatattcgggatggtgcagcggtcgtgcagtatcttgtctggctggataagaagatgcaagatattttgggagcttctggttactttttggagaacgat

SEQ ID NO: 24063 - DNA, 406 bp, Glycine max
tttaccccaaactggtattttgctcagttcctcattagcaaaatcgaagaaaagaggcataactttcagcaaaatgggcctttggaagatgaagtaggggcctgtagatagcacatgagtcatatcatcttttgaatcaaatttgaatacaagtcaaccgctttcatgggtagaatatgagaactttacgccccatttctgaaagcattccagtagggctttttttcctaggaaacggcctgctacatagcctataaggttgtgtccccacacctcttccaggggctgaaaatcatcttcatcaagcaatactatatcttcagaagatggaggggaaaatttcaggccaaatcccttggaaggctttttgttgtccttgaacagattaattcaaggcatggaagcc

SEQ ID NO: 24064 - DNA, 416 bp, Glycine max
  modified_base (155)..(155): a, c, g, t, unknown, or other
  modified_base (169)..(169): a, c, g, t, unknown, or other
  modified_base (199)..(199): a, c, g, t, unknown, or other
  modified_base (316)..(316): a, c, g, t, unknown, or other
agagggggatccaatatcactggcattaacttaggtcaaaaccgaccttacatcctaaagcctttgaacatcgtttggcagccatggaaacaggcatagcatgctacactcgcgggcctttcctgctagtgtttcttccagcactcttcaccctncatctctctatctnttggctcgaggagtctgaaatcgagctctntatttggagaatctctaagagtggcatccaaatcaacactaaaggtttcaaagacaaagaatacttcactcgtgaccagatgttgaaatggtgacagtctggaagaattcctcacanaagcaacaccagataggggttgatcaggttgttggtgtccatgggagaagcattaagaacaatttccttcaaagtgaagacggcttcttgtggtggaaca

SEQ ID NO: 24065 - DNA, 413 bp, Glycine max
gaccaccaattagacaataaacagcgacaatgaaagcaatgacagcaacgacaacgtttgatgtctctgccgcttgcttccgtgcccctccttcttgttcaccgaatccatgccacaccagtttttcagttataaactccctgaatcctcacaagggacgacggataagcgttgctgttccacctaagtttccaagcttccggagggaagcagctctgcaggggaatttggaggctgttagagtcccaacttcggtgcctgtgcgtgtagcatacgaacttcttctagctggtcatcgatatttggatgtaaggactccagaagagttcaatgctggacacgctcctggcgcaattaacataccttatatgttcagagttggatcaaggatgacaaagaatagcaactttatt

SEQ ID NO: 24066 - DNA, 411 bp, Glycine max
gatcttcttcaatttattagccgaagatgtggtgcatgagaccttagtctttgtcatagtttcttccacaacaacttggtccaaactttccaaaaattcacataagagcaatagttctctccctagaaactgatatgctatataagccgtcctttggagcaatatatccatcctcttcagtttagcagaaggtgtcgtgtattagaccatagtctttgtcattgttgtttcgcaacatcaaagtttagcctttgagcatcagcaatcacatggtgatcagaatatcattcagcaattgaagatcagaggcaagcatagactagcaatgatatggctttcttcccagcaaatttcatgctacaaacacctcaccaagatgaccatcaacctccaccttcactcaactcaatt

SEQ ID NO: 24067 - DNA, 402 bp, Glycine max
cctctacatgctaacatgtggcaaagcttgcagctgtatgacaatgaatatctttgggaaggcaccaatcccacaatatatacatttctcttaaacctataaatagaatatcaagtgttgaaaatctgttgaaatccctggaggatcgcacactaagttaaaagagcaaacctttgccttgcaaagttatttttgttgtattcaagcttattgtgtatcctctctatgagagctttgaatattgtattcaattcaaactattgcttagaaagctaggaatggcttttgtgataaaaatacttgggttttgtttaatctcaggggagattaaggatgtgttaggagtggcctagaaaatactgtgtatccagaagtgaaagagtaaaatacttgtttgtaata

SEQ ID NO: 24068 - DNA, 397 bp, Glycine max
ggagcctgaggcgacggttctggcagttgccctcgtctcagcctcgcgtatgtttccttgctctttcatcttttcctctttctctatgcaaataaccgattgatcaatcgaatttttttgtgattcaatttcgctcttttttctcggcgcgagaaatcatggctttgggaacggtgactcgacggttggggaataaactcttgccggcgttatctccttctcccaggcttctacattctcacgccaccagtttcgggttcaaacaagtaaacgaagaagaaaaggctcgcatggttggtgacgtattcacgagcgttgcttcaagctacgatctcatgaatgacctaatgagtgctggtttgcatagattgtggaaggataggttagtttccaagct

SEQ ID NO: 24069 - DNA, 358 bp, Glycine max
ggttcaatgcagatgatgggaaatgtagtgagatgcctgggtctacacctgctgcaagattggtcagtcctgttccattttctgcttcatccatgtcttttggtattctctcgatcacagtagctgctgctgcaaagagcccctttgtggcacctgaagatttattgaaaagtaaaaaggagcttggttggaagggatctgctgctactagtgcatttcggccagctgagcccaggaaagttatggaaattcctcttgatatgtcaactacccctattcctaatgatgaagctagaaagcagagccgggcaccattggattttgacttgaatggttccgatgaaataatacttgatga

SEQ ID NO: 24070 - DNA, 418 bp, Glycine max
gaggtttccttagttattgttaccatttgctcccagcactgagcttaaccgagcttcacaaagatgaatcgggaaaaattgatgaagatggccggttcggttagaactgggggaaagggcaccgtgagaagaaagaagaaggctgtccacaagacaacaaccacagatgacaaaaggcttcagagcaccctgaagagaataggggtgaatgccatcccggctattgaggaggtcaatatctttaaggatgacgtagttatccagtttctaaatcccaaagttcaagcatccattgctgctaatacttgggttgtcagtggttctccacaaacaaagaagttgcaggatatactccctagcattatccaccaattaggaccagataacttggaaaacctgaagaagctggccgagcaat

SEQ ID NO: 24071 - DNA, 345 bp, Glycine max
ggaacacaagcggcatcgtcttggtttgtgagagagacagaggctcagagagaaaatggtttcagggtcaggaatctgtgcgatgagggtagtcgtggacgcgcggcaccacatgctggtgaggctggcatcgatcgtggcgaaggaacttctgaatgggcagaacgtggtagtggtgcgctgagaggagatttgcatctactgtgggctcgtcaggcagaagatgaagtacttgcgtttccttcgcatgcgcatgatcaccaagccctgtcactgtcccatccatttgcgtgcactcgtgaagatcttatggcgcaccgttcgtgggatgataccacacatgac

SEQ ID NO: 24072 - DNA, 419 bp, Glycine max
aaaaggccaccaaaagggggcctcgttttacctcggtgaagggtccaaaagttgtcattgataggctaactggccggaccaagggatatggctttgtaaggttttcagatgagagtgagcaagtgagggctatgactgagatgcaaggggttctttgctcaacaagacccatgaggattggacccgcctctaataaaacccccaccactcagtcccagcccaaagcttcatatcagaattctcaacctcaaggttcacagaatgagaatgatccaaataatacaactatttttgttggtaatttggatcctaatgtcactgatgatcatctgaggcaagttttcagccagtatggagaattagtgcatgtgaagattccagcaggcaagcgatgtgggtttgtccaattcgcagacagg

SEQ ID NO: 24073 - DNA, 395 bp, Glycine max
gactgcgaagacgacgtcgtggaaggcaaacaggcaaagagaacttggcttgttggagactgagctgtgtattgtgtgggttcccctggccgatagtacctaaatctcaatcgcgctttagcgacagcagagatccgatctgctctgcacctgtctctcaccacagtgtcgccagagaaaggaggatatcacatcaataacacgatgatgatgatggatccgccgatgacgccgctgaggcaaatgctattggaggagatcactcccgtcgtcatgctcctctcaactccttacgtcgaacaagattccctcaagaacggtctctacttcctccagacgctaacgccgttctgctccttcaacaacatcgacgttactgttaggaccgccagtga

SEQ ID NO: 24074 - DNA, 389 bp, Glycine max
gaaggtgcaggagtttgttgtgagctataagctagtttatcgtgaggagaatatgaagttgtttgttttctttgttgctgcagtagttttggtagcatggccatgccatggcgcaggctaccaaaggttccctctccgaatgaaaactggctatggtgagcgttcttcggaggtaaaatgcgcaagttttaggcttgctgtggaagcacacaacatccgagcctttaaaaccattcctgaagagtgcgttgaaccaacaaaggactacattaatggcgaacaatttagatcagactctaaaacagttaaccaacaagctttcttttatgctagtgaacgcgaagtccatcacaacgacatatttatattcggcatagataacaccgtac

SEQ ID NO: 24075 - DNA, 405 bp, Glycine max
gaagttgaagttgtggctcaaactcacagatagattagcacttagcatttactaagaaaggataaaggaaggaacactttcgttacatttctccgcccattcctaccttgttcctgcttttctccttttctttttcgtattcggggttgctgctttctttcgactctattgtcttcttaataaatacagaaagaaacagataagaaaaaagtttataggtgcctagaagaaaagacaatatagtgtggagcaattacgtttgatcacaagggaaattaaaggtgcaacggttttgcaagatagcatagaagattttgaagaatcttagttgcaatatagttgtgcagttgttgaaatgggggctcctttatcagcatggcctttggagagctttggaacatacaa

SEQ ID NO: 24076 - DNA, 207 bp, Glycine max
gaacgatgtaaaattccaatacattcacgtgtgaaaataatatataatatatttagtaaaaaaatttgtatttaattattattgtgtaatatttcttttgatcaacaataattacatcccacaaacaagattaatctttcacataatcaatttgaaaaaaattaatttttgacataagaaattaaagaactttcataatatttcagc

SEQ ID NO: 24077 - DNA, 414 bp, Glycine max
gcagtgctcaccagcagggcaattttccaaaggatgaagaattatactatctatgctgtgtcaatcaccattcgtatagtgtttggtttcatgtttattgcattgatttggaaatttgattttgcacccttcatggtgttgattattgccatactaaacgatggtaccatcatgacaatatccaaggatcgagtgaaaccatctccaatgccagacagctggaagctgagggagatatttgccactggtgttgtgctaggagcttacatggcactaatgacagtagtatttttctggctcatgaaggataccgacttcttctcggacaagttcggtgtgaggtctataaggaacagccccggagaaatgatggcagccctgtacctacaagtcagtattataagtcaagcacta

SEQ ID NO: 24078 - DNA, 326 bp, Glycine max
gaccgtcagttgcaggaaaaatggtttcgctgaaactgcagaagcggctcgccgcgagcgtgctcaagtgtggcagaggaaaggtttggcttgaccccaatgaagtcaacgaaatctccatggccaattctcgccaaaacataaggaagctggctaaggatgggtttatcatcaggaagcccaccaagattcactctcgctcacgtgctcgtcgaatgaaggaagccaagaggaaaggacgtcactctggatacggtaagcgtaagggtacaagggaggcaaggctttccactaaaattctatggatgaggagaatgcgtgtgctc

SEQ ID NO: 24079 - DNA, 410 bp, Glycine max
gggtgactggtgagtgcggggacgctggcctgcagtggtgcgacttttcaccgacgacgctcgttgtgcaagcagctaagtaccacgacgctcttgtgcgagcagcttctattcgctggacggatggtggttctacgattaagtactagggttcagacttcatgagttttaaacaccgtgtataattgattttggtggtgattccaattcggaagtgcaaccgcagaaagaagaatgagcaactccatgccttttgttctgctaatattattactttcggttttacgttactcaagcgccgaagaagctttccatgttcgcatacatctctccactgtctctagatatggtgctgcgaaagacattgctgacaataacttcgtaccttccaaaatccccaagggatgtgt

SEQ ID NO: 24080 - DNA, 416 bp, Glycine max
gaccactacatcccatctctcaaagctttacacgcttttaacactctctagaaaagtggtgttcttttttctttctctgaggactcgttgcttttcctttttcccattctcttcttaaatccatggacacggctcagtgggcacagggtattggagtggttaaacaatcgatggaaggttcaaagcctcctcctcctcctcctcctcctatgttggagagaagggcaaggcctcaaaaggatcaagctttgaactgcccaaggtgcaattcaacaaacaccaaattctgctactacaacaactatagcctctctcagccaaggtacttttgcaagacatgtagaaggtattggactgagggtggttctctcagaaatgttcctgtgggtggtggctctagaaagaacaagagatca

SEQ ID NO: 24081 - DNA, 386 bp, Glycine max
  modified_base (336)..(336): a, c, g, t, unknown, or other
cgacagaagggggcagtgaatacaagccaaaagaacaacatggacattgggctttctcctcagttgcccaagaaagtttacggtgccaatggtggctcctactacgcatggtccccctccgaccttcccatgctccaccaaggcaacattggtgccgctaagcttgctctcaacaaaaacgcctttgctcttcctcgttactctgactcttccaaagtcgcttatgttcttcaaggtagtggagtggctggaatagtgttgcctgaatcagaagagaaggttgttgcaataaagaagggtgatgccttggcactcccctttggtgttgtgacctgntggtataacaaggaagatactgagttggttgttctgttccttggggacac

SEQ ID NO: 24082 - DNA, 435 bp, Glycine max
tgcaaaaggccaccgaagggggttaccttggggattgagttgtttgtacttaaaatctttgtgccaatagcatgtctggcatgggcagttctggttcctgtcaacgccacacgttccgggctagaaagtgctggtctggacaacataacttctagtgacattgataaactctcaatttcaaatgtccatagtacatctgaaaggttttgggcacacatactagttgcttatgcatttacattttggacatgctacattttactatacgagtatgaaaaagttgcctcaatgagattgcaatttcttgcatcagaaaaacgtcgccctgatcaatttacggtgctcgctagaaacattgcaccagatcctgatgagtctgtcagtgagcttgtggagcactattttctggtcaatcatccagataactatgtttct

SEQ ID NO: 24083 - DNA, 54 bp, Glycine max; identical to SEQ ID NO: 3720

SEQ ID NO: 24084 - DNA, 389 bp, Glycine max
gaaacaaacctcagtaccaagaaccctatgccttgacaaaccctaacgttgatttaaatcgtttgttcgcacttcaatctccaagtcataaatacactcttctctccccattcactcgcattggcttttggtagttgaagtctttcattgttgtcaaattcagatcaggactactcaggcaagtgatagcagctctgggcttcgagggctagaatcctccgaagaattcaagagaagagggaaacaattgagagaaaagaaaggaatctacggcactaatggcagacaaagctaagggaatggccagctcagcgcatcacacgaaatcctttagtccatctgcagtttagtttgttcccggtggggcaattcacacgctacccatgaat

SEQ ID NO: 24085 - DNA, 372 bp, Glycine max
ggagcctgaggcgacggttctggcagttgccctcgtctcagcctcgcgtatgtttccttgctctttcatcttttcctctttctctatgcaaataaccgattgatcaatcgaatttttttgtgattcaatttcgctcttttttctcggcgcgagaaatcatggctttgggaacggtgactcgacggttggggaataaactcttgccggcgttatctccttctcccaggcttctacattctcacgccaccagtttcgggttcaaacaagtaaacgaagaagaaaaggctcgcatggttggtgacgtattcacgagcgttgcttcaagctacgatctcatgaatgacctaatgagtgcctgtttgcatagattgt

SEQ ID NO: 24086 - DNA, 401 bp, Glycine max
  modified_base (370)..(370): a, c, g, t, unknown, or other
tccagttaaacacgctgactcattttcagtcaaactcttaacccagtggctgacttttcctttcttttttcttttgagttttttcttgctttatcttggtgcttaatttggttgacatttaatcagagttttactcacaactaagaaaatggttaggcaccacaccattttagaaagcctgaaaggcttatctgtgtctatcattatgctttcaagtttcagcatgatttatattattgctttttatactagaattataatcacggagctgatttagtttcaaaatttcactaatgatcaactgacagaccctctagaggatgaaggatccaactatccacaaggccttgttctggtccctcgaggtggngatgatgatagtgttgttgtagggtcacaca

SEQ ID NO: 24087 - DNA, 424 bp, Glycine max
ggtcgcttgaggagaacaggaacattttggatggcaactgctcatatcatcactgctgtgataggctcaggagtcctttcactagcatgggcggttgctcagcttggttgggttgctggacctattgtcatgtttctctttgccgtcgtcaatctctacacttccaacctattaacacagtgttacaggaccggtgactccgttactggacacagaaattacacctacatggaggcagtcaactccatcttgggaggaaaaaaggtcaagttatgtggcctcatccaatatatcaatctgtttggagttgcaattggatacaccattgctgcctctgtcagtatgatggccataaaaaggtcgaattgttatcacagcaatcatggaaaagatccctgccacatgtcaagcaatgggtatatga

SEQ ID NO: 24088 - DNA, 211 bp, Glycine max
ttaatgctgggtttaaatatacatcccttttttcatgcatattccatgctttatatattatcatgtcttgtacttcattaataaattcacttctttcatcataatatgtcttcactatcaaatcatgcctttttatgaacattataactttcatactatatacttcatttattctttatagaacttatacatatcccataaaaatttttta

SEQ ID NO: 24089 - DNA, 400 bp, Glycine max
ggttacctgaaggtttacctgggtggcctaaaatcttggtccatacattctgcatggcagtctggtcctggaacgcccagtaccggctagaaagtgctggtctggacaacataacttcgagtgacattgataaactctcaatttcaaatgtccatagtacatctgaaaggttttgggcacacatactagttgcttatgcatttacattttggacatgctacattttactaaaggagtatgaaaaagttgcctcaatgagattgcaatttcttgcagcagaaaaacgtcgccctgatcaatttacggtgctcgttagaaacattccaccagatcctgatgagtctgtcagtgagcttgtggagcacttttttctggtcaatcattcagataactatctttc

SEQ ID NO: 24090 - DNA, 403 bp, Glycine max
ggcaacccctggattggaggccagcaaagcccaactcaaccaccaaacctctcctcgttcacgctacccctttctgctcttcttctacctttcaagttttaaaagtataaagatggcagagacattcctatttacctcagagtcggtgaacgagggacaccctgacaagctctgcgaccaaatctccgatgctgtcctcgacgcttgcctcgagcaggacccatacagcaaagttgcctgcgaaacatgcaccaaaaccaacttggtcatggtcttcggagaaatcacgaccaaggccaacgttgacctacgagaagatagtgcgtgacacctgcaggaacatcggcttcgtctcaaatgatgtgggactggatgccgacaactgcaaggtcctcgtcaacat

SEQ ID NO: 24091 - DNA, 394 bp, Glycine max
ggaacgacagaaacttgagacttaccatccccctggttatacagaattgtttggatcaactaaatgcttcatcgcgcttcgaaaataatgtcaagaaaattgtcttgagaagggaaattttacactgatttagctaatttttgaagccatttcagcagacagcaagtgaaatttggctgacaacaactaaaatttgcctgaccggtgaaaattgtaactgcttctataactggatcggatcaggatttaaaatactggaaattactatttacatcattttagcaaatgagattcattagaaaacttcttatatataggcttgagtcttcttgaatccatttcattcagcatgcttatatgaatttcgctagtgtataattgtattctactagtg

SEQ ID NO: 24092 - DNA, 410 bp, Glycine max
ggtggccaattaaaggtgagtgtggatgatgttaaagatgcagatgctccagttcctgtacccactgatgaggttcccttagtggggcagacacttcacaccttccttgcttggccaacacatctggtcaagtctttatcacaccaggtacttattgttcttactatatgtttcttctttttaaattaattcattaagcgtgcctcaaatttggctatttaactttgtttcatgaacaggtagttgtgtctccgccaaaaccaccttcgaagcccgatccggaggtcgatgatccgctgtatctgatgacattgaccatcccagagcttttcttgaagccttatcaagttagatgggatgccaccgtgtttggggtcgttaatctagatttccccctgtacataaagcac

SEQ ID NO: 24093 - DNA, 408 bp, Glycine max
gatctcaagcaagaaaatgtgcttggatgagaagcttgaaaggaaaatagctgaaatgagaagatataaatttggacaaagcaaattgaaatcagttgatagtgtagttatgctgttccctatgttcaaggagagactgaaaacattaagaggaatgtttgaacagtatgatgaggattctaacggatctatagaacccaacgaactaaaaaagttcttagaacatcttgaacttcatcttaaagagcaagagattgagcatctttttcagtactgtgatcttgatggaagcaagggcatacagttcaatgagtttatagttcttctatgcctcatgcatctcctagcagaaccttcatcctctgatatttcatccaaagctgagttagcacaggttggagaaatttt

SEQ ID NO: 24094 - DNA, 400 bp, Glycine max
tttgtgcttcaaatatgcgttcattaaaagaaaaatgtactttgcatagctcaatgtgtagctttaagtggcgttaggagtgaggaatctttcattctcaattaagacttcattcgtgcaagggtcaaaatcaattttgaccaaaagctaagaaaaaaaagtgtatctggttaggagcgagtgaggaatctttcattctcaattaaggcttcattcgtgcaagggtcaaaatcaattttgaccaaaagctaagaaaaaaattaattattttttgacgcaacaaataataactttagtagcgaattcataatgatactatattcaacatgattttctaacacaaattcaaacatgcttaagaattattggcatttaatgtctttcgtaattatgacactac

SEQ ID NO: 24095 - DNA, 386 bp, Glycine max
ctattaatatttgatatcagactattagagtggtgacttcatttgtggaactgaagacatagagagtagataaatatttaatggttgtttatgattattaagtagcttattatgcattgtttctgcttaaaatgtctttaacgtgttgaattaccagatgagttgagaacatgggtttcaagtatttgctggttgtgacgtgtgtgtgtgcttggtttggatccttggttgttacaacttcttctggtgatgggttaatgagggttagtctaaaaaggacgagtttagatattagcaagcttaattctgcaaagatcaatgaggttgttaatcatttaaaagcaaatggagtgtatctgaagaaatatcttgatgcacaagaattt

SEQ ID NO: 24096 - DNA, 322 bp, Glycine max
ggagtgaggaagagcgaagagtgaagagaatggctcccaagggtttaacctttctggctgtgttaatatgcgtttcagcactgtcactgagtccttctgttgcgggggaagggcaaaataatggccttgttatgaacttctacaaggaatcatgccctcaggctgaagacatcatcacagaacaagtcaagcttctctacaagcgccacaagaacactgctttctcctggctcaagaacatcttccatgactgtgctgttcagagttgtgatgcttcactgttgctggactccacaagaaagagcttgtctgagaaggaaac

SEQ ID NO: 24097 - DNA, 260 bp, Glycine max
gggccaaggattgacatttatttgagtttgcctcgttgattgcacaaccagctgggcatcaagaaaacccagccaacaaccacaaccaaacagggtggatagggatgtcgcagcagggcacaggttcagtggtggatttcgacctccccgacgagattctgtcggtgataccaacggacccataccagcagctggatctggctcgcaagataacctccatggccattgcctcccgtgtctcttctctcgaatacgatgca

SEQ ID NO: 24098 - DNA, 169 bp, Glycine max
acagaaggtgactcacttaacaatcaatcaacacttccaggtgcgggtatacacatcttggttgagccataactctctctaaacttatacttgcttcccttcttgcctcgcttatccttcttcatcttgctgatgctgaacaatcaccacatgtacaaactcaaggctc

SEQ ID NO: 24099 - DNA, 318 bp, Glycine max; identical to SEQ ID NO: 491

SEQ ID NO: 24100 - DNA, 383 bp, Glycine max
gacctcacccagttgcagaaagaaaagaccatcaaagtttcacttcagccttatccggtttagggtttcggtttttgacccaacctttgacgtatcgaaaccttaagtttcggatcaggtctgagcaatctggttggtagaacctttggtcttagagagtcaagttttatgtctgaattagacgatcaaattcctactgccttcgatccttttgctgatgcaaatgctgatgactcgggtgctgggtcaaaagagtatgtgcatattcgcgtacagcagcgaaatggaaggaaaagcctgacaaccgttcaaggattgaaaaaagaattcagctataacaagatacttaaagatgttaagaaagagttctgttgcaatggaac

SEQ ID NO: 24101 - DNA, 410 bp, Glycine max
gacttctcttcacacctttgttcactcttcttctctggcggctagggttttagcgcagcttcttctagatttaaggaagatgggtaaggaaaaggttcacatcagtattgtggtcattggccatgtcgactctgggaaatccactaccactggtcacctgatttacaagcttggaggcattgacaagcgtgttattgagaggtttgagaaggaagctgctgagatgaacaagaggtctttcaagtatgcctgggtgctggacaaacttaaggctgagcgtgaaagaggaatcaccattgatattgctttgtggaagtttgaaacaacaaagtattattgcacagttattgatgcccctggacataaggatttcattaagaatatgattactgggacatcccaagctgact

SEQ ID NO: 24102 - DNA, 421 bp, Glycine max
  modified_base (255)..(255): a, c, g, t, unknown, or other
tggacaattgagtgcaattaaagaggtcagggttgtctgtgatgaccaatcatcaaaggagtgcctcaaacaacttaatcaggagatccatttgctcagtcagctttcacatccaaacatcgttcaatactatgggagtgatttgggggaagaaacactttccgtttatttggaatatgtctctggtggttctattcataaattacttcaggaatatggggccttcaaggagcctgttattcaaaattataccangcagattgtctctggactttcctatcttcatgggagaaatacagtacatagggatatcaaaggggctaacatactagttgatcctaatggtgaaatcaagctggcagactttggaatggctaaacatataaattcttcttcctccatgctatctttcaaagggagt

SEQ ID NO: 24103 - DNA, 394 bp, Glycine max
tgtggatactctagtaagtctcatgccaacagacaagggctcttccattccattgacgatttttgtttggcatgttaaagatggctatcatgttgggtgccactatcccctgtaggcttgagcttgaaaggaggatcgcgttacggttggaaatggtcttactagattatctgtttatactcatcttttcatatgtgttgtcaccttattttatgttgtcaccagtttcattttttctgtatttttatccttttattgtttttaattttattatttttatttttaatttctttcactcttctgtgtaatttttatattttattattatataatttatactcttttttttatattttcttattcttattatacttttttcttttatattattttt

SEQ ID NO: 24104 - DNA, 403 bp, Glycine max
ggaggaagctattgaattgggtcctgtacgagggttgggggaaaagcttaggtggttattgatgcctgcctttcacaatatgatgaggaggcaatcttctttgatgaagctgtgagaaatgcaaaacgaaagcaattggaatcaaaggctttggatcttgtgtaccctgcttatacaacattgttagggcatatacgctctaaagctctagatgattttaagactaagctggaacaatcactaaacaatggagaagggtttgcttcatctgttcgcacttggactcaatctattatgcttcaatttgacaaagcatctgctgatgctgctgtaagacaagctaattggggtgcttcaaaagggcgagacaaaccttaccgtgatattgattcacatacttcat

SEQ ID NO: 24105 - DNA, 352 bp, Glycine max
aggtttggccaagtgatttaaattaaaaaagtgtttgtcaatggttttactctctggtaatcgattaccagaggatgtaatcgattaccagtggccaaatacgttttataacagctacaaaaatttgaattcgaaattttagactgtgtaatcgattacacaattttggtaatcgattaccagcagttagtaaacgttttaattcaaattttaaaagctgtaatcgattacacaattactgtaatcgattaccagacaggattttcagaaaaataatttcaagagtcacaacttttcaaagtctttattcatgaccaccaatggtctatatatatgtgacttaaacacgaaa

SEQ ID NO: 24106 - DNA, 471 bp, Glycine max
  modified_base (14)..(14): a, c, g, t, unknown, or other
agaaaacgacagangggggacagaattgagcagaatgatagcgaaaaccaaaaaacaagtgtcggcaccttcttcttcttctgtccctgattctgttggttccatctcttcattcataccttgatccgtgatctcccaatttctcacttgtatgaagaaagaatagataagtaatggcaggagcagaagcaagggctctgtggcagagaactgctaatcgttgctttgtccaagaagatgcaaaaagagctcccaagttggcttgttgccaatcttcatgtgcaacatcaaaatcagttgatactggacctgccagtacagcagatgaatctgatcataatacagttaatgttacccattttaacaggaaatcgtcaatttctaatctatcatcagactgtaggtggtggttgcattcacaacctaattatgggtatcaaaagggtttaacatatgaacaagtaaatgcat

SEQ ID NO: 24107 - DNA, 373 bp, Glycine max
ggacgccataagaaagagcacgtcgaaaagttcatctctccctctctctcacacatcccagccatgagcctcttcggtataggcagaaaccagagaacattccgcccgaaaaaaagtactccttctggaagtaagggagctcaacttagaaaacatattgatgccacgttgggtagtggaaatctgagggaagcagtaaagctacctcctggggaggatttaaatgagtggctagctgtcaacactgttgatttcttcaaccaggtgaatctgctttatggtacccttacagagttctgtactcctgagaattgtcggacgatgtctgcaggacccaagtatgaatatagatgggcagatggtgtacaaatta

SEQ ID NO: 24108 - DNA, 484 bp, Glycine max
aaaaaaaaaacggacgggaaaaaaaaaaaacaaaataacatttattacaaaaactttttttttataaaaaataataaattaaataaaggggcaataaaaaaaaaaaacgggtggggaaaaaaaataaataaaaaataataaatataaaataaaataaaaaaaataataaaaataaacaataaaaataaaataaaaaaaaaaatttaaaatatttaaaataattaaataaaattaaaaattaataaaaattaaaaataaatataaaaacaaaaatattaaactattaaaaaaaaaataaaaaaaatatataattaaataatacatcatataaaaatctttaaaaaaaaaaataaacaatttgtaaaaaaattaaataaaaaaataaaaaaaacaatacaatataaaataaaattaaaaaataaataattaataaataattaaaaaactacaaatttataataaatataaaaaaaaaaatatatat

SEQ ID NO: 24109 - DNA, 415 bp, Glycine max
ggcaagttgtaagtggtaactctttcaactcagccgtgcaagttttgttggcagcgcacgaaggaaccatcttctcttcgttttcctttttttctcaatcacacccaaatcccttccttccttcttcgctattggcttctctttcaggtgcaccttccagtaaagcaggagtaggataattgttgaacatagatgaaaaggtgattgttatgtctggactgattgaaggacttcctgatgctgttgcaatcaggtgccttgcatgggttcccttctacctccatccaaagttagagcttgtctctcgtgcttggcgagcagttgtccgtggccctgaactatttaaagctcgacaggagcttggttcgtcagaagatttgttatgtgtctgtgcttttgaaccagagaacttatg

SEQ ID NO: 24110 - DNA, 436 bp, Glycine max
gattgtgtctcactcacatcacacacactctcatagctgtagcggcgacactaagatcggagaaagaatggcgaaaacgacgtcgttgctgctctttacactgctcctcttcggaaccctagctctcatccaggcgaagagatcgaaggaggatttgaaggaggtgacccacaaggtttactttgatgttgagattaatggaaaagaagcaggtcgtattgtaatgggtctttatgggaaggctgttccaaaaactgcagaaaacttccgagcactttgcacaggggaaaagggaactggtaaaagtggaaagcctctccattacaaaggtagctcattccatagaattattcctagctttatgcttcaaggaggtgattttacacaaggaaatggaatgggtggagaatcaatttacggagagaagtttgctgat

SEQ ID NO: 24111 - DNA, 439 bp, Glycine max
  modified_base (379)..(379): a, c, g, t, unknown, or other
gagaatcaattgagtggcgaggatggcaaacacaaacagcgacaccaaagaagaaagcaaaaaaatggatgaaagagagacaatacctctcctcacctcatacaagatgggaaattttaatctatcccacaggattgtgttggcaccgttaacacgatcaaggtcttacaacttcgttcctcagccgcatgctgctctgtattattctcaaagagctactaagggtggcttcttgatcggggaagctactggtgtatctgatacggcaaaagatgggtaccctaatacacctggcatttggacaagagaacaggtggaagcttggaaaccaattgtgagcactgttcatgagaagggaggtattttcttttgtcaactntggcatgctgggaaagtctccaactatgatgaattccaaccacatggtgaagccccaata

SEQ ID NO: 24112 - DNA, 401 bp, Glycine max
ggaggcggaacctggagtggaagtgcgatcccagtgggagtgtgtatttcctctctgctcactccgggatcgatattttcaagaacagatcgaaaagccgttcatcgatttgttggatctgtgagtgagaagatggttactaagacagaggagactcaattgaacaggctcgaaaaccatgtcgataaccgcggcggcggcgcgtgggagtacctatgcctcgtgcggaagctcaaagttcggcggtcggagaaagttctgaagcacggtctctccatcttgaacgacctcaaacaacgatcctctctcggctccgatgaatggaccttgtatgagcacgttgctgatgctgctatggactgccaatgtctcgacgttgccaatgactgtacaaaggttct

SEQ ID NO: 24113 - DNA, 432 bp, Glycine max
  modified_base (417)..(417): a, c, g, t, unknown, or other
gatcaccgcgttgtgttgtgattgaaaatggagagcgatgtcgaagaatctctgcggaagaggcccagaaaataccctttctccgccgattcatcttctcgcaagcaatttgaacaatattctggacggacatttgcatttacgggggaagtgaattttatgcaagatgatgataatcgtctggagattacccgaactaaatttggaagtttgcttaaaagacacggagatttgacagagcgtcttgctagggattctgacaagataatatttgagcgtctacagaaggagtttgaagctgcacgagcttctcaaactgaagagatatgtttagacggcgaagagtggaatgatggactactagctacaataagagagcgggtgcatatggaggcagacagaaaagcaatgcatggngatgctgacatatta

SEQ ID NO: 24114 - DNA, 318 bp, Glycine max
ggaggctggataaactaaggcttgatgtcgtcaatgggggtttatgattatgccccggatttttagttgttgtggtttgagttcgagtttctttatggtttcgagttaccgtggttcttgtttttgaccaatatatctggttgtttatagttgatttagtgaaatgataatcagtaattggagtgaaaaaaaaaaattaatttataaattaagctaatttacacggttatttgcttgaatattcttatttagtgtattatgacatgattttatttaaaaactataaaaaaaatttgttagtggttctacattattttt

SEQ ID NO: 24115 - DNA, 391 bp, Glycine max
  modified_base (372)..(372): a, c, g, t, unknown, or other
  modified_base (374)..(374): a, c, g, t, unknown, or other
  modified_base (380)..(382): a, c, g, t, unknown, or other
  modified_base (384)..(386): a, c, g, t, unknown, or other
gatagcagcatcatacaaagcattgaattcaaaaactaagttcatttcttgtgctttgctttattcctcaaaaccaaacatgtcgaacacatgcggcaactgtgactgcgctgacaagactaactgcaccaagggaaacagctatggtgttatagtagagactgagaagagctacatcgagactgttgacatggatgttccagcagctgagcatgatgggaagtgcaagtgtggcactaactgcacttgcacggactgcacttgtggccattaaggaatatgtatgaaaatgtaattgccatgtgtttggcaatacaaatctccaaataatgtaatcttcgtatgaataaatgtgtgctgttatcctaaaananaaaaannnannnaaaaa

SEQ ID NO: 24116 - DNA, 458 bp, Glycine max
gaagacgacagaagggggatgttttgcattggatttaccaagagaagagctaaccaagtgaagagaacctgctatgcacaatcaagccagattagacagattcgtaggaagatgagggagatcatgaccaaccaggcaacatcctgtgatttgaaggagttggtccgcaagtttattcctgagattattggaaaagagattgagaaggcgacatctagtatttaccctctgcagaatgtgtttgttcgtaaagtcaagatcctgaaagcccctaagtttgatcttgggaaactgatggaggttcatggagattactcaaaggatgttggtgccaaggtagacagacctgctgatgaaatagtggcagaggaacccactgaaattgttggagcttgatttcatgatgcattcagtttgttctagggtttctttttcttacgttatcattgaaaattaag

SEQ ID NO: 24117 - DNA, 381 bp, Glycine max
ggagacagagagaatgagtacggtgggagaagggaaggtgagtagtaatggtcatggatgttgcaaatcagggccaggctatgcttccccactggaagccatttctggtcccagagagtctctcatttatgtaacctctgtctacacagggaccggaatagagaagccagactatttggcgacagtggatgtggatccaaactctccaacttattccaaagtcatccataggcttcctgttccttatttaggtgacgaattgcatcacacaggctggaattcatgcagctcttgccatggagacccctcagcagaccgacgatttctcatcgtacctgcactcgtatcaagtcgagtatatgtggttgatgtgaaaacaaa

SEQ ID NO: 24118 - DNA, 316 bp, Glycine max
aaaaatatcatctacggataagagccccgaactatatacgaccttttgtgctaaaaaaggctttctcggatggagcactcttactcatgaacatggatgatgaaaagctgccttcccctatgaattttgatgttgtcaaacaatactatgcatgttactgggggcagtttgaacgttcactgtttggctgccccaaagactcattacgatctttatgttttaagctttaattgtaaacaataattccaatgttaataaatatcgattgatgttttgtatctctccttctcatgtgtgtcttttgcattttttttat

SEQ ID NO: 24119 - DNA, 378 bp, Glycine max
gcttccctaaaaattttggcctgttaaatcccttgagttgaaaattctttttttttttggttctctatgaacatttctaaatatttagtattttacttttttcttaattattataaatttctgttattttttaataatatggttactttttaggatttactcttttaatattttataactaatttatcaatatcttaattaataagtgaatgcttcatttagttttctaagttttttagtagtttcattttttgaaacactacttttttaaatgcaagtttctattttctaactttatgtttctttcattttgatcttcaatatatttatctaatttcatgattatctttttaaataaatcatgatttattatttttt

SEQ ID NO: 24120 - DNA, 131 bp, Glycine max
aataaaatcgggttggtaaaataacatcgtggccttgccttcatattaaattagtaaaattatcctctctcacataaatcaatataataccttagcaacaactgtcaattctatcaccttacttctattat

SEQ ID NO: 24121 - DNA, 414 bp, Glycine max
  modified_base (66)..(66): a, c, g, t, unknown, or other
gtaggtattatttttttcttctaaaaaaatagggtggggaaattttgatggtggcggtgggtgcanatgaaattagtaaaattatccgtgaacgcattgagcaatataatacggaagtaaaaattgtaaatacgggtaccgtacttcaagtaggcgacggtattgctcgtatttatggtcttgatgaagtaatggcgggtgaattagtggaatttgaagagggtactataggcattgctttgaatttggaatccaaaaatgttggtgttgtattaatgggtgatggtttgatgatacaagatggaagtttagtaaaagcaacaggaagaattgctcagataccttgaagtgaggcttatttgggtcgtgttataaatgccctggctaaaccaattgatggtcgaggagaaattt

SEQ ID NO: 24122 - DNA, 420 bp, Glycine max
  modified_base (344)..(344): a, c, g, t, unknown, or other
tattaagcacatgttgtcaaaaccgattttacacagtagaattggaaagtgggctttagcattaacagaatattctttaacgtacaagcctttgaaatctgttaagggtcagattgtggctgattttattgtagatcattcattgatcgagatgctgcaagattatgtcgatacagagccttggattttgtatttcgatggatcgaaacacaaacatggaactggaattggagttttaataatatcccccaataaagttccaactaagttcaaatataaaatcaaagggctttgttctaataatgaggctgagtatgaagctctaattacaggccttgaaattntaattagcctgggggcaagaaatgttaatataagaggtgattcagaattagtggtgaggcaattaacacaagaata

SEQ ID NO: 24123 - DNA, 383 bp, Glycine max
  modified_base (291)..(291): a, c, g, t, unknown, or other
ggtgtgtccccttagccaagctcgcgtctcacttctcggtcttatattaatcactcgcgcacacagagcataattcacctttcttttccgaccaaaggttcgccagaaaatgcttctatcctcctcctgctccgccgccggctccgccgtctccggcgagatcatgctgttcggcgtgagagtcgtagtggactccatgaggaagagcgtgagtatgaacaacctctcgcagtacgagctccctcgcgacgccgccaacgccaaagacgacgtcgctgccggctacgcctncgctgacgatgccgctccgataaactccggcaagaaccgcgaccgcaagcgagggattccatggacggaggaagagcacaagctattcttgg

SEQ ID NO: 24124 - DNA, 378 bp, Glycine max
gaatgtggagaaacatgggatcaatgacaagaaaagttaaaaaaagggaataacctaaacttcaattactttactgagtgaggtcacatctaatatcactcatatctacaatgcaagaatagtaagtagtatttggtataagtgttaatttagttcgattaatgtaaaggtgtggatttaatttgcctgttcgggtagatgtaactgttggccacaacacttaatctctcttaatttggcccatatcactctcatattgtactactacgtgtaacgtactatattctcttctctcggtgtatcccccagtcaaactcatttcaattcactgttcccttgtattcggaattaatgttcgggtaatgaaaatgaattact

SEQ ID NO: 24125 - DNA, 292 bp, Glycine max
attaagcacatgttatcaaaaccgggttggacaataaaataggaaagtgggctttatcattaacataatattctttaacatacaatccttttaaatcttttaagtttcatattgtcgctcattttatttgaaatcattcatttatctaaattcttctacattatttctatacaaacccttttattttttatttttattcatctaaacacaaacatataactgtaattgtaaatttaaatatttcccccaattaatttccaactaatattaaatataaaattaaaatgctttt

SEQ ID NO: 24126 - DNA, 205 bp, Glycine max
aaaaaaaccggccggcccacacataccatctattaaataatacaatataatggttttttttcaatcacaatatctacaaacaacgcggcgtgttaaaaaaaagcggcggcacctcaaaaaaaatttcatattatttaatataaaaacctacaactcttaccctaccatattatctaccttttttcttcttacttaattttatcta

SEQ ID NO: 24127 - DNA, 354 bp, Glycine max
tagattcaattacatatttctgtagggtagtaagcttctgggcggtggttcttctaacaacatgtgacttgttttcaccaaatgcaatcctgcatgtaattttgagaaatgaaaaggagagacaagttaagataagaacttcccctgatgaagttagtgattctgaggtattttccccctttaaatgtataaataaatgtgctatacatgacatattctgtaactgataatgaaatttctgtcatatccaattgtttgatttatgtatgttattgcacttccagctagattgatgtttttcctaaattgtttttagtaattcttaataaacatattcaactctattaatcattg

SEQ ID NO: 24128 - DNA, 193 bp, Glycine max
aaattaccacttttctctaccaagtcccacaaaagcttatatcctctctgctcccgcgctccgcgttccgcagacatctgttcggtagatcgactgactccatgagaaacggagtataacaacttccatacagctccctccgacccgccacccaaaacacctcctgcggtaccctcctgacatgccctccata

SEQ ID NO: 24129 - DNA, 437 bp, Glycine max
tatgggggtagtacaccatagccatatcctcgggaattaagtttagcttaccgatgtcaacacatatatctcagctttcttccatagcattttctccttagctttcagcacattcagtttattccttactgtttggaataatattcgagttttgatcatccaatttgaagaaccaaaggatcacaaacagtcaacacaggaaggatcagttttgtttatatttcctcgttactttcgtgatggtctcagtattctttgcttctttactcggtgttggttttcttcaaactagtagcatgccatccatatccttaaatcatgtttagcatgccaacaaatctcagctttcttccttaattaacattttctcttttctcacattcaagttaatgcttaccatttggaatagtgacaagacaaatcacaactcacagtca

SEQ ID NO: 24130 - DNA, 265 bp, Glycine max
ggtgtgttcccttagccaagctcgcgtctcacttctctgtcttatattaatcactcgcgcacacagagcataattcacctttcttttccgaccaaaggttcgccagaaaatgcttctatcctcctcctgctccgccgccggcttccgcctttccggcagatcatgctgttcggcgtgagagtcttaatggactccatgaggaaaagcgtgagtatgaacaacctctcgcagtacgagctccctcgcgacgccgccaacgccaaaa

SEQ ID NO: 24131 - DNA, 237 bp, Glycine max
ggccgcgctgccacaccaaataaacacaaacatggacgcatcaaaactcaatcaattgaagcatttcatcgaacagtgcaagtccaacccttccctcctcgctgatccttcactctccttcttccgcgactatcttcaaagtctcggcgcgaaacttcctgagtctgcttattccgaatcgacgggcgtggagagggatgaggacatagaggatcttacggatgagcacgagaaggt

SEQ ID NO: 24132 - DNA, 354 bp, Glycine max
ggttccatttctcaacaacttctgctacttccggctggaaccgcacttctggtgggcaattatcatgggcaaggtcaagatcggaatcaacggatttggaagaattggccgtttggtagccagagtggctctgcagagagacgatgttgaactcgttgccgttaacgaccctttcatcaccaccgattacatgacatacatgtgtaaatacgacagtgttcatggacactggaagcatcacgatgtcaccgttaatgacgagaagacccttcttttctgtgacaagccagtcactatttttggacacagaaacccttaagagatcccatgggggtctactggagctgacattat

SEQ ID NO: 24133 - DNA, 404 bp, Glycine max
ggttcccctcatttctttaattactacttccccggtcgagttcacccactcacccaaacacgccactttccagttatcatcatcatgctttcgatttccactctcagaagatcctcacccttcctcgcccgacgcttctcaacccaacggtcccagatccgccacgcgtcaacctcctcctactcctgctcctcactccacaacaccgcgaacccggttcgaacctggttcggtcgaaacgcactctcgaccgtcctcgccggcgcgagcgtatcagggcttcttctctacggctactcttcttcgcacaattccgagttcgactcgtctctgctgaagagctcaatttcttctctcgttgaccggtcaacgccgatttccgaggaccaagaacggcgtcgttc

SEQ ID NO: 24134 - DNA, 375 bp, Glycine max
gtagtcaagacacacggatacgttcacacaatttctcgtttttctccctatgagagcagttagcatgatggtgaaatgtggttaaaagtcacagatggtaccggtatcactggaactgattgtatcttagaactggccataagtattcagtttctttcttgtttctgttttgccttccctagaacagtgcctctgcttttggttaatttgttggtgagcctgtcaatttgatttatttgtatttggtatattttgttttcagtttggagaagctttacttaaacaggaattgtttgagttctctcctttatcctgataacggtgggcggtatgaatcagaagttacgtgctataaacccttttaaaacttacact

SEQ ID NO: 24135 - DNA, 360 bp, Glycine max
taaacacagacttacatgcaggaaatcttctggtcagaaagcttgaagggtttggaaggtttgatcaagtggagctttttcccattgatcatggtctttgtctccctgaaactttggaagatccttattttgaatggatctattggcctcaggcatcaattcctttctcagatgatgagctcgactatatatatcacctagacccatttcgtgattcagaaatgcttagaatggagcttcccatgattcgagaagcatgcttgcgggttttggttctctgtactatcttcctcaaggaagcagcagcttttggtctttgtctagcagagattggtgacatgatgagtagggaatttcaag

SEQ ID NO: 24136 - DNA, 417 bp, Glycine max
ggtggcagagagcgaacccaaaactagagctaccttcccttcaaaccttccactcttctctccttttccaatcaagggaataatatttcttagagatattccgaaaccatggctcacgccaatcctatgatttttgttgttggaattctaggtaaccttgtctccttctgttgctttctagcaccagtaccaacattctatcgagtttgtaagaagaaaaccacggaaggtttccaatcacttccttacgtggctgcactcttcgcttcaatgctttggatattttatgcttacataaagacgggcgaaatacttctcatcaccattaacgcattcggttgtttcatagagacagtttaccttgtcatctatatcacttattgccccaagaaagctaggttctttaccttcaagatg

SEQ ID NO: 24137 - DNA, 403 bp, Glycine max
gatcggacaaaaacctaaacctaaaccttaccctgcaaagtgttgaatttacagtgtagtagtaaagtgagtagagaaatcgaagttgaaaagataatagatagtaacagcatcattcatcactcatcagagatggctaccgttgaaagtagaagcaaatcagtggtattggctctctccaagtacctatcattggatcctagtgttgttccagccgatacttcagacagtgatattaagagtctttacctgaacatcatagcggtatcaggacatggggttaatcactctgatgaggtgttgaagtgggtagcatttgcagaagccttccctgtggcccttgatgcatgctttgagaatctcaatagattaaatgatgaactgtctgaaaagtctgtgcttc

SEQ ID NO: 24138 - DNA, 414 bp, Glycine max
gacttattaattgtgttaagaaatttaagtgaggagctagagaatgatgatgaagtctgctatgtgtgcagtggtggttgtagcacttcttcttctggcggaggtggggcccatggctgaggctgtgacatgcaccccaacagagttgagtccgtgtcttccagcaatcacttccggtgctaaaccttccaatgcttgttgcacgaagctgaagcagcaaaaaccatgcttatgtggctacctcaaaaacgctagcttgaagcagtatgttaactctcctaatgcccgaaaaaccgttgcttcttgtgggattccctttccaacttgttaattaattaagccttcttataattaaagtgtgggatatatatatatatatagataaacagtttaatttatacacactttgatcct

SEQ ID NO: 24139 - DNA, 413 bp, Glycine max
gccgtacctttgtgtacaatcttatcacgccaatcataaatcagtacgtttctgatcttgacgagggcaaggcaatgtatctgtactttgtaaaagcagaaatgtgcactccatgtggcctaccagccagaacagtgttaacaagctactacaagagcaagcacttcaagtgccgcacacacgatccttggaacgactacacaagccctgaccaaaccattctatgcaatgacagcaaccaaagcatgcattgccagcttctctcaggtttggtccaccgccgccacgtcctacgcctcggtgccgtcttcgcctccgcacttctgagagccatttccttcctggaacgaaactggaggcacctttgtgaggacattcgaactggccaactcagttccttcataacagaccct

SEQ ID NO: 24140 - DNA, 411 bp, Glycine max
tttattactgatacattgaactttaagaaagttatgggaaccatatttgacaagtaacttgtgatttcaaattttcaatacattttttaattaaaaaaaagggggaaatcatcaatgcatttgtgaactgtgatcccccaagctgttatgcacattttttgtattaaaataaataattgaaacaaggcacaatcactgcaatgtcataacattaacaggtattaccaccaatcagcttagtagttattgttgtgctataatctgaatttttattattaatttgtatcaggtggatgttcggaaggaactcatacgaaattctgcaagcctgattgatcttcatcagctagatatttgatggtgcagctggatgtggagaaatggaattccttccatgttaaccatatacac

SEQ ID NO: 24141 - DNA, 400 bp, Glycine max
  modified_base (347)..(347): a, c, g, t, unknown, or other
  modified_base (394)..(394): a, c, g, t, unknown, or other
atagatgtttttttgtttggagttatcaaaaaggaaatgaatcattggtacttcaaacttcttatattacttttgttctcattaatttttattaacaacaaaatgaggagtttggatatcatgttgagtttgtagttttcttaagactttattaagtgctaatttatgatctaacaatatgttgactaatacaataacttgttaggttactgaaggatttgataaaataattatatgtgattttttatataaattatttttaaatttttatttatttaaaacagttgacataccggtgagagatttaaaaatatgatttataaaaaaattattggtgattatcttgntaaatttcttgatgaagacaaagtcaatgagttattaagatagttgntatgtc

SEQ ID NO: 24142 - DNA, 418 bp, Glycine max
  modified_base (401)..(401): a, c, g, t, unknown, or other
ccagcacgaaggtaatgtataaaccccagatgctgaacttgctcagagtgtcaccaataatgccctctaaaaagcagcaaggagattggtattagtgaaggtattgataaaatctctggggaaataatcttctgatcgacttctgcctctaaaaagcagcaaggagattggtattagtgaaggtattgataaaatctctggggaaataatcttctgatcgacttctgcctctaaaaagcagcaataagtgtgtgttggacaaaagtttgcaaaattgattttgagttgaagtaatttatgtttaaatgtttttattctgaaaagtaacttaccagtaaaactgactgcaaaaatttatcgaacacaaaatttacttatagttagtttaacttaatcaattntagattcaaaatcaatt

SEQ ID NO: 24143 - DNA, 323 bp, Glycine max
ttgtgaaatggatgatgagtggaggtttcagattttcgatgatgagatgctgccggaaaatggaatacgatcttctgcttcccttcaggccagggatcatattgcgcactatttgttgcaccatgggagggctgggactggctttttctagtcttctaggttcttcttttcgggttttcttgctttttttagaactttactactatctcattctttttcgctatgtcacgttgaataactagagattaactggattgcatagattgaaatatggtcatttgtatacaacaactattgattgtatagagaatttttgtctgatc

SEQ ID NO: 24144 - DNA, 404 bp, Glycine max
gaagagtgaaactgccaaaaagtgaggccaccccaaaaacaaagtgagattataggaaacaaaaatttctttgcttaatactagttcctcctttctcctagcctggtagtcttttgaaaattctttatcttgatcacataattttcattttgaacttgaagaaagttttagtgtatttttttttccttaaagaaacagaacatatcctgttctttctttctctgtttgcatttttgttcacttctttctttctttcttattatctagttaagcatgacaacatttatggacatgtacaacactactagtagcatcatgacaccggatttcttagaccagtgtagtgatcaagagctgatgaaagcacttgagccttttatgaaaagtgattcatctagcactac

SEQ ID NO: 24145 - DNA, 372 bp, Glycine max
gacattttctacgtattgaatctcaagattctaagagagattttgctgctctttgaagaagggtgtttgcttgattttggagatgtcgctgctctcagatctcatcaaccttaacctctcagacactactgagaaggtgatcgcagagtacatatggatcggtggatcaggaatggacctgaggagcaaagcaaggactctcccaggaccagttagcgacccttcaaagcttcccaagtggaactatgatggttccagcacaggccaagctcctggagaagacagtgaagtgattatatacccacaagccattttcagggatccattcagaaggggcaacaatatcttgggtatctgtgatacttacacttc

SEQ ID NO: 24146 - DNA, 445 bp, Glycine max
agaagacgacagaagggggcagcgcttgatttgaggccaggcaagccccactcaaccaccacacctctcctcgttcacgctacccctttctgctcttcttctacctttcaagttttaaaagtataaagatggcagagacattcctatttacctcagagtcggtgaacgagggacaccctgacaagctctgcgaccaaatctccgatgctgtcctcgacgcttgcctcgagcaggacccagacagcaaagttgcctgcgaaacatgcaccaaaaccaacttggtcatggtcttcggagaaatcacgaccaaggccaacgttgactacgagaagatagtgcgtgacacctgcaggaacatcggcttcgtctcaaatgatgtgggactggatgccgacaactgcaagggtcctcgtcaacattgagcagcagagccctgatattgctc

SEQ ID NO: 24147 - DNA, 418 bp, Glycine max
ccagcacgaaggtaatgtataaaccccagatgctgaacttgctcagagtgtcaccaataatgccctctaaaaagcagcaaggagattggtattagtgaaggtattgataaaatctctggggaaataatcttctgatcgacttctgcctctaaaaagcagcaaggagattggtattagtgaaggtattgataaaatctctggggaaataatcttctgatcgacttctgcctctaaaaagcagcaataagtgtgtgttggacaaaagtttgcaaaattgattttgagttgaagtaatttatgtttaaatgtttttattctgaaaagtaacttaccagtaaaactgactgcaaaaatttatcgaacacaaaatttacttatagttagtttaacttaatcaattttagattcaaaatcaatt

SEQ ID NO: 24148 - DNA, 370 bp, Glycine max
tgttctgatcttctcatcaggacgtgccacaggcgcggcgtgcatgctatgggaggaatggcagcgcagattccaatcaaagaagatccagtggctaacgaggtagcactggaacttgtaaggaaggacaagcttagagaagtgaaggcagggcacgatggaacttgggctgcgcaccctggtctcattccagcctgcatggagattttcaacaacaacatgggcaatgcttccaaccagatagacacagtgaaacgcgaagatggggcaaacatcaccgagcaagacctcttgcagataccaagaggagcccgcaccatggaaggtctcagattggacacaagggtgggaattcagtacgtggcggcgt

SEQ ID NO: 24149 - DNA, 413 bp, Glycine max
  modified_base (355)..(355): a, c, g, t, unknown, or other
gactagatgtgaatgtgattcatattcatagagagagaaagggaaagggagaagagcttgaggaagtgatgggagatgggagggtcggtaaagaatatatctgagactcgactcaatctcgatctctctcagtgttgtgttgttttgtttatccttttgccgattccgcccattcctatgatttccttcggttcctctctttccactctcctctccgctctttcctcttgttatggtaagcacctttcttcttcagatctgctctttataccatacacttattatagatctaagtttttatggaccttaactatcttccttgatctcttattaattttaaccgctctctctttgntgctggacatgttacttcaagataacaaattgcttttttatatttcatcttttctctc

SEQ ID NO: 24150 - DNA, 390 bp, Glycine max
gaagtcactacacaccaaatattcttcgtcctcccgctcgctcttctcactcgtcatcttcgaattcgtctgcgccctaacaaaattcatttcaattccaactcctctgatcaaaatcctaggctcgttcttgaatccctaattcgatctcctcctcctcctccgaagaataaaaggaggatcgatgtgggcagcatcttgcctggcgtcgtgctgcgcggcctgcgcatgcgacgcctgcaggaccgtcgtttcgggaatcagccgtcgttccgcccggatcgcctactgcggcctcttcgccttctcccttgtcgtcgcctggatcctccgcgaggtcgccgctcctctcatggaatcactttcctggatcaatcacttcaaacacac

SEQ ID NO: 24151 - DNA, 409 bp, Glycine max
cagccttaggttgtcatgaccaatgcccacaaattgttaaaagcctgtttagattatcattatgaaatacccctctggttatttcttcttttatctatccttctataactttcaattcattttgtaagtttatttttgcttaattggcaggttttctggggtttggacaaaaagcttgctcagaggaagcactttccttctgtaaactggcttatttcttattcaaaatactcaacggtatgtcctaaagttggttactttgtaactcatcctccagctttctacatttgtatgcatagtgttttggttccatgactttccccgaatttttaatattttctttttggtatctttaagcacttgaaaccttttatgagcaatttgatccagattttatcaacattaggac

SEQ ID NO: 24152 - DNA, 413 bp, Glycine max
cagccttaggttgtcatgaccaatgcccacaaattgttaaaagcctgtttagattatcattatgaaatacccctctggttatttcttcttttatctatccttctataactttcaattcattttgtaagtttatttttgcttaattggcaggttttctggggtttggacaaaaagcttgctcagaggaagcactttccttctgtaaactggcttatttcttattcaaaatactcaacggtatgtcctaaagttggttactttgtaactcatcctccagctttctacatttgtatgcatagtgttttggttccatgactttccccgaatttttaatattttctttttggtatctttaagcacttgaaaccttttatgagcaatttgatccagattttatcaacattaggacaaag

SEQ ID NO: 24153 - DNA, 318 bp, Glycine max
gatactaagaccattctattagcctagctaatatgatttgtgagagaaagggagaaagggtgtgagaatggagagcaaagatgaagatgtaaaggttggagcaactgagttctcagaaaggcaaccaattggtacagcaactcacggtgacaaggactacaaagaaccactgcacagcaccttatgttgatcctggtgaactaaagtcatggtccttctacagagctggaattgctaagtttgtggccactttcttgatactgtacattaccatgttaactgtcatggctgtgaacatgtcactctacaagtgtgcct

SEQ ID NO: 24154 - DNA, 423 bp, Glycine max
gacaccacaacttgcatctcatttctcatttctcacattgttattcacatctccatctagatctctctctctctctctcccaagaaattcatcaacagacttgtgattaatttgcaattgttcaagtgatctatcaagaaattgataattcaatgggaaagtacgaaaaagagcttaatctcgaggctacagagttgagattggggttgcctggaagcgatgagcctgggaaacgttctattgttagaagcaataagagatcttcaacagaagcaagcgaggaagagtgcataagcaagggcaacatgaattctaatggttctgatatcacaagtgatgaccaagacaaccttgtgccacctgcaaaagcacaagtagtgggatggccaccggttcgatcatataggaagaatactctacaac

SEQ ID NO: 24155 - DNA, 119 bp, Glycine max
atactactcaaaacttcttttttgtggaacctggacctctttttccgaaggggcaaacccttggtggttacaataactcctgttttttctatacattgtatcttctttctattattaat

SEQ ID NO: 24156 - DNA, 369 bp, Glycine max
ggcttttggaggaacaaaaccctctctccccaaaaacccaaacccttggcggctgcgagacccgttgtgttctctcttctctctctcttctttttttttttctctttccctctcttcttcgctccttttagggttttctcaactcttcgatttggggcttaaaccctctccgattcagattcggatttagggcttccctttctctattccgcctccaaagaaaaacagatctcgtggttggttcgtcatggccaccgttgctaatcccgcggatcaagcaactgatttgctacagaagctatcgttagaaactcagcccaagcccttggagattcctgagcctaccaaaaaggccactgggaatcagta

SEQ ID NO: 24157 - DNA, 405 bp, Glycine max
ggaacctgatctcttgctggttgccacactacaccgatatttccaccaaacccgtttgcgttgttgtttgcgaataaatggcaactaagaggagcgtgggaacgttgaaggagggtgatttgaaggggaagagggtattcgtgagggtcgatctgaacgtgcctttggatgacaaccttaacatcaccgatgacactagagtccgtgctgctgttcccaccatcaagtacttgactggttatggtgctaaagtgatcctttctagccatttgggacgtccaaaaggtgtaacacctaaatacagtttgaagcctcttgtgccaaggctgtctcaacttcttggaattgaagttacgatggccaatgactctattggggaggaagttgaaaagttggttacacaac

SEQ ID NO: 24158 - DNA, 399 bp, Glycine max
  modified_base (387)..(387): a, c, g, t, unknown, or other
gattgtagaactgaacaagggtttctctttctctttctctgtctgcttcttcactttctctcgtttcaatcgaaaaaaatcatgggcagaaaattcttcgtcggtggcaactggaaatgcaatgggaccactgaggaggtgaagaagattgttactactttaaatgaagctaaagtccctggagaagatgttgtagaagttgttgtgagccctccttttgtgttccttccttttgtaaaaagtttgctgcgccctgatttccatgtctcggcccaaaattgttgggttcgcaaaggtggtgcttatactggagaggttagtgctgaaatgcttgttaatttgggaattccttgggttattattggtcactctgaacggaagcagctnttgaatgaatca

SEQ ID NO: 24159 - DNA, 364 bp, Glycine max
gatgccaaacaaaatggagtgaggagcaaatgcgaagtatccaaagttgactctggaaacattcaaaagagtttcttctcctttcttccatcgtgccacggcgaagatgaagatagcgtggcttctgctgctcctcctggtatcagtgtccgttcaagtttgggccctgaaatcgccgtttcacccgcgagacgtacttcctctgcttcccaaacagttgtcgtggcccatcctcaatcgcctccacagcgcggtggatctcctccccgtcttcgtcggcgccgcctcttctccggacgacaatctcaagtggaaaggtgcatgcttctacgagaacaaagcctggatggtgtttcacaacaag

SEQ ID NO: 24160 - DNA, 426 bp, Glycine max
agaagggaatcagaaaaaatatgttgaaagagatgaaagaaaatagtgaaagattgattgaaagagatgattggaatgaatgaatatgtttcatgccaaggtcacatatttataatttcttgatgactcaagtcaaaacttgtaactcttggcagttcctttaaaactaattacttaaaaagttatgacttttgaaagaacctttagaaacaagtcacttgaagaattgtggcttttggaaatgaatatgggtaatcgattacatgtttatggtaatcgattacagctttgtaaatcagtttgaaatacaatgctggctactggtaatcgactaccagagagtaaaactctttggtaaaagattttgtgaaaatttcatgtgctacccaatgttttgaaaaacctttttaatacttatcttgattg

SEQ ID NO: 24161 - DNA, 414 bp, Glycine max
gatcgattctcgtaacaaaccctacccttttgagtcttccaagttttcaccatcgtaatgggttccgaaggatccagcgtcgtggttcctaggaatttcagattattggaagagcttgagagaggtgagaagggaattggggatggaactgttagctatggaatggatgatgctgatgacatatacatgcaatcttggactgggactatcattggtccccctagtactgttcatgaagggcgtatctaccagttgaaattgttttgcagcagggattatccagacaatcctccatctgttagatttcaaacaaggattaacatgacatgtgtcaatcaagaaactggagtggttgagccacatttgtttcctatgcttgctaattggaaacgtgagcgtacaatggaagacatt

SEQ ID NO: 24162 - DNA, 365 bp, Glycine max
gaagggattgtcttctggaattccggcaattgctgcttttggtctttcaaaataaaaatgctaacagttttatcattcaaaaggaaatatgttcaagcgtcttttaatatgaaatttagaagacgattttacgttattataaaactaacaatttttatccttaaaaaaaactaaattttaatttatttatagttaaaatcactcaaactttaaactcgtttttttttttactccgcttggatgattgaagccacattatttagtcttggttttttttctagaagcaatgagactaaccattaaagtatagaaattatcaagataggttttgtcttttctaacaaaatcttatatataatatataa

SEQ ID NO: 24163 - DNA, 374 bp, Glycine max
ggatatggcctacatagtgtatttcaccctgggcctcgggtaccttctcccatggaacgctttcatcactgccggtgattacttgtcctatctctaccccgatgccagcgttgaccgcatcttcgccgtcgtttacatgttgatcggcctcgtggggatctccctcataatcttctacagccacaagtccaacgcctatgtgaggatcaacgttggcctcgccctcttcgtcgcttctctcctcatcatcccccttctcgacgccttttatctcaagggtagggtcggcttgtatagcggcttctacgtcaccgccggcgccgttggactttccgccgtgggcgatgcgttggtgcatggctccattgtgggct

SEQ ID NO: 24164 - DNA, 400 bp, Glycine max
gagtgcacaagtgagtttgttgatcgagataactagaaacagtgtgatgaaaatgaaggtccttgttttcttcgttgctacaattttggtagcatggcaatgccatgcgtacgatatgttccctctccgaatgaacactggctatggtgcccgtactccggaggtgaaatgcgcaagttggaggcttgctgtggaagcacacaacatctttggctttgagaccattcctgaagagtgcgttgaagcaacaaaggaatacatccatggcgaacaatatagatcagactccaaaacagttaaccaacaagcttacttttatgccagagacctcgaagtccattccaaggacacatttgtgttcagtatagatggcaccgtactctctaatattccatactac

SEQ ID NO: 24165 - DNA, 413 bp, Glycine max
attggacagaaggagggtctctgagaaacgttcccgttggaggtggctctaggaaaaacaagagggtcacctcatcaaaggttcctgacttgaatccaccaattagcctctcatcagtctcagccatttcttcccaaaaccctaaaatgcaaggagtccatgaccttaatctggcttttcctgcagctatggacaagtatcatcatggcacgtctccgtatgttgagatgccaaaacttgaaattggtggtgatcacagtactagtcatcatagtcaccaccatagccatagcccttcttctgcagttgagctactacggtctggcatggattctaggggtttgaatccttatgctcctaattccttgatgtcaggctcagatcattccctttatacacctggctatcccatg

SEQ ID NO: 24166 - DNA, 407 bp, Glycine max
gacacaccaaaccaaagtaagagtgagcaacttccaacaccatagtgaaatggcttccaaggctgcacttctcttgtgtttcaatgttctcttcttcaccgtggttagctccacatatgtgccatgcaacccaccccccaaaactccaaaacacccacctgtcccaaagccaccttccccaaagcaagcaagttgccccaaagacactattaagtttggtgtgtgtgctgatgtgttaggtttgatcaacgtgcaacttgggaagccaccaaagaccccatgctacaacctcattgagggtctcgctgatcttgaagctgcagtgtgcctctgcactgctctcaaagctaatgtgttgggcatcaacctcaatgttccagtgaacttgagcttgctactcaactact

SEQ ID NO: 24167 - DNA, 385 bp, Glycine max
ggagagagaggggacatttaatattttctttctgaaaaacaaaatgggtcatatcagcaaatttgcgagaagatgatggtcactgtgatattgttccactcttgatgcttcttttgggtgttcaggttagtgaggcagaaacaacctgttatagaaaaagaacaaattttcccatctcattcacagctcctctcagtgggtttgatttggtgtgattattaccccatgctcctcttcctcctcctcttgttatgttatctcttcaacttcaacctacacggatatccacaaaaaaacgaactttttggttggaccactccagttcaagcataatggagctcctttcttgagatatatcaactgggttttgtgcaacttttctctt

SEQ ID NO: 24168 - DNA, 400 bp, Glycine max
gatttacaaagttgtaatcgattaccatgagcatgtaatcgattaccaatgttttaaaatgttagatttcaaatttcatgagttacaactagtgataaaacattttcaaatcattttaaacttgtgtaatcgattacacaatacttgtaatcaattatcagagtttctaaacgttttgattttcaaattttaacatgaagagtcacatttgttgatgtgtaattgcttacaccttgatggtaatcgattatcagtaactgatttcaaaaaataaattatcaaaagtcacaattcttaaagtgacttatttctgaagagttttttaaaagtcataacttttaaagtaactagttttcaaaaagagtcacaacttttaaaaggtgactagttttaaagaaat

SEQ ID NO: 24169 - DNA, 391 bp, Glycine max
gaagggattgtcttctggaattccggcaattgctgcttttggtctttcaaaataaaaatgctaacagttttatcattcaaaaggaaatatgttcaagcgtcttttaatatgaaatttagaagacgattttacgttattataaaactaacaatttttatccttaaaaaaaactaaattttaatttatttatagttaaaatcactcaaactttaaactcgtttttttttttactccgcttggatgattgaagccacattatttagtcttggttttttttctagaagcaatgagactaaccattaaagtatagaaattatcaagataggttttgtcttttctaacaaaatcttatatataatatataattgtgttggtgagatgattaattaaa

SEQ ID NO: 24170 - DNA, 390 bp, Glycine max
atactccaaaaactgcagtattttagaattagtgagaattaggaaaaatcgattttgaatcagtctttttaaaaagtaaattgttttttatttaatctaaaatattttaaatataaataaaaatacataaatattttacataattatcaattattctgttaacggttattaatctttatcttgtgaaccatataattaaattatttatacaaattttataatttttcagaccctaatcttactattttattacttaaaatattatataatattaaaatatataaaattaattcaacatgattcaacacgtattgaatcattaaagcttaaaccagtgtcttcatcaatttactcatcagttcaaatttaaacatattggattatatatta

SEQ ID NO: 24171 - DNA, 404 bp, Glycine max
tcatagtataaaccaacattagaattttcagctcaatgaggcaagattaattattttcaaaataaaataattgtctttacatgaaattgatgcaaagtatgttgttatgcctttttatgtgtcctaaacattaataaggccaattatgttgaaagcaactatagaaatattgcatgtatagaaagtaggaaaaaaaacagaatgatggtacacatatccaataggttggtaattcagatatgcttatactttctttctaaaattgcatttctttgaatttcctaaaattgcattttttttctttcccttgaacagtcactattaccaatgggtaaactataaaattaaatgtatagtataattgtatacatttaatgataaatatgtaaaacttattaaatgat

SEQ ID NO: 24172 - DNA, 402 bp, Glycine max
ggacgcaccttgttttctctgcattgtttcgaattccatggaggagtcttcgtacaccggtcttcccactagccacttgctcggttcagttcctgctgtcataactgaagaaaataatgccacgaaacatgtggccaccggtgcaaatatgcaaacattccctcccaacaatggaggagacagaggaccaggacatcaaactcttggcagtcctactgaagcttttgaacaacagccagcaaacaactggaggggaatctttagcatgtcatcatattcagagtatttcaatgtagacacagatgttgtcttaatcagattgataagttccttgaatccagttgctgcagactttttcagcaagatagatgctaaccctgatttatatgggcttatatggat

SEQ ID NO: 24173 - DNA, 410 bp, Glycine max
  modified_base (400)..(400): a, c, g, t, unknown, or other
gcttttggaaagccacagggtacttgtgctagagtggctattggacaggtccttctttctgtccgctgcaaggacagcaacagccatcatgcccaggaggcccttcgccgtgccaagttcaagttccctggtcgtcaaaagattattgttagcaggaaatggggcttcaccaagtttagtcgttctgattatctcaagttcaagtcagagaatagaattgtgcccgatggtgtgaatgctaagcttcttggttgccatggaccattggccaaccgtgaacccggaagggcctttttggatactgctactggttcttagtctgtttgttaatttggaaatactagactttggattactttagttttgcaagagtgaatttgagttattgtcagaacatttncaattactta

SEQ ID NO: 24174 - DNA, 361 bp, Glycine max
aatgatgaggctgcagaaacaaaggcagttgagccagaacccccagtttatgcaaataagatggaggctaaagatgcattcaaagcactcttggagtctgtaaatgttggatctgactggacttgggatcggtccatgcgtttaataattaatgataagaggtatggtgccttaaaaacacttggtgaaaggaagcaagctttcaatgagtacttaaatcagaggaaaaaacaagaagctgaagaaaagcgtatgaaacagaaaaaagcccgggaggattttaaaaaaatgttagaagaatccacggacttgacttcatccgctagatggagcaaagcagtgtccatatttgaaaatgatg

SEQ ID NO: 24175 - DNA, 385 bp, Glycine max
ggagagaaagagtgaggagagaattacagagcattttccaacacgattacacgaccgaatcaaaccctctctttctctccgaagctgcgtttaatatcttactcgccttagattgttcttctctttcattatactgttctcttttcgatttgagggaacagtacaagagtgtgaggatcggttaacccaactgcacaggtagtcactaaaataatggagtctcacgatgagactggatgccaggctcctgaacgccccattctttgcattaataattgtggcttctttggaagagcagctaccatgaacatgtgttccaagtgttacaaggacatgctgttgaaacaggagcaggacaattttgcaacatcgtcgggtgaaaaca

SEQ ID NO: 24176 - DNA, 394 bp, Glycine max
gaagggattgtcttctggaattccggcaattgctgcttttggtctttcaaaataaaaatgctaacagttttatcattcaaaaggaaatatgttcaagcgtcttttaatatgaaatttagaagacgattttacgttattataaaactaacaatttttatccttaaaaaaaactaaattttaatttatttatagttaaaatcactcaaactttaaactcgtttttttttttactccgcttggatgattgaagccacattatttagtcttggttttttttctagaagcaatgagactaaccattaaagtatagaaattatcaagataggttttgtcttttctaacaaaatcttatatataatatataattgtgttggtgagatgattaattaaatgt

SEQ ID NO: 24177 - DNA, 393 bp, Glycine max
gatccacatcctccacaacacaactccactcttagctgccattggtttttcttcttccatttctcttcctttctaagcttttttcgattacccatttggagattctgtcctaatggctcttgctccttccaaagtttcctccttttccgggttttctcccaaacccagtgttggggatgctctgaaaaacccaacttgctctgtttctctgagctttgcgaatgtgaaacttggaagcagaaaccttagggtttgtgcctcaactgtgcctctctcaggggtgattttcgaaccctttgaggaggttaagaagggtgaacttgcttgtccaacggcttcccaagtctcgcttgctcgtcagaactactctgatgagtgtgaatctgcctttat

SEQ ID NO: 24178 - DNA, 401 bp, Glycine max
gggggccaagactgttgtcacggatgaagccacacacactgagagaaggcttcaccaaatgatgtttgctgatagggattatgaacgagttaatgatgatgatgacttcgctgagaagcaaaggcctaatgtgaatgttgtgaattggtctgataaagattattctgtggttactattcagtgtaaggataggccaaagcttctctttgacacagtttgtactttgacagacatgcagtatgtggtttttcatgcaaacattgatgctgaggggccagaagcatatcaggaatactacatcaagcatatagatgggtcccctgtgaaatcagatgcagaaagacaaagagtgatacaatgtcttgcagctgcaattgaaagaagagtttctgagggtttga

SEQ ID NO: 24179 - DNA, 350 bp, Glycine max
cttccaagggaccacttaccattggtggttaacccttaaggtccattaggaaagtgattttgggcctaattaaaccccaaaggttagttaaggggttaagagaaggaatattttcttcccctctttatattaacggattagttaggctaaaaatactaatagaatatcgtatcatatattatatcagtctcaatcgatggctttgttatatgttagatattgatacgcttcaagcgctctatagatgtgtgagattaatcttatttgaagatagccttagattagttgagatgggatttggatggatgccgtatacggtggacttttatgctttttgtttgagtgatttg

SEQ ID NO: 24180 - DNA, 423 bp, Glycine max
gacagagaaaccaaagtttgatgtaagtcctttttcttttcatatttcgtgaatttcgaaattcacgtcaaatttcaattgcgtcatctcatttttccgcccaaaacaaatcctccctccgcgctcgtcaaggggagaaagagaaaagacaaaacgagcagagaaaatgacggaaagtgagggaaagtgtaagaaaatgggcaaagagaagagaggtagaagcttcatcgccttcaccggagctgcggcggtgcttggaattgcggcgaacctagctatcaccgcaatcaagtaccagaaggcaaaaaatgctaagaagaaagatcttgcaggttccaaggtgcgcgttaatctctctgcatctgagattcttaagctggctgagcaaatcattgctaactcaaacaaggcccataattctgt

SEQ ID NO: 24181 - DNA, 406 bp, Glycine max
  modified_base (362)..(362): a, c, g, t, unknown, or other
  modified_base (368)..(368): a, c, g, t, unknown, or other
aagagttactgtaatgtaaggaagggaaattgtgtgcaatctcaagaaactgcaaaggaatgtcaatgcaatttgctctaaaaataaacaaacaaataaacgcttctctaacctctttaataaagcacaaacaagaagtactacaacaagatctcatcagtacacaagtattcgtagcaagggaaaactttatccttcaagcaagttcacacaatataacttggataagttgaagcctaatgtgatttagggataaccaaggtctcccgaagcaccaaataaaaaaggagaaaagaaaaagaaatcatgtatatgaaatatccacaagcatatcaacattgttaacactaataccatggttntaaatngcggtcgcgactgagttgcagtgagctagaaaccttta

SEQ ID NO: 24182 - DNA, 392 bp, Glycine max
gttatcaagaaggcgaacctcgtcacgtacaggggacccacgatggtcgccaacacgctccacgccgccgcgatcctgcttagggagctcggggattgggactggttcatcaatctcagcgcctccgattacccacttgtcacacaggatgatctgctgcacacgttttcctacttgccgcgggatctgaatttcattgatcatacgagtgacattggatggaaagatcatcatcgtgccaggccgatcatcgttgatccggggttgtatatgaataagaagcaagatgtgttttgggttacgcagaggaggagtaggccaacggctttcaagctttttacaagctcaacttggaggccctgtcaaagcatccccgattactgatattggga

SEQ ID NO: 24183 - DNA, 436 bp, Glycine max
aagacgacagaaggggaaggtgcaagagtttgttgtgagctataagctagtttatcgtgaggagaatatgaagttgtttgttttctttgttgctgcagtagttttggtagcatggccatgccatggcgcaggctaccaaaggttccctctccgaatgaaaactggctatggtgagcgttcttcggaggtaaaatgcgcaagttttaggcttgctgtggaagcacacaacatccgagcctttaaaaccattcctgaagagtgcgttgaaccaacaaaggactacattaatggcgaacaatttagatcagactctaaaacagttaaccaacaagctttcttttatgctagtgaacgcgaagtccatcacaacgacatatttatattcggcatagattacaccgtactctctaatatcccatactatgaaaaacatgga

SEQ ID NO: 24184 - DNA, 410 bp, Glycine max
tagcctctgtggttcttccctaggttgggattatcacaaccttggagttctcaacgtggacaaaatgtctttaagtactatactatacttttgtttctctttatatttctacctataatgcatttgttacctccttggataagatattaatgcttataactagctaaagtgttgcaatgcaatgattggtggtgatattcaatatgcagtgccagctatggagggaagtactacaccatcactctcatcacctcaacactctgatttctcaactgggtatctcgaagatgctttgattgaatcatgtgagcgttcaaaacgtagacgtgtgttgccatgtgctactgatgaacatagcaagagtttcattgatgaccttgagcaggtacaattagctatactatatatac

SEQ ID NO: 24185 - DNA, 380 bp, Glycine max
ggtggcagagagcgaacccaaaactagagctacctgcccttcaaaccttccactcttctctccttttccaatcaagggaataatatttcttagagatattccgaaaccatggctcacgccaatcctatgatttttgttgttggaattctaggtaaccttgtctccttctgttgctttctagcaccagtaccaacattctatcgagtttgtaagaagaaaaccacggaaggtttccaatcacttccttacgtggctgcactcttcacttcaatgctttggatattttatgcttacataaagacgggcgaaatacttctcatcaccattaacgcattcggttgtttcatagagacaagttaccttgtcatctatatcactta

SEQ ID NO: 24186 - DNA, 377 bp, Glycine max
atgggaaagcttgtgcagttgatggtgcaaaaaaaggcagagtacgtgagcgtgaacgtggtcgggctgttccagcccctgaagccaacgcagagatccaaacaaacttagataggtggagagttgtgacccatgcaaatgcgaaaagcaagagtgagaaattttcaccttctcatcaagatggagctgttggatacccacaagatgcatcaaataaaggacctgtttcatttggcgccccagacactttcttctctttagggatatttaattcaaaaccttctggacatgttaggaatcatgctgctgcagggcttaacagagggaggagaacttagaaagatgagtcccagatggcatcatcatggaaattcatg

SEQ ID NO: 24187 - DNA, 402 bp, Glycine max
  modified_base (391)..(391): a, c, g, t, unknown, or other
gatgagttctaatatatcattcaaaagtttttgaaatgttgtcaccccttcttctatttctatgcctaactcttcctttgtttttgttgtccttcttcaaataccgtaaaaccttcaagaatccaccacttccaccaggtcctagaggccttcccataatagggaatcttcatcaactagatagtccttctcttcatgagcagctatggtatctctcaaagaaatatggtcctttattttcccttcaatttggattaaggccagccatagttgtttcctctccaaaattggccaaagaggtaatgaaagacaatgaccttgagtgctgtggacgacctaaattactaggccaacagaaactaacctataatgggttagacatgggattttnctcatacgata

SEQ ID NO: 24188 - DNA, 382 bp, Glycine max
ggtgagtgagacaccgatagatagagagcgcggcataacctaaacctatctttcttctctctctgtgtgtgcgcttcaacggcaaccagaagcagccatggccactgcaaggactgtgaaggatgtttcacctcatgagttcgttaaggcgtactcctctcacctcaagcgatccggcaagatggagctgccagagtggactgatattgtgaaaactgcaagatttaaggagttggctccttatgatcctgactggtactatgtcagagctgcttccatggcaagaaagatctacttgagaggaggacttggtgttggtgcctttcagaggatttatggtgggagcaagaggaatggtagtcgccctcctcatttttgcaag

SEQ ID NO: 24189 - DNA, 401 bp, Glycine max
gattccactgagtgtagtaatcaatcatcttttgtttgttcttcagtactttagtgtgtgatttaattccaagattttgagaatgtctagctgtgggtgtggaagtagctgcaactgtggcagcaactgcggttgcaacaagtactcttttgacttgagctatgttgagaagacaaccacagagactcttgttttgggtgttgggtctgtgaaggcccaattggagggtgctgaaatgggtgttgcagctgagaacggtggctgcaactgtggatcaagctgcacctgcgacccatgcaactgcaagtgaggtcaagatttataaccttgaagcaaagataactgtaatatatgtatcaacaaataataagaattacgtgttgtggttaaataagtgatca

SEQ ID NO: 24190 - DNA, 244 bp, Glycine max
cgttaatacgacagaacgggatagtgctagagtttctcctgagctataaactagtctggcgagaggagaatatgaagttgtctgttttctttggtgctcctaaaggttacctaaaatggccatggcctcttgcaagctttcaaaggatatctatccttatgaaaactgttaagtcgttatcctttttactaagtcaaatccgcaagtttaagctttcagtggaaacacacatcatacaaccctt

SEQ ID NO: 24191 - DNA, 166 bp, Glycine max
gagtccttgttccttgtctcaaaaacaaagtttttacatttcatataactctcatcgttaattcataatgacatgcacggtccctagatagtaaaagatgtgctcggtagcgtgccggaaaaattgaattgtcgaaatctttctaatgtattttcactgatggtac

SEQ ID NO: 24192 - DNA, 414 bp, Glycine max
atgggttgaatttaactgtcatgattgtgtggaatttaactgtcaataaaaggagtgtaaaaatttacttatgaatttatttagtaaaaaagttcataaagttgagatttatggttactcttatggctgcaaaaatttagaaaaaatgtgtgtgtttgttataggagatgttcatgaaatactggtcgagttggaaggaatgggtggtggcggaaaggttcagctggaggtatgtttcttttattagaaaagaagaaacccaagaatacagatttataaaatggggaaaagttattgaccatttgaattttagttgacagcatgatgcctatgcattatatttcgtgtataatatagtggaaaaattatttctctgttgtgctttgttacaacttcatttgccaatatatctgg

SEQ ID NO: 24193 - DNA, 389 bp, Glycine max
gtcagatttatcttgacgggagcaagagtaataataatgtgtataatgctacagcagcgggtatggtaaaaaaaatcatacgaaaagaaaaagggggatacgaaataactatagtggatgcattggatgggcgtgaagtgattgatattatacctccaggaccagaacttcttgtttcagaaggtgaatctatcaaacttgatcagccattaacaagtaatccaaatgtgggtggatttggtcagggggatgcggaaatagtacttcaagatccgttacgtgtccaaggtctcttgttcttcttcgcatctattattttagcacaaatctttttagttcttaagaagaaacaatttgagaaagttcaattgtccgaaatgaatttctag

SEQ ID NO: 24194 - DNA, 376 bp, Glycine max
gtgattggagggtatcaattggaggatgtgttggtgcagattgattttgatacttccatggtgggattcagtccttcgcttctgacgaagcatgctacttgctctcatttcaaaccctagttttcggtgaatcgtgatgattatagtttattattatccataccacatagtttttctttagattaagaagagttttgaggagtttaacacgttctgtaataacccttttattttttttttctttcttttttgctctcctgcggtattatctgtataaactgcttaagtggactatgtttaaatgcaattgcatttttgatggcatttttatttgaaattgaaatacttctccagtaaggaaaatttggctgagcat

SEQ ID NO: 24195 - DNA, 393 bp, Glycine max
tttacaggtggtgacaaaccatatctaatcactggttctgatgatcacactgctaaggtatgggattatcagaccaaaagttgtgtccagaccctagaaggtcacacacacaatgtatctgctgtatgctttcatcctgaacttcctataatcattactggttctgaggatggcacagtacgcatatggcactccacaacttataggcttgagaacacattaaactatggtcttgaaagagtctgggctattggatacttgaagagttctcgtcgggttgtgattggctatgatgaaggaacaattatggtcaaacttggtcgagaagtacctgtggctagcatggacaacagtgggaaaattatttggtctaagcataatgaaattcagact

SEQ ID NO: 24196 - DNA, 397 bp, Glycine max
gatgaccagaggaaaataatttcttttaataaaaaaaacttagaatcgaaacgaaaaatcgccatgaatcccaaaatcctcttcgtgtttgctctgcttctgaatctcgtatccaattcgttccaaaaccctaaccctaaaacccccaaatcaacgtcatcgcaggctcacgtggagctcatcaaccacggcttacccgccggtcttctccccgccaccaccgtcttgggctacgccgtgaaccgtacctccggtgactttaccgtcaagctcggcggcgcgtgcaagatcacgctcccgccggacaactacgtcgccacctattccgacaccatcacagggaagatcgtgaaggggaaaatcgctgaactcgaggggattaaggttcgcgcgttct

SEQ ID NO: 24197 - DNA, 402 bp, Glycine max
gggcagtgtatctgagtaatatcactgtccctttccctctccctttcatcagaaacacaaacaaaacaccgattcactatattaccagatcggactcaattcctgaaccgatgaagttgaagccgcggtgaaccaaaccatcatcatcgcgttaccggaataatcgacccatcatcaattagatcgaaatgaaggatgaggacgggcttccgacgacgaccgcggttacaaagaaggaaaacttggattcgagtctgtttggaaaaggcaggtacaaattctgggcgttagcggccatcttgcttctggcgttctggtccatgttcaccggtaccgtctcgctccgctggtccggcactctcaattccctttccaacgacatcgacactcccatccacgacg

SEQ ID NO: 24198 - DNA, 406 bp, Glycine max
catgtataccttacatcacattgtcttctttaagtaacgactttttttttatgtgcttattttctcccttaatgatgacctaattatatctaacttatgtttttaattttcttttaaaatctaatataagtagtgtcatgtatagtggaacgaagtacctatattgttaaacaaaatgtttatgcaaataatatttggatattgataaagtgtaaatgaattaaattatttacaaattagttgaacttgcatgcatggttcgttcattcttaattaagtccattttaattagctcaacaaatgatatcgatcttaaagttggactcaattatttaacaagttatgctttagttttatagggtttcacattaataactggttcgtacctatatatatatttgatagc

SEQ ID NO: 24199 - DNA, 248 bp, Glycine max
tgtaagcataccctagtctttgatgaaagcctttggcaacaagcctgtctatatattcgataactcgtccatctgggtataaattaacccttaaaacccatttgctaccaatgggaaacttttgtgagaggtataactatccagagtcctagttcttattgttcatagaagcttcatattctgctctcattgctgcaatgtcacatatgatatgcaatagcttgactttgttgatttggtcaatttga

SEQ ID NO: 24200 - DNA, 390 bp, Glycine max
aattcgagcggccccttttttttttgtttttttttttttttttttttctctattcttcttttgtgttggtcaccttgatcttattttaatggttttgatttgagattgaaaattgttggagtggaattttgatttttccatgcgaagatctgattaaagcagttaagttcatttagtaattaaattaattaaactcacatttcttaagaatttggataaaattgctgaaaggcataactttgcatgcatgtctgcatttctttgtttttattgggcatggttcttctagttttaagtttattatttttctaggcttcacaaaaattgagtatcaaggagttaaagaatttaagacaaaataccaaattaaagtagatcaatttttttcat

SEQ ID NO: 24201 - DNA, 343 bp, Glycine max
aaacggacctcggccgtgaacaagagggctttaagagaagacggcggcggtggtggcggcggcggagcgatgaggtaccgcggcgtgaggcgcaggccgtgggggcgttacgcggcggagataagggaccctcaatcgaaggagcggcgatggctgggaaccttcgacacggcggaggaagccgcttgcgcctacgactgcgctgctagagccatgaggggtctcaaagctcgcaccaactttgtttacccaactgctccgcaaccttcttccgccaccaccgaacacttgttccctaacttcaacatcaacaacgactttcacaaactctcacttttaaatt

SEQ ID NO: 24202 - DNA, 405 bp, Glycine max
catcaagctgctggagtttccatttatgagtaatagcaagagtcaaacgaattttgacagtaacaagtttgattacaggtgtgaaagtctcattgtaatcatacccaagtctttgatgaaagcctttggcaacaagcctggctttatatttgctaactgtaccatctgggttttttttaacccttaaaacccatttgcaaccaatgggagactcttgagagaggtaaatcaacaagtgtccaagtctgattgttaagaagagcatcatattctgctctcattgctgcatgccagatgggacatgcaagagctgactttgttgatttggtcagcatgagtaaggagtgtaggttgaattctgggtttgacaatcccagctttagctcttgtgcacatagagtgaat

SEQ ID NO: 24203 - DNA, 392 bp, Glycine max
  modified_base (250)..(250): a, c, g, t, unknown, or other
  modified_base (329)..(329): a, c, g, t, unknown, or other
ggggttccatgttcgcacggagcaaaaccaaaaacacggtgtggcgctgcggatctctctctcggtcgttgctctccgccgcgagaaccactccaaatcgttcctccatttctctccttcactgtccttcttcgccttccctacgctctcatcttctccaccctcgccgtcccctcattacactccttaggactgtgggaattctcgggtgcacgtagtcgctgattcctctacacagcgctgacgcctncgctcgtctcacttctcacatttccatcgaatcgcgcgcttgctgcaaattctcgcagggtacttgttccttctaaatntctatctctcttgccctaattaggcatgctttctgtcattatgatgtattttcattattatat

SEQ ID NO: 24204 - DNA, 380 bp, Glycine max
ggtggcagagagcgaacccaaaactagagctaccttcccttcaaaccttccactcttctctccttttccaatcaagggaataatatttcttagagatattccgaaaccatggctcacgccaatcctatgatttttgttgttggaattctaggtaaccttgtctccttctgttgctttctagcaccagtaccaacattctatcgagtttgtaagaagaaaaccacggaaggtttccaatcacttccttacgtggctgcactcttcacttcaatgctttggatattttatgcttacataaagacgggcgaaatacttctcatcaccattaacgcattcggttgtttcatagagacagtttaccttgtcatctatatcactta

SEQ ID NO: 24205 - DNA, 403 bp, Glycine max
gatagcagcatcatacaaagcattgaattcaaaaactaagttcatttcttgtgctttgctttattcctcaaaaccaaacatgtcgaacacatgcggcaactgtgactgcgctgacaagactaactgcaccaagggaaacagctatggtgttatagtagagactgagaagagctacatcgagactgttgacatggatgttccagcagctgagcatgatgggaagtgcaagtgtggcactaactgcacttgcacggactgcacttgtggccattaaggaatatgtatgaaaatgtaattgccatgtgtttggcaatacaaatctccaaataatgtaatcttcgtatgaataaatgtgtgctgatatcctacttcagggtctgtgtagtcatgcaatctgaatcat

SEQ ID NO: 24206 - DNA, 177 bp, Glycine max
taatatcactgtcccttttccttttccttttatcataaacacaatcgaatacaggggaatcactggattaccatatccgaatcaattactgaaccaattaactttaaacctcggctaaccaaaccatcatcattctcttacccgaataatcgacccatcattaattaaatctaaatt

SEQ ID NO: 24207 - DNA, 332 bp, Glycine max
gaccacaccatactgtgttttattcttctctccctccttcattttcatttacttctctgggggtatataactattattctttttttttttttaaacataaaaattgtttaaatcttttgccatgggaacccagattttgcggcctcaggactgtttcgtagaacgaatcatgtctcctcccgctgacttttcccggcggaggagttccggtaactactgtaattattattaccacagcaaccatgttgccacttccaggtcgtgccggaagccggttgcccgacccgataaaaagaaacgggttgttccggcttctggcatgccgcttgtgg

SEQ ID NO: 24208 - DNA, 414 bp, Glycine max
gtgctgaatgcacatagtgacatattctctcctttgcttctcaatatattccagagctgctttgcttaaaatgttttctccctatggaaagataatttctgaggacttcttatggcacacgcgtggcccaaaacgtggggagccacgtggttttgcttttatccagtatagcacaaaagaggtaagttgattgcatacattagttacttcactttctagcaatttctgatttccattgttaaagtgagaatgcaggaagcagaattagccaaggagaaaatgcatgggaggttagcttgcagccggccattggtggttcgtcttgccggtgataagtgcatgttggaaacagttgatagctctacaaaagcagctggtgaagggcacaagatgcatctcactggtggtggtggt

SEQ ID NO: 24209 - DNA, 416 bp, Glycine max
gtctctatatatataagagacattataactttcagtttcaaaacaaagaaattcattactttgatgattaagtattgttgttggtgctaagggtcgaaggttttaatcttatttatttaacattttgataatttatatgtctattttgcatcacgttacaccagcatcaagtcaatgtcatgcataagaaccaccatgcatttaactcatttttctaaaagtcattttcttaagttgttcatgttctaaacaaattagctatcgtgagtgtaaaataaatacatagttttttaggcaaatgttgggccaaattttcaaggcaatgaacaaaacttgtgactatttaataatttaaacaatcattttaaaacaaaagatgatcataatatgtgaagaccaatataaatgaaagaacg

SEQ ID NO: 24210 - DNA, 403 bp, Glycine max
gggtgtggcactcaaacattgtttgttgtaggaagaggaatcttgagaaatggcaggggacagcaagagcaagattctgttcatcggagggactggttacatcggaaaattcatcgtggaagccagcgccaaagctggccacccaactttccttttggtgagggagtccactctctccaaccccgcaaaatcacccctcatcgacaatttcaaaggcctcggtgtcaatcttgttttaggagatctatacgatcaccaaagtttggtgagtgctataaagcaggtcgatgtggtaatttctactgtaggacacctgcagctagctgatcaagataagatcatttctgcaattaaagaagcaggaaatgttaagaagttctatccatctgagtttggaaatgat

SEQ ID NO: 24211 - DNA, 402 bp, Glycine max
ttttcccttatcttctatcctctcctgtcttgctgataattaataatatctggggtcacggtcttgccttgcttcattaacaacttgtgtgtttagattatacttatctcactcaaatcatggttcagagggggcaaatttgattttattttcaattaccatgtttggcataattttatttgggatatgtgctacgagattttggtgtcgaattatgtttaaactgaggtaagaaatagttatgttttagcaccgcattagctttgtaaaggaaatactaatactaataaacaatatgtttccggtgaaagcatttatagtatgctcatgattgtttttcctttttttatagacgcaacactagaaaccaaaacataaagggaaatcatgtacataccattt

SEQ ID NO: 24212 - DNA, 406 bp, Glycine max
aggggtaaggcatggaattgtgatgttggatcttgagatcctcacacatttccttcatcatcttgttatttaggttggtggcattgatcgcgataatcttcctgggcaacccataccagcagattatctctttcttgatgaacttgaccaccatgcttctcgtcacgctagagtatgaagcagcttcaacccacttggtgaagtagtcgatcacaaccaagatgaagtgatgttccttcgaagccttgggcttgatggctccgattacatctgttccccacatagagaagggccatggcgctgccaatacgttcaaaggcatgggcagagcattgacattgtcagcgaaagcttggcacttgtggcatttccttacacggatgcaacattcgcttttcatggtgag

SEQ ID NO: 24213 - DNA, 410 bp, Glycine max
ttttcccttatcttctatcctctcctctcttgctaataattaataatatctttggtcacggtcttgccttgcttcattaacaacttgtgtgtttagattatacttatctcactcaaatcatggttcagagggggcaaatttgattttattttcaattaccatgtttggcataattttatttgggatatgtgctacgagattttggtgtcgaattatgtttaaactgaggtaagaaatagttatgttttagcaccgcattagctttgtaaaggaaatactaatactaataaacaatatgtttccggtgaaagcatttatagtatgctcatgattgtttttcctttttttatagacgcaacactagaaaccaaaacataaagggaaatcatgtacataccatttgaattaac

SEQ ID NO: 24214 - DNA, 386 bp, Glycine max
gaacacaaccacctctcacctcaaatgacttcccattctctcttttgaaatcactacacaacaccaagaaatccaaatctaattcctcatctcgtttgatatcctgattcctactctcttagtttccactctattgtatggatgcatgtgatgaactgatgatatatgcatttgcttttatagtttgcttggccaccaagtaacgacaaagagaaacagtttctaactttttcttggctggttgtaaataatctctcttttctctattggatcatagctttctgcaccctcttcctcttaggttcccatatttttctctcttgtcgtggacctcaactttgtaggctcgccttaaaaaaaaccttcttttctttttggtgggggtg

SEQ ID NO: 24215 - DNA, 311 bp, Glycine max
aagtctactgtggaggatttaccacctggatgggtgaaagaattaaagattaggaagaacagcaagggcattcggaaagatccgttttatatagatccagcgagtggatatgtattccgttccaagaaggatgtacttcggtatcttgaatctggtgatatacgttcatgtgcatttaagccaagtagaaaacaagtccaagatgaagacaatttaactccaccacctgctgccaagagacagaaactgaagcagtctgcacccgaacaacagctttcttcagccacagaaattcttgataaaagcaactt

SEQ ID NO: 24216 - DNA, 307 bp, Glycine max
cagataataagtttaagatcgagattatcaatgagttgcctgccgacaaaattatcacagtatacagatgtggtcccttggtggatttgtgtcgggggccccatatacctaatacatcctttgtcaaagcaattgcgtgtttaaaggcttcatcagcatattggaggggggacaaagatcgggaaagtttacaaagagtttatggcatatcttatcctgatcagaaaagtctgaaggaatacttgcatcggctggaggaggctaaaaagtatgatcacaggattttgggtgtgaaacaggagcttat

SEQ ID NO: 24217 - DNA, 218 bp, Glycine max
gaccgttccatttctcaacaactggggctacttgctactccaaccgcacttctgctccgcaattatcatgggcaaggtcaagatcggaatcaacggatttggaagaattggccgtttggtagccagagtggctctgcagagagacgatgttgaacctcgtgccgctaacgaccctttcatcaccaccgattacatgacatacatgtttaaatacgaca

SEQ ID NO: 24218 - DNA, 415 bp, Glycine max
gaataggacttggttccatgatgtgattttattgtacgtacatttgttattttcaatgaaactcttattcagttagatattttctcatatggttttgtgcacatatttatttatttcgagaaaaaatcattcggtttagatatagaataaacatatggtttattcattaagttgagagctagtgttgagagacttgatatattgtggtacatggaagatactactcatcatcagaggacctatcgccacgactcatatattatgtttcttgttatggctgatgttgagttaaatggaccaagtgggagaatgttggaagcgcacgttcacttccacgtcctttttttattttattttattattttggaaaatttagttatttctgaatctggtccatttttcatccacattcaac

SEQ ID NO: 24219 - DNA, 56 bp, Glycine max
  modified_base (10)..(10): a, c, g, t, unknown, or other
  modified_base (54)..(55): a, c, g, t, unknown, or other
gagacctcangtcaggcggggctacccgctgagtttaagcatatcaataagcgnng

SEQ ID NO: 24220 - DNA, 358 bp, Glycine max
gactgtacaaggggaaagaacatgctgaagttgaattcattgttggacctatacccattgatgatggagatggcaaagaaatcgcaactgaaatcaaaacaaatctagcaagcaacaaaaccttctatactgattccaatggacgtgatttcattgaacgtgttcgagactatagaaaagactggcacttggaagtaaatcaacctgtagctggaaattattaccctatcaaccttgggatttacctgaaagataaaagcaaagagttttctatattggtagatagagctgtggggggctccagcatcatagatgggcaattggagctaatggttcataggaggttacttcaggatga

SEQ ID NO: 24221 - DNA, 350 bp, Glycine max
ggttctagtgtgtgattgtttgttgttgtaactcggtcttcttcttttgctgttctgtgtttgtgtttgttttttctctcacctgaaaatgtcttgctgcggtggtaactgtggttgcggaagctcctgcaagtgcggcaacggctgcggaggctgcaagatgtacccagacttgagctacactgagtcaaccaccaccgagaccttggtcatgggagtggcacctgttaaggctcaatttgagggtgctgaaatgggtgtgcccgctgagaacgatggctgcaaatgtggaccaaactgctcccgcaacccctgcacttgcaagtgaggtgtttggagagcaagcttca

SEQ ID NO: 24222 - DNA, 322 bp, Glycine max
aaggggtgcacaggtgagtttgttgatcgagataactagaaacagtgtgatgaaaatgaaggtccttgttttcttcgttgctacaattttggtagcatggcaatgccatgcgtacgatatgttccctctccgaatgaacactggctatggtgcccgtactccggaggtgaaatgcgcaagttggaggcttgcttgggaagcacacaacatctttggctttgagaccattcctgaagagtgcgttgaagcaacaaaggaatacatccatggcgaacaatatagatcagactccaaaacagttaaccaacaagcttacttttat

SEQ ID NO: 24223 - DNA, 368 bp, Glycine max
  modified_base (257)..(257): a, c, g, t, unknown, or other
  modified_base (348)..(348): a, c, g, t, unknown, or other
ctctctctaaaaatctctaaacatgcaaaagcggcgagaattgcccaaactccccctccatttctgatttcagacttaaataggtggccttgttggtgcttgtccgcttagcgtgaatctggaccgctaagcgtgcattagtgaattttgacttagcgcgcgtcttctcgctcagtagatggactcaagtggtgcgcttagtgggatgacacctcgctcagtgaacatgcacaactcatccttcttccagattcttnctcgtgctcagccgcaacagtgttgcgctcatttgaaatcgtttcaaggtccaatgccttaacgatcctttttttttttacttttatcggntaaaacgaacccgttaaaaa

SEQ ID NO: 24224 - DNA, 365 bp, Glycine max
ggattccggcgagaaaaaaacttggacggtgaaattggaaggttttccgggatcccaaggccgaatcttggttcaatttacgaaaagagaagagagaggaacaacaacacccgttgttgaatcttcaagctgaatcaaatcatatagagagagaaagagagagacccggataggaaaatagcgtttaaagagagaaaggtgaagtgaggttgtttaaagtttgggtcttggtgggtgaaagggaaagatgacggatgtggtactgcatatatacgatgtgacgaatagtggatccgagaaaaccaacaacaccattgttcagatcaacaagatcttcaaggatgggattggtctttgtggcattt

SEQ ID NO: 24225 - DNA, 389 bp, Glycine max
aattcgagcggccgcgtggtttttatatctttttcttttttttttcgaaacgggtctctctggtagaactaattctctccattcagagaagagcgggaaggaatcttcttttctatgaaacctgagcaaagtctcggctaaaatctcaagactagtgaagaagtaaagaagtcccagccacagagggaaagactgaaccgattcttcggagaacattaccccggaaggactagagcaggtacgacagccttaaggaccactcccgtgctaatcaccttggaacttgaggacttcgcgtcacatgctatcaaagggtcttccgatccgctctacttaaccatttaagctaccccccaaatagaattgggattgggatccaacaattaaat

SEQ ID NO: 24226 - DNA, 401 bp, Glycine max
  modified_base (353)..(353): a, c, g, t, unknown, or other
ggagtgatatttgagcttaaaccctaaccgcgggtctcttgattctgcactttggaaacaatcataatggcgttctgtaataaggctggaaatgtcttgaggcagggtgctgctcgcagcacacatgcccctgttgcgtccatgcttaattacatccgctgcatgtcttcaagcaagcttttcattggaggcctttcatatggagttgatgaccagtctcttaaggatgcattttctggctttggagatgtggctgatgcaaaagttataactgatagagacagtggaagatcaaggggatttggatttgtcaacttctccaatgatgagtctgcaagttcggcactctctgncatggacgggaaggatctaaatgggcgaagcattcgggtatcctatgc

SEQ ID NO: 24227 - DNA, 379 bp, Glycine max
ggagtttaagtattgatgcaagagcgctcaccaaactcttcaatggatcaacgaaattatacacttcctcacgccttactctttcttaatcaatgctcacgtcgttaatttcttcaaggataggctatgggagaatgttgacgccgaatggatcgaatgcctgcgccgagaatctgttcaaaatcttcttctcataccttctggtgcagtacaagatcaatggccaacttctttgaaagagttcatcctaaaaataaggtctatggtattttgtcaagaacaagcagatataaatatggcattacctggcctgcagacaatttcacttaacactgttcttgcccagggcatgaatgtaaagaaaaaacatgaagttgaa

SEQ ID NO: 24228 - DNA, 387 bp, Glycine max
  modified_base (187)..(187): a, c, g, t, unknown, or other
gatggagtgacaatgggaaagcaaaacattcgtcaccgcttgcgattccttcacgtggggaggtcctataaagggcaaactcacttgaattgaatgtagaccccattctgcaccgagaatcattcttcaccaaaacttcgcaaagaaacactacacatccctggcaactgctggcggtgcaagaagntcgggttccccctctaacttccacctctgagccaccttctctctttgacggaaccaccaggttgtacatcagttatatttgtccctatgcgcagcgtgtttggatcactcggaactataagggactacaagacaagatcaaactggttcctattgacctacaaaacaggcctgcttggtataaagagaaagtctaccctg

SEQ ID NO: 24229 - DNA, 406 bp, Glycine max
ggggagagaatagagaagagagatggatccagacgcgttggcaaaggcattcgtggagcactactacagcaccttcgacaccaacaggaacggcttagcgaatctctaccaggagggttccatgctcactttcgaaaggcagaagatccaaggcgcttccaacatcgttgccaagctcacctccctcccttttcagcagtgccaccactcaatctccaccgtcgactgccagccctccggcgtcaacgccggcatgctcgtcttcgtcagcggaaaccttcagctcgccggcgaacagcacactctcaagttcagccagatgttccatttgataccaacacctcagggaagctattatgtgttgaatgacatattccgtttaaactatgcatgaagatgtcatatg

SEQ ID NO: 24230 - DNA, 394 bp, Glycine max
ctctctctaaaaatctctaaacatgcaaaagcttcgagaattgcccaaactccccctccatttctgatttcagacttaaataggtggccttgttggtgcttgtccgcttagcgtgaatctggaccgctaagcgtgcattagtgaattttgacttagcgcgcgtcttctcgctcagtagatggactcaagtggtgcgcttagtgggatgacacctcgctcagtgaacatgcacaactcatccttcttccagattcttcctcgtgctcagccgcaacagtgttgcgctcatttgaaatcgtttcaaggtccaatgccttaacgatcctttttttttttacttttatcggttaaaacgaaccgtttaaaaatctaaaatcaacaccccgcataactt

SEQ ID NO: 24231 - DNA, 362 bp, Glycine max
gaatcatcacaattttccgttgttttttctttggtcttttcgatccacgcacgatttttttttatttggatgcgtgcgtgcgtgcaggtttgggttcgcgaagggttttgatttttcggcggcggaaaatcttggtaaaaattcgtcttcttaaccaaataaaaaagaaaggttttcttctttaaagttggagggttgggtctgatgagaattgttaggggaatgcagagatcgctttgcgaggaatactactgctgctgcaacaaagattcgttcttcccaggggttggcatcactgcgcccaaagccagaacccgcgacaaactaatcatccaaaccctctgaaaattcatccaaaatta

SEQ ID NO: 24232 - DNA, 385 bp, Glycine max
gtgataaattattttgctctgttcttgaaaacactcctaactctctctctatatagaaaatattataggagatatcctttcatgaaaatttaatctcttatctttcgatttatcattctcgttttattttattaaagaaaattctaatattaaaatgaaaattagtcaatattattaataaaattagtaagaaacaagaatctacttaaatatagcttaatgtaacaacatcccagtgaagtttgttaggatgatggctcatgctattgcaagaacatccattgatcatatcttatgtcttctccttttgttttttttggtggtggtggttttaagtttactttattgtattggtgatttgattatgaatgaagtaatctaagtc

SEQ ID NO: 24233 - DNA, 264 bp, Glycine max
  modified_base (71)..(71): a, c, g, t, unknown, or other
gatttataaacttgaacagagatctcatctcacttgtcagagattctcaccagtgattggtgatggctcanccgcttgtgaagaaagacgatgaccgcgacgacgaaggttgtcgagcagctgactattccccctttcttggaattgaaaaggggtctgttcttcaagaggccagggtttttaatgaccctcaactagatgctaggagatgttcacaggttattacaaaacacctatacctactgaatcagggagagacgttta

SEQ ID NO: 24234 - DNA, 423 bp, Glycine max
  modified_base (415)..(415): a, c, g, t, unknown, or other
ttttccacaaaagtatattcaatattccccaattgttgaatcggaccaatttgatggccctattccaccacttttacgaggtttcatatttcttgatttattcaataacaaaagatgaacatctaagtataaaaaaatgaacaagaataattttattgcatttctgaaatatagattaaattgtttacaaaatattaatttctaattaatagtcaatgatgataggatgcttgaaaataatatatatattcaaggaaagatctccaatctaaatcttactattttcttatctcaaaatgtcttttaaaactacaaatcatttatgattatgttaataacgtaagattatcattttttgataagttatttgtttaaaaagtatataatgtgttgaaagagttttactattattaancttcatta

SEQ ID NO: 24235 - DNA, 305 bp, Glycine max
  modified_base (78)..(78): a, c, g, t, unknown, or other
  modified_base (103)..(103): a, c, g, t, unknown, or other
  modified_base (109)..(109): a, c, g, t, unknown, or other
  modified_base (119)..(119): a, c, g, t, unknown, or other
  modified_base (123)..(123): a, c, g, t, unknown, or other
tggctttgtgacactggatgaaagatttaaaatgcttaggcaaattgactgggaaagcattgtcctaaggacccaacncgttgtcaaagaagaccctgctgcnttcctngttctaaacnttangaaatatcaactatattaagagttttattacaataataattaatgttcttacacatctgtttggagccttctgttttttgtttttttttttttcttgcaaattgactattacaaatctaattttactattatgttagggtggaattttttacacaataatgagttccattttgtttaggcaa

SEQ ID NO: 24236 - DNA, 415 bp, Glycine max
gtacagcagcactgatattaccggaatcattgagaggtatggccaaggtcgttacagcaagtcacacactggtgattcattggaacacgattcacagagcgcataccatgaattcttgaaattaagagcgaaatatgaatctcttgagcggacacaaaggcattttcaaggagaagaccttgagccacttagctttaaagatttgcagagcctggagaagcaactagacataacgctcgcactaactcgacagcaccaaacgaagaaactcatggcacgagcggatgaattacgcgaaaaggtaagttgttaaatgctaattaacttgtttgattttactccgtgtgaagtttttctgtgaatttctctctaatgttatgttttttcttgtttacaactcggggctgcagaagtt

SEQ ID NO: 24237 - DNA, 291 bp, Glycine max
gggaggctactgaaatcattacttggactagttgtctacgattattcatagtgaggcaatagtaacagcaattcacactggtctttgcttctcgttactcatttctcacctaactttctattcttctcaggctcagatcagaaccttagccatggcagcgttccaaaagatcaaggtcgccaaccccatcgtcgagatggacggagatgaaatgactagggttatctggaagtcaatcaaggacaagctcattttgcccttcttggagttggacatcaagtattatgactt

SEQ ID NO: 24238 - DNA, 376 bp, Glycine max
ggtggtagttgtgtgacacagagattaagctagagctacatagtttttttcttttctcaccttccttctctcccttcagacaagggacgaaaaatcagagagagagagagagagagagagagaaattccaaaaccatgtcgtcccacagtcatctaagtttcgcctttggggttctaggtaacatcgcctccttcgtgtgctttctggcaccactaccgacattttatagagtttgtaagaagaaatcaaccgaagggttccaatcaattccatatgtggctgcactcttcagtgcaatgctttggatcttttatgcctatgtgaagaccggagaaatgcttcttatcaccatcaatgcattcggttgcgtgattg

SEQ ID NO: 24239 - DNA, 416 bp, Glycine max
ggctaccaactccggcttgttcagtctttcttggaactttgttactctcacacatgtctcgctccgtgcctttggtttcaaccatttttgtcttgcttctgcttctggtggccactgaaatgatggggccaacaatggtggcagaagccagaacttgtgaatctcaaaaccaccggttcaaggggcccatgttgagtgacaacaacttgggcctctgtttgccgaaccgaacgtttcactggaggacactgccgtggcttccgtcgcagatgcttctgcaccaaacattgttaattttaaaaaattaattaagagtgctttgatagaagatgatagatctatcatctttctactcgggttgttaattaaccactttgtgtttgagaataagggttacccattctactatgggtttc

SEQ ID NO: 24240 - DNA, 357 bp, Glycine max
gtgataaattattttgctctgttctgaaaacactgctaactctgtctcgatatagaaaatattataggagatatcctttcatgaaaatttaatctcttatctttcgatttatcattctcgttttattttattaaagaaaattctaatattaaaatgaaaattagtcaatattattaataaaattagtaagaaacaagaatctacttaaatatagcttaatgtaacaacatcccaatgaagtttgttaggatgatggctcatgctattgcaagaacatccattgatcatatcttatgtcttctcctttagggttttttggtggtggtggtttaaagttactttattggattggtgatt

SEQ ID NO: 24241 - DNA, 373 bp, Glycine max
gtacagcagcactgatattaccaaaatcattgagaggtatcgccaatgtcgttacagcaagtcacacactggtgattcattggaacacgattcacagagcgcataccatgaattcttgaaattaagagcgaaatatgaatctcttgagcggacacaaaggcattttcaaggagaagaccttgagccacttagctttaaagatttgcagagcctggagaagcaactagacataacgctcgcactaactcgacagcaccaaacgaagaaactcatggcacgagcggatgaattacgcgaaaaggtaagttgttaaatgctaattaacttgtttgattttactccgtgtgaagtttttctgggaatttctctctat

SEQ ID NO: 24242 - DNA, 349 bp, Glycine max
ggtgatttaccatttaccacaccaaaaccaatcggatcgttttgtctggggagtcagaaatccatggatccctacaagaatcggccatcaagcgccttcaattctcccttctggactactaattccggggctcccatctggaacaacaactcatcgctgactgttggatctagaggtccaattctgctggaagattaccatctggtggagaagcttgcaaactttgacagggaacggatccccgaacgtgttgtccatgctcgtggagctagcgcaaagggtttctttgaagtcacgcatgacatttctcacctcacatgtgccgatttcctccgagcccctggagttc

SEQ ID NO: 24243 - DNA, 334 bp, Glycine max
gggtggcagagagcgaacccaagactagagctaccttcccttcaaaccttccactcttctctccttttccaatcaagggaataatatttcttagagatattccgaaaccatggctcacgccaatcctatgatttttgttgttggaattctaggtaaccttgtctccttctgttgctttctagcaccagtaccaacattctatcgagtttgtaagaagaaaaccacggaaggtttccaatcacttccttacgtggctgcactcttcacttcaatgctttggatattttatgcttacataaagacgggcgaaatacttctcatcaccattaacgca

SEQ ID NO: 24244 - DNA, 383 bp, Glycine max
ggaggaaagaagagagagaacaaagcacttagtgcgtattcaagaattacgaaaaaccaacagcgagtgttgtttttgtttggtccaggctggaccagggaatgaatagagatgagaggctttcggttgaagagaactgagttaagcggcgaagccaaacgcagaatcggcggcagaaattgccaccggaagcacgtcgaatacgggtgaaccaaacacaaaattccatccaccacttctcttttcaatccccaactcaaatctgtgaagaaaatctcaatttctaaattgtaattcttagcactactgctagtagtagtaaaaaaaaacaattagaaagtagtagagggtttttttttcttttttttcgttggtttactttt

SEQ ID NO: 24245 - DNA, 289 bp, Glycine max
gtcccgccatggtaatccaggacaaagattcccaccagatctgcctaagtttgtgatagctgaaaaagttaaaattaacttgaacacctcaaatttttaagaggctccctcatttaacttctagacaagcacctataaacttaacaaggcttgacactattgtcttagagaagtctcagtaggttttacaattggaaatcgcccataagctagaaaatagaaattagtccaagctgggccatattctagcatgtcctggacagtgtagtcaaaggaaccaaaacatatg

SEQ ID NO: 24246 - DNA, 377 bp, Glycine max
gaagacgacagaaggggttgggtgtggcttggggggcaagcttggacatggttcaagaactgatgacgagtaccctctcgtttgatcgaacagttcggactgctgaatctccaacctatggtgcttggcatgctgttgtggtgggacgggatgactgtgtttgcacgtggggatgagggcgatatggttgcttggggcatgggagtgatgaatgtgactcagtacctaaggcggtggaagcattgagcaatgtcaaagctattcatgttgtagcaggagattacacaacctttgtagtgtttgatgatggtgatgtgtattcatttggatgtggacaatccgctagtcttgggcataatgcttgtggaaatgatgag

SEQ ID NO: 24247 - DNA, 346 bp, Glycine max
ggaagtaaattactctctacttgtggatggcgctgttagtgtcactttcagctgtggttttgttcccaaaattttgattgtttcttattcgaaagaaattttagatgcacgagacttggcttctgaacagttttaagtcttgagtttgtggaaatcggtctccgagcttccagacttgctgtgtttcgatctgtttatccatccaccttcatcgaccttagcatctagagagatagtaaatttccactcgtatggtaggagattttcaagtgactatggagaaacagagcagtttttcggcatctacaatggaaaaacagaagagttttcgtggatttatggaaaa

SEQ ID NO: 24248 - DNA, 373 bp, Glycine max
gaagatgagagagtacacactacacggcttcacagagtattgatgaaggaaccctcgagctaacccgctgtcactctcggcgcaccccaccatcactcttcgacggaaaatgcagcgtcgcaacggcgcgcgcttcagtgatcagcgcctcagctgcagcagtgcgccttgccaccgtgacctgggttgcaacgccgcgctcgtcagttcgcctctccgcaccaacctgagtccgtgataactgttgccgtcaagggttcgttaggggaaaactataacagcaaggctcttttcatctttgctttgtttgatgttagtatgacaatcctattgatgttggtttgaatatcattttgttatgtgcttcgtttgg

SEQ ID NO: 24249 - DNA, 411 bp, Glycine max
gttgcattgctctatagagctgggactagcaatgtagtagctcctgaatctggctttgtgacactggatgaaagatttaaaatgcttaggcaaattgactgggaagcattgtccaaggaccaacctgtcaaagagactgctgctcctgtctaacttagaattcactttcaaggtctatcaaataataccatggttttacacatctgtttggagccttctgttttttgtttttttttttttctgcaaatttgactagagaagtctgatttgtaatatttaccgagggatcttttatagtcatataatgagttccattttgtttaggcaagtttttatttcaatgtgactagatatatttcctatttttggaatttggaaacatggatattttggagtgatgtttttttttaa

SEQ ID NO: 24250 - DNA, 378 bp, Glycine max
  modified_base (359)..(359): a, c, g, t, unknown, or other
gaaatctatagcaggaatcccccaaacccttctcatgccccccctttacttccttcgtacaaaattcccattgcaatctgctagtttctagacacaacctgctagtcaatgcacggtgtaggagccacaatctgttagtctatgtgttcctcaatctgcatataatacttcttgcttcttgcttttatatgaagctaagaataagattttaagggaatgagtattacatgactccccggcataaaatgtagcatgcatttctaatgctttgtgagaatactggattggctttggcatcttcagtgtttacctacgttgcagaaattttgcttggggttctttaagtaggtttctgcagntcatttgtctttgcatttt

SEQ ID NO: 24251 - DNA, 341 bp, Glycine max
gactctgcagctcgcaacttgtaccacgaaaccatggacttgagaaaattccacgaagatgtgaagagcaagccataaacaagcacaaagatgcacacccaggtttttcttttgctcatgatttgaagcagtagcacgtaagaggaaggtgatgtgtgaattggtgaagtgggttgttcctcttcttccacttttgccatggacatgacaacaaaaacaacctcggaaaactagccagtaccaattaccgaacaaaacaccaatctgggtttggtttggtttcttttcacaagtggaaaccttttcatactaattcaatggtctgggccgtttgggtcttt

SEQ ID NO: 24252 - DNA, 388 bp, Glycine max
  modified_base (373)..(373): a, c, g, t, unknown, or other
  modified_base (375)..(375): a, c, g, t, unknown, or other
ctcctaccttgaagctcttatccatggcttcctatggtggtgagtttcttcttgactcatcttcttcttgaagtgatgtctcctctcaactcttcttcttctccattccactgcaattaaaattcaagaagcaaaggactccattgatgaagaagatccaaggcctacatgctccaatggagctacatcatgtggtatcaagagcatcttcatataggtgatgttcttttgcttcctcaatctttttgttcggtcaattcactttaattccttgttattcatcttattatccatgtatatcctccattgtcttggggtttggtgttgttagagtagattaaaaaaaaaccgggtacatcttagatgtacactngntcttgcatttcta

SEQ ID NO: 24253 - DNA, 266 bp, Glycine max
  modified_base (12)..(13): a, c, g, t, unknown, or other
  modified_base (18)..(18): a, c, g, t, unknown, or other
  modified_base (21)..(21): a, c, g, t, unknown, or other
  modified_base (31)..(31): a, c, g, t, unknown, or other
  modified_base (104)..(104): a, c, g, t, unknown, or other
  modified_base (210)..(210): a, c, g, t, unknown, or other
ggaaaacaccgnncgttnctncgcaccgacngcaacctcttcgtcgctgccaaggccttcgccgccggcgtcattctcgccaccggattcgtgcacatgctctncgacgccaccaaggcacttcgccacccgtgcctgccagcgttcccgtggtccaagtttcccttcaccggtttcttcgccatgttggccgcgctcctcacgctcctnctagatttcgtgggaacgcaatactacgagcgcaagcaggggatgaaccgcgcccc

SEQ ID NO: 24254 - DNA, 363 bp, Glycine max
  modified_base (332)..(332): a, c, g, t, unknown, or other
gaaaccaccaaagcctacggctactacattacattgttttttttctttcccaaatgggttccatcttttcacccttaaccactatcttcctcctactcctactcgtactttggggtggcgaggcacgtgacccttttgcttgtgaccctaagaacaccgccacaaaaaacttaccattttgcaaggcttcggtggcaacaggggcaagggtgaaagacctcattggaaggttgacactgcaagaaaaagttaacttgctagtgaacaatgccgcggcagtgccacggcttggtatcaaagggtatgagtggtggtcggaggcactacatggngtctcaaatgtgggccccggaaccaagttcg

SEQ ID NO: 24255 - DNA, 342 bp, Glycine max
tcctatgagtcaaggaacgtcattgtcgttaacaattcgcccaacgtgtttctcttccttttcctcctcatgtgagatagagataaaaaaccctaacacatcgacataagagaaagaagaaatattaacatcgatttttataaaaaaaatcaatattaacatataaatacaacatcagttttcaaacaataccagttattatgaaaattgatgttaatatcgacacacaacattagttttcaaaagaatcgatatcaacgaactcaacttatttataattatgtcaccgtattttgtaacattgatttttattaaatggatgtaaaaatatcgacattaaat

SEQ ID NO: 24256 - DNA, 390 bp, Glycine max
gagggaagtgcggtgtccactcatcatctatctttcctcggtcccgaccacacacaataacaatgtcaactctttgttctgcacttcctccatcatcatcatcatcaccctccatagcaaagttcatctccgaccaaccatgcctcaccatgctccaaacccaatgcaccaacatgaaagacctccaaaagatccatgcccacatcatcaaaaccggccttgctcaccacaccgttgctgctagccgcgtcctcactttctgcgcctcttcatctggtgacatcaactatgcctacttgctcttcaccaccattccaagcccaaacctttattgctggaacacaatcatcagaggcttctctcggagctcaacccctcatcttgcaatat

SEQ ID NO: 24257 - DNA, 415 bp, Glycine max
gacacgcacctctttctgattgccttgaaatcacacactctcttcaatttctagggttttgctattgctttgcctccgttccccctttctcacaaaaacaacgccttttctcttctccttcgtatctattctttgcgtttggtttttggttgattgaaggcattcacagcgtaattcgttgctgcattttaatcgatttatctaaccaggactgaatgacctaatggagtctaaaggtgggaaaaagaagtctagtagtagtagtagtaaatcaattttttacgaagctcccctcggatacagcattgaagacgttagaccaaacggtggaatcaagaaattcagatctgctgcttactctaactgttctcgcaaaccatcctgatacacatccggattgatagttcgttgcatg

SEQ ID NO: 24258 - DNA, 58 bp, Glycine max
  modified_base (19)..(19): a, c, g, t, unknown, or other
aattcgaccggccgctttnattttccgggattttggtttttttccttctttcaaactc

SEQ ID NO: 24259 - DNA, 415 bp, Glycine max
tttcagccttagttttaataggaaatatccaagggtatctggaaaaagcatcaataaaagatacataatacttgaaaccagaatgagagggtagcctatgagactttcccatgcaacaggaagcataaaagtctgaaaaaaatttattagatgaagaaatattacactggttgaagactagcttcattacttgactattgggatggcctaacctagcatgccaaagactaacagtgctaggaggagaaataacagaactggaagctacactagaatttttattaacagtaggagctgggattgaagtagagatggaggttgacaacaactgaggagagtgatcttgaagcctaatgttatgaaatgaatagaggccatcaacaccaacaacactttgaagaaggatcttattggt

SEQ ID NO: 24260 - DNA, 424 bp, Glycine max
gtgaactggacagttccaataagatttcattcttgaacaaaaatccattttggggtttatttcatctattccatgaccggaacagtgggagatacacgttacaccacgattttgaatcagaagagatatttcaagaaatggcagatctattcactctatcaataaccgagccggatctggtgtatcataagggatttgctttttctattgattcctccggattgggtcaaaaacatttcttgaatgagttattcaactccagggatgaatcgaaaaatcactctttattggttctacctcctcttttttatgaagagaatgaatctttttatcgaaggatcataaaaaaatgggtccagacctcttgcgggaataatttggaagatccccaaacctaaatagttgtatttactagcaacaacat

SEQ ID NO: 24261 - DNA, 314 bp, Glycine max
ggggtcgaaaaacatggtcagaatttgagcttttggccactattgacagagatattaactttccatatttggaggagaagcaatcccttttggggttcgctggttccattttcagcttttttcttgggtttgagcatttggatctggacaaaagttcacctttgggtgagtgattcaacaccagctatagctgggggagtgaaggtaaagttgtgagcattaatttgcttgaaggagggtttgtgaattgaattggtaaaaagggtctctgttttatgggaattattaattggtgtttactgggattaatgaaa

SEQ ID NO: 24262 - DNA, 412 bp, Glycine max
  modified_base (338)..(338): a, c, g, t, unknown, or other
  modified_base (366)..(366): a, c, g, t, unknown, or other
gaccgtttgccacgttcgcaaccaaacaccttctctctctctctctctttgactctttaggggaaggccattctcgcaacgtttgagttcagcagatccagaatttttcagaaaacaagtttaggagaatgaagaatacggaacgaattgccaatttggctttagcaggtttaaccttagcgcctcttgttgtgaaagtagatccgaatttaaatgttattttgactgcttccctcactgtgtttgtgggctgttaccgctccgttaaaccaaccccaccaactgagacaatgtccaatgaacatgccatgcgttttccctttgttgggagtgcaatngtattgtcactcttcttactcttcaagnttctatccaagggacttgtgaacactgtattgacaggctacttctt

SEQ ID NO: 24263 - DNA, 407 bp, Glycine max
ggaagtaagtacgaggtgagaagaggcgacgaggcgagaacattcccatgtagcgtggagaagcaaggccatcgatgggtctataatcaggcacgatgaaagcctcgcgttcctcgcgggccccagcagctctgctttgtccaattccattgaaggttccatacctgaccaacctccccacccaagacttagacttcttattattagtggtgggactttgatgtccggcgttcatcttctggcacaggtactccttcaccgcatgcaacccctgctccaccagctgcggcggcggcgaactcagagggttcccttccacgctaatcttctgcagcttcttcaggcatccgatggagtccggcagggccctgatcttgttgtagcttacgtcgagttccacgagggac

SEQ ID NO: 24264 - DNA, 389 bp, Glycine max
gagattcagaccacacacacccggttttaactacttacttgccactttacccttctcaactctcttactgttactattactgttactccacctaaatcaaaattcaaacatacctgtgagtttcttttagctctcaaacttgcaaatcagagaccctttatatttaaatgattgccttttttattatgttatggataagaactgtttcatatttcgggtcttattattattattattattatgtaacatggtttgggtgcaactacctgcaataatttactgttcatttcttcgaatttttggactttattttagttcgcaatatgtgtcataattcataataataatagttgcattcaaatgcattccaaaacctcaaaatcgagctc

SEQ ID NO: 24265 - DNA, 415 bp, Glycine max
  modified_base (254)..(254): a, c, g, t, unknown, or other
  modified_base (257)..(257): a, c, g, t, unknown, or other
  modified_base (397)..(397): a, c, g, t, unknown, or other
gatactaaagaatttcgtttcgtttgtacaaaacgaaagctagcaccgttctgcggcggtcccctccggcatcgtctttacagagctttcccggggaccacaatcgccattcgccgccgcagacgacggcgctcatggctcagccgccgttcgatccgttctacctttaccaacatgatgagcagagcaacatcaacacgctatttgtctccggtctaccagacgacgtgaaggcgcgtgagattcacaacctnttncgccgccgccccggcttcgactcctgccaactcaagtacaccggccgcgccaaccaggtcgtagcgtttgccacgtttttcaaccaccaatcgggcatggcaagcgtgcacgccttgaatggtgtgaaattgatcctcanactggatctgtttacata

SEQ ID NO: 24266 - DNA, 357 bp, Glycine max
gaacctcatccaaatttgttaaggaggaccacaattggaaatggtctactttgtttccctacagcttgggggcttgcaattactcctacagtctatatttaaacctttcctttcttgagatgcaagtcctccggaatcagtttttgactggacacgggaaatagactcagatttgtcaaatcagaatatcaataatcaagcattctcaagaaagcattggcgtcttttacaatgtcaagatggtttgctacatttatttacatgatagagcacattcctattttgattacataaaagaaaagttattctagtgatatattctagatttctagtgtttacatgatttgatatgtagaa

SEQ ID NO: 24267 - DNA, 390 bp, Glycine max
gacactttcttttctctttcactgtctttggggtgaagatgggtgatccttatgggctaccggaggatctccggcggcttataccagccagaagtacccatttgaacccttcagacacacacctaattgaaccactttgtgttcaccatggtctcagtagtgctgttgctgctgctactgctagtgctactccacccatcacctatgacgccaacatggttggggacgttttcttccctcgtggtttcactcatcactttgctcatcaccatgactattcttcttcctctggcgtaaaccccgttgctactactgctactgctactactactactactgtctcggatcatgcattctgcagcatggaaagtgcagaaaaagggtggtttg

SEQ ID NO: 24268 - DNA, 144 bp, Glycine max
gagtgcacaagtgagtttgttgatcgagataactggaaacagggtgatgaaaatgaaggtccttggtttcttcgttgctacaattttggtagcatggcaatgccatgcgtacgatatgttccctctccgaatgaacactggcta

SEQ ID NO: 24269 - DNA, 334 bp, Glycine max
gacgcgtttctttcctttcaagactctctctctcgctctagttttttcggtccgcgactcaacctttcgaatcctctcacccagaaggacgattcgtaccatgtagttgggggatttcggctttggcacttcttgattccaataattttgggttcttttttttccctaatttgatttccccggttagggtttttaactctattcgatcggcgatttcgaatactcggaggctcgaatcgtgttgggggttttccgttttgattaaaaaagtttccggtttttgtgttgggtgatcaaggggttgttgatttttttcttgcgatcgagaatgggt

SEQ ID NO: 24270 - DNA, 421 bp, Glycine max
gacaccagtggcttcttcattcctttattcattcgtctcactgctgaacacaagagaaacaatggaacttttgcaaaatggccacaaaaatttcgtcagcatcaaaccctccgagttacccctcacgaatggggcagcgttaactctcctcaactcgctctccaaaactcagtacttgggcaacatagatccttccagagtttttgtcaccaaagttaagcgtatcattgtaaaggttggaacagctgttgttactcgaagtgatggaagattagcattgggcagaattggagcactatgtgagcagcttaaagaactaagcagtcaagggtatgaagtcatattggtaacttcaggtgcttgtggtcttggcaggcaaaggcttagatatcgcaaattggccaatagcagcttttctgat

SEQ ID NO: 24271 - DNA, 344 bp, Glycine max
  modified_base (199)..(199): a, c, g, t, unknown, or other
gggagaagaatcagagagagatagagagagcatgagaaatcggggagttgactcagtagagcgaatcgatggaggaggaagaagagattgagtgcttcgagtgcctccaacttcgaataaagtccgatttctcggagcaagtgttcttcaattatgccatctccacttctgcttttcctttcggatcctcggctatcgntaatatttctggtacagctgatggcgaagcttcgggcgctcaatttatattgcagtacatgccgagtcgtgataagaattgtttcatcaattatgtaaatgaatatattttggatagtggtgaaatcactactaggagtagtgat

SEQ ID NO: 24272 - DNA, 413 bp, Glycine max
gatattttaggattttgagatgtgatgaaatttgtgttaaaaaagtagttgttttaaaatttgattgtatgagattaatttgaagtgagattggcacatggtgagaatagagagaggggaaaggaatccatcgaggtgaagatggtgtggaacagcatggtggtgttgagagtggcacgtgcctcagcggaagcgtggcaatgcattgcggagcctctgaacagtgagcagatattggatctggtttgctgtttccctctccatcaactcgctctctttctctattccttcttctgcactcctcaatccaatttttaccatttcccttctcactccgactctgaccatgacgattcttccgattaccaatcctcttcagactgaaaccaaaccaaactcaatagaataagatg

SEQ ID NO: 24273 - DNA, 397 bp, Glycine max
  modified_base (389)..(389): a, c, g, t, unknown, or other
gacacctttgttcactcttcttctcttgcggctagggttttagcgcagcttcttctagatttaaggaagatgggtaaggaaaaggttcacatcagtattgtggtcattggccatgtcgactctgggaaatccactaccactggtcacttgatttacaagcttggaggcattgacaagcgtgttattgagaggtttgagaaggaagctgctgagatgaacaagaggtctttcaagtatgcctgggtgctggacaaacttaagactgagcgtgaaagaggaatcaccattgatattgctttgtggaagtttgaaacaacaaagtattattgcacagttattgatgcgcctggacatagggatttcattaagaatatgattactgggacatnccaagctg

SEQ ID NO: 24274 - DNA, 344 bp, Glycine max
ggttcatgccataaactaaaccgtttctacaggtacaaatctatgctactccacaaagactctttttgcatgagacatcctctctcttaaaaaaccccttcttcagtcaaacctccccaatcatacttttaccatttcaccactcacacttttctctccctcttataataacaacaacttcctcatatatacacttactctccttcaataggggaactttttcaatttggttgctacccttttgttctcttttggactatatattgtatattgaagcctaaaaggttttgaagaaaaaaaaaagtgatgagaaactctgaagcaccaacacatggtggcatgat

SEQ ID NO: 24275 - DNA, 344 bp, Glycine max
tcagaaaaagagagagaggattgagaagcgatttttttatatgaaattttgaagagtgaatgaaaaatctcaatcccatggatgagcaattgaatttgagctgaatcggcgtccgttcgatttctctcagtcacacactactgactcggccagattcaagtaaacgcttcttctaagcaaccctagatattggagattgatgtgatgacatcttcacctacctatctgcatgcagtgctgaattgatacctctggtttttatctcatgctattttagttgtgtaacatgtaacagtgcctgtttaatttgttacaccttgcccgaataataagtaatcaatata

SEQ ID NO: 24276 - DNA, 310 bp, Glycine max
gagaagaccacagaaagggactggtttttgtttctcgtttaagccatcatatggaggaagggctcttctggttaaacaacgtcaataaatctagatcttagtcttaattagaagtaccatttgaaacatgaagtctttttagcttgaatatactaggttcttcatttggattacttggattctgtgaggtcgctaattagatgcactcagtgcaggttcagaactttattcgatcagcgatcacggatactaggaggctcgaattgcattggaacttttcctttttgattaataaaatttccagttttaa

SEQ ID NO: 24277 - DNA, 394 bp, Glycine max
attaatattcatgtgttcgattgaacattggtgcgtgtttgggaaacatatatgtgtgtgtgtgtgtgtatttgtgaaattcaaatttaccatgtttttcataagcaaaataatggagttttcataaaagaaaaaaaacgaattaattttccagttattagagtggtgatattgtatcgacgagacgggtcggtacattcttgtgtttgtgtgtgtgtgtgtgtttgtgtgggtcttacaaacactgtcgtagttgagatttttcgcttttcaaacactatggtctttacaaaaaactgtcgttgtccaaaccttcattttctcgctcccttctcattgtctcacttcctcccaattaaaccctcttcctggaaaacccttattcacacccaaa

SEQ ID NO: 24278 - DNA, 385 bp, Glycine max
gactgcgaaccagtagggactcccatgccgactcttagccgccgatctctcagggcttgcatcttctcagctgtgaagatgtacacatcaaggaagaaaatccacaaggataaggatgctgaaccaactgaatttgaagagtcagttggacaggcattgtttgatctggaaaataccaatcaggagcttaaaagtgatctgaaggatttatacataaactcagccgtgcaagttgatgtttctggaaaccgcaaggctgttgttattcatgtcccttacagattaaggaaaggtttccgtaagattcatgttaagcttgtcagggagcttgagaagaagtttagtggcaaggatgtaatcttggtcggcacccggaggattttga

SEQ ID NO: 24279 - DNA, 382 bp, Glycine max
gtggatggttccgtggagcgtgcaagtgaagctgatgtaaggattcaggagggagatcagaatggttcgatgaagcctaagagatatctgccgaagaaaaaggagataaacatcgaggggaagatgatggtggctgatggaattgatgcgtcgcacggagaggttgatgatagtgctggtgattggatgccagctgtcagtcggagtactcataggagatatctaagaaggaaagctagacgcgagtatcatgagttgttgtcaagtaatcaagatcagcaacagttggaaggaaatgttgatggtagtgttggtgaagatgctagtgctttaaatcagcctgctcatcacaatgaaaaacaacatattgaaaatgctgtga

SEQ ID NO: 24280 - DNA, 402 bp, Glycine max
  modified_base (360)..(360): a, c, g, t, unknown, or other
cagtatgataacaataatcataatttcaatagttagttaacatatacacgtctagcaccaaaggcttgaaaaacttctctctctaaggccaaagcgaagattaattgatgaggccctacctataacttatgaaataaaataaaaattccacagtctcatatatgtcacaaaatgaacccaacttagaaaaacttggcatcatcaccacaaccaactaatttctcttggcaaccagcctcatcaagaagccatttctcaagcaaagagaatggcataatttctgcaccaataacatcaagcttgctttcatcttgcaaaacagtggcctcaggagacaatgaccgagagaattcatcagangttgaagaactccaagactgatcaaaatcaaaacaatgattc

SEQ ID NO: 24281 - DNA, 376 bp, Glycine max
cataaatatttctttattgtttgtccaagtaaagagtaaacattgttttcaattatcaatttcttgaacttcttagttctcatcatttatccagtggctcagatttctacatgcatgtgaataagaagatcagatgaagacaatatgaaagaaagactatgagcaaagaaaaataggctctaaacgttacctattgccacctaagacccagctcaacatagaaggcatcatgatgtcaacaaaaaaccttcctccaactcttccaggatgtggtatacgaaacttagtcaaaaactgcagagtaagggaagcaagaatgaatttgtgcatttaattatttcaatttgagtgtcatttcaccatatttttcattctc

SEQ ID NO: 24282 - DNA, 168 bp, Glycine max
  modified_base (12)..(12): a, c, g, t, unknown, or other
gcggcggcttcnaaaaaacaacagaagggcatatacatcgctttattaacacatcaaatccctgctaaacctgcattcctattctggattccttaaacaacataattctcattatttataccccacctcttatttcttcatacctcctcatacctaaaatcaattcaa

SEQ ID NO: 24283 - DNA, 419 bp, Glycine max
ccgaccggttgcaaaaagacaccaaaagggttggacccacgggtcagcaacacattgtaccccttgttaagcatcatgcatggtcaacttccataacagaggatgatcatcatttatcagaacaaacatattttttcttgtgacgtcaacataccttagagcattcattggtagtacctagattagagatggaagtcagtaaagatcttaaggtcaataaagaggacactggttaattatatgaatggagtcctaccaatggacgaggagctgagatcatagcttcagtaagttctatagtccaaacatgtgttattcgagttgctggaggccttccacatgtttgattatctagtggtggcatgaagtgaagattgaatatccaatctctctctgaagcagcataaatgatgatgata

SEQ ID NO: 24284 - DNA, 285 bp, Glycine max
catggtcaacttccataacagaggatgatcatcatttatcagaacaaacatattttttcttgtgacgtcaacataccttagagcattcattggtagtacctagattagagatggaagtcagtaaagatcttaaggtcaataaagaggacactggttaattatatgaatggagtcctaccaatggacgaggagctgagatcatagcttcagtaagttctatagtccaaacatgtgttattcgagttgctggaggccttccacatgtttgattatctagtggtggca

SEQ ID NO: 24285 - DNA, 350 bp, Glycine max
tatgctgttgatggacttgaaatatgggatgctatgaagacatgggttcatgaatatgtctccttgtattacccaacagatgcagcagttcaacaagatactgaactacaagcatggtggaaggaagctgtggagaagggtcatggtgacttaaaagaaaagccttggtggcctaaaatgcagacaactgaagatctcattcaatcatgctctattatcgtttggacagcttcggctctccatgctgctgttaattttggacaatatccttatgggggcttaatcctgaaccgcccaactctagccagaaggtttatcccagctgaaggaaccccaaaatatgatgagat

SEQ ID NO: 24286 - DNA, 295 bp, Glycine max
ggtgaccagatatttcggaagtagcgggggcatagtaacatgctctgggaaatgattctacccaaaatgcatcatccagctcagttaatggtgatctttggagaaagctatggaaaattcctactgctcccaaatgtttgaatttagcatggagggcttgccaaaacattctttctaacagagtcaatctcaaaaggcgaggtgtggatgtggatattttttgtccgagatgtggccaagaatctgaaactgagttacatgctttattattatgttaagaatcgaacatggcatg

SEQ ID NO: 24287 - DNA, 354 bp, Glycine max
  modified_base (315)..(315): a, c, g, t, unknown, or other
gattctcttacacaacagggacgagggttattctgggcctacggaaccattggcgtggtgggaaggggaaacgatcttgggtggtaaggatgcactgggcggtggaacatggttgggttcgacaagagacggtaggatagcgtttcttacaaattttagggaagttgagatgctttcgaatcccaagaccagaggggacttgccccttcgttttcttcagggcaataagagtcccgaggagtttgcggagcaagttgtgaaagaggcagatgagtataatggctttaaccttgtattagctgatatttgcacctncagcatggtttatgtctttaatagaccaaaccaagatca

SEQ ID NO: 24288 - DNA, 359 bp, Glycine max
  modified_base (51)..(51): a, c, g, t, unknown, or other
gagggtgcttgtgttgtgttgtgggcacgccttgttcggtgaagtgagtantgagtgctgaatcgaatcgaatcgattctccgaacatggcggcgagcgatcgcacagtgttgcaattctcttcatcatcttcttcttcttcgcagatcttgtccgcgaaggtccaccctctggtcatcttcaacatctgcgattgctatgttcgacgccctgaccaagccgaccgcgtcatcggaaccctactcggctccgtccttcccgacggaaccgtcgatatccgaaattcctatgctgttcctcacaacgagtctatcgaacaagttgcattggatatagagtaccaccacaatatgttaata

SEQ ID NO: 24289 - DNA, 357 bp, Glycine max
gatccaaaatcgaatctttgttggaaacatggcttcctgctccttcctctgccccgcagcatttaccttctcacagaagccacttcaatccacttttcttcattcctcctctcttctcactctaagcattcttcctaagaaattgagaaaaccccaccaactgagaagcctcatagtggccaaatccattccctcatatttaacttcctcctttgatgaattcctgtgtccaatccatctctgttctctgatgtggcattaattacttctagagtagttttgtctttggtttcagtatccactttaaaaagcaattgggatttcatatttgcattggtatactctcttcattattta

SEQ ID NO: 24290 - DNA, 391 bp, Glycine max
gatactcttacacatcatgcgactagggttttagcgcagcttcttctagatttaaggaagatgggtaaagaaaaggttcacatcagtattgtggtcattggccatgtcaactctgggaaatccactaccactggtcacttgatttacaagcttggaggcattgacaagcgtgttattgagaggtttgagaaggaagctgctgagatgaacaagaggtctttcaagtatgcctgggtgctggacaaacttaagactgagcgtgaaagaggaatcaccattgatattgctttgtggaagtttgaaacaacaaagtattattgcacagttattgatgcgcctggacatagggatttcattaagaatatgattactgggacatcccaagctgact

SEQ ID NO: 24291 - DNA, 340 bp, Glycine max
gctccatcgtgattagggttttgggattttgattttatcctcagtgcttccaccctcgtcacctgcaattgattctttcttccaatcgataattgaagaacacaacatttcaattcctctctcgatttgttttgcaagttcgataatcgaaagtgcctggtgattcggagttgtttgtgaaaatgagaaggcaggggcactatggggatccatctgccaacacttgtgttggtggtagccagatgcatcatatggctggtcaaaggggggaggccaagtcgggtaattttgaaggacggctagaggcctttactccacagagagagaatccgtatgcaaa

SEQ ID NO: 24292 - DNA, 317 bp, Glycine max
cacttttgtaacactttatcttctctcttctatattttgcttggcaactgcctccccctatcaacctaaggttttaggttgaactggttgttagactttagagttttcaacatgaaatatgttattgttctcacttctgctagatttctagttcttgatgaccaacctgctaggttttgtgtgtgttttttttatcagagaggtctttgcaaatgcacctttttttatttcagcataggttgctggtgcattggaagcaaggtaaatattaaatcttgctttattgcatgattttctctattttcaagtaatttttg

SEQ ID NO: 24293 - DNA, 251 bp, Glycine max
agcacagaacagttgaagtgaatggcataaaaatgcatgttgcaaagaaaggagagggtccagtggtgttgttcctccacggcttccctgagctctggtactcatggcgccaccagattctctctctcagctccctcggctaccgcgccgtcgcttccgatctccgtggctacggtgacaccgaagcaccaccttcaatctgcagctacaactgcttccacatagtgggtgatctcgttgcgcttattgac

SEQ ID NO: 24294 - DNA, 250 bp, Glycine max
tattaagcacatgttgtcaaaaccgattttacacagtagaattggaaagtgggctttagcattaacagaatattctttaacgtacaagcctttgaaatctgttaagggtcagattgtggctgattttattgtagatcattcattgatcgagatgctgcaagattatgtcgatacagagccttggattttgtatttcgatggatcgaaacacaaacatggaactggaattggagttttaataatatccccc

SEQ ID NO: 24295 - DNA, 374 bp, Glycine max
  modified_base (297)..(297): a, c, g, t, unknown, or other
gctagcagccagagagaggatacctcaggtcactttaatatttttgtcggtgaccttagtcctgaggttacagatgccacattgtatgcttgcttctctgtatatcctagttgttctgatgcaagggtaatgtgggatcagaagacaggccgttccaggggatttgggtttgtttcttttcggaatcagcaggatgctcaaagtgctataaatgatttgactggaaaatggcttggaagtagacagattcgttgtaattgggcaaccaaaggggccagtgccagtgatgaaaagcanacttcagattcgagaagtgtcgtggagttgaccaatggatcatctgaagatggccaaaaaacaaccaatgatgacac

SEQ ID NO: 24296 - DNA, 314 bp, Glycine max
  modified_base (9)..(9): a, c, g, t, unknown, or other
acacgacanaaaggtgctcactttacctgtggcagtactttgagaattcttgaaattaattgcttgggaaaaaggattatggcaggcacaacttagaaatgttgtttcaactcaaaaaccaccgattgagttatgtcttgaaaatcattctgggttgaatatggatgagaactctgagagctcatctgcattcagaagcaacatccattattatcgcctgcataattctgttgattttagcgcttacctgagttcttgattctgctcacatacctcatgtcaatgctgcttgtggtgctgcattgttgccatac

SEQ ID NO: 24297 - DNA, 220 bp, Glycine max
caacgggggaaagagaagtctagtagtagtaggggtaaatcaatgttttacgaagctcgcgtcggatacagcattcaatacgttagaccaaacggtggaatcaagaaattcatatctgctgcttactctaactgttctcgcaaaccatgctgatacacatccggattgatagttcgttgcatgcaaccatagttttattaggattttttcttctttggtt

SEQ ID NO: 24298 - DNA, 413 bp, Glycine max
caagtaagtaaaattgatccaacacaactccaggctattcagagaactgctccagggcaaacttcaccttctttgcaaacccctgctccacaggttggtaatcgacctggtagtgggtctcaagcttcatctccccccaaaacatccaacacgattagttcattggattctggagaaattgatgcagcttcagataccagtaaattgaagggtgcattggttgggaagggaaggggagctccccagggtagtagtggaaggggctcttttgtttatggtggagctatggggactgctggaaatatcagtggtagtcatggagatctgaacttcccaaccttcttgccagttatgcaatttggtgggcagcatcctcgtggcataagagttcctgctgttggcatggcgttccc

SEQ ID NO: 24299 - DNA, 291 bp, Glycine max
ggtaacaaccaagtgatatgcaaggttgatgctgcaagtgaatcctcaattcttgacactgatttgacagttttagctagcatgcttgtggatcaaggtgtggatgagaggaagcaaattgaggaagcagttgagagagaccaacgtgtgagtgatttcttcgtctatggtgtcaacttgacatttctagacttacaagaaaccaatgtgtatgacttgcaattgaagggacacacaccaaagtttgtttactacacccttcaaggtgttggagatgaaggggttgttttg

SEQ ID NO: 24300 - DNA, 427 bp, Glycine max
  modified_base (46)..(46): a, c, g, t, unknown, or other
cgagaagacgacagagggggtgtgattgtttgttgttgtaactcgntcttcttcttttgttgttctgggtttgtgtttgttttttctctcacctgaaaatgtcttgctgcggtggtaactgtggttgcggaagctcctgcaagtgcggcaacggctgcggaggctgcaagatgtacccagacttgagctacactgagtcaaccaccaccgagaccttggtcatgggagtggcacctgttaaagctcaatttgagggtgctgaaatgggtgtgcccgctgagaacgatggctgcaaatgtggaccaaactgcttctgcaacccctgcacttgcaagtgaagtgttgggagagcaagcttcaagcatagatagcccttaattaggaataatgataaactattaatgtgtcgctaaaaacttatgtatta

SEQ ID NO: 24301 - DNA, 366 bp, Glycine max
ggaaaaagaaaaaaagagaagggggaaatctcttcttcaatggcggcagagtcatctcgcagtagcgctaaacgcccctttatggaagaagacgacaatgaattctccaaaaagccaccgtaatttcttttcccttcttcccgctcacaaaccctaatttcattcattcttattgagaaaattccagtaatcggtagaaatgatttttagacttagtttattgcatattggcttctgttattttgattcggggactattatcttgtggatcacctccaacgcctatcaagttctaatttctggcccttaaaattggcattcttcgaaagctagttactttaaattcattatgcttgtgtatgaata

SEQ ID NO: 24302 - DNA, 302 bp, Glycine max
  modified_base (293)..(293): a, c, g, t, unknown, or other
gggctagtgcatgacaagagggttcatggaggcatctcactgggatctgttgttcaggatcctcattccagtaaagcagatgaactaaagcaggtactcattgacaaaaacatggatgtaaatatgatgaaaatagggagtagcctaggcgctgctgcaacctgttctgacttcgagcagttggaagctgcaactgctcatgtctcggttaaggaaggtggtcacttgccaatgtcagttgttgttcctgaaggcagggtgcatggtggtagtctgatggcaatgctaacggngagttctag

SEQ ID NO: 24303 - DNA, 367 bp, Glycine max
gagtatgtgtaagtgtaaatattatccctatacgcggattaaatatgcgcaggaagcaccaccagcactacttcttcgctttttgctagtgtgcacccttgttgccttgcgtgcgcccggtgcgcagccccctatcgtgcgcatcccccccaatcacctcaccgaaactactaacaccgtgatcacaatcgttcaccagcgccacagaacccaaatctcgggttccacccgcccagccatgttcaaagcgcgtgtctacaccgatgtcaacgttcttcgccccaaaaagtactgggattaccagttttttaccggtcaatggggtgatcaaaaagattattaagttgtgcgccaagtgggaaaggga

SEQ ID NO: 24304 - DNA, 395 bp, Glycine max
ggacctagtgtgtgattggatggtgttgtaactcgaccttcttcttttgttgtgctgtgcttgggtttggtttttctctcacctgaaaatgtcttgctgcggtggtaactgtacttgcggaagctcctgcaagtgcagcaacggctgcggtggctgcgcgatgtacccaaacttgagctacactgaatcaaccaccaccgcgaccttagtcatgggagtggcacctgttaaggctcaatttgagggtgctgaaatgggtgtgcccgctgcgaacgatagctgcaaatgtggaccaaactgatcctgcaacccctgcacttgcaagtgaagtgttgggagagcaaactctaatcagagatagcccttaatttggaataatgataaactattcatgt

SEQ ID NO: 24305 - DNA, 356 bp, Glycine max
tgccagataaaaaagattttggttatagttttccttgcgatggcccgggacgaggcggtacttgcgatatttcggcttgggacgcattttatttggcagttttctggatgttaaataccattgggtgggttactttttattggcattggaaacacattacactatggcagggtaatgtttcacagtttaatgaatcttctacctatttgatgggatggttaagagattatctatggttgaactcttcacaacttatcaacggatataacccttttggtatgaatagtttatcagtctgggcatggatgttcttgtttggacatcttgtttgggctactggatttatgttcttaatt

SEQ ID NO: 24306 - DNA, 423 bp, Glycine max
  modified_base (401)..(401): a, c, g, t, unknown, or other
  modified_base (405)..(405): a, c, g, t, unknown, or other
gtcagggatcattcacaagattggggagacccttcatgtgggagggcacaagaaggaggaggagcataagggtgagcaccatgctggagaatacaaaggggagcaccatggtgaacacagtagtgagtacaaaggagagcatcatggtgaacacaaagctggagagtaccatggtgagcacaagccagagcacaaagaggggttcctagacaaagtcaaggacaagatccatggtgagggcggcgccgccgagggcgagaagaagaagaaggagaagaagaagaaggagcatggccatgagcatggccatgacagcagcagcagcagtgacagtgattaaactgctgcatcacctatatatttaaaagggttatgggaccatagtagcgagggctgtgccntaanttctctctctctctctct

SEQ ID NO: 24307 - DNA, 431 bp, Glycine max
acgacagaagggtgctcactttacctgtggcagtactgagagaattcttgaaattaattgcttggaaaaagggattatcgcaagcacaagttggagatgttgtttcagctcaaaagccacggattgagttatgtcttgaaaatcattctgggttgaatatggatgagaactctgagagctcatctgcattcagaagcaacatccattatgatcgcctgcataattctgttgattttgcgcttactgttgttcttgattctgctcacatccctcatgtcaatgctgctggtggtgctgcatggttgccatactgtgtttcggtaagattgagatattcatttggtgaaagtcccaatgtatcatttattggcatgaatggtagccatggtggtagggcatgttggttacgtgttgatgattgggaaaaatgc

SEQ ID NO: 24308 - DNA, 357 bp, Glycine max
gagtatgtgtaagtgtaaatattatcgctatacgcgcattaaatatgcgcaggaagcaccaccagcactacttctgcgcttcttgctagtgtgcacccttgttgccttgcgtgcgccggttgcgcagccccctatcgagcgcatcccccccaatcacctcaccgaaactactaacaccgtcatcacaatcgttcaccagcgccacagaacccagatctcgggttccacccgcccagccatgtccaaggcgcgtgtctacaccgatgtcaacgttctccgccccaaagagtactgggattacgagtctctcaccgttcaatggggtgatcaagatgattatgacgttgtgcgcaaagt

SEQ ID NO: 24309 - DNA, 420 bp, Glycine max
aggaagacgtggaaatgattctagagaatcttccagctcaaaggcagagcatgcttttctctgctaccatgcccagttgggtgaagaagttggcgagaaaatatttgaacaatccactcacaattgatttggttggtgatgaagaggaaaagcttgctgaagggataaaactttatgctatagcagccactgccacttcaaagcggacaattctttctgatcttgtaactgtttacgcaaagggtgggaagactatagtttttacacagacaaaaagagatgctgatgaagtatcattgtcattaacaaatagtataatgtctgaagcactgcatggtgatatatctcagcatcagagagagagaacactgaatggtttccgtcaaggaaaattcacagtgctttgtgccactgatgttg

SEQ ID NO: 24310 - DNA, 332 bp, Glycine max
gaagcatcaactaacgtaaaatcttctgccccaccctgcatttcagcagagtgattctgttcactacaatgccatcatcactatcctctttcctccatatggttcctattctctcccttcttgtactctcatgtgtgatttgttctagtagtgctcagggaccaccttcacctggctactaccccagttccaaaattagtcctgttagtttttatcaagggtttagaaacctatggggacctcagcatcagaggctagaccaaggctcattgacaatctggcttgactctaactcaggaagtggattcaagtcacttcactcttatcgatct

SEQ ID NO: 24311 - DNA, 216 bp, Glycine max
  modified_base (12)..(12): a, c, g, t, unknown, or other
ggggtgatgaangatggacccagttgtgctgttgataatggtactactgcaaattctacacctacttgcttatcaagatcgtgattatcttctctctcaactggtgcttatgtgaaagttctgatcttattggagagtagctgtctattattcctactaattgcaccacccatgccctggttttacccatattctaaaactaatctactatgagct

SEQ ID NO: 24312 - DNA, 418 bp, Glycine max
ctcacttgtcatgcactgttctctaatgcatttattctcctgctgagattatggcggtttgatcgtccacctgttgaacatgtgatggggggtgcagcaaccccagcattaggatcacaattaggtcctgagtaccttttattggttcggaattgtatgttagcatcctatgggaaatctccgagagatcgagtaagaagtagaagattttcaaaaatgataagtttttctctcgagcccttatttatggattcctttccaaaattgaacatttggtatcggcaacatcaagaatgtattgcttccacctgcaatactcttgcacctggagggccagtttctcagatcgttgaagcactacttagcatgatgtgcaagaaaataaatagaagtgctcagtcattgacgcctacaactt

SEQ ID NO: 24313 - DNA, 414 bp, Glycine max
ggggaagaagttgagtctgatcgactcaacctcaaccttctcctggttcctgcattgcgttgctctctctataccttctaattcccaaatttctagggtttggtacagagagaaaaaggaacataagatgtctcaaaacgggaagctgatgccaaatctagaccagcatagcaccaagcttctcaatctcactgttcttcaacgaatcgacccttttgtcgaggaaattctcatcaccgctgcgcatgtcaccttctacgagttcaacatcgacctcagccaatggagccgcaaggacgttgaaggatctctcttcgttgtcaagaggaacacgcaaccgcgatttcagtttattgtgatgaaccgtcgcaatactgaaaatttggtggagaatctcttgggcgatttcgagta

SEQ ID NO: 24314 - DNA, 400 bp, Glycine max
ggtaggcaaagagagagagagaaaagcgtgaatcatgtcggacgaagagcatcacttcgattctcaggcggatgcgggagcgtccaagacgtatcctcagcaggctggtaccattcgcaagaatggctacatcgtcatcaaatccaggccttgcaaggttgtagaggtctctacgtcaaagacaggcaagcatggacatgcaaagtgtcactttgttgcaattgatatttttaatgggaaaaagcttgaagatattgttccatcatcccacaactgtgatgttccacatgtgaatcgcactgactatcagcttattgatatctctgaagacggctttgtgagtctgttgactgataatggaaataccaaagatgatctgaagcttcctactgatggggca

SEQ ID NO: 24315 - DNA, 443 bp, Glycine max
cgaaagacgacagaaaggtgctcacttgctgggatatttgtgacttcatgtccaatattattggtgactctttccatttgtcgattgattaactcattgggaaccacagataaaagctccaagtcttgggcttccaattggatcactttgttgttcatctcttatgaaactacgcttcatgaaacaaacattaataattcttatttatgtttttatatcaaaaaaagaaggggatcttaatatacttcatcctttattcaataccccgaatgaccttgtaataacatatcttgcacttgcatgacgaaaattaaataactccttgtagttatgaggagtgtttccaatccatccattaagatgatatctaggccctcgatcaggagctaaaaattcaggccatttgtataccccacatgcacaagaatatatttacctacgat

SEQ ID NO: 24316 - DNA, 309 bp, Glycine max
gctcaaaaacagagtaccctacacctatcagatagagaaggttttctgtcgtgcgggtgcagaaaatagctcggagctccacatgaatgaaatgggtctctatcttgacactcttattactttcccactcgcccctcacaatattcgcaaaagatgggctagtggcaaacggagattttgaggctaccccaataaacggggtcccacactacgctattgtggagggccccatcacagtcccaaactggaagtcacactgcaacggtgagcttgaggaatcatggcaaaaacaggctgggatgatcctta

SEQ ID NO: 24317 - DNA, 403 bp, Glycine max
  modified_base (355)..(355): a, c, g, t, unknown, or other
gatgcttcgttattctctatatttctctccctctttctcttcacactctggctttcattcatttgcattgcgagaaaacgaaaaactctgaaaaccgcaacaaactcacacacactcacaagagagtaacaaccaaacaaacaacaaatctctcatcatggcagttgaggctcctccgcacaacatgaatctcttcccctcgcagttactaaccgccagagaaatgacgaaaccgaatcttggcttctacaccgcacagcaaacggaagctgctgctgctgctgctacgcctcttcttcagtcaacggcgttaccttttctccaccaatccgatagtggcctcacctgccacgtnaccaccaccgctccgacgagaaaacgctccagagactccatcaccact

SEQ ID NO: 24318 - DNA, 317 bp, Glycine max
tggaacataacatatagaaattgatgtcttttttgtaagagaacaaaggttggccaaacagatctcagttgagcatctttctgccttagatcaatgggtagatgtcttaaccaagccacttttctcaacatgatctgaagatctgagggacaaactcaatgcgaagtatttttctttagaaaaaccttgcccttgcgtttccgggggttttagaatgcatgtctaaaaataactgttacaaatagttattgtgggactgtcaggacagctctgttaagctaactacttttttttgactaacagaattctgttagtta

SEQ ID NO: 24319 - DNA, 397 bp, Glycine max
ctctccttcagttcgctccacacccgaatcccattctctcaatcaaatcaaaactggggctttccaaaaaccaaaggcaataacagctcggacgcttgtaatactttctgctcttgctatgatcttaatccaaccagctattgcaccagcagcttttgctacctttcaaactgctgccaagaccggtggtcctgctgctgcagttggtagaaaactaatccatactgagctcctaagtagtgcttggactggtttcttagctggctgcttgcacaccttatcagggcctgaccacctagctgcctaggctccattgtcaatcggtcgaacacgaatggagagtgctgctgttggggccctttggggttgtggccatgatgctggtcaagttcttttt

SEQ ID NO: 24320 - DNA, 397 bp, Glycine max
  modified_base (333)..(333): a, c, g, t, unknown, or other
caacgccgatgccgatggagctggagctaggttcaacaactatccagcgatccttcaacacgcgctacacgcgccacgcgcgcgactcgctcgacgaattgcctgacagcttcaccatcaccgacccctccatccctggccaccccatcgtcttcgccagcccgggcttcctcaagctcacgggctacgcggcccgtgaagtcctgggccgacccgccgccatctttcagggcccgcgaacttcgagaaaatccgtcattgaaattcgcgaggccgttagagaggagcgaaacgcgcaggtcgttctgctcaactaccgcaaagacggcacgnccgtttggatgctttttcgtgtttgccccgttttcagcagcgacggtggcgccgtcgtgcactt

SEQ ID NO: 24321 - DNA, 364 bp, Glycine max
ccgccatcccaaatatccccaaaagaccgcgcaccattctcaccatcttccacaccccaacattgcccaccaaactccccatcaagcaaaagaacccgctgaaccacattgtcgccaccgtcaacggctttcgtccgaaccggtccagaagcaccggcgatatcgtaaaggccggcatctccggcaccgagttcagcatcacgttcaagtagaggctggttacgaggttcatgacgtctagactaagcccatagtcgaccacataacctagaaaatctatagccaccgcaatgaacaacctgatacgagtgatgggggaacgcaccacgtctatgatggagccaacgagggcatccttgttttc

SEQ ID NO: 24322 - DNA, 411 bp, Glycine max
ggttcacatccgaatccacaacacactgttaataattattctgattcacgaaaaacaggaaaaccccaaaactctctttgttcacaatgggcacagagacctcatcggtagatatttcggaacccctgctcttggatcctcacgggaacgaggaaaaggaagagtatttgcgcgaagaggttccggagtggaaggagcagataacgataagagggttggtggtgagtgctgtgttggggagcttgttctgcatcatcacccacaagctaaatctcaccgttgggatcatcccttctcttaatgttgctgctggcttggtggggttcttctttgtgaggacctggactgggttgttgaccaagatgggatttttcaccaagccctttactaggcaagagaacactgttattc

SEQ ID NO: 24323 - DNA, 413 bp, Glycine max
  modified_base (380)..(380): a, c, g, t, unknown, or other
gagcgttaagaacagaacgaagccacgcatgataataacaatacccttcttcgtttcttccctctccactcggcactcacaattctcaacccaaccaccccctattaaccctcaccgcaatctctgattcgatcttcttcaatttcggggtttcccatataccacaaggcataggcctgtgtgaatttgcgatatgctgggtaattgtcgccaagacccaatctcttgggtactcctttaccaacccccaccgccgcattaattgtttttctattggaatcggacaaaggttccactgcgactgaaactttcaaaggccaaaaaaaatgctcgattcggtccttctggcgcttttcttgccgtgccttggcatgagcggngtttttatcgtctacatgtgccttctttggtac

SEQ ID NO: 24324 - DNA, 351 bp, Glycine max
caccactcagggtctagatggccttggtcagcgttgtgccaagtactacgaagctggtgcacgttttgccaaatggcgtgcagtgctgaagattggtcccaacgagccatctgagctgtctatccatgagaacgcctatggcttggctagatacgctgtcatatgccaggagaatggcctggttcccattgttgagcctgagatccttgttgatggacctcatgacattcacaagtgtgccgccgtcaccgagcgtgtccttgcagcatgctacaaggctttgaatgatcaccatgtccttcttgagggtaccctattgaagccaaacatggtcacccctggatcccaatc

SEQ ID NO: 24325 - DNA, 342 bp, Glycine max
caacgggggggcggagaacggacccaaaactagaggctccgtcccgtcaaaccttccacgctgctctgcgtttccaatcaagggaataatatttcttaaagatattgcgaaaccatggatcacgccaatcctatgatttttgtgggcggaattcgtaggaaccgtgtctccttctgttgctttctagcaccagctccaacattctatcgcgtttgctagaagaaaaccacggaaggtgtacaagcactttcttacgtggctgcactctttacttcaatgcttagcgatatgttatgcttacatacagacgggcgaaatacttctcatcaccattaacgcatt

SEQ ID NO: 24326 - DNA, 316 bp, Glycine max
gagggagatttcatgggaatccgatcggtattcgatgggggcgatcttagaaggggagtggagaaaactggaattgacccacaattcattccaaagatatggaagcatatcctcatctttgccaaacatcaaaattgggattgggagaaacacgtgcccttcttgccctcttcagcctactctctccttcggtccaacttcaaaacccctctctcttcccctattcactccgttttccactctgtcgacaacctcaccaccaagctcctaattcagctccaccacaatcatggacctttcgtcgaggctgtcatta

SEQ ID NO: 24327 - DNA, 258 bp, Glycine max
aggagtgtgagcgtcaacaatggcttcttcaccttcaaaaggggcggtgtcttatcgagaaggaatacctgtggttcaaatcgccatagatggccaaacttacctcactcaatcccatctagatgttttttcacgcctaactgttttgcaagagagactatcgcaaggcaagggcggagaaacgaactttatcgctcatcgaagcgagcttcacgcgctgttatccaatattctatagtgcttcaacagtctttctac

SEQ ID NO: 24328 - DNA, 286 bp, Glycine max
ttaacaaaacagaacgaatcagcacaggaaagagagagagaaaaacatatggtgaaggctttgtggaagaaggcgaattgaacacactgcctaaatacttcactctcaaatagaggcaaaatgggcggtatcttcggacattaacgacgataagaccatgcatgggtttctcaaggtctctggaactcatgtcgcgagcccattcgctaagtttggggttgcaaaagcttaagagaaatataacaaccgtgcttgagcatgtcagatgtggtgacaacaacatata

SEQ ID NO: 24329 - DNA, 393 bp, Glycine max
ggttctagtgtgtgattgtttgttgttgtaactcgttcttcttcttttgttgttctgtgtttgtgtttgttttttctctcacctgaaaatgtcttgctgcggcggtaactgtggttgcggaagctcctgcaagtgcggcaacggctgcggaggctgcaagatgtacccagacttgagctacactgagtcaaccaccaccgagaccttggtcatgggagtggcacctgttaaggctcaatttgagggtgctgaaatgggtgtgcccgctgagaacgatggctgcaaatgtggaccaaactgctcctgcaacccctgcacttgcaagtgacgtgttgggagagcaagcttcaagcagagatagcccttaattaggaataatgataaactattaat

SEQ ID NO: 24330 - DNA, 137 bp, Glycine max
caactttctgttgtgtgtgtgtgtgtgtgtgttcgagtctgtgtatgtgtgtgtgcgtgtgtgggtgtgtggctgtctgtgtttgtggttgtgtgtgtgtgtgtgtgcgtgtgtgtgtgggtatgtaagtgtgtgtg

SEQ ID NO: 24331 - DNA, 357 bp, Glycine max
  modified_base (334)..(334): a, c, g, t, unknown, or other
gaagtaagtgaatcgatcaagtacccaaactctaaagaaagatcattatttatggtccaagaccatacatattgataaaaagaactattattgatttgatgaatagacaaatcaagcgaaaacatcataactatagttaacaataaaatactaggaaaagcccacatacggcgaagatatttggttgctgtcggaaaaagtagaagtcccactcctattaacataggaactggaaatggaataaaaagtatgatccatgaatattgatgtgtatattccatacaataaacaaaaaaattatgattctaatgaattttgtttcttattcgtcggnttttattttatcttttttggaaa

SEQ ID NO: 24332 - DNA, 372 bp, Glycine max
ggggttgcattttcgcacggagcaaaaccaaaaacacggtgtggcgctgcggatctctctctcggtcgttgctcttcgccgcgagaaccactccaaatcgttcctgcatttctctccttcactgtgcttcttagccttccctacgctctcatgttctccaccctcgccgtcccctcattacactccttacgactgtgggaattctcgggtgcacgtagtcgctgattcctgtacacagcgctgacgcctgcgctcgtctcacttatcacatttccatcgaatcgcgcgcttgctgcaaattctcgcagggtacttgttccttctaaatttctatctctcttgccctaattaggcatgcttgctgtcattatg

SEQ ID NO: 24333 - DNA, 389 bp, Glycine max
gataccaaaaacaaaacacaagccaagtgaaagtgagaaaaaataaaaatcaaagagcataatgtcagggatcattcacaagattggggagacccttcatgtgggagggcacaagaaggaggaggagcataagggtgagcaccatgctggagaatacaaaggggagcaccatggtgaacacagtagtgagtacaaaggagagcatcatggtgaacacaaagctggagagtaccatggtgagcacaagccagagcacaaagaggggttcctagacaaagtcaaagacgagatccatggtgagggcggcgccgccgagggcgagaagaagatgagggagagaagaagaggagcatggccatgagcatggccatgacagcagcagcagcagt

SEQ ID NO: 24334 - DNA, 301 bp, Glycine max
acgaaggtcggctggagaagacaagaaggtcggctgcggaagacaagaggggaacgcaccaaaaagaaatctcaatttttgagcagcaacactttctctgttctcgaaaattctcagttgagagaaaatctgatatgtcgggcaagcgtatgtcgacatcacctttggtgacatcgaagtaccacctactacgctgtatatcggcaaacggagcgttggctcaagaccgacttcctcagtaaacctgagagataactgcatatgaatgacttatgagcctggacacttgctcaactggatt

SEQ ID NO: 24335 - DNA, 327 bp, Glycine max
ggttctagtgtgtgattgtttgttgttgtaactcgttcttcttcttttgttgttctgtgtttgtgtttgttttttctctcacctgaaaatgtcttgctgcggtggtaactgtggttgcggaagctcctgcaagtgcggcaacggctgcggaggctgcaagatgtacccagacttgagctacactgagtcaaccaccaccgagaccttggtcatgggagtggcacctgttaaagctcaatttgagggtgctgaaatgggtgtgcccgctgagaacgatggctgcaaatgtggaccaaactgctcctgcaacccctgcacttgcaagtg

SEQ ID NO: 24336 - DNA, 418 bp, Glycine max
ggcagaggaaccgtgttctctaatcttgtaattttctgtgtcgcttcgtggttcattcttctcgttcttgtgatctgttctattttggagtacttacaacactcctttgcaagtttaattaattaaagaggctaatcaattttcaattggactgcagcagatggctgaggagggttgcagggttactctaaatgtttatgacttgagccaaggactagcacggcagctttcaatgtcctttttggggaaagctattgaaggcatatggcacacaggagttgtggtttatggtaatgagtattactttggtggtggcatacaacattctcctgctggattaacaccatatggaactccacttagagtggtagacttaggtgtgacacatgttcccaaggatgttttcgaaatgtattta

SEQ ID NO: 24337 - DNA, 386 bp, Glycine max
tatcttggttgggatgcttgacacatacttaaatgtcttggctttgtggcttctgtttcttctttttgctagttgggtggcatatgtgttttttgaggatacaatacaggggaaaacagtattcacttcctatggtactacgttgtatcagccatttcttttatttaccacatccaataatccagatgtttgggttcctgcatacaagtcgtcacgttggtattgcctgtttttcgtactctttgtgctggtgggagtttactttgttacaaacttgatccttgctgttgtttatgacagtttcaagagtgagcttgtaaaacatgtttttgagaaggatcgtttgagaagaactatgttggacaaaagctttgatctcttggata

SEQ ID NO: 24338 - DNA, 397 bp, Glycine max
ggtgagcgtcaacaatggcttcttcgtcttgagagtcggcggtgtcggagcgaagaggaataccaggggctcagttcgtagaggatgtccaaacttacctcactcagtcgggtctcgatgttggttcagccctggcttttctccaagagagacttcagcagtacaaggtagtagaaatgaagcttcttgctcagcaaagggatcttcaggcaaagataccagatattgaaaagtgcttagacgttgttgctacattgaaagctaagaagggtactggtgaggaacttattgctgattttgaggtatcagaaggcatctattcacgagcacgcatagaagaaaccaattccgtgtgtttatggctgggagctaatgttatgctggaatattcattaga

SEQ ID NO: 24339 - DNA, 418 bp, Glycine max
ggactctccgctggagttggagttggcaacgccttggtgttggagatcgtgatgaccttcggtctggtgtacacggtctacgcaactgccattgaccccaagaagggtaatttgggaattattgctcccatcgccattggtttcattgtcggcgctaacattttgttgggtggggccttctctggagcggccatgaaccccgctgtgacatttgggcctgctgtcgtgagctggacctggaccaaccactggatctactgggccgggcctctcatcggtggtggaatcgctggccttgtttacgaggttgtctttatcagccacacccacgagcagcttcccaccactgactactagagggggggaaatgaaaataaaaaaaaaaatgtgtattattgaaattctctggaatcttctt

SEQ ID NO: 24340 - DNA, 393 bp, Glycine max
tgcattatgttagtttaatctatttatgtatttagtccataatggtgggtaatgtcacatgagtcaagtgcgagaatgctagaattaatgtctcatgtgagagacatgtgacttatatataaactaataaataaataaataaataaataaataaagactaaattgtaattggattaaatatgagaagtttctaaagataactgctacttaataggagtggtgattataaaggggttaatactcactaacgtgaaacaagtccccttcttgacagaaaggattctctctaatctatagtcatcacaaatgttgacaagaaagaatatttaagaaagcaaaatcttgtttctctcctcttccaaggaatcaaagtgtaccaaagagaagtctcac

SEQ ID NO: 24341 - DNA, 146 bp, Glycine max
accactgaacgggatacatagtccagatttcaaaaggataatgtcggtgacaaccatgggtaacgcattttttttttccaaaccatattattaccgcaatttccattatcagacatcaaacatgcttcacgatcaacactccaaaa

SEQ ID NO: 24342 - DNA, 397 bp, Glycine max
caaacattggtgataagtcctgtcaagttatctttggacactccattgctcacatggacaacttaatataacgattactctggttaaataatgattgctttttaacatttcattattcacatgaaaattaatctgataataattcctgtcaaataatgattgtctttggacatttcattattcacatgaataatcacactatttatcatcaccacatgtttatcatcacaaacatgtaattatgctgccaaattgtgtctttctttgggccgagcacaattcatatgaataatttcatgcaacatctatgtaaattcaatcaaatcaacttatgcaacagaggttacttgggcaacatgttgtttcaatcaatttaacaaaaaatacaagataattt

SEQ ID NO: 24343 - DNA, 423 bp, Glycine max
aggcctacaaagcacccataggaatgtctccttatcgggttgtctttggaaaggtatgtcatcttccagtggagattgagcataaagcatattgggcagtgaagacctgcaacttctctatggatcaagctggtgaggaaagaaagttgcaactgagtgagttagatgagatccgcctagaagcgtatgagaatgccaagttctacaaagaaaagaccaagaagttccatgatagcatggtaattaagaaggacttcatggttgggcaaaaagtgttattgtataattctaggcttggactcatgagtggtaagttgaggtctaagtggattggtccttttgttgttactaacatttttccttatggtacagttgagataaaaagcgactccacaaataagagcttaaggtcaatggacaccg

SEQ ID NO: 24344 - DNA, 380 bp, Glycine max
ttacaaacttctgtgggctcactatcgtgacaccatgaacattaattcacttgcccgcaaatccttggtcaatgccgacggtattatagagaaaacattcttgtggggtaggtactctttggaaatgtctgctgttatttacaaggattgggttttcaccgatcaagcattgcctaatgatcttgtcaagagaggagttgctgttaaggatccatctgctccccatggagttcgacttttgatcgaggactatccttatgcttctgatgggctagagatatgggatgctatcaagtcttgggtggaagaatatgtctcattctactacaagtcagatgaggaacttcaaaaagaccccgagctccaagcttggtggaaag

SEQ ID NO: 24345 - DNA, 406 bp, Glycine max
gatccacacgctcacaataacacactgtcaccgttccgttccgttttcctctgttttttttttctttctttcaaatccccgcttcgtggaaatcccgaaccagaaaccatgcttctccgaaccgctgctgcttctgcttcgtccctctccctcttcagcccgaacgccgaacctccccgttcggttcccgctcgtggattggtggttcgcgcagcgaaaggatccacgaaccaccgcgccctgaccggagtgatttttgaaccgttcgaagaggtgaagaaggagctcgatctcgttcccaccgttccgcaagcttctctcgcgcgccaaaaatacgttgacgaatctgagtccgccgttaacgaacaaatcaatgtggagtataacgtttcgtacgtttaccatg

SEQ ID NO: 24346 - DNA, 384 bp, Glycine max
  modified_base (375)..(375): a, c, g, t, unknown, or other
gaaacagagtagagatagcaaagggataatgtgggtgacaaccatggctaacacatctcttcttcccaaaccatattattaccgtaatttccattatcaacatcaaagatgcttcaagatcaacctcccaaaatggacaactagagcttcctctgctgcccctggggtcgacctcaacactctcgaatctgccatttccaagaaagacagtgatgctgttaaagaggcacttaatcagcttagtgaagttggttgggccaagaaatggagttctcagccatatgtttcacgtcgtacggtcagtctccaattacaaatgtggcaaagtgacaactaaacattaagctctcatcaaccattcttggacatggcatncatcataca

SEQ ID NO: 24347 - DNA, 92 bp, Glycine max
gaatggtccggtgaagtgttcggattgcggcgacgtgagcggttcgctgcccgcgacgttgtgagaagtccactgaaccttatcatttagag

SEQ ID NO: 24348 - DNA, 397 bp, Glycine max
gagacatatctctaattaacactaataacagcaaactaaaggtgaagtttgccagaaacaagatgggaaggaaccattttcagcagcaacactgtgctgatgggagcatgtggatggagagtcagggtcagcaacagagctatgccttccaagaagagtcttggagccctgataacaactatggccacaaccacaagcaattcccaggcatgcacatgaacatgaacaacaacaacaacaacaaaaggcttggtgcttttgctgctgtggactctgacttctcaatgcaaaaacatcatcatgggcatggcaacggcgtaggagccatgcacatgaacatgaacaggcatggtggcaagttaggaggcatgtttcaagaaggcatgcacagtgacca

SEQ ID NO: 24349 - DNA, 346 bp, Glycine max
  modified_base (336)..(336): a, c, g, t, unknown, or other
agctttttcccattgatcatggtctttgtctccctggaactttggaagatccttattttgaatggatctattggcctcaagcatcaattcctttctcagatgatgagctcgactatatatatcacctagacccatttcgtgattcagaaatgcttagaatggagcttcccatgattcgagaagcatgcttgcgggttttggttctctgtactatcttcctcaaagaagcagcagcttttggtctttgtctagcagagattggtgacatgatgagtagggaatttcagggtctccatgaagagccaagtgagcttgagcttatctgtattgaagcanagaaactttt

SEQ ID NO: 24350 - DNA, 374 bp, Glycine max
acagaaccaatcttacaccagacattacttattttatctttgacacttcaacaatgtttaaaaccttcaaatacatcatactctttggtagagattccgctggttattcggcgaggcagtttgccaaacaaggcgttaaaccatggtagttggctatcatttctaaagaagcggtagcaccttatgaacaaccttctctcaacaatgcttacctttttccacagtcccctgctaaactttctcttttccatgtctgtctttcaaattgatgacaaaggtttcttcctcattcgtacacacagaaaaggatagtattaattcttatcacacaaatagttaatgtataccttcctgcaaaatctcttatcattgct

SEQ ID NO: 24351 - DNA, 409 bp, Glycine max
gaattcgtgatttttatatggagataagttttcattttgagagctctgttattccttttattgggcgtatagctccttcagatacttatcggatttggaagcgtgggtctaatcttcgtgctgatatgacccttgctggttttgatggcttacgcatccagcgatcggaccaaacatttttgttccttggagagggctatgttgcagaggaaggtaatttaactctgccacctggttctttgattgctctttctcataaggagaaggaaatcacaaatgctttggaaggagctggtacacaaccaacagagtctgaagttgcttatgaagtttccttgatgtctcagacaaatatgtatagaccaggtattgatgttactcaggctgagcttgttccccatttaaattg

SEQ ID NO: 24352 - DNA, 455 bp, Glycine max
  modified_base (71)..(71): a, c, g, t, unknown, or other
  modified_base (75)..(76): a, c, g, t, unknown, or other
  modified_base (106)..(108): a, c, g, t, unknown, or other
  modified_base (167)..(169): a, c, g, t, unknown, or other
  modified_base (205)..(206): a, c, g, t, unknown, or other
  modified_base (248)..(249): a, c, g, t, unknown, or other
  modified_base (263)..(264): a, c, g, t, unknown, or other
  modified_base (319)..(320): a, c, g, t, unknown, or other
  modified_base (354)..(354): a, c, g, t, unknown, or other
aactcctatgtggtcctttcattttacaggagtttggtggaacaagttcctcggatggacgaagcctatanggtnntttcttatttgatgatagtgaccgatattnnngatgatagttaccgaaatagtgagcgatatcgaccccgtcgaccttgatatggagcgtnnngagcttctatactatgtatgaataccgctatactanntggatatgatgcgcacgaaatagaaccgacttttattatcanncctttcaattcgannattagcaaaagccaatgtgcttccttgcatttaatatggatgtccaaacatccanntgatctggagtgtgaatgagtcgaattacttatnccctcggtcttttagtgaactatctctccacggattgtgaaagatgttctactagaaatattcttgttattgcttcgactcatattccccaaaaagtagat

SEQ ID NO: 24353 - DNA, 403 bp, Glycine max
gcctcatcataagattctctctttcatctccccattgaaaaccctcgccaaagttattgacttttctggttcaacagcaatgggtttgcttcaatttcttcttctgatctctctaggggtgaggagttagccagttttttattctttttctgagattcccacatggatcgggggtttagatttctgtgtcaggcaggaactacgagattagtttcatttgtaggaataacagtggctatagttttcatggttcagtattctgaacttcctagtagtaaattcttatcttctgttactaccaagtttactagtttcacaatggatacatcatcttcagttaattctaaagtggagggtaataatttgcacctaaatggttcaaattcaaactctactcatgcat

SEQ ID NO: 24354 - DNA, 416 bp, Glycine max
gattcataaatcttagttactttatcagtatcattcattatcactacgattgttctaaaagcaattattactcttgagaagaattaaaagatcatcatcacaataacaagatgagttcaggaattagagcatggagtgtggcagctagtgttggagttgtggaggccttgaaagaccaaggcatatgcaggtggaatcatgctttaagatcagctcaacaccatctcaaaaaccatgttggctcattctctcaggctaacaagctttcttcttctgctatgatctccacaacactaaaacatgagaaggcaaagcaatcagaggagtccttcagaactgtcatgtacttaagctgctggggccccaactagatatcataagtccaataagaaaatattctttctcttttaatttct

SEQ ID NO: 24355 - DNA, 181 bp, Glycine max
ccttcctaccggtgggaaaaaaacacaaaaagggatttggttttatgggtgaaggtctcttgggaaagggttggcttgccaaatattaaacacaatgggcccccatggatttggtaataatctttgggccctttcagatttggtttgggaaccctccaggctttttgggaccagggattta

SEQ ID NO: 24356 - DNA, 406 bp, Glycine max
ggtggcagagagcgaacccaaaactagagctaccttcccttcaaaccttccactcttctctccttttccaatcaagggaataatatttcttagagatattccgaaaccatggctcacgccaatcctatgatttttgttgttagaattctaggtaaccttgtctccttctgttgctttctagcaccagtaccaacattctatcgagtttgtaagaagaaaaccacggaaggtttccaatcacttccttacgtggctgcactcttcacttcaatgctttggatattttatgcttacataaagacgggcgaaatacttctcatcaccattaacgcattcggttgtttcatagagacagtttaccttgtcatctatatcacttattgccccaagaaagctaggttcttta

SEQ ID NO: 24357 - DNA, 310 bp, Glycine max
  modified_base (18)..(18): a, c, g, t, unknown, or other
  modified_base (20)..(20): a, c, g, t, unknown, or other
aagtgagtgtgttgatcnanataactagaaacagtgtgatgaaaatgaaggtccttgttttcttcgttgctacaattttggtagcatggcaatgccatgcgtacgatatgttccctctccgaatgaacactggctatggtgcccgtactccggaggtgaaatgcgcaagttggaggcttgctgtggaagcacacaacatctttggctttgagaccattcctgaagagtgcgttgaagcaacaaaggaatacatccatggcgaacaatatagatcagacttcaaaacaatttaccaacaagcttactttta

SEQ ID NO: 24358 - DNA, 391 bp, Glycine max
ctccacctagagggaaatggctcccaaaccgcctagtacgggtctgtttgttggactgaacaagggtcacgtcgtcaccaagaaggaattgcctccacgcccctcagatcgtaaggggaaaacaagcaagagggtgcactttgtgaggaacctcataagagaggtagccggttttgcaccctatgaaaagcgtataactgagttgctgaaggttgggaaggataagagggcactgaaagttgcaaagagaaagctcggaacacacaaacgcgcaaagaagaagcgtgaggaaatgtccagtgttctcaggaagatgagggctggtggtgctggagacaagaagaaataagtcttatttactgttttccagattcactagatggacctgtgt

SEQ ID NO: 24359 - DNA, 351 bp, Glycine max
ctttgacagtcgtggcaatccaaccgtcgaggtggatttgacatgctccgatggtacttttgctagagctgctgttccaagtggtgcatccactgggatttatgaggcccttgaattgagagatggaggatctgactaccttggaaagggtgtatcaaaggctgttgacaatgtgaacaccattattgcccctgctttggttggcaaggacccaactcagcagactgctattgacaacttaatggttcaacaacttgatggaactgttaacgaatggggttggtgcaagcaaaagcttggagcaaatgccatattggcagtgtctcttgcagtctgcaaagctggtgctac

SEQ ID NO: 24360 - DNA, 408 bp, Glycine max
ttgcactagcgggtaagtacataataacgttagttgtgaattgtaccctaaggtgtaataaattatgggtagagaggtataactgttggcttggtttgaactttgaagggttagtgccttgcatttgcttgctgattggtttgtgctttatccctgagtcccccagatggctggtatgcattattaagctagaatcattatctaaggaccaaatgctcctttattttattatatataaatataacaggaatagcaatgaaaattaacatgtatgtatgtattttttgtaggctaaagttggccgtgaaaaagaatttcaactagctttaaggagacttcggggtaaagatgttgatatttctgatgaagctgctgaaattctggtactttccaagctctctttactga

SEQ ID NO: 24361 - DNA, 407 bp, Glycine max
gatggcagaggctgcgcacagtttgaactttgaacgttgaaggaacatagaggcagaggtttttcttctctcaccgtagaatcgaatcgagttcactttgatcgtgtgtgtctccgatcttcaaatccgcaacaaccatggtgaggggattgctcaacaagctcgtctctcgctccctctccgtcgccggaaaatggcagcacaaccaactccgccgcctcaacatccacgagtaccagggcgctgaattgatgagcaaacacggagttaatgttccgagaggcgtggctgtttcctctgttgaagaggtcagaaaggccatcagggaccttttccctaatgaaaatgagttggtggttaagagtcaaattttagccggtggaagaggtttgggaactttcaaaagc

SEQ ID NO: 24362 - DNA, 349 bp, Glycine max
  modified_base (121)..(121): a, c, g, t, unknown, or other
aggggtgtgagagagcgagcgagcgagcagtttcaaagagaggatttgggattgggaaagcgagggattgcgctgcgtctcttcctcttctctttcgattcatccctcattcataatcttncaatccaacaacctcagcctcacactcacacatacacacatctgaacgcgtatcgtccctcccatggcttcaaagcgcatcctcaaggagctcaaggacttgcagaaagacccaccaacttcttgcagcgctggtccagtagctgaggacatgttccattggcaagcaacgattatgggtcctgctgatagtccttatgctggaggtgtattcctagtcactattcac

SEQ ID NO: 24363 - DNA, 335 bp, Glycine max
  modified_base (29)..(29): a, c, g, t, unknown, or other
  modified_base (50)..(50): a, c, g, t, unknown, or other
ctttgacagtcgtggcaatccaaccgtcnaggtggatttgacatgctccnatcgtacttttgctagagctgctgttccaagtggtgcatccactgggatttatgaggcccttgaattgagagatggaggatctgactaccttggaaagggtgtatcaaaagctgttgacaatgtgaacaccattattgcccctgctttggttggcaaggacccaactcaacagactgctattgacaacttaatggttcaacaacttgatggaactgttaacgaatggggttggtgcaagcaaaagcttggagcaaatgccatattggcagtgtctcttgcagtct

SEQ ID NO: 24364 - DNA, 421 bp, Glycine max
ggcacaaaaaatggagttctacacaaggccaaataggagtgacatccacctctcagcagaggaagaagccaccatagaggcaaagaccagagactactttgatggggttgcaccacaacgccacacaaagcctcaacgaagtgagtattcagctcaatatgtggatgctttctccaatgcccatcactcttcttcttcttcttctataccagaattcatgcaattccaacgcctcgagaatgatccccaagagaagaaattggagtacaatggaagtcaagtaccggaagaatttgtggaaacagagtattaccaagatctcaacagcgtggacaaacaccaccatacgacgggaacaggatttatcaaagtagagaaaaatggaaatgactttcacatagaaccagataatgacactggg

SEQ ID NO: 24365 - DNA, 383 bp, Glycine max
gaatgtttcatttattaggagtttttcactcttagttatatcatttgatttttctgtcacttctcttatttgattatttcatgttgctatctagtgaagttttcccgatcctggtcttgtatttgtcttcctcagaaataaatacctcatgtttaacttattttcaggggacaagctgagaaagaatttaaagtagaggtagaagcaattggtcgagtgcgacacaaaaatcttgttaggttgcttggatactgtgtcgagggagcctacaggatgcttgtgtatgagtatgtagacaatggcaatctagaacaatggctgcatggggatgttggagctgtaagccctttgacatggaacatacggatgaacattatattggg

SEQ ID NO: 24366 - DNA, 410 bp, Glycine max
atgactatggcttttgacaatatcattgagagatggatcaataattactacttcagcataatatactgaaaaattatggtagttatgactgtgtcattgaggtattgatagacaattgctactttaatatgatctcattaaattagaacatgattacgaaagtgctcaatctttctttttctggttaacctgactagtatttaatcccaaatcaagcagtcctataagggacttggtgacatgtagtcaggggttgaacccaaattagtttctgcttagaggattataagttatataggagccacacagagctaactttcctacaaatcagaaaacagcatgtggagatttatgaatgcttgttgcttcaaactaaaatcagatattcaatgtctatcaattagaaagat

SEQ ID NO: 24367 - DNA, 55 bp, Glycine max
cgtagtgtggggattgtgggatagtctcttacgagcctgacaggggcatttacat

SEQ ID NO: 24368 - DNA, 245 bp, Glycine max
aataacccatatacatatgcataatcattccaatcatcatcatccatcttaacactattattaataataatactctatccttctttactttatttcttgtttccatcctttttatgctcattctcctcttctttcataacttatctcaacctctcttattcccccttattctccacccccttcaccaatcttcctcatatcttcaatatttacttatcttaaacactcatctctttcaccctatt

SEQ ID NO: 24369 - DNA, 382 bp, Glycine max
ttgtttgctcgattgaaaaatttcctctttttctttgtgattttaactggtggtctttaaattggtgagtgagacatgtggggatgggttctctttgagtaggatttaggctgatacctcacataaaggccaagtggcatccaagttggacttcatgataagctacttgatggttggtcgactctggtagcgatttgaggctcttatacccccatgctgctatagatatctttatactttccccaaaaatccagatccaatctttgcatctaatatctgggatatcaatcttcatatattgtcttttgagtacgatcttgattatgagagctcggtgttttttgtatattattattgggggcgtgagaaactcttttttgga

SEQ ID NO: 24370 - DNA, 410 bp, Glycine max
gtatcccaaatggatgattctttgcttgagagtcatgcatctggtgggcatggggagagcaagtttgatgaatttccagatatgttgaatgatttggaaaggctttctgtctctgattacaacaatgttaatggttttctatcatatactggttcaaattcaacatctgatgctcagcggtcattttttgactttgaggattcccaggatcaagtcttctcaccacctttgctaatggactcatcacttttgacagatccatttgaagacttgctggcccctctctccgagactgaaacggccttgatagaccattgaaaattttctgggcaacctgcaagacttcattgaagaatcagcattactgatgtggtggattgctattcttttggtgagatatatactccatt

SEQ ID NO: 24371 - DNA, 414 bp, Glycine max
ggaagcagaaccaccgcaatagaagttcgttttggtcctcttccgaaaaacccagaggcagaggcagaggcaagcgaagcagcagctccgatctgaagacgatgatgaagaagaaggtgcaatggttctggacttgggttcttggttccgtcgttttgaggctcattctcctcttcttccccaaaaatctcaacctctcttctcgccccgaagtctccacccccctcaccagcctccgtcgtctggccgagggttactggctgaagcagtcatcgctgtcaccctatgctggatcaatgtaccatggttcccctttgttattgacgcttctcggcccgctcacagttagaagaattgaaggacaacccgatcatcttttatgcagatgtggtcagtgcaatgcttatttgtgct

SEQ ID NO: 24372 - DNA, 421 bp, Glycine max
cactaaaccttcaccaactgaggaattgagtgctaccctggcctctaaattaacctgataatgatgttttcatgagcatttagactttagtagctagcatgttgtagtctaaccgttgtctgagaatataaaaaaaaaaaaattgctgcttttatagatagggacattttataatcttatatttaatcctggtgaattacctgcttagaccaacagcattgtacaaattctccaagcacagatataacataagcttttgcctgcctaagttgtgattgccttcttctgaccgagacacgcttcttcttgtccgcaacaactgtaatttaaaaaacttgcaggccattacaacactaaccgttcacagtatgaacagatagatggtttaatctatgtcaaattgtcaatcattaatattaga

SEQ ID NO: 24373 - DNA, 399 bp, Glycine max
gcttcgagttatattgcccaaaaagtagatgcgggtgtaatagctacgagttggtcaaatacatgcattaagatacgaaggcttattatttcacaacagcgaaaacactatgtcactatttcatatactaggggatttcacttggaaaagaaaatgttccatactaatggattcgggtccacaacgatgggttcaaatgtacgagatcttgtagcacttaccaacgaggacctatcgactagtattatacatcaaaaatccatcatagacactaatataatgagatctgttcttcatagacaaacttgggatttccgatctcaagtaagatcggttcaagatcatgggatccttttatatcaaataagaaaggctgtttcacaggatgtacttctaagt

SEQ ID NO: 24374 - DNA, 350 bp, Glycine max
gaagagagagaagaagaagttgttgggttgagttgggtttggattggatttctaatctaatctatacctttctttttcctatgcttttaaggcacaaatccttctcccttctctcttctttcttcttcttctcctgacccttattattattccttgcccttaccctttaggcaagggaaggaagaaagaataactatattattatctttattgtaatctatctttttattataattataattataattattgttgttattattccttaaatatggattcgccgtgtctccccaacgattcggtttctggattcaaagacaaggagtcaatggttgacccctttttggtcg

SEQ ID NO: 24375 - DNA, 406 bp, Glycine max
gcaaggtgagattttgatgcgtgttgaggagcttgggggaagaataatggaggacgtgggtgagttgaacgagttggtggggtatttggggagattggaggagactcgtgaaaagttggtgcttttgtttgtgaataggggaaagaacaatgagttctgggattcggttaagaagaccgaggagaagggtgtggcgaggaagaaggagattgaaaggaagtggctcgcggcggtggtggtggcagggaacgccgccgagtttactcggtccaccaacccgtttcttgacccggggcaactcagtccggtcccacggttaagttttgcaacggtaaggtgacatatggccaacggtcatttttcgggacaatttgggaaaaatcaacatacacattctttttctttt

SEQ ID NO: 24376 - DNA, 352 bp, Glycine max
ggtgctctgctcgtgcctctagggatatcggtcctggatttacatttgggctgggactttacaagaatcgtaagctatgggaaagtcttacccaactgtgagtgctgattaccagaaggccgttgagaaggcgaagaagaagctcagaggcttcatcgctgagaagagatgcgctcctctaatgctccgtttgtcatggcactctgctggaacctttgacaagggcacgaagaccggtggacccttcggaaccatcaagcaccctgccgaactggctcacagcgctaacatcggacttgacatcgctgctaagattttggagccaactaatgcctaattccctattttgagc

SEQ ID NO: 24377 - DNA, 328 bp, Glycine max
gatctacactcataaatcattacatggtcatagtctacacctaattagccaaacacaccacagcaccaaactagttggctcaattctctttgaatggctttggaggctttgaattcaccaacagcagccaccactcccttccgtggttaccaagaagaggaggaggaggttgaccttcacctacgcgagccttgggccaagagaaaacgctccaaacgacctcgttttgagtcggaggaagagtacttggctctttgcctcatcatgcttgcacaaagcggtaacaacaacaacacccaattaccgtcttcgtcacagtcacacaaag

SEQ ID NO: 24378 - DNA, 357 bp, Glycine max
gaagtgtggaggtgcgtgcttttgtgggggcaaagggtagatagtcgatctgtcgcagagcaaagaatcgtcggcgactgcgaagctgcactataaccgcgattaactatgattagccttcgccggagcgtaaacaagatcccggcgaaatcgaagcgattcaaatgccgattggtgaagttcgaggagctgccggagtacttaaaggacatcgagttcatattggactattaccgctctgaatggcccgtgaaggaagccttgtggagcatcttcgcgtggcacaacgaaaccctaaacatttggacgcatataggaggatttctcatattcgccgtgttggcgtcgatgagcacc

SEQ ID NO: 24379 - DNA, 267 bp, Glycine max
ggtatattaaatatttaactagagattagagaaacttggcagttgatatttggtggctcatctgatcctggttggagggtttgatcagcatggccattgtaggcggaaccatgatggctgcgtatctgcgtgtattcatgcccacttacccacagtgccgcaccactacgaaggggagatgcataaatctgaaaactatctgctgcgattaccgacccaaaattacaatgccgcccctcaaccctaaagacccctttctcttcaagc

SEQ ID NO: 24380 - DNA, 358 bp, Glycine max
cgcgtccggcgagcagacggctgacagaagactactgaatgggaagagagaaacagaggaatcaagataggtcctctggattttctatcagaatctgaggacccaaaatctatggttctctgttcttctctggggatctgaagacatgcagtccaagtctgaaactgcaaatcggctgaggtcagatcctcattcctttcaacctggcggtgtatattctgagcgttggtggcgtggtattgggtacaatcccatggcccaaacaatggctggggcatatgcgtccaattcgacatctcttgaatgccctaaacgcgattctgaatacaatgaagatggccagtctttgaccaatagc

SEQ ID NO: 24381 - DNA, 414 bp, Glycine max
gcttttcaatatcaatatcttgattttaattcatgtcatgcaagatcaccaattgattcgttcttaaattactggtattgcagcaaagccagcacctatggcatcatctagcaatgtttttccgtgatgagctactgtcttggtcttggagaagaccgcttgggatgcccattgcctctatggctgcaggtggtactatgagccctgttgacttcaaacagaaagttatcacaaatgtggaacatgttattacaagggttaagggaattgctcctcagaatttttctgaagaggtgagcaactaacaaaattgcgtgcccttatcaattttctgaaattatttatcctttgctttaatttatttggaaaatctacaatcaggtttcctttctaatagtatttgatagatgaaat

SEQ ID NO: 24382 - DNA, 344 bp, Glycine max
gccagaagacaacagacgggtgcctggtggctaaaaaattagccacatgttatgatagcttaccaactggaattactagactgctaaatgctctctgagtatattcaactggcagcatgaatagcatcagcagactattcatattatgaacttctgtcttcttcatatcgaacgtacggatagaactcttgctctcactggtgattatgcatggagtagctcgcgccaacatgaatgtcttgactatgcattgagtgtcgatgggttgcagagctagcatggtatgccatgaattctgtaaacacactgctaagattaggagaactctctttatcactatattg

SEQ ID NO: 24383 - DNA, 418 bp, Glycine max
gaagagagaaaaagaggaatcaagatagctcctttgaattttctatcagaatctgaggacccaaaatctagggttttctgttcttctctggggatctgaagacatgcagtccaagtctgaaactgcaaatcggctgaggtcagatcctcattcctttcaacctggcggtgtttattctgagccttggtggcgtggtattgggtacaatcccatggcccaaacaatggctggggcaaatgcgtccaattcgtcatctcttgaatgccctaatggtgattctgaatccaatgaagagggccagtctttgtccaatagcgggatgaatgaggaagatgatgatgccactaaggattcgaagcctgctgctcctaatgaaacaggaaattatgagcaagaacagcaagggatgcagcatact

SEQ ID NO: 24384 - DNA, 409 bp, Glycine max
gaagagagaaaaagaggaatcaagatagctcctgggaattttctatcagaatctgaggacccaaaatctagggttctctgttcttctctggggatctgaagacatgcagtccaagtctgaaactgcaaatcggctgaggtcagatcctcattcctttcaacctggcggtgtttattctgagccttggtggcgtggtattgggtacaatcccatggcccaaacaatggctggggcaaatgcgtccaattcgacatctcttgaatgccctaatggcgattctgaatccaatgaacacggccagtctttgtccaatagcgggatgaatgaagaagatgatgatgccactaaggattcgaagcctgatgatactaatgaaacaggaaattatgagcaagaacaatatgggatg

SEQ ID NO: 24385 - DNA, 394 bp, Glycine max
  modified_base (387)..(387): a, c, g, t, unknown, or other
  modified_base (392)..(392): a, c, g, t, unknown, or other
gaagcatagcagcatcatacaaagcattgaattcaaaaacttaagttcattccttgggttttgctttcttcctcaaaaccaaacatgtcgaacacatgccgcaactgggactgggcttacaagactagctgcaccaagggaaacagctatggtgttattgtagagactgagaagagttacatcgagactgttgtcatggatgttccagcagctgagcatgatgggaagtgcaagtgtggcactaactgcacttgcacggactggacctgtggccattaaggaatatgtatgaaaatgtaattgccatgtgtttggcaatacaaatatccaaataatgtaatcttcgtatgaataaatgtgtgtgctgttatccgaaaaaaaaaaaangtgancc

SEQ ID NO: 24386 - DNA, 361 bp, Glycine max
caaggtcattcctggtgctgctgacaagccaatgatcgtggttaactacaagggtgaagagaagcaatttgccgcagaagaaatctcttccacggtgctcatcaagatgcgtgagattgctgaggcttacctaggctccacagtgaagaatgctgttgtcaccgtccctgcttacttcaatgattctcagcgtcaagctaccaaagacgctggtgtcattgctggtctaaatgtgatgcgaattatcaatgagcctactgcagctgccattgcatatggtcttgataagaaagccacgaatgttggtgagaaagaatgtgttgatttttgaccttggtggtggacatttgatgtgctttac

SEQ ID NO: 24387 - DNA, 376 bp, Glycine max
gatcttaatgcttccagcgacttaactgattctacacctgtggaagatattcctgttactagtcctccattatttcagaatgcaacatatgaagagtgacaagaagctcccaatggatttccttagataagtcattgcacaaaatgcggaaaggcctctaagaaactttgatcgaagaatgagccatctacagcatcaggaatctgtacctctcaatttaccatcaacagggagtgctatgcatcataatcagttcttctctgcatgaagcacctggctctgactcaatcaacgattcaccggacttgaagatcacagctggacggacatgatctgctaatgctggcgctactatgaaccatacacctgtcttgcg

SEQ ID NO: 24388 - DNA, 356 bp, Glycine max
gaacccaatccactattataattttttttatctcttctcttctctttcccctcaccaacacgtcatttcatttctttcaaagtcttcccttctctcctcttcctcttcacttcttaaaccgtcgccccttaacgacgccgtttcctgttctctcatgtaagcgcggttcgagaaaaaaaaaaagaaaatccgttattggcgttgttttatttttgtttccggttcggattatttgaatggatcgggcggcgttgacggtcggaccgggcatggacatgccgataatgcacgacagcgaccgttacgatctggtccgcgacatcgggtccggaaatttcggcgtggcgaggctgatg

SEQ ID NO: 24389 - DNA, 303 bp, Glycine max
agaataatatgactatgtaaactactctgccatgggactcttgttctgaacgacttttcaagagaatcaaaccatggcagtcaaagtatacggtcctcactgtgcttccaccaagcggttgctgatttgtctggtttacaaagaagtctaatttgaagttgtccctgttgatgtcactaacggggagcagaacgatcctgagtacctcaaactacacccatttgcagttgatcctgtcatcaaatatcgagattataccttatatgaatctcgtgctataatgatgtattatgcattaaaata

SEQ ID NO: 24390 - DNA, 384 bp, Glycine max
gacccaacgaatttgcaaaactcaaacgaatacgtgttctctttctcttcaatttcacccttattagcatagcatattcatttccctttcttgaatcgttgtaagcgcattgcgattttgcccttatctttatttcaattttttgttctgtttttgttattcatttgggttaatttcgattcgaagcttaactgcgagaggggatatcagagaagttgattggcctcccattaataacagatctgaatgatctgatggagtctaaaggtgggaagaagaagtcgtctagtagtaagtcctttttgtacgaagctcctctcgattacatcattgaagacgttcgaccacacggtggaatcaagaagttcagatctgctgcttact

SEQ ID NO: 24391 - DNA, 375 bp, Glycine max
gacccaacgaatttgcaaaactcaaacgaatacgtgttctgtttctcttcaatttcacccttattagcatagcatattcatttccctttcttgaatcgttgtaagcgcattgcgattttgcccttatctttatttcaattttttgttctgtttttgttattcatttgggttaatttcgattcgaagcttaactgcgagaggggatatcagagaagttgattggcctcccattaataacagatctgaatgatctgatggagtctaaaggtgggaagaagaagtcgtctagtagtaagtcctttttgtacgaagctcctctcgattacatcattgaagacgttcgaccacacggtggaatcaagaagttcagatctg

SEQ ID NO: 24392 - DNA, 345 bp, Glycine max
gccgctcttctatcgctactggctcgacttccggaaggtccttcacgactggttccggaagcgacgattccaacccggtatcatgtccgagttgactcggtcaattaagcttccaattgattcacacaacaacaacaaactacaaaccaataacacaaataaaaacaaatactcttcttgtgccgtagttggaaacagtggaattttgctgaatagaaactacggtagtgaaattgattcccatgaggttgtgataaggttaaacaacgctagggttgatcactttgaaaccaacgttgggaaaaaaactagcatttcattcatgaatagtaacatcatgcattt

SEQ ID NO: 24393 - DNA, 378 bp, Glycine max
ggagtttcaacattcaacaatggtacctcaagctttgtcagtgcctgcgagtgccagcttcactatcgcttctcgcaccagaagtccctcccacctcgtattttctcacagaaacccgtgctcgatagcttcttccttaccaaacccatatggccattcatcaggagttgggttatcaagtaaaagccgtggttttcctttaaaacttgatgagaaaaatatccatggtgcgagtacaagttatggtgcaattgaagccaagggaaatccaccaataacacccgcagtgatgactcctggaggacctcttgatctctcatctgttttgtttaggaatcgtataatattcataggacaaccagtcaattcacaagtggc

SEQ ID NO: 24394 - DNA, 264 bp, Glycine max
gggttctagtgtgtgattgtttcgtgctgtaactcgttcttcttcttttggtggtccggggttggggttggtttttctcttaacttgaaatggcttggttccggggtaacttggggttccggaacttcttgcagtgccggaaccgcttgcgaagcttcaagatgtacccagactttagcttcacttagtcaaccaccaccgagacctttgtcatgggagtggcacctgtttaaggttaatttgagggtgcttaaatgggtgtgc

SEQ ID NO: 24395 - DNA, 360 bp, Glycine max
gggttctagtgtgtgattgtttgttgttgtaactggttcttcttcttttgttgttctgtgtttgtgtttgttttttctctcacctgaaaatgtcttgctgcggtggtaactgtggttgcggaagctcctgcaagtgcggcaacggctgcggaggctgcaagatgtacccagacttgagctacactgagtcaaccaccaccgagaccttggtcatgggagtggcacctgttaaggctcaatttgagggtgctgaaatgggtgtgcccgctgagaacgatggctgcaaatgtggaccaaactgctcctgcaacccctgcacttgcatgtgaagtgttgggagagcaagcttcaagcagagat

SEQ ID NO: 24396 - DNA, 344 bp, Glycine max
gaacaaacacaaattttatgtgattagtcgcggtattcagaataaaaaatgaaagtagacaaataaaaaaggaaaggagatgtttgaataaaaataattccccttcaagttcttattttttgagaggacaggacaatctgaatgttctattatgctctatcaacacattaaaaagattatatgatatatctgctgtggaagtaggtcaacatttctatcgtcaaataggcagctgccaagtacatgcccaagtactcattacttcttgggttgtcattgccctattattgcattcagccatcctacttattctaaatctgcagaccttgcccgttatcggtcac

SEQ ID NO: 24397 - DNA, 411 bp, Glycine max
ggaaacgaagaagccctaactccgcacgcattcgggagaaaactcaatattcgtcgctcatggcactctcttctcgtctcttttccaaatccaaattgatctatggcagtcaaatacttctacaaaaggagcatgctattccagttcgtcactttgctaaagagtctgcccctcctgcccttaagggagacgagatgctgaagaacatttttgtggaggtgaagaacaaatttgagaccgccataggaatattaaagaaggagaaaatcaccattgacccagaagatccagctgctgtttctcattatgcaaaggtcatgaaaacaattagagagaaggcaagcttattgtcggagtcccaagacatactatccaccattgaaattgagacacaggatattccagatgctc

SEQ ID NO: 24398 - DNA, 394 bp, Glycine max
acaagggtcctactctgctagatggacttgaccagatctctgagcccaagaggccttctgacaagcccctcaggctaccccttcaggatgtgtacaagattggaggaattggaactgtgcctgtgggacgggttgagactggtgtcttgaagcctggaatggtggtgacttttgcaccaactggactgacaaccgaagttaagtctgtggaaatgcaccatgaagctctcacagaggctcttcccggtgataatgttggattcaatgttaagaatgttgctgttaaggatctcaagcgtggttatgttgcctcgaactcaaaggatgatcctgccaaagaggctgctaacttcactgcccaggttatcattcatgaaccatcctggtcagattg

SEQ ID NO: 24399 - DNA, 373 bp, Glycine max
  modified_base (293)..(293): a, c, g, t, unknown, or other
  modified_base (349)..(349): a, c, g, t, unknown, or other
ggacccaggatgaggatcgcgtgagcactcctcttcagatccgcacaagcattgcatatcaaatcaagcatcctgttccttatctctgtctctgcatttcccttccttcttcttctctctctctctctaaaaccctaattctatacatggaagggaaatctcaaatctaatgactaattaattaatccatcgatcaagcatggagtccgaactcaaagacctcaattcgaagccgccgaacggcaacggcaacagcgttcgcgatgaccgtcctctgctgaagccggagcctncggtctccgccgacagcatcgccgatatggagaagaagttcgccgcttacgtccgncgcgacgtgtacggcaccatggga

SEQ ID NO: 24400 - DNA, 262 bp, Glycine max
gctgagggggctataggcagataggtcttgatcggtgttcgagcatcgggtgtaatcatttaactgcatatattgcatgtccactattccagcatctctgaaaatagttggagccatctaatgaatcctggttgatgagaacgcctactgcatgtgcatcttagatactgtattgatctcatggtgatcaccgtctatcatgcattcaattaaactattgatccatgagatagatctatcatgtcatgtacagcacccacat

SEQ ID NO: 24401 - DNA, 393 bp, Glycine max
gctcacaaagcattctactatcattattagtcattcctgtttcatatacttcattacattggtcactagtaatcacttgctgcattttctttcctactcttcacccttgagaatttgtcattccgacatggaacttagttttaagcaccattttggccttgcttgtgtcttactactttgagctgctctgtgtagctcacaggactctttcactgactcgagagcaacatattatggtagccctgattgctatgggaatccaaggggagcttgtggctttggcgaatatggaagaactgtgaatgatggaagtgtggcaagagtgtctaggctatggaggaatggaagtggctgcggtgcatgctatcaagcaaggtgcataataccacaata

SEQ ID NO: 24402 - DNA, 373 bp, Glycine max
acgcgtgcgaacacgacaagacgagcgtttgctgtcactgagcatgctactattactaagacacatttctgggtcatatacgttattacattggacagtagtaatatactaggcggaatttgtttgctactctgcaccgatgcgagaattagcaattgccacatgcaacttagtggcatgcatcatgattggccatgcttgagagttactccgttgtagctgctgtgaggcattcacaggactcttcaactgactctggatcgacttgttatgctataccaagtggatctggcaatccagggtgagcttgtggctctagcgatattggaagaactgcgcatgattgaagtgtgggccgaatgtctacgctatg

SEQ ID NO: 24403 - DNA, 348 bp, Glycine max
gacacaccatttgcattattcttctcttctgtttcttttcatatctgatctacatttatctatattctcttctcttctctctcaaccttctcaacagtcttattagcagagagcacaagagaggacagggaaaacagaaaaaaaaaaattcggcttctgcatcttcagataagaagggggaacttctctattttttgcggcatatcgtggtttgtaaagactgtttctaggtggagattcattaattgacactgaagtgcaagagaaaagtgagtctaaagatgggttatatatgtgatttttgtggagaccagagatccatggtgtactgccgctctgacgctgcat

SEQ ID NO: 24404 - DNA, 403 bp, Glycine max
gactctgcgaaggtgcaacctgacagcctccaaatccaatggcttcagagaagaaactttcgaacccaatgagggagataaaagtgcagaagctcgtcctcaatatctctgttggcgagagtggagatcgtctcaccagagccgccaaggtgttggaacaactgtatggccaaaccccagtgttgtccaaaggtatgatccgttaactggcatttatggaatggactgctttgatgttctggagcgttctggctatcgagtctgacgccgacgtatgtgcaagtcccgtgttggaattcagcaccgtgtcacaaacgaggatgctatgaagtgtgtccatgtgaaacatgatgcagagatccgtaacgagatccaggcgatcgttcagctagagcgagttcac

SEQ ID NO: 24405 - DNA, 231 bp, Glycine max
gactttgtattagtgttgcatgacacaatcaggggcctgtgtgcttagaagagagacattgagtcataatgagggagatgaagaagcagaatttggagcgcgatacatgagtaagagaaagtggagatcgaataacaagaatcgacaagatggtgcatcatgtaactgagctgacgctagggctgagcctatgtatgattggtaatgtagcctcggtagcaagtaatgctg

SEQ ID NO: 24406 - DNA, 375 bp, Glycine max
gaacacaagttcgtcaacgttggtgctctcaagcgccacgtcgcagaaaccggaaccggtccaaacgccgtcgtattcctgcacggcttcccggagatatggtactcgtggcggcaccagatgatagctctcgccggtgccggattcagagcggtttccttcgattacagaggttacggtctctccgacccgccacccgaacccgataagacctcttggtccgatcttctcagtgatctccttcatattcttgatgctcttgctctttctaaggtgtttcttgttgggaaagactttggagctcgtcctgcatatctattttcaattcttcaccctgaaagggtcttgggagttgtcacgttgggagttccatat

SEQ ID NO: 24407 - DNA, 192 bp, Glycine max
ctgagtatactgagagctgactttcctaagtcattcgagacgggctataactaaaggatatgagccaatacataagactcttctgaaaatacacggtatatttcatctggggaagaggcttctaagagatgttagaaccgattaatccaagatgacataagatgtgttaatatccattactgatcaaaacac

SEQ ID NO: 24408 - DNA, 383 bp, Glycine max
gtacattgtctattccaaccatgttattcccatgtttagcttatctactggtttaactccaaataggaattaatcattatatgttctaaagttgatatatcattagtagggttgatgattcatatactctagtacgctattgatacagtagatctttgtatcattcttcacagtatttttgataacttgagaagcatgttattttttcaggctttgactccctacatgcagtctccagttgggaactcttcaaataaatccattgggaagctgatgggacctgctcttggtgatcacaatcaaggaaacttttccatcaatctctggagaaatgctttccaagatgcttttcaacgactctgtcctgttcgagcaagaaggca

SEQ ID NO: 24409 - DNA, 123 bp, Glycine max
ggctgcgttgctgatggatatattgtgaactggctacattcaaggagcgttcatattactaatgacactggattacacttcactcagcaaagctgctttcttatagttagccaagaatgataa

SEQ ID NO: 24410 - DNA, 443 bp, Glycine max
cgtgtaacaataatagtctatacacacaaacatatgcatcttagtaactctatcagtagaaactaccataattcaggacatgcaacagtcatcggatttgacaatttatctcagcaataatatagctaactaatcaacaattcctgaaaataatcctaagctatctttatccagatacactgttaacacgttggcaagtgtaccaaattgtcacaagtagtaaagtaagcgaaagtccaagtgtcgaatccacatgaactttgtttgtacttagattaatgcaaacccaattttgaagcaatagacaaagaatttaaaataaagataggaaaatagatgagataaagatttaaagatcaaaatagaagattaagaaaattaaaaaattaaagtaaaagattaaaaaattaaagattaaaaaaagaaaatcagagcgtgataat

SEQ ID NO: 24411 - DNA, 393 bp, Glycine max
caactaggaagggaagacactaaggttgtgccacgcttttggatcgctattgatagcttgcttgcaagtaggaagcaacaaatgatgaagggtggtgatcaaggggtgcaagactttgcaacaagagagataaagaggctgctcttcctcaaacaagaccctaagggatgggtcattcttagcaaagggtacaatgtaaagctccttggtcaaggtgaggccatgtgtcgctcggttagagattttggtatatggtatgggaagttgcatgaagaagtgagctttgatgttgccttcaaagagtactatgaaagcatcaaggttaaggattgtcctaaaaaatgtgaacatagtgaaatttctaactacccaacggatatattggcccacata

SEQ ID NO: 24412 - DNA, 440 bp, Glycine max
gaaacccttgcagattattcagcctgaaggtccaagttttcgtgttaatgggcacttcattgaatggcagaagtggaattttcgtattggattcactcctagggagggtttggttattcattcagtagcctatattgatggaagtcggggacggagaccagtggcccatagattgagctttgttgagatggtggtcccatatggagatcctaatgatcctcactataggaaaaatgcttttgatgctggggaagatgtcttgggtaaaaattctcattctctgaagaagggctgtgattgtttaggctatatcaaatactttgatgcgcatttcacaaacttctatggaagtgttgaaacaattgaaaactgtgtttgtttgcacgaagaagatcatggtattttatggaagcatcaagattggagaacaggtttggctt

SEQ ID NO: 24413 - DNA, 417 bp, Glycine max
  modified_base (330)..(330): a, c, g, t, unknown, or other
gcttttcaatatcaatatcttgattttaattcatgtcatgcaagatcaccaattgattcgttcttaaattactggtattgcagcaaagccagcacctatggcatcatctagcaatgtttttccgtgatgagctactgtcttggtcttggagaagaccgcttgggatgcccattgcctctatggctgcaggtggtactatgagccctgttgacttcaaacagaaagttatcacaaatgtggaacatgttattacaagggttaagggaattgctcctcagaatttttctgaagaggtgagcaactaacaaaattgcgtgcccttatcaattntctgaaattatttatcctttgctttaatttatttggaaattctacaatcaggttttcctttctaatagtatttgatagatgaaatgt

SEQ ID NO: 24414 - DNA, 392 bp, Glycine max
ggagtacaacttcacattttagaagaataccccctcttttgctgcatcagaggagttgtaaattaagagcatggctgcacaagctcttgtatcatcatcttctcttaccttctcagcggaggctgcaagacaaagtcttggaccaagatcactccaatctccatttggcttctccagaaaagcctgctttcttgttaaggcagctgctaccccccctgtcaagcaaggatcagacagacctttgtggtttgcatcaaagcaaagtctttcttacttggatggcagccttacgggtgactatggatttgaccctctgggactttcagaccctgaaggaacaggagggttcattgagccgaaatggctagcatatggtgagataatcaatggtc

SEQ ID NO: 24415 - DNA, 334 bp, Glycine max
gacgaatgaattgggaatttggaattgtgtctgtgactgagactaagctctcaacttaaaacccttgctgatgttcactgtcgccgtcgaaacggggttcctctgtggtagttggaaggtcgcaccgtgccactattgcaccaggctgcctcgtcatcggagggggtcacggtgaagtgtattctgcttttgtgttataatttcaataggaattcagatcttataatcctcagtctgatcctattaaggacagacacttgaagaaaagaatcaatagattgaaagacatggttgagccagataaaaattgcgagactatggctgaagatgttgc

SEQ ID NO: 24416 - DNA, 369 bp, Glycine max
acagctagttaaaacaagattcctaattgattgctgcacatgcaacatttaatactactgggctcttttgctttactgttgagtcatcaagggactcttgttgtcagagtcttttgtttttgttatcctgactcacagagatatcaaaacaagtacatgaaagaatgccatgtaattctttgtcctctattgatttcagattggttttggtatgggtcattttcagtcaaatgctggtttcctcctcttattctttgcttttccccctctcgagagtgtggggaattttcgtgatacaaggaaagacatcaagatgccttgtcccttgaaatacaatgagaatctaaataaagaaaagtagcatatgcc

SEQ ID NO: 24417 - DNA, 314 bp, Glycine max
acggtgcaacttgtcattccacatgactaccctggcttatattccatgatatggggattgaattaatatcataacttcacaaatgctcgtgtgttaatcttttctgacctcctcaacgaagactgagttactgattattggaccagaatcacttctgtaagaattaagctattactcaacagacttcaatcttgataatgcaaatgatgacatcactgtaaagatacgttcatgcatgacctatttagttagaaaaatgctaaaatgtatcttatttgatcgcattctaacgattgactatagaattgaccctc

SEQ ID NO: 24418 - DNA, 180 bp, Glycine max
tatagagaccgaaaggctcgctgggttccctccgacaattaatcaagcagagggtttccaaggggttactggcatttacttggtggtcaatcagaagcttcaagaagaagcactgcttgcaaaatgccttggtagaagaatttgttatcaatgtggaagaaaatttaatattgccttcat

SEQ ID NO: 24419 - DNA, 300 bp, Glycine max
tcgaccacgcgtccgcgaacacccggcacgggacacacagatgtgataccaaataataactgatgagctttacagcgaagaggaagacagctatgcgagcattgaagagaagatgcacaacaactatagcctgacgcgaggcacagggcatacgctgtgacactctctcaaccaatgatgaatccctattaccatgctttcacttactaggctgaaccttacactgattgtagcactaatcttacccctctgaaaccacgcttatgaagctacctcaataacactagcataaagcagtat

SEQ ID NO: 24420 - DNA, 215 bp, Glycine max
tgaatgctcttgctactgttaatcgatcttcttcagggaataggtccaatccaaggataggtataatgccttgaagttctttgtaacgttctaaaattagctcaactttttaaacagcctcataatattacttaccaacaattcgaggtaagagcataattgacgtcgattctaaaggatctactaattgatagatacctattgccactaattct

SEQ ID NO: 24421 - DNA, 345 bp, Glycine max
ggaaccgattgtatcattaactcttattctcttccgctacggctaacaatctctatctatctacaaagtgtgttgtgtactgtacacaaaaaaaccaggattctctgttggagtctgactgacgcacctggccaacagagtaccatgcagcctctgcatcgcctggaatcacagggaagcgtatactcataaagcgttataaataatcattgaacacagattcacatgtcacgagctcgagactatgatggacatacatgcttagaagggaactatgggaatgatggacataggtaaaccacatcagaattgcaagactcggaatacagatggcgatcgaggatt

SEQ ID NO: 24422 - DNA, 403 bp, Glycine max
  modified_base (55)..(55): a, c, g, t, unknown, or other
  modified_base (105)..(105): a, c, g, t, unknown, or other
ggtgaatagagagagtgatgggtgagaggggggacgaagctgtaaccccggcggngaggctgttcctgcaggcagaaatgaaacaagtaatccactgcgtcatanggctgaagaaccccatcgacgcggagctagtgaaatcacaagtccggaactctactatgctacaacacccacgcttcacgagtctgatggtaagaggcgaaggaggagtggagcactggcggcccaccgaaatcgacatcgatcggcacgtgcttataatagaggaagcagtgggcgagagggaggcggaggatgaatcggccatcaacaagtacctggccgaattatccatagacagcgatgggcttagcatggagaagcccctgtgggaaatccatcttcttaaggcccacaagtg

SEQ ID NO: 24423 - DNA, 398 bp, Glycine max
acgaaaaaaaaagtgatcccccttttcttgtttgtcttatatccatatttatggagatagaattcatgtcataatttaaaaaatgaacatgtataattctttttcgtaatcgaaaatgatgagggagttattgataatttgaaaagagtattttatggaagaattaagttattactcaacaaatttgaatttgaattttttaaaggatgagatcaattcagaagtactttttgtattttttatttatttaaagaaatgttaaaatgtattttattttttctttattaaatgtatttattttaaaatttgtttttttagaacagacagaattcaataggtctaattcagaaccgtccgataaaatcgaatattatctaccttagagatgtatcaaggga

SEQ ID NO: 24424 - DNA, 424 bp, Glycine max
tccgaggggacgacagaagggacgctccttgactacgggattgtcacatcaaactgtcaatagtggagtattcactatcattttggtctacatgaacgaattatatcttgcacagtggattaaagttctgacgccgttattgatctcaactactcttgagtgattacaatctctatgagcttagttacactttttctcagtgatgatagtgaatgaatgatgatatataggatgtcttaaatgactgatcactgagcctatccagatgaacctactcataaggactactatcaacaacatcactgctagccagttatcactgagaaactgatgcaagagttttcaactagggtagcagaaatttacggttacctgcacttgaggctacatatgaaacttgttgacttatccaattaactgacac

SEQ ID NO: 24425 - DNA, 369 bp, Glycine max
gacaaggcacaggcttccctccctgctttgaagaaacaaattagaagagtgtgttgcgttgtgttgaagtagcaagctagcaaagatgtttggcatcttaggaggcaataaggggcacaagatcaagggtactgaggtgttgatgagcaagaatgtgttggaacttaacgaaatagtgtccactactcagggtggtttggttggtgctgccaccggcatcttcggtgctgccaccggtattgttggtggagttgtcgatggtgctactgccatcttcaagtacaacattggcattcagttgatcagtgccaccaagactgatggacttggaaatgggaaagttggcaagcaaacctatgtggagaaaca

SEQ ID NO: 24426 - DNA, 426 bp, Glycine max
  modified_base (398)..(398): a, c, g, t, unknown, or other
ggattcatattttccttgcgttgccctttcattttccctcactttctcgctcgccaaacgcccctctctctcctccaatggccgaccagctcaccgacgaccagatcgccgagttcaaggaggccttcagcctcttcgacaaggacggcgatggttgtattactactaaggaacttgggactgtgatgcggtcactagggcaaaacccaactgaggcagaactgcaggatatgattaatgaggttgatgctgatggcaatggaaccatcgacttcccagagttcctcaacctgatggctcgcaagatgaaagacaccgactccgaggaggagcttaaggaggctttccgtgtgttcgacaaggatcagaatggtttcatctctgcagctgagctccgncatgtcatgacaaatcttggggagaagc

SEQ ID NO: 24427 - DNA, 455 bp, Glycine max
agacgacagaagggcaccaaaataacattgctggtttgattgagatgaattaaggaagacttaactcatgatatagtgagtctcagcttcttttaacaagtcacctaagcaattaagattacaatggattgactcttctatccttttgaggattgttgttggtcatgaaccttatcccaataccccgaattgtacgctcgtatttttccagggtgaataagtaatttaatatgttatcattctatttttattttatttctcacctaattttttcaatcaagaaatccaacatttaattttatttctactatatttctcttttttaaaattatctctctttcatttttatatactttatttctttcctctctaccaaagcatttaggcttaaggcactcgtgtacaagtttaagttctttagcttattttgatttaagtttcttgacttatttaaa

SEQ ID NO: 24428 - DNA, 436 bp, Glycine max
gtttcagatgatggagctgccatgcttacatttgaagcactttccgagacttctgagtttgcaaggaaatgggttccattctgcaagaagttctgcattgaaccacgggctcctgaatggtattttgctcagaaggttgactacttgaaggataaagtggatgcaacatttataagagaacgtcgtgccattaagagggagtatgaagagttcaaagtgaggattaatgcattggtggctttggcacaaaaggttcctgaggatggttggacaatgcaggatggtactccatggcctgggaacaatgtcagagatcatcccggaatgatacaagttttccttggtcaaaatggtgttcgtgacatcgaaagaaatgaattacctcgtctggtctatgtgtctcgtgagataagacctggatatgatcaccacaaaa

SEQ ID NO: 24429 - DNA, 390 bp, Glycine max
gggttatatccgaagacatggaaagggatgtttttatgtcagcagcagaagcccaagctcacggaattgtagatcttgtagccgttgaataaaaaataagtggcaaggattattctaaaaaaatacaggatttgaaatttcatttttgaatcttcttactttgattctaatataatatctctattagttaatctattaatatctattagttaatctattaatagaatataagtaatatagaatctaagtaattcacggataggatagatctaaaccagctcattatatatatattacaacttactatgccaactatgaaacaacttattagaaacacatgacagccaatccgaaacgtcacaaaatgcccagctcttcggggatgccctc

SEQ ID NO: 24430 - DNA, 332 bp, Glycine max
gcacacaacaaccttcttcttcttctcttaaaagttattaagagcttttgcttttctttctgcgcgcttttcccaattaagtagttcttccttttctcaaagcaaaaaaaatgttcatcgagagtttcaaggttgagagtcctaacgtgaagtacacagagactgagattcagtccgtgtacaactatgaaaccactgaacttggtcacgagaacaataatggcacttatcagagggttgtcaagcccaaaactgtcaaatatgaatttaaaaccaacacccatgtccctaaactaggggtaatgcttgcagagtggaggggaaacaatggc

SEQ ID NO: 24431 - DNA, 409 bp, Glycine max
  modified_base (313)..(313): a, c, g, t, unknown, or other
ttgaaggggttgaatgatgattgcgaacattttgagtcttttccacctggtcacttgtattctagcaaagagagagcgttccgcagatggtacaatcctccatggttctctgaggctattccatctgccccttatgatcctcttgctttgaggcatgcctttgagaaggctgtggtaaaaaggttgatgactgatgtgccctttggtgttttgctctctggaggtttggactcttcattggttgcagccgtcacggctcgctacctggcaggcacaaaagctgcgaagcaatggggaactaaattacactctntctgtgtaggccttgaaggtgcacccgacctaaaggcttgcaaggaagtagcagagcacataagaactgtccatcatgaatttcactacactgttc

SEQ ID NO: 24432 - DNA, 418 bp, Glycine max
ggttctagtgtgtgattgtttgttgttgtaactcgttcttcttcttttgttgatctgtgtttgtgtttgttctttctctcacctgaaaatgtcttgctgcggtggtaactgcggttgcggaagctcctgcaagtgcagcatcggctgcagaggctgcaagatgtacccagacttgagctacactgagtcaaccaccaccgagaccttggtcatggtagtggcacctgttaaagctcaatttgagggtgctgaaatgggtgtgcccactgagaacgatggctgcaaatgtggaccaaactgctcctgcaacccctgcacttgcaagtgacgtgtttggagagcaagcttcaagcacagatagcccttaattacgaataatgatgaactattaatgtgtagcttaaaacttatgcattat

SEQ ID NO: 24433 - DNA, 433 bp, Glycine max
gattcttttttcgtaaagttacggaaacttacgaatttcgtaacgatacttgttttctttccgtaatgttacggaaccttgcggactacataatcatcccctttttgacttacggaatgttacggaacctcacttaattatgcaacgatgcttccatttgatttccgatgtgtcacggaaacttacggattgtgcatcaatatttttttggtttttttcggcatgtcctggaatttcacaaattgcctaatgatgggtgccaagcacctcacgaggaccaaagaatggtcgcacgtcatcgagcaaaggtccccggacgaaattagggtatgacaactggtaatcgattactgataacaggtaatcgattaccagagagtaatcactctggtaacttaaaaaatttgagaaaaatcttttgtataacaaaact

SEQ ID NO: 24434 - DNA, 438 bp, Glycine max
gggaggaaatcaccctgttcgtaaccttcgaagtggccatgttgaaattagtgcccagaaccacaactatgctgttgaccctgccacactgccggaaggagtggaggttactcatatcaatctaaatgatggaagttgtgctggtcttgctttccccgctcaacaacttatgtctcttcaataccaccctgaagcatcccctggacctcatgattctgactatgcttttagggagtttgtagagctaatgaagcaaggaaaaaacagaacacaagaaagtctacaccaactatcagcagcacaggctttggatgcataagtggttgaagggagctgctcttgttcgttcggcgcaaaaagaataatgcatctgctgaaaaattacgaagttatgagtccatttctatgattttgtagatgagtttattaaagttttct

SEQ ID NO: 24435 - DNA, 353 bp, Glycine max
gacccacaaactccacaagtgtcacaagtcataactcgttagagagagtttgtgtgtgtttttgtgtgtcaccttggtgcatacaacacaagatggaggaccaaaatggtagtggtaagttgagccaagggcttcgcaaggtgaagccttaccttgctatattgtcccttcagtttggctactcagggatgtatatcatcactatggtttctttcaagcatggcatgagtcattggatactctcagtgtaccgtcatgtagttgctgctattataatagtcccttttgcacttgtccttgaaagaaaaattagaccaaagatgactcttcccatcttcctgaggatagtggca

SEQ ID NO: 24436 - DNA, 308 bp, Glycine max
ggagcagagtatcggcatagcgtagccatggccatgggattgacctcacaactcctcctttctttgttcatcagtacccttcttcttcttcttccctcttccctttcacaatctaaccagttttgtgacgctggaacttcatccaagctgttgatcaagggcggcaccgttgtgaatgctcaccaccaacaggttgccgatgtctatgtcgaagatggtatcattgttgccatcaatcccactattacggctggagatgaagtgacggtcatagatgccacttgcaaagttgtcatgcccaggggcat

SEQ ID NO: 24437 - DNA, 262 bp, Glycine max
  modified_base (244)..(244): a, c, g, t, unknown, or other
ggtggcagagagcgaacccaaaactagagctaccttcccttcaaaccttccactcttctctccttttccaatcaagggaataatatttcttagagatattccgaaaccatggctcacgccaatcctatgatttttgctgttggaattctaggtaaccttgtctccttctgttgctttctagcaccagtaccaacattctatcgagtttgtaagaagaaaaccacggaaggtttccaatcacttncttacgtggctgcactct

SEQ ID NO: 24438 - DNA, 394 bp, Glycine max
acgcgacgcgtccgcctacccgtctgtgagaagtaggacgaagacgacagcactgatcaacagcacctggcagatgcacctacgtctttagacatagctgacgcgtggactaagatataaagtctgcgctgtgcaatcggcatacatttgatccttgattgtttctatgcagcgatcaaacaacacagaacactgaacctgttcttatggatttggcgactaagaagacgaagaacaacatgcaagacgtgtaagttgacgatcatgaatagcacactgagaagataagagatgaacgttggccatgctttggtgcagacagtggtagaaactgcatccactggaggtagccgtgaccaaaacgtgatcactcctaaggtgaggatgaacgatg

SEQ ID NO: 24439 - DNA, 365 bp, Glycine max
agaacacaacatcggcatagcatagccatggacagggtattgacctcacagctgctacttatctgtgttcatcaatacccttcttcttcttcttacctcttccctttcacaatctaaccaggtttgtgacactgaaccttcatccatgctggtgatcaatggcggcccctgtgtgaatgctcaccaccaactggttgccgatgtctatgtcaacgatggtatcattgatgccatcaataccactattacggttggagatgaagtgacggacatagatgccactggcaagtttgtcatgccagggttcattgaccctcacacccacctagagcatgagtctatgcatacggcaactgacgatgact

SEQ ID NO: 24440 - DNA, 356 bp, Glycine max
gaataccctgatcaacgaaatcttgaatcatctatctcaagaccaaggaccacatcttgatcacgattatgtacgatcagacagtgaagagaatagtgcgggtataaagaaaaagaagagacaagaacaagatggaggcagaacttaatctcttactaagaaattttttgattttacatttaaattggaataatttcttaggtcaaagaatatttaacaatgtcaaagtatattgactactgattagattaaaaaatttaagagaaattacaatagcctctattcaaagaggagaactaggtctagatattatgatgattcaaaatcagaagaatttaattcttctaggcttaatg

SEQ ID NO: 24441 - DNA, 413 bp, Glycine max
gaatcaatgactattcatgattgcataattgaatcaattacatactggatccaagctaaaggaatgttatggtaaaacttcgtttgaaacgatgtggtaaaaagcaacgtgcgacttgaaagacatgattagattagctgtggattcttacatccgccattttttctagtatatagaaatgaacatgctcttgactcgacatcgtttgttctgttccactagaacttattgttttggggacgggaaagcagttgatgatgtaagttgatgatgtaaatagtacatgatggagctcgagtttattcatttatcaggggcaagtatctaaggttagtaaaaattaataagttagaaaaacttcgtaagtttatttttgatagaaaaatagaaaggatccaatttgagcaagggtc

SEQ ID NO: 24442 - DNA, 423 bp, Glycine max
cgatgtcaaggagtcgccgaatgtgtgcgacagcgagctcttccgtgtagtcctctgataaaagaaacaccaaaatcagtgagtgagtgagtgagcagtgatcgtctacagaaggttcaggtttagcggtgttcgttaccttggacgatggtcagatggcagggtttcaaggatacgatttccaccgtgtctttcagcctcgtgcctcgcacctgttcaagtcattctgttagccgtttttccgttatttttttttttttgtttaaatgctcattttggtccatcatattttaataagtgacaatttagttcctaaacaaccagcaattctgactcagcctctagatacgtataattatgttttgcccccaaaaactttgggatttaatctggtattaagttataattttacatatttttgaa

SEQ ID NO: 24443 - DNA, 422 bp, Glycine max
gaaacctctcacactcccaaacgtcttgaggcttagcctctcgtcactgttggcactgtcatcatgtcgaaactactctcaagccctcgcctctcatcatcgttgatgttgagtttccttcagcttggatctctgacaatccacctaaaatggcgatgtatagcgggatctgcaagcatggagggcgagaacgcgagcaaggtgaccgagttggtgaacgagatagccaacatctccgagtacatgcctccaatgaagaagcagcattgcaacttggcgtagaggctgaagcttctgatcccaatgttcaaggagattagggatatgaacaaggatgcacttcctgaggacacttccaactcagtcctcgccttcaaagaagctctccaatctgcgagggaactcctcagattcaaaagcga

SEQ ID NO: 24444 - DNA, 420 bp, Glycine max
atagaaatttataatttatattttatcttattatgtatatattattctatcaaatatccaatttttattttataagaaaaatgattgattgatatttcaaatttgaaattttatttcaaaaattttattttatattaatcgaactaaaatagaattaatatagaaaaatagaatattaattctagttataaaataattaatttaataaaggatataattaatttaataaaggatcccccttttttgacacgaaatggatatatccataccatatatcttggatttatttttatgaaataattaaatatggcaaaacctatatctaaaaagggttcgcgtaaaaatgtacgtattggttcgcgtaagcatactcgtaaaataccaaaaggagttatttcatgtcaagctagtttcaacaat

SEQ ID NO: 24445 - DNA, 434 bp, Glycine max
atagcaatttataattcatactctatcttattatgtatatattattctatcaaagatccaattgttattcatataagacaaatgattgatgcgatatttcaaatttgaaattttatttgaaaaatcttattctatattaatcgaactagaatagaattaatatagaaaaatacaatattaattctagttataaaataattaatttaatagaggatataatcaatttaataaaggatcccccttttttgacacgaaatggatatatccataccatatatcttggatgtatttttatgaaatagttgaatatggcaaaacctatatctaacaagggttcgcgtaaaaatgtacgtattggctcgcgtaagcatactcgtaaaataccaaagggagttattcatgttcaagctagtttcaacaatactattgtaact

SEQ ID NO: 24446 - DNA, 420 bp, Glycine max
atagaaatttataatttatattttatctgattatgtatatattattctatcaaatatccaatttttattttataagaaaaatgattgattgatatttcaaatttgaaattttatttcaaaaattttattttatattaatcgaactaaaatagaattaatatagaaaaatagaatattaattctagttataaaataattaatttaataaaggatataattaatttaataaaggatcccccttttttgacacgaaatggatatatccataccatatatcttggatttatttttatgaaataattaaatatggcaaaacctatatctaaaaagggttcgcgtaaaaatgtacgtattggttcgcgtaagcatactcgtaaaataccaaaaggagttattcatgttcaagctaggtttcaacaa

SEQ ID NO: 24447 - DNA, 434 bp, Glycine max
  modified_base (383)..(383): a, c, g, t, unknown, or other
aaatattgattcaatggttgtctaattgaatatccattaatttgtgtgtataatgcagagtatatgtttcagatagtgacatcttgttttgggaggaaaatgatgtccatccaaaacttactatagatggtgtccgtgacatattgcgtgtattcatcaatggccagcttataggtaatgttgttggtcattggatcaaggtggtccagactcttcaatttctcccaggatacaatgatttaacactgttaactcaaacagtgggtttacagaattatggcgcttttcttgagaaggatggagcagggattagaggtaaaataaagatcactggatttgaaaatggagatatagatctttcaaaatcattatggacctatcangttgggcttcacggtgagtttttaaaattttacagtgaagagaatgaaaat

SEQ ID NO: 24448 - DNA, 379 bp, Glycine max
gccagtgatgataattactttattgcccatcatgggacgaggtcaaaactgatgggatcgacaattttagaaagcattggaaaactggtgagcccattattgttaagcaagtatttgatgggtcatccatttcaagctgggatccaatggttatatggagagggattctagagacaatatatgataaagcgaaagatgaaaaccggatggttaatgccatagattgcttatatgggtcttagattgatattgagcttgctcatgtcatgaaaggatactttgaagggcttattttcttaaatggctggccactgttattgtaatcgaaagatatgcccttacctagggcttttgaaaaatttgtgctgttccaaagacc

SEQ ID NO: 24449 - DNA, 423 bp, Glycine max
ggcattatatttgagtcaaacaaatcaaagccatggccacctccaacttctctattgttctctccgtctccctagccttctttttggtgctacttaccaaggcacactcgaccgataccgtttctttcaccttcaacaagttcaacccagtccaaccaaacattatgctccaaaaagatgctagtatttcatcctctggggtgttacaactcaccaaagttggcagcaacggcgtgcccacctcgggatctctcggtcgtgccctttacgctgccccaatccagatttgggacagcgaaaccggcaaggtagccagctgggctacatcctttaaattcaacattttcgcacccaacaaatcaaactcagctgacgggcttgccttcttcttggcacccgtcgggtctcagccccaatccgacg

SEQ ID NO: 24450 - DNA, 395 bp, Glycine max
gattcatcttcatctcatcaatcttttcaattctctatgcacacatcaaactcgacactaccttgttcttaaactcacaacaaaaactatttgcatcaccaactactttctagcttattatatattcaaaagttgtgaagaatatgagttcaacaagccgtgcttgggcttggaccgtggcagctggtgttggagtggtggaggccatgaaggatcagggtatctgcaggtggaacagtgtgatgagatcagcacaacaacatgctaaacataatatgaggtctttgtctcaaaccaagaagctttattctcaatcatctgttatggcttcagccaaattgaaagatgagaaagctaagcagtcagaagagtctctgagaaccgtcatgtacttg

SEQ ID NO: 24451 - DNA, 429 bp, Glycine max
ggaaagcatttaggggagattgtttttctgttccgtttctacgaactcagacccttcaatcccaaccgagaaaaaaatcatgaagctgaagacatatgcgggtcttagtatcattgcaactctggctattatatatcatgcatttaacagtaggggccagttttatccggcaatggtgtatctgtcaacttccaagatcggtttggtgcttcttctcaacatgggtttggtctttatgtgtattctatggcaattaaccaagaagttgttcttgggttccctccgagaggcggaggttgagaggcttaacgagcaatcgtggagggaggtcatggaaatcctctttgcaataaccatttttaggcaggacttctcagtcacattccttgcaatggtcgcagcattgttgttgattaacgctttgcattg

SEQ ID NO: 24452 - DNA, 395 bp, Glycine max
ggttctagtgtgtgattgtttgttgttgtaactcgttcttcttcttttgttgatctgtgtttgtgtttgttttttctctcacctgaaaatgtcttgctgcggtggtaactgtggttgcggaagctcctgcaagtgccgcaaccgctgcggaggctgcaagatgtacccaaacttgagctacactgagtcaaccaccaccgagaccttggtcatgggaattgcacctgttaaggctcaatttgagggtgctgaaatgggtgtgcccgctgagaacgatggctgcaaatgtggaccaaactgctcctgcaacccctgcacttgcaagtgaggtgttgggagagcaagcttcaagcagagatagcccttaattaggaataatgataaactattaatgt

SEQ ID NO: 24453 - DNA, 397 bp, Glycine max
gtcccataattatatatatatacacacacacatactggtggccttttacttgaaaatcatatgatacacaggttgatatagtggaccaatttgttaagaacattttcactctgttgaccaatttggataccgatgaaccaacctgtcaatcttctcattccttacactaccctacgcctctaatattgctcacacattacaagaattttattacactaaacaaacgtgtagtaaggaagagattgttttttttttaatgaatgaacatcatgttttcttgaaaagaagaaaatacactattgtgattattgagaatgattgtgaatatttttgcagaaattaaaaagtttcatgatgtgtttatcacggattttaattatgtttaatactcattttt

SEQ ID NO: 24454 - DNA, 363 bp, Glycine max
gccagtgatgataattatcttattgcccagcatccgacgatatcaaaactgatgggattgacaattttagaaagcattggaaaactggtgagcccattattgttaagcaagtatttgatgggtcatccatttcaagctgggatccaatggtcatatggagagggattctagagacaatagatgagaaagcgaaagatgaaaaccggatggttaaggccatagattgcttagatgggtctgagattgatattgagcttgctcagttcatgaaaggatactttgaagggcttattcttgaaaatggttggccacagttattgaaattgaaagattggccttcacctagtgcttctgaagaatttc

SEQ ID NO: 24455 - DNA, 416 bp, Glycine max
ggattatttctagtcccaaagagctaacaagagattcaagaccggcatggctaatgaagaggaacagaaaaaccacctcttcggcatcaaagatctcggtcacaagactctccttcagagtgatgcactctatcagtatatacttgaaaccagtgtctatccaagagagcacgagtgcttgaaagagatacgcaagatgactgcaaaacacccactgaacatcatggcaacaccagcagacgaaggacaacttctgagcatgcttgttaagctcacgaattcaaagaacgccttggaaattggtgtattcactggttactctctgctctccactgccctggctcttccccctgatggaaagatcttggctttggatgtgaatcgcgaatactatgagttaggattgccaataattc

SEQ ID NO: 24456 - DNA, 433 bp, Glycine max
gaaggagaaatattgagagcaggaagaagcaagtgatggcgacgaagcagcttccgcagatcgccattctgggagctggtatctttgtgaagactcagtaccttccgagactctccgagatctctcatcttttcattctgaaatccatttggagccgcactcaggaatcagctacagctgccgtagacatagctcgtaagcattttccccaagtagagactaagtggggagataacggttttgatgacatcattcacgatggatcaatcgatgctgttgccgtggtcttggctggacaaaatcaggttgacatctcactcaggttgctaaaggctggtaaacatgtccttcaagaaaaacctgcagcatccggtacaagtgaattggaagctgcattgtctagctacaaatctatttcttctgatgctcccgg

SEQ ID NO: 24457 - DNA, 412 bp, Glycine max
atgggagcgtttactcactggtgttcctcttcttgctggttttaaggatacaagcaaccccgttttagaagaaagcacattagacgtgataagcccggtatccactgatcccctggtgtttgatgctgagcagagccttgagagtgagttatcttttattcataaggctaaagaatctggtgttgtgtatcttcttggtcatggggatataagagcaaggaaggagtcgtggtttatcaagaagttagttataaactatttttatgcctttttgagaaagaactgcagaagggggatcacaactttaagtgtaccacactcacatttgatgcaagttagcatgacatacatggtttgaaaatcaatcaattttgcagcccaaataaaacgagtggcaattctcttgaaagct

SEQ ID NO: 24458 - DNA, 416 bp, Glycine max
gaaagtcagtggtgcatgtactaaaagttggattgaaggttggggtggaaattccacttacatggggtaaggaagtggaaattggtgtgcaagtgaagaagaaagatgttgaaagggcaatagcaaagttgatggatgagacaagcgaaagtgaagaaagaagaaaaagggtgagagagcttgctgagatggctaacagagccgtagagaaagggggttcatcatattctaatgtgaccttgcttatccaggatatcatgcaaaaaacctagagagatgtgtgataatctcatttgtcataaaccaatttgaagtaaaaggcaactcatttgtcataagtgtagtagattcgtgtgaatgttggggcagaagttccaatgaattggggagaggaagagaaaactggtgtgttggtg

SEQ ID NO: 24459 - DNA, 434 bp, Glycine max
aatctgcaaaatgatattgaagagctcataaagtaataaaaaatatcagaagaatttgaaatggcatagtacgtgaaacaaaataagttttaaaaaaataacaattgaagctgacaagtatattattaataccaacagtatggaaatgttctccctgctcaagtatattattaatttcaaagtatattatgttaatcttgatatttaattgtacattaatagagtactgcacaaatcgggattaatggaaaattttatagacatggtatctgtgacaagacttttctatccaacggtggattttgtgataaaatgatccagtaaaaagctacttaatggtataatagtggttttcacttacatcgtgtgtgtgtgtgtgtaaagaataagttgagacatgccttaaccactcctctggatattttacaatgacc

SEQ ID NO: 24460 - DNA, 441 bp, Glycine max
cccacgcgtccgatgggggtggaaagctttttgtggacaagcaccctaaccttagggtccgagttgttcatgggaacacgttaactgctgctgtcatactcaatgagatccctcaagatgtgaaggaggtgttcctaacaggagccacatccaagcttggaagagcaattgctctctacctttgccaaaagaaagtgaaagttctgatgttaactctctcaacagatagatttcagaggattcaaaaggaagcccctccagaaaatcaaagctatcttgtccaagtgacaaaataccaagctgcacaaaactgcaagacctggatcgttggtaagtggatcacgccaagagagcaatactgggcaccacgtggaacccattttcatcaatttggtgtcccaccaattttatcatttagaaaagattgcacttatggtgacc

SEQ ID NO: 24461 - DNA, 237 bp, Glycine max
aattcgagccgccgcttttttttttttttttttttttttttttttgggaaaaaacaattagggggggttatttccgcggggccccccacaccaaaccgaaattaaaccccccaaacttctttaaactaaaacgctaccaagccaatttatttaaatttttttaaaagaaaccctttataccccctaccaaaaacttaaaatccgttgcaccttaaacaacccccaaaactctaaaaa

SEQ ID NO: 24462 - DNA, 440 bp, Glycine max
gaccacattcacacatgacagcacaaacacgaggtctcacataacaccaaatctcatcacgaccatcatcatcataatcaccatagcataaccctccttttctctctctaaatctctctcaattctctctccttagatctgcgaattatcttagattccgatagataaaataaaattcaatcaataatcaatttggatcctcgcggcggggaatggaagcgttgttgttgttgttggtggtggtgggtgaatctagcagactctgaacgcgaaaaatgcctgcgttaccgcacgggaatcaccaattcggtagtagtaatggattctggtcgaagaatcgcgacgatgttggatacaatcagctccacaagttttggtgtgagctgttgccgcaagctcggcaggagctcttgaggatagacaagcaaccctttttgagt

SEQ ID NO: 24463 - DNA, 419 bp, Glycine max
taagatatttttctcaagtgtgaaaacttgagagattttgcaatggatataagaactggtatctaattcgaataagtatcattcttttagggaatcttccaattgattgaccaatccaaataatatatggatatatatatatagatagatctatctatatatatctaactaatataggaatcttagaaagataattagtctattcataagaggagatgagatcatatgaaaaatataaccgattctttcctttgtttgggctactggccatccgccggaagtttcgggtttaataccgatattttagcaacaaatctaataaatcttagtgtagtgttaggtgtattggttctttttggaaagggagtgttaagtgatttattagataatcgaaaacagaaaatcttgagaactattcg

SEQ ID NO: 24464 - DNA, 216 bp, Glycine max
ggaggcgaagtgaacggtttgaatgggacaaggaaatgacagcctggaatttcctcaaacagttaacgtgcaccgttggcgctcattctcccaccctctcccgtcgcctcatacactactcattacttgttccctctctctccgctcatcacaaaattgttaggtaccaatggcttccccatttccgtgtcaatctttatgccgcagttccaaatg

SEQ ID NO: 24465 - DNA, 404 bp, Glycine max
ggtggcagttgtgtgacggagaaattaagctagagcttcatagtttcttcttcttttctcaccttccttctctcccttcagacaaagggacaaaaaatcagtgtgtgagagagagagagagaaattccaaaaccatgtcccacagtcatctaagtttcgcctttgggattctaggtaacattgcctccttcgtgtgctttctggcaccactaccaacattttatagagtttgtaagaagaaatcaaccgaagggttccaatcaattccatatgtggctgcactcttcagtgcaatgctttggatcttttatgcctatgtgaagaccggagaaacgctgtttatcaccatcaatgcattcggttgcgtgattgagacaatttaccttgccgtatttatcacttac

SEQ ID NO: 24466 - DNA, 365 bp, Glycine max
tattcaactgcctttgggttatctcgtgcattgtgtcgccttcagcagcagcagggtgctgatggtcatggatcaacaaatgaaagagaggtcagggttgggagattgcagcgtcaaaaggttcgtgtctctcgaaatcgcattttggattctgctgctaaggtgatggagttgtattctagtcaaaaggctgtacttgaagtagaatattttggtgaagttggcaccggtctgggtcccactctggagttctacacacttctcagtcatgacttacaaaaagttgtacttcaaatgtggagatcaggttcttcagagaaatatcaaatggaaattgatggagatgaaaagaaaatgaaaaatag

SEQ ID NO: 24467 - DNA, 359 bp, Glycine max
agaaaatatttaactttctttgggtatcattccaaactgtcgccgtgagcttcaacgggctgcttattaacaaagatcaacaaattaaagatacgtcatggttctaaaattgcaacaacaaaaagttcctttctcttgaaatcacattttgaattcttctgctaaagtgacttaattttattcttatctaaaagctgtacttgaaataaaatatatttttgaaactcccaccggtcttggatccactctctagcactacacacttctcaaacatgacttacaaaaaaatctacttttaataatttgatcacgttcatttgatacatatctaatagaaattgcttcttattaaaatataa

SEQ ID NO: 24468 - DNA, 352 bp, Glycine max
  modified_base (341)..(341): a, c, g, t, unknown, or other
gaccgctttgccttcatacttaactcaattctagttttgtagagagaagaaaaaaaccaaccactctttttctttcatttgcaatttctgtgtcaccaatcatacacacaatgtcggcttacagagacgaggatccccgtcttcatggcatcaaaactaagattcgtgttgtccctaatttccccaaacctggtattatgttccaagacattactactctgttgcttgatcccagggtctttaacgacacgatagatttgttcgttgagcgatacaaaggcaaaaacatttctgttgttgcaggaattgaagctcggggtttcatttttggttctcccatngcactggcaat

SEQ ID NO: 24469 - DNA, 409 bp, Glycine max
ggttgttctcatttccgaacacaatatcggttgtttaaggtgaaaaggaaaaaaagaaaaaagttgtgcagtgaggaacgcgaagacgcgagatagggaataggcgacagtgcgtttggctgcccccagcaatcgaactccttgtgctcctcgcacctcattctctctctctctcgtatctgcaacttcaactaactaacttttatgaagccgaaggcgtcagtgaatcgacccccaacaccagatgtggtcgaaaatgtccctgaaagagaacccacgcttcaagagctcatcaacatcaagttgatcgagactggagagaaggagcgcctcatggagctgttgaaggaaaggcttgttgattgcggttggaaggatgaaatggaaactctctgcagagctgttgtga

SEQ ID NO: 24470 - DNA, 415 bp, Glycine max
  modified_base (393)..(395): a, c, g, t, unknown, or other
  modified_base (404)..(407): a, c, g, t, unknown, or other
  modified_base (409)..(410): a, c, g, t, unknown, or other
ggtcctggatggtgatgagaatggccgtcgtggacccacagctatgcagacagtgaggagtctggttagggaaggtggttggatggcttgttatagaggattgggacctagatgggcttctatgtcaatgtctgcaacaacaatgatcacaacttatgagctcctcaaacggctctctgcgaagaatcaagaggttttgacatgatgaaggataggtttatgacagcaaaaagaaaaaaataaaggttaaacaaagagaagaggaggttcttctttcctcccttatttgtctgttttttctgttcttttcttcacttgtcaatgttgtttcttcacgtatggcttgctacaatgactgtttgatcaatgtaagtcattgcaggttatttttgnnnaaaaaaaannnnannaaaaa

SEQ ID NO: 24471 - DNA, 432 bp, Glycine max
  modified_base (397)..(397): a, c, g, t, unknown, or other
ggttctagtgtgtgattgttgttgttgtaactcgggtctcttcctttggtggtccggggttggggttggtttttctctcaccctaaaatgtcttgctgcgggggtaactgtggttgccgaagctcctgccagttccgccaccggttccggggcttctagattttccccaacctgagcttcacttagtcaaccaccacccagaccttggtcattggagtggcacccgtttaagctcaatttgagggtgctctaatgggtgtgcccgctgagaaccatagctgcaaatgtggaccaaactgtttctgcgacccctgcactttcaaatgaggtgtttggagagcaaacttcaagcacagatagccctttattatgaataatgatgaactatttatgtgtngctcaaaacttatgtattatgtctgtgatgggttt

SEQ ID NO: 24472 - DNA, 434 bp, Glycine max
atcggatcctggttttagtttttatgaagtctaggttttaaactttggttgcgtcgatatcaatggaatcatggaaaattagaggccaaagctgctgaggccttcgaaacgttaatgttgttgggtaaaggctgtttccaaggtttgaatctatggcccgagagtgcaaaacagcaaactttctgttgccccaaggctcgctcaccttcaaattgatgatcttagtattgacagatagctaatgctttctgcatgatggactctctgaaattcttcgagctaactaaatttgctaaaagcattcttggatagttgccttaattgcagttacccctagcctgccttaagtgcagtatctttgggctgcctaatttcagtatcgagaggttgtgtttagttccacatcaattagtgatatagtcaatataattctt

SEQ ID NO: 24473 - DNA, 406 bp, Glycine max
ctgcttggctttgaacacattagctttagatttatttgatgaaaaagattaataaataggctccaataataaagataattaaattgggtttattccattcaaagtatctgataatgatgaatatgatctattttctttttctgtttttgcccctgcattttatgggtagcgcgaaatatactatggtgtaaaattcatcgtagaggtgaatttctggttggaatgggaatcaaatttgcataatgatggatgtaaacttcatattacttgttctcagaggacattgttcgtttttagtaaatggcagtgttatgattgaactgtgattcaactaacaacgattcagtatcatattctaagagttatttttggtagttatttcattcaaaaacacattgtatatatt

SEQ ID NO: 24474 - DNA, 417 bp, Glycine max
ggttctgtgtatgtgattgttgtgactcgttcttcttcgtcgttatcttcttcttttgttgtttgtgtgtttgttttttctctcacctgaaaatgtcttgctgcggtggtaactgtggttgcggaagcgcctgcaagtgcggcaacggctgcggaggctgcaagatgtacccagacttgagctacaccgagtcaaccaccaccgagaccttggtcatgggagtggcaccagttaaggctcaattcgagagtgctgaaatgggtgttcccgctgagaacgatggctgcaaatgtggagctaactgcacctgcaacccctgcacttgcaagtgaggtgttggagagctaaagcttcaagcagaaatggcccttagaaataatgataaaaactatatgtagtttcaaaacttcaaaatta

SEQ ID NO: 24475 - DNA, 432 bp, Glycine max
gcggccaaaggtatctatccagcagtagatgctttggattcaacctcaactatgctccaacctcgaatcgttggtgaagaacattatgagactgcgcaaagagttaaacaaactttacaacgttacaaagaacttcaagacattatagctatccttggcttggacgaattatccgaagaagatcgcttaaccgtagcaagagcacgaaaaattgagcgtttcttatcacaaccttttttcgtagcagaagttttaccggttcgccggggaaatatgttagtctagcagaaacaattagagggtttaaattgattctttctggagaattagatggtcttcctgaacaagccttttatttggtaggtaatatcgatgaagctactgcgaaagctacgaacttagaaatggagagcaatttgaagaaatgacttt

SEQ ID NO: 24476 - DNA, 242 bp, Glycine max
  modified_base (113)..(114): a, c, g, t, unknown, or other
  modified_base (127)..(127): a, c, g, t, unknown, or other
aaaaaaaaaacgacgccgccgcacgcctgctacaaaatacaaaaaacaacaaaattttacttcttcaaaaaaacaacaaaatcctctcaacgcttctctcaaccttcctcaanntacacaaaaaacncctatcaagtcccttctttttcataaatttaaaacattttacctaccaattaatatattataccatcattattatccctttaccatttcatccacacaaatattataccccttac

SEQ ID NO: 24477 - DNA, 417 bp, Glycine max
ctctttaatattaaaaagtataaaaaaatgctagtttggcagaatatttcttccgaaatatttgtcaatccacttaaaacatgacagttatcaatctatttaattataccttctaaaaaaacttcgtttcaaacgcattttttactcttatctttattattttattttaaaattgttcatggaattatttacttatgctatttatataattcaaactaaatttataaaaaaaataatctctaccatttctttttctttttcactcaccttttccatcatattaacgttggactttgtaaggtggacatctaaaatggtgtttgatccatctttacatcaaagttattgcattatatttatgttaggtatcagaaaataaaatatgcacacaaaaggcttcaggacaattaacaatgc

SEQ ID NO: 24478 - DNA, 427 bp, Glycine max
gacctgtaatgtaacaagtaagctccagcactggcttttattccctttattctctctctctctttccttcctttgatccatggaagcctgtgatctcttgtgatagttggtgtgttgggtagggaagggtttgaaagtgtcgtgtcttctaaggagctttcactgcacgacggtggccgaatcttcttgcttctttctctttccaagatatcctttgattcaactttggatcttcacctctgatttcctttcatttttcggtttatacacacttggggtttcccctcacccaactgtgtgcaacaaccacaaagtacgaaccttttcttttttaatttctatttcttggaaatataaaaggtctttttatttatttctgttttagccctagaggagtaaaatctgttgtaggaaaggaaacgcctga

SEQ ID NO: 24479 - DNA, 422 bp, Glycine max
caagaaggagaagattaactcgctggacacgatgagtacatggtaaaaggaggcagggatttgtttcacttgttgcccgatgctttcaagggtatcaagcagattggtgttatcggttggggatctcagggacctgctcaggctcagaatctacgggactctcttgctgaagcaaagtctgatattgtggtcaagattggactcaggaaaggttctcgttcctttgccgaagctcgagcagctgggttttctgaggagaatgggactctaggtgacatatgggaaactgtctcgggcagtgatcttgtgatgctgttaatttctgattccgcgcaggctgataactatgagaagatattgtctcacatgaagccaaacagcatacttgggctttcccatggttttcttcttgggcatttaca

SEQ ID NO: 24480 - DNA, 395 bp, Glycine max
gatcccaaattaaccaataattttttagttaaacaatgtccatggccatcattaacacttttggaaacgttggtgtctactatattgtattattattatcatggtttctcgtatctggtgtgtgtgtttggggacgacccgccacttttctgcaagactttgaaatcacgtggtcagagactcatatcaggcaaattgatcaaggcagagccatccaactcattctagaccaaaactctggttgtggctttgcctccaagagtaagtacatgtttggccgtgttagcatgaagatcaagctcattccgggagactctgctggcactgtcactgcattttatatgaattctgacaccgacactgtacgtgatgagctggattttgagttcttgggg

SEQ ID NO: 24481 - DNA, 427 bp, Glycine max
  modified_base (387)..(387): a, c, g, t, unknown, or other
gccaacaagcaagatcttctaatgcaatgaatgctgcagaaataactgacaagcttggacttcattcactccgtcaacgccactggtatatccagagcacttgtgcaacttctggagagggtctctatgagggtttggactggctttctaacaacattgccagcaaagcatgagacatttgaaaaattttggtcttgtctggtgatttcatgcgagtctggcggttcttggagaaagatgcttatcttttctagcgaatgttgtaatagcagaatgcttgctagaagcattctcttttgcgtaactcgggtttgtatgattgctcaaattagctaatacttttagctataattggaactcttgcaccctcttgtgcgtgcgtgcagngttgcttacatcttgattgtttgatttttgattgaatata

SEQ ID NO: 24482 - DNA, 430 bp, Glycine max
gacgatcgtgtttttttttttattccatcgtaaaccaaaatttagttctccagttgagcgttcttcccacaaaccctaatgtcgtttcttgaagaatttcatgccaatttggattcactacccgttattcttcggaagaagtatacactgttgcgtgacctagataagagcttacaggatattaaaaggcaaaatgaacagcgttgtgaacaagaaattgaagatattaagcgaggtgttaggtctggaaacatcacgcctgatacttcggcaattagattctctgatgaagcgcttgatgagcaaaagcatagcatcagggttgctgatgaaaaagtagccttggctgtccaggcttatgatttggtagatacaaacatacaacaacttgatcagtatctgaaaaagtttgatgaggagattcggcgtg

SEQ ID NO: 24483 - DNA, 414 bp, Glycine max
gggaacagagtagaacatgaaacagaagatagttgtggtgtagctttgaagaagctatgagaacaaatggctggagtgacaaaggaggaagagaggggtagtcctagttggggtgcttcattttttacgcagacaacagaggatgtggctagagctgttgccactgctatgaattctcagaggccatctgtggtatattcattgaaaaatgatcatggtggcagccaacttcaaaggctgcagtatcaagttacgaaaatgataaaaggattttctagccctccagaagttaaatatacaaattacaatccggaaatcttgacaactcagaagcgtcaatgggctgcaaactttcagttgcagtacacggaccataagtcttggaaggagccaacaaagctgtttgaaagcatg

SEQ ID NO: 24484 - DNA, 429 bp, Glycine max
gcaacaacaaactggaaggagtatactagtcctgatggaagaaagtattactacaacaagatcacaaatgaatccaagtggtcaattcccgaggagctgaagttggcccgtgagcaagttgaaaaagcaattgtcagtggatctcgtcctgaagcattgctgaattcccatcctcaaccctctccgacaccttctgcaactgaagcaacacccaacacagataattcaactttacccagtcaaggagaaccatcaagtcctgtttcagttgctccagttgttactacatctataagtaatccacaatctgagatgccttctggaccatctctgtctacttctgcaaatgctataactggagcaaaagtggacgaacttgaggcacctgtaaatactgtcacaccatcagatacttgtgtgggaagtgat

SEQ ID NO: 24485 - DNA, 382 bp, Glycine max
acgaagacgaccgaatgggggagagctctacaagtgtcgggctgctaggacaaccaacagatactgctgcaccataactggcgagagtccaggactctaaagcatcactagcttacgctctgaccatagttgaatgtggcacgcataatcccgtcgtgaatcacaaaggactacattgcaaggataaatactaccatgtgacctatcgcgaagtagtaccagaagataaggctgaaaaaaacataaatcgaagagtgaaacacaacataaagctgtcatctcccaagcagtactatgaggctcattactcttacctcgttcctgttgaataacaatcctgcgactaatatgcatctgtttgcctaatggaaacacaccacat

SEQ ID NO: 24486 - DNA, 392 bp, Glycine max
gagggaagaaaaacaatgtaacagagccttttagagctagtacatacaagttctcatttgcaagctcatattttcttttcaataaccctttctcttaaaattagaagcaaaaatggatagggtaagagagttggcatcaaagaaggcagcagttatattcaccaagagttcatgttacatgtgccacagcatcacgcaactgttctatgagcttggagcaagcccagcagtgcatgagctagacaaggatgcatatgggagggaaatggagtgggctttgaggagcatggggtgcaacccttcagtgccagcagtgttcattggtggaaaatttgtaggctcttcaaaagatgtcatatccctccatgttgatggctctctcaaacaaatgc

SEQ ID NO: 24487 - DNA, 439 bp, Glycine max
  modified_base (411)..(411): a, c, g, t, unknown, or other
actatttaaatacaataataacaccaagtgttatttttacccaaggctttgctacttcggggcttttaacgaaaatgcatgaatcgttaatattagtacctgctttacagtcccattggttaatgatgcacgtaagtatgatgatattgggttatgcaactcttttatgcggatcattattatcagtggctattttagtcattacatttcaagaactcatacaaattattggtaaaagcaagaatttctattttttaaatgaatcattttcttttgctgaaatcaaatacatgaatatgactgataaaaataatgttttacaaaaaacttcttttttgtcttatagaaattattatagatctcaatttcttcaacaattggatcgttggggttaccgtactattagtctangttttatctttttaacgataggtattat

SEQ ID NO: 24488 - DNA, 307 bp, Glycine max
gatcaatttgatctgggacaacactaagcacatggtttcaacgccaagattcaaaggaaaaagcaattgataccaagacagacggtagtcaaagcagtcacaacaaaaacaaaggatggctattgtgaatattcatttaatttacatgttgaaaaaaaatatctatcaataactcaggggtgcccatgtattggtataattcacaaaatagtttatataaagtattatttctactaaacacacacattgttcctaaaataagatattgtactttatgcaacagtaaagaggaaaaattatgtatttc

SEQ ID NO: 24489 - DNA, 423 bp, Glycine max
gtactggccaatttcgataccgatcttggaattcctttcggttctgtgctcaatgatgctgttcgtataagctatgctgcgcacctgatgcttgtatttccagttgtcttctttccgttgcgtcttaacatagatggtctcctcttctcaaaatcaaggcctctggttctggataacgtcagatttgcatcactcactgttgcccttattggtgttatcttcctgggagcaaatttcatacctagcatttgggatgccttccagtttactggagcaactgccgcagtctgtataggattcatttttccagctgccatcactcttaaggaccgctacaacattgctactaaatcagacaagattttgtctgtcattatgatagtccttgcagtcttctcaaacgttgtggctatatacagtgat

SEQ ID NO: 24490 - DNA, 428 bp, Glycine max
gtaaaagatgatgttttcatgcattttataagttgtggcccgagaagttccaaaacaaaacaaatggtgtgacaccaaggagatggatcaggttctgcaatccagatctgagtaaaataataaccgagtggataggtactgaggattgggtcctaaatactggaaaattggccgagctacggaagtttgtagacaatgaggatctacaagtgcagtggagggaagcaaagaggagtaacaaagttaaagttgcagcattcatcagagaaaaaacagggtattctgtcagtcctgatgcaatgtttgacatccaggtcaagagaatccatgaatataagcgacaattaatgaacatatttggaattgtttaccgatacaagaagatgaaagaaatgagtgcggcagaaagggaaagcaaatttgctcct

SEQ ID NO: 24491 - DNA, 430 bp, Glycine max
gtgtttgatctaccacatttgtttctggcttgcaaggaagtgagaaccttaaatttgttggaggggacatgtttgaggcaattcctccagctgatgccattttgttgaaggtaaaacaatttcacaattcatagtacaattttacatttataccattaacacctatttcataattgactgatgtcaaaatttagagaattaaagcaaagaattgatcaattggaaaaaaagtgaacgattttatcagcattgatcacatgaaataacttattataatttttatatgtataggtcactaagctagcactgtctagtagtctaacaacatatctgcaagactgcaactgtcataccaaatcagaccaactaattctaacacaaaatgcaattaattaagttatcatctattgacaagtattcacattcccac

SEQ ID NO: 24492 - DNA, 412 bp, Glycine max
atcaagcaggtttcttgtcttccggtttctggtagatcaccacttgggttgggagaaaagaacagacaatggaagcgggttgagagctacctcggttgaacatcatcgaatcgaataatcacttttacacatgacttatccttctattccgatttaagcccctaaacgaactatcgaagccacttcaaaaactactcttagattgcttcgatggtcgatcactacaacaagctggttaaactagcggcgagggctttctacgatgatctaacgagtaaaggagagaatcaacccaaatcgggaaggagtgataacagaggaatcgctgtggtgattctcgacgctctcacaaggcgacaatgggtccgagaagaagacttggcaaaagatctcaaattacacacaaaacagc

SEQ ID NO: 24493 - DNA, 432 bp, Glycine max
ggcacaagtgagtttgttgatcgagataactagaaacagtgtgatgaaaatgaaggtccttgttttcttcgttgctacaattttggtagcatggcaatgccatgcgtacgatatgttccctctccgaatgaacactggctatggtgcccgtactccggaggtgaaatgcgcaagttggaggcttgctgtggaagcacacaacatctttggctttgagaccattcctgaagagtgcgttgaagcaacaaaggaatacatccatggcgaacaatatagatcagactccaaaacagttaaccaacaagcttacttttatgccagagacctcgaagtccatcccaaggacacatttgtgttcagtatagatggcaccgtactctctaatattccatactacaaaaaacatggatatggggtggagaaatttaactc

SEQ ID NO: 24494 - DNA, 419 bp, Glycine max
cggaccatggaagccaatggaatcactcatgacagtagcctaggagcggggagaagggataagagagaggtgggagacaaaacgatggaagatttaagtaaatacgtacacagccctgctcacttggcagttgccaggcgtgaccatgctgccctaaggcacattgtttctgccttgcctaggcttgctaaggctggtgaggtcaccacagaagtagaatctattgcttctgaacttcaagctgatgaggtctctactgttattgattgccgtgacgttcctggtagggagactcctcttcaccttgctgtgcgtctccgggatccagtctctgctgagattttgatggctgctggtgcggattggagtctgcagaatgaacatggttggagtgctctccaagaagcagtgtgcaccaa

SEQ ID NO: 24495 - DNA, 418 bp, Glycine max
  modified_base (300)..(300): a, c, g, t, unknown, or other
gatgcatagcaattcccaattcctaattgtttaaacctaattctcatttcttcatcgttcgattcttctcctcctaaagatgcagatcttcgtgaaaactttgaccggtaagaccatcacccttgaggtggagtcctccgacaccatcgataacgtgaaagctaagattcaagacaaggaagggatcccacctgaccagcagagacttatctttgcgggtaaacagcttgaggatggtcgaacccttgccgactacaacatccaaaaggaatccactctccacctcgtgcttcgcctcangggtggcatgcaaatctttgtcaagactttgactggcaagaccatcaccctcgaggtcgaatcctcggacaccattgataatgtcaaggccaagatccaggacaaggagggtatccct

SEQ ID NO: 24496 - DNA, 255 bp, Glycine max
gaccacacaccacacacatagtagctattatactctctagagtaattgcggaatctgctagaattttctaataatggcgaaagacgttgagcaggtcacagagcaaggtgaatactccgcgaaggactaccatgaccctcctccggcaccgttgatcgacccagatgagctcacaaagtggtccttgtacagagccgtcatagctgagttcatagcaacactcctgtttctttacatcaccgtgttgaccattat

SEQ ID NO: 24497 - DNA, 433 bp, Glycine max
  modified_base (409)..(409): a, c, g, t, unknown, or other
tcttgatgaaatgattaaagatgagaagaaccatggaagctatgacttcatctttgttgatgcggacaaggacaactacctcaactaccacaagaggttgatagagcttgtaaaagttgggggcgtgatcgggtacgacaacaccctatggaacggatctgtggtggcaccccctgatgctcctcttaggaagtatgttaggtactacagggacttcgtgctggagctcaacaaagccctcgctgtggaccccaggatcgagatttgcatgctcccggttggtgatggaatcactatctgccgtcggatcaagtgatttctgatcatcataatcgtggaccaccgttgcttcttctgcacaccctatagtgatgactggtcatcattgagtggcacctgctaatgcatntaaaagcaatcaatacttttcttt

SEQ ID NO: 24498 - DNA, 227 bp, Glycine max
gtactctatggaaatgtccgctgtcatttacaaggactgggttttcactgatcaagcattacctaatgatcttgtaaagagaggagttgctgctaaggacccatctgctccccatggagttcgtcttttgattgaggactatacttatgcttctgatgggctagagatatgggatgccatcaagttctgggtgcaagaatatgtctcattctactacaagtcagatg

SEQ ID NO: 24499 - DNA, 107 bp, Glycine max
aaggttaaggctcacatcttattgtggtcattgggcgggtgtgctatcggtaatccactaccacgggacacctgttttgcaatctctccagctttggccatcgtgtt

SEQ ID NO: 24500 - DNA, 421 bp, Glycine max
ggatgttataaaacgtgtctcagggaaatcaaggttggtctcttctggtctgttctgttcttctacgcaaacacataacataacacaacgcacctcttcttcttcttctgtaccttcaaatttcaacttcttcatccattttgtgctccaaacagcacaaacactgcaatcacaccgtcttcgctttctactcatctaaaagatagaggttcatgggttgctttggcttctgcaaaggaaatgatagtgttacaggttctgacagaggacctttcatgcaaagcactcctactgggaaccccagttttcattgaagacacacagcagtaactgctactccgactatataattttaacctattgcttgccctttcatcacactagatgaattgaagtccttgacaaaaaattttggctcaaa

SEQ ID NO: 24501 - DNA, 428 bp, Glycine max
cagaggagcactgccaatattcttgtaccagattcttcgtgggcttaagtatatacattctgcaaacgtaatccatagagatttaaaaccaagcaacctgctgctaaactcaaactgtgatttaaagattattgattttggtcttgcgagaccgactttggaaagtgacttcatgacagaatatgtagtcacaagatggtatagagctcccgaattgttgttgaactcctctgattacacctctgctatagatgtgtggtctgttggttgcatctttatggagcttatgaataaaaagcctctgtttccgggcaaagaccatgtgcatcatatgcccctattgacagatctttttggcaccccaactgaggctgaccctgggttagtgaaaaatgaagatgcaagaagatatatcagacaaccttctt

SEQ ID NO: 24502 - DNA, 408 bp, Glycine max
gatatcttactatgatatgcgagctgctcgcactgccatgcgtgctttacaaaacaagcccttgagacgaagaaaacttgatattcatttttcaattcctaaggataacccctcggaaaaagatattaatcaaggaacccttggcgtgttcaatttagatccatcagtatccaatgatgaccttcgtcaaatatttggggcttatggggaggccaaagagatcagggaaacaccgcacaagagacaccataaatttattggattgtatgacgatagagcatcagatgcagctcttaaagcattaaatcgaagtgatattgctgggaaacgcataaaacttgaacccactcgccctggtggagctcgtagaaacttgatgcaacaactgagccaagaactggaacaaga

SEQ ID NO: 24503 - DNA, 428 bp, Glycine max
  modified_base (410)..(410): a, c, g, t, unknown, or other
aagacgacagaaggggaggacgttgttttgttctgccttcttctctccctcaatacaatttccatcctattcctcagataaagaagatgcagaagggtagagaagttcgagacaataacatttttgaaccaagacggtttgaagattttggcgactttggatttcatagaagtaggatgccaagtctttttggtggcagggatccatttgatgatccctttttcacagacccgtttgatagcttgtttggtccaagttctgcatcaagagcaatgcagaagacaaacagagaaaaaggaatagttatagaagaaatagactctgatgatgagggggctgataatggccctgaaactggagagaaagattttgataagaaaaaatctaaatcgaccatggaaccgtcaatngagtatccagatgatgat

SEQ ID NO: 24504 - DNA, 431 bp, Glycine max
  modified_base (409)..(409): a, c, g, t, unknown, or other
caacatagttgttaaagacttaaagtctaaaaagtaaacaaaccttggacttttctaaggcagtgtctcttttggcagcttcacccattaaagccatatgatttaataaatctttttgcaaaggcataacctcataagatctgcaattaattaatttgaaaaatgtcacaatgtgtacttccaaaccaattatgagaaacagaactccagaactttgaaaattacctaaactccttattcttactcaatttatcccacacagacttcgcagatgagtcaggattcttcttcacataactaaggaagtgagtggtgatcaaagtagtccttattatggtatcctcatagctcttacgaggcttctcaagtataatccatcttccatcctttgatagcactgatatctcangcctaacataggaaaaatcaaa

SEQ ID NO: 24505 - DNA, 412 bp, Glycine max
gaattggagctcgcttctctcaggggaactgtacagagagcagaaatccagcttaatcttcaaaaaagaagaggacatggagtcctgtctgtacttaagccaaaattcagtggcgtgctcggcgaagccctagatgtggcagctaggtggagtggagatgttatcactattgaaaaaacggttttgcaacaaaactacagttgttatgaacttcaaggtgaatatgtgttgcctggcaccagagatcgtaatcctgttgacaaagaaggtggccttataaaaaggcttatgtctggtcatattggtaatgctatatcctcaatgggcaggtggagaatgaaacttgaagttcgtagagcagaggttgctgagatgcttcccctcgctcggcttctttctcgaagtatggatc

SEQ ID NO: 24506 - DNA, 433 bp, Glycine max
attaacaagggctcccaaacacttggaagggctaataatgggtgtctgttctgcaggaaatttaggaaacttgcctataatcattatcccggctatatgtaaagacaaaggtagtccttttggagactccaatgtctgctatcaatatggaatggcttatgcttcactttctatggcggttggagctgtttatatatggacttatgtctataacataatgagagtttccgcaagtgtagtaccaaaagatgcttatagaactagctccttcacactggaggcttcaggagagttcctagaattcttaccagaggaagaatcctcagaacctgaaaatccatcaaaggacaacatggatgattacacacttctgctttcttcaattgaatctgaggagaatgtgaagttaccagtctcagctaagatcaaacac

SEQ ID NO: 24507 - DNA, 435 bp, Glycine max
aaggaaaaggttcacatcatattgtggtcattggccatgtcgactctgggaaatccactaccactggtcacctgatttacaagcttggaggcattgacaagcgtgttattgagaggtttgagaaggaagctgctgagatgaacaagaggtctttcaagtatgcctgggtgctggacaaacttaaggctgagcgtgaaagatgaatcaccattgatattgctttgtggaagtttgaaacaacaaagtattattgcacagttattgatgcgcctggacatagggatttcattaagaatatgattactgggacatgccaagctgactgtgctgttcttatcattgattcgaccactggtggttttgaaactggtatttccaaggatggacagactcgtgaacatgctctgctttcattcaccctttgtgtgaaacaat

SEQ ID NO: 24508 - DNA, 403 bp, Glycine max
ggatgttataagaggtgtctcggtgaagtcaaggttggtctcttctggtctgttctgttcttctacgcagacacataacataacacaacgcacctcttcttcttcttctgtcccttcaaatttcaacttcttcatccattttgtgctccaaacagcacaaacactgcaatcacaccgtcttcgctttctactcatctaaaagatagaggttcatgggttgctttggcttctgcaaaggagatgatagtgttacagttgctgacagaggacctttcatgcaaagcactcctactgggaaccccagttatcatggaagacacacagcagtaactgctcctcggactataaattttcaacctattgctgtcccttccatcacagtagatgaattgaagtctttgac

SEQ ID NO: 24509 - DNA, 413 bp, Glycine max
gatgtttttgtcgtgtattctattcctattgcattcagctcactgatttcaattacaaagtcaattttgtaaatcagaggcagagagagttgtaaagagcctctgaattttgatcacaccacacccttcttctcatctccaccagaaatggctaccggagctgctgtgccaactacgttttctaccctcaagacatgggattccagtttggggtttgcaaaaaacatagattttgtgagagtttccgatatgaagagcatgaaatcttctgcgaggaaaagggtgtcaattatcaggaactcaaatcctggccaagatattgctgaacttcaacctgcatccccaggaagccctcttttggttcctaggcaaaagtattgtgaatcattgcacaaacccatcaggagaaaaac

SEQ ID NO: 24510 - DNA, 429 bp, Glycine max
ggagggtgttgttacttcttctctggttgattcggatctagagtcttcagtttctcctcgttgttcttcgctttcctgttttcaatttcgattctttcgttaatttaataagatgtttgggagggcaccgaagaagagcgataatacgaggtactacgaaatcctcggcgtctccaagaacgcttcgcaggatgatctgaagaaggcttacaagaaagccgccattaagaatcaccccgacaagggcggtgatcccgagaagtttaaagagctggcgcaagcttatgaggttctgagtgaccctgagaagcgtgagatatatgatcagtatggtgaagatgcgcttaacgaaggaatgggtggtggcggcggccatgatccatttgatatcttttcatctttctttggcggggggagtccctttggatc

SEQ ID NO: 24511 - DNA, 408 bp, Glycine max
  modified_base (287)..(287): a, c, g, t, unknown, or other
gaacccaggttgtctgttacggattagcatcaaagcaagttaacaaaatttgggtgcgtcctggattgacccttttgccccctctccctcaccctccactaactcctcctttttggtttttataaagcacattcccaatagaggagggtccctacacaacacaacccttcaatgacgtccatggccactttcttcgcccaaacctccttcccctcccactctctctccaaaaccttcgatacccatttcgcccctgccccgaaagtcaacgtctttgtgaacttcanggcgaggaggcacgttggggtgcgagtttcgaacgcgctgatcgaaccagatggagggaagctcgtggagcttgtggtgacggattttgagaaggatttgaggaagggtgaagctctttcg

SEQ ID NO: 24512 - DNA, 395 bp, Glycine max
gatacaacaccacacacagatcaattgcaacggttgaattttgactgaagacaaagttagaaaaaaaaaacatgtcttgctccgtcgcggtttccaattcgccggtgttctctccttcttcttccctcttctgctcgaagccctccatcatctcttcttcgccggaatccctctccctctctctgtcgcatctcaaaccttcgaactcttctacgtcgtcgtcttgttcttcgccttctgctgctgctgcttcttcttctccttcttctccgattcgacttcgccttcccaagcctcccaccgcgttctccgcgtcttctgctgcttctgcttcgtctacctctccgaactgcaccgttttgaagaagaagcgacccgctaggttggacataccc

SEQ ID NO: 24513 - DNA, 393 bp, Glycine max
agggaccattgtttgatgacatgcaacctttgtttgaccacttcgaggtacttggcaccctttgttgcacaatatgtgaagtttcgagacatgccagaaatcaaaaggaagcattgttacgccatctgtgaaattccgtaacatgccggaaatcaaaaggaagtattgttacgcaatccgtgagtttccgtaacattccgaaagctaaaaaaggagtaattacatgacccgtaaggttccgtgaccttatggaaagaaaacaagtatcgttacgaaattcgtaaagtttcgtaacgatacggaaaaagaatcacctaaaaaagcaaagggggtgtatttagtaaaaaaaaaggtgcaaatagcaaccaggcccacttgggccttccaggatgt

SEQ ID NO: 24514 - DNA, 432 bp, Glycine max
tacctacattatggagcctaaatacaaggcccaaaaataatgaaatcctgatctaatatgtacaaagataaatgggttcatacttagcccatgggtccaaaatctatcctgaggctcatgagaaccctagggtcttctcttgccactatggcctaatcttcttggagtcttctatccaatgcccttaggggggtaggattgcatcattccctcccccttgaaagggatttgaccttaaatccagaggttcttgaaactcagggattctttcctcaacacctgtaaaaagaataaaaacatatgtattagtggtgttaggtatgttagagtaaggtaaggactgaaagcccttttccttgccatttcccatgagagaacatggttcttcaccaactcaatgagtggtgctacaagtatagaaaaatatgggat

SEQ ID NO: 24515 - DNA, 436 bp, Glycine max
gtagctgctgctgctcaaattataaagctacactgaatgtaacaactggattgtctgctccttataacaaccttgccattatctataagcagcagggaaattatgttgatgccatatcatgctacaatgaggtcctccgcattgatcccttggcagctgatgggctagttaatagaggcaatacgtataaggagattggtagagttagtgatgctatccaggattacatacgggcaattgctgtcagacccaccatggctgaagcccatgctaatttggcttcggcttataaagatagtggacatgtagaggctgctgtgaagagctataaacaagcattgattcttcgtccagacttccctgaagcaacttgcaatctccttcatacataccagtgtgtatgctgttgggaggatcgtgataaaatgttcaagga

SEQ ID NO: 24516 - DNA, 258 bp, Glycine max
gtcgcccacgcccccctactgctttgagaaaacacgagaaagggggaagggaaatttttctgagcctgctataaacacggggtgggggaacaaaccagcttgcccaagatctccattctgggagccggtattttttagaagacacaaaaaccttccagacacttcaagatccttcaaatttttactccgaaaatccactggagccccacttaggaaatatcctcaggtggccgtaacatatgttgtgagcatttttcc

SEQ ID NO: 24517 - DNA, 294 bp, Glycine max
ggttctagtgtatgtgattgttgtgactcgttcttcttcgtcgttatcttcttcttttgttgtttgtgtgtttgttttttctctcacctgaaaatgtcttgctgcggtggtaactgtggttgcggaagcgcctgcaagtgcggcaacggctgcggaggctgcaagatgtacccagacttgagctacaccgagtcaaccaccaccgagaccttggtcatgggagtggcaccagttaaggctcaattcgagagtgctgaaatgggtgttcccgctgagaacgatggcttgcaatgt

SEQ ID NO: 24518 - DNA, 52 bp, Glycine max
ttactgatactcacataatagcatcactgtagagggaggaaactacatcaat

SEQ ID NO: 24519 - DNA, 306 bp, Glycine max
acgacagaagggttatatatagctcggcatccttcaggccaaaacatgcatcatagtcatactctccaatctattctccaacattgaatattatatttccatctgcatcatttttatttaattgcaagggaatcaatcactagtcacgaccgaattttggtgcaaaactaactacttgtttcgaattttcaatctgagaacatgcaaaacaatgacagagcctctgaatcacatgcggcacacactggtgaatatgcagaatcaacttcaactaattggtacaatttcagctccaatattccgtac

SEQ ID NO: 24520 - DNA, 239 bp, Glycine max
cttttattttgataaacaaatcaaagccatgggcacctccaacttctctattgttctctccatctccctaaccttctttttggtgctacttaccaaagcacactccaccgatacccgttattttaccctcaacaattttaacccattccaaccaaacattattcttcaaaaaaaatactagtatttcatcctctggggggtttcaactcaccaaaatttgcatcaaccgcttgcccacc

SEQ ID NO: 24521 - DNA, 381 bp, Glycine max
ataacatatgaacagtaaaaactagtattttaattgagactggaactcatagggaagaaaatagatttatgaatggaataaaatatgcagtatttacagacaaaagtattcggttattggggaaaaatcaatatacttttaatgtcgaatcgggattaactaggacagaaatcaagcattgggtcgaactcttctttgatgtcaaagtgatagctatgaatagtcatcgactcccggtaaagggtagaagaggacgacctattatgggacatacaatgcattacagacgtatgattattacgctttaaccatgttattgtattttgattcttagaaagaaaaaaacttaaatcaaaatacttaatagcatggcgatacatt

SEQ ID NO: 24522 - DNA, 419 bp, Glycine max
atgcgcaataaggcactatattctggcggaagggaactcaacttgtttggattggaggaaacaagtttagtgactctcattcagatgacttagacgttcctgaagatggcgtccctttggagaatgaacttgacattgccgttgacttcacagctcctgcattacctggtcgtgacatatcatattgtaggatgacatctccatctggacataaattgggccaacatgattgggtccttatacaggttgatgcctgtctcatggactcattttatgataactctcaaggactgaacttgaatattaccctccttatgagtggctctgaaggacctcatattattgatataaatgctcagcctactgaggatgatactgttcttcatacccgcaagcctaaagctcccattgagcctttg

SEQ ID NO: 24523 - DNA, 370 bp, Glycine max
gacaagagtttcatcaatggcaatgggggctacgctacctgctggggacgaacaaacgccacttgtgcccgatgataattcgggcatcgaagctcgcaagagccaccactgcacggatattcacatactgagcttggactttctcttggtctttctcgcctgcggagccgctcagaatttgcagagcactctcaacactgaggatgacttgagtgccaccacactcgggatcttgtatttgtctttcacattcttctccgtggttgcttctttggaggtgcgagttgtcgactccaagaacgatctgctcactctgactactggacatgtgctttatgaccctcacgacttgaaaccaaattggtataca

SEQ ID NO: 24524 - DNA, 284 bp, Glycine max
cggcataacatatcaacagcaaaaactagtctgttaagggacactagaactcatagggaagataattgatttatgaatggaataaaatatgcagtatttacagacaaaagtattccgttattggggaacaatcaatatactcttaatgtcgaatctggattaactaggacagaaatcaagcattgggtcgaactctcctatgatgtcaaagtaatagctatgaatagtcatcgactcccagctaagggtataaatatacgacctattatgggacaatcaatgca

SEQ ID NO: 24525 - DNA, 223 bp, Glycine max
catcgattcctagggctaatattttccgactttcatctagtcgattttacactgggtcccgataaaaaagatctctcatctacctagtcccagacaattttctgatgcgcatggtcatttctattctaaatgcatcatgagcgatctcttcattcatgccttcacatgtgttgccttcacgtctttctgcacctcaagcgccgatgtatgtaacagtacacct

SEQ ID NO: 24526 - DNA, 436 bp, Glycine max
ggcaactgatgatggaaggaagctgaaacagtgagaaacaacaaccaacccctgtctttgttttttgtttgttgaattgaaacttgagagagagaaagtgaatgaatgatggaggcaaagggtgtgcagttcttagcgtaccaatcaatattttcgagcgttggatctggggactttgatggggtgaagaaactggtggagaaagtgaagaatgaagaatggtcatcgctctctgatgtgatgtctcttcagaacgatgctggagagactgcgctatacatcgctgcagagaacaatctgcaagagattttcagcttcttgctcagcatgtgtgacttcgaggtcgtcaagattcgctccaagaaggctgatatgaacgcctttcacgttgcttgcaagcgtggcaatctagatattgtgagggagcttttgaata

SEQ ID NO: 24527 - DNA, 345 bp, Glycine max
atagatgtgaaagaaaatggttgccatgatgcagagaatgaagttgatcaggagacagatgatgatgctgatcgtgttcagagtggaaaattgagtgagagtagtggttatgctggcagtgatctttatgattacaaggcatttggaggtgatgattctgatgttggatcctccagtagtaaccatgctaagactgaaaatgctaatctgaatgctgttccagataccccagggtctgaggatcaaaacaagcaaagaaaggccagtgaaaacccagttgatgaaaatgatgcttttaatttgttgccttagtctgaatcttatcgatccatgggtgagatttta

SEQ ID NO: 24528 - DNA, 193 bp, Glycine max
ggctgatcctatatgatatgattgatatgatagagcgactaagaaaaagagagctatatctaacctttccattaacgcgacgtgtcgccatatttaagaaccgttcgttctgcgcacctgctgctgctacaggagtcggaattactctgctttaccgaataccacagcaaagagtggacacctctatctggga

SEQ ID NO: 24529 - DNA, 426 bp, Glycine max
gaccctgcccacatcaaggttcctctcattcttggtatctggggaggcaaaggtcaaggaaaatccttccaatgcgagcttgtctttgccaagatgggaatcaaccctatcatgatgagtgctggagagttggaaagtggaaatgcaggagagccagcaaaactgatcagacagagataccgtgaagccgcagacatgatcaagaagggaaagatgtgtgctctcttcatcaacgatcttgatgcaggagctggtcgtcttggtggaactacacaatacactgtcaacaaccagatggtgaatgccaccctcatgaacattgctgataaccccaccaatgtgcagcttcctggtatgtacaacaaggaagagaacccccgtgtgcccatcatcgtcaccggtaacgatttctcaacactgtatgct

SEQ ID NO: 24530 - DNA, 259 bp, Glycine max
cacacgaccacacaactgcgcgaagactacagatggtatctatctgacatatagggcacgctatcatgcatagaatgaagttgatcactagacatatgatgatgctgatcgcgttcagagatcaaaattgactcagagtattgattatgctgacaaatatctttatgattactaagccatcagaggtgatcgattctgatgtaggatcctccagtacataccatgctcagactgcaaatgctaaactaagtgctgtctc

SEQ ID NO: 24531 - DNA, 313 bp, Glycine max
gagcgcgactcgtcttcgttccttaccctcggggtgatctgtgagaggggcttgatagccctctctctctctgctgctgcaattcagacgatttgtcttcacatggaagcattgcttgcttgagggacgcctttgtctcaaaggagttggaattttcgggttttttgtgggattggagatttagagagtgcccttgcactccctgttttatttcatcaccatgattgccactgaaactatagtaccaagtacaaaattgaagatcaagttctcaaccaaaaggatagagattgattctggcccaaaatgtgag

SEQ ID NO: 24532 - DNA, 405 bp, Glycine max
gatccccaatcagagagaaaagttagggttcacaacttttccttttccttttgcttgcgaatctgaatcaaataatcaatcatccattcattattcatcatgtcgtcggcgaagaaaatcacgctgaagagttcggacggcgaggctttcgaggtggaggaggcggtggcgctggagtcgcagacgataaagcacatgatcgaggacgactgcgccgacagcggcatccctctgccgaacgtgacgagcaagatcctggcgaaggttatcgagtactgcaagaagcacgtcgaggccgcgaatcccgaatacaaacccttcgatgacgatctcaaggcctgtgacgctgaattcgtcaaggtcgaccaggccacgctcttcgatctcatcctggttgttactact

SEQ ID NO: 24533 - DNA, 207 bp, Glycine max
gatccccaatcagagtcaaaagtcagggggcacagtgaaatgctgttgcttaagcttgcgaatctgaatcacataatcaatcacccattcattatacatcatgtcttcggtgaccacaatgacgctcaagagttctgacagctaggctttcgaggtacatgaggaggttgcgcacgaatcgcagactcttaagcacatgatcgaaga

SEQ ID NO: 24534 - DNA, 378 bp, Glycine max
tactcaagaaatatatgaattagactcccaataacagagacattgtgaaacttttcaaaattccaaaacagagcataacataaatggaatatattgatctttagctggttcttatttttggcttgtgtaatatattgatctttcacttatatatgtcaccacattgctttattttttttatataattcctcaaagatttaaaatgttatcatatatgtctcacatctcaaagatataatttttgattcattcctctattttaggcttgacagatatataagtgaacttgaactttgactaatatgatgtaccgcattaattattacaattccttaaaaatttaaaaggttatcatatatggctcttaaacacacatac

SEQ ID NO: 24535 - DNA, 418 bp, Glycine max
gaccaagcccctttcggctctctgtatcgcttctagctgtagagattactatttttccaaccctctctctttctctcatcatcccccttttccttctttttcttcttcttcttcttcctcctccttgcaccactccttatattatctcataaaaatcactctgaggagaaacactataatcaatcatggaggggtctcacatggggttgttgctcttcttttcttccatgctttttgctgccttcccttctgcctcctccagaaacttgcccgtcataccctttgatgaaggctacgcgcccttgtttggggacagcaacttggtcatccatagggatggcaaatcggtccatctttcactcgatgagagaacaggttcaggatttgtgtcgcatgatctttaccttcacgggtattt

SEQ ID NO: 24536 - DNA, 239 bp, Glycine max
ggcgaagagtgaagagaatggcttataatggtttaaccttgatggatgtgataatatgcgtctcaatactgtcactgagtccttcagatgcagtggaagggcaaaataatggccttgttatgaacttctacaaggaattatgccctcaggctgaagacatcatcacagaacaagtcaagcttctctacaagcgccacaagaacactgctttctgctggatcatgaacatctttcatgac

SEQ ID NO: 24537 - DNA, 101 bp, Glycine max
ggttctgtgtatgccattgttagaactcgttcttcttcgtcagtatcttcttcttttgctgtttgtgcgtttgatttttctctcacctgaaaatgtcttgc

SEQ ID NO: 24538 - DNA, 428 bp, Glycine max
aagaagaaatcgggaagaggcgcattcgggtgtacatggatggctgttttgatctgatgcattatggccatgccaatgcactcaggcaagcaaaggctctaggagatgaactggttgtgggtcttgcgagtgatgaggagatcgtggccaataaagggccacccgttttgtccatggaggagaggctggcccttgtcagtggattgaagtgggtggatgaggtcataactgatgctccttatgcaattaccgagcaattcttgaatcgtctctttcatgaatacaagattgactatgtcatacatggcgatgatccttgcctgcttccagatggaacagatgcatatgctgcagcaaagaaagctggtcgttacaagcaaattaaacgtactgaaggagtgtccagtacagatatcggatgaagaata

SEQ ID NO: 24539 - DNA, 346 bp, Glycine max
gagcaaccataattatttttttttgacaagcagctcaagagaaatctgcaaagaataaaacaagaggaggaaatgcaacttacttgttgatataaacttcagacagagcgagttgttgtaaagctagccttgttgcagccatggccacccacgcggctctagcttctacaaggatccccactaacaccaagttcccatccaaggcttcacactctttcccaacccaatgcgcctcaaagagacttgaggtgacagaattctctgggctaagatccacttcatgtgtgacatatgctaacgatgctagagaatccttcctttttgatcttgtagctttccaactcac

SEQ ID NO: 24540 - DNA, 291 bp, Glycine max
ggagcaaagacgaagaagaaacacccagtacccttcttacatcttaatttatttttctgaagactttttttttttttaatttcttcatttccaccattttctgttacgccaagctgcgtcggcgacgcgaattgtgattactgaacggtgaattttgaggatctgctacgtttttcaacattgaataaggtgtatgtatcagacaagtatttgtcagaatcacattgttaattctcttctaaagatttcattcgttcatcttcggtatttaaaggcgctccataatttcta

SEQ ID NO: 24541 - DNA, 423 bp, Glycine max
  modified_base (264)..(264): a, c, g, t, unknown, or other
  modified_base (322)..(322): a, c, g, t, unknown, or other
gtatcacatcaatgaccaaagcgatgaccaaagcgatgacgagggcgttggtggaccaaccatcacctccgttgcaatatcaccaacctaggtgtcaagtgaacatgaaccttgaccacctgtcacactacattaattgtcaccatttcattcatcaacaagataatctacaaccaccaaccgtgcacacgaggttgtcatgaccttcgatgaaaaagcacaatgtattcgagtagtcaaagaatacaacatcaaaaatcattntgattgaagaataatatattccgactagagaaggctaaactctatgtgtgaatgaatntgatagacacaaccacacatttattgtaacatagactcaatccccacttcaaatacccaaaccacttggaatgtttagggttatgttacaatcctaaaagt

SEQ ID NO: 24542 - DNA, 296 bp, Glycine max
gacaacattccattttcataggaaaagccaaaactggagctcgaggaagataactacgatgaaacaagaggaatggatgattacgacagcgttgctatcgttgctgattgtttcatcttttccgccgttgagttacggagttgttcctcctcgtactctgctcaataagctgtcggagggcaaatatctcaacactcaggagctctggttcgaccaaaccctcgatcacttctctccctatgatcaccgacaattccggcaacgttactatgagttagtagactatttccggattc

SEQ ID NO: 24543 - DNA, 416 bp, Glycine max
ggctcaagtccagacataagcataacccggaccttgaaaccggcaacttgagttgaatcacagcgcagtatcacgtctccaccgatcatcatcttcttcgttcttctttcgaggagcgaccggttctgatcaaggagtttcaggttatcgtcgaaaatgttgtttcagattcctcgcctcaccaactctctcagagatcccttcgacgtggaccagtactatcttcatcgcaaaaccattctccacaaccaaaaacctagcaattccgcaagttcactcgatgaatcggaactggcgcggaagattgtgcacgggtgggaaaaagcttcgtcggacgtgcggcaggcctacaagcagtttataagagcgggggtggacttggttgacggagaaacgcgctccgaggagttccacga

SEQ ID NO: 24544 - DNA, 191 bp, Glycine max
taaggaatcaaagtcctgatgaaaaacaatttagtacctgtagatcgtgcaaatttacgttcccgcacacgctacgttataacaattccttaattccacccaatttcagttcacccaacctgcctttacatacgcgaatctggattaccgaacggtgaacccaactgaactgcctacaattacaaccactg

SEQ ID NO: 24545 - DNA, 202 bp, Glycine max
ttaaaaaaacaccaaaagggattgttttaaaatttaacactcaaccccgatttgcgaagttctaatatttcatttcacacaaaatgtctttgattccaaatttcttttgtggcacaaagaacaatttttttgatccttttcttcctcgatatgtgggaaccttttaaagattttacttttcccacttttctttcttcttaaa

SEQ ID NO: 24546 - DNA, 365 bp, Glycine max
gatcaccgcgttgtgttgtgattgaaaatggagagcgatgttgaagaatctatgcggaagaggcccagaaaatatcctttctccgccgattcatcctctcgcaagcaatttgaacaatattctggacggacatttgcaattatgggggaagtgaattttatgcaagatgatgataatcgtttggagattacccgaactaaatttggaagtttgcttaaaagacatggagatttgacagagcggcttgctagggattctgacaagataatatttgagcgtctacagaaggagtttgaaactgcacgaagctttcaaactgaagagatatgtttagacggggaaaaatggaatgatggtctactagc

SEQ ID NO: 24547 - DNA, 265 bp, Glycine max
gataacaatcattattataacggaaacttgtaacttgtaatcaagggagagagaaaatttcaagcacaaaaaatggcggagaagaaagtggtgatcctaggaggtggtgttgccggtgccaaccttgcaaaaactatacaacgtcaagccaacgtcacccttattgatccgaaggaatattttgagattccatgggcaagtttgaggggattggttgagccaacttttgctgaaaggatagtgatcaaccatagagagtacttca

SEQ ID NO: 24548 - DNA, 407 bp, Glycine max
ggatgttcctcagagcggaaaatgttgtcgtttgctccgaaggtgtctcctgccacattcttcgatcagtcctagattaaaaattctgtctttcttcttctgtgaccgaaacagcaatgaggtagcacaagcaggtttcctcgcttaaccggcgacccaccgttctttatctgctgtgcgccgctgcattcttctccctcctcctcttctacatccaatcctctttcttctcaggcaccgtctcttcggattcgccaacaaaagataccgtctcttcagaccgcgactccgagacaatccgcggtttttctaacgttcagtccattgtgaatcaatgtgtggataacagggggcttggactcactgcacatattattgatcattgcaggttaattcttaaataccct

SEQ ID NO: 24549 - DNA, 292 bp, Glycine max
tgccacctttgttacaaacaattcctctggcacgcagcaaggacctgttggaggaagtgatgctcaaattaattgttctgacgggggtggattaactgaacttgagaaactattaaagcagaagactttcaccagatctgagattgatcatttgacagcacttatgcgttcaagaactgtcaatgcacctgtcagggaagaggagaaggggacagaaatggtcccctcagaaccaatgctgctgagtggacaaaaggaatatcccaaatcaactgcactagaaaatgggact

SEQ ID NO: 24550 - DNA, 427 bp, Glycine max
gggtgtgtgtgtgaaatttccttctccctgttgtttaacgtttcttcgtcttttttgtttttgttgataaaaaatggagggtgtgggttgttcggataagggtttcttcaatttgtttttgcgacctcttatttgtcttcaatttttgtaaagagttggtgtagaaggttgttctgtgttctcgtgtgtggctaaattttggagatgagtcatgcaaaagagaatgaggaagcagggcagaatgtacccttggctttggaagaaactcaacagtttgttgaagcacagattcaaccagaagatttggctgctcctgtgtccacagggggtacttcaaatcatgttgaaaacgggaaagtagaggtagaggcacgcgtggaggataaaattgtgaaaccagaagcggattcagagtgcattccactac

SEQ ID NO: 24551 - DNA, 306 bp, Glycine max
ggttctagtgtgtgattgtttgttgttgtaactcgttcttcttcttttgttgttctgtgtttgtgtttgttttttctctcacctgaaaatgtcttgctgcggtggtaactgtggttgcggaagctcctgcaagtgcggcaacggctgctgaggctgcaagatgtacccagacttgagctacactgagtcaaccaccaccgagaccttggtcatgggagtggcacctgttaaggctcaatttgagggtgctgaaatgggtgtgcccgctgagaacaattgctgcagatgtggaccaaactgatcctg

SEQ ID NO: 24552 - DNA, 334 bp, Glycine max
gattacctataatttcagagctagctagttcacagcttcagttcgtttttgttgatcctgtgaacttatggctgacggggtggttctgttggatacatgggccagcatgtttgggatgagggttaggattgcattagctgaaaagggtgttgagtatgaatacaaggaagaaaatctcaggaacaagagtcctttgcttttgcaaatgaacccaattcacaagaaaattccagttctgatccataatggcaaaccaatttgtgaatctgcaattatagtgcagtacattggatgaggtctggaatgataaagttccattttggccttttgacct

SEQ ID NO: 24553 - DNA, 254 bp, Glycine max
ttcctaccaaaactactcttaatgtgcctaattccccgaatatctttcttaatccctcaacaatgaaattagttgaactgcatgattaatggagatgcatcaacaggctacacaacttcgcactatccctatcactgaagcatttagatgctctttctagttctaagggataaaagacatttcccaacgcctaaaccctaaacatagcatatatatgggtgatcagaccaaatacatgggaataagcacaaaaa

SEQ ID NO: 24554 - DNA, 285 bp, Glycine max
  modified_base (61)..(61): a, c, g, t, unknown, or other
gggatgtgaataggagagggataataagaagaaagaggaggaagaaaaggggaaaactcanataaaaaaagaggaagatagatcaagatctcccttgcgtttgtctcagatgaagaaattcaagagcagaacgatactaactcaacggtatcagacgtttcagggtttcagcacttccattttttttttccggatttgacttggaagacaatcaaagaggttcctaattgcttgcattgttcctctgggtggtggatactttgagtattcttaaaatattgacat

SEQ ID NO: 24555 - DNA, 206 bp, Glycine max
gaggaccccaagtgagtcagatgatcgagataacttcgagcagtgtggtgacaatgaaaggactaggaatgttcgtggctacaatgttggtaccatggcaataccatgcgtacgatatgcgtactatacgaatgatcactggctgtacagtccgtactgcggacgtgatatgcacgagaaatacgcttgctggaggatcactcaac

SEQ ID NO: 24556 - DNA, 361 bp, Glycine max
ggtgaaaccgtcatcataaattcatatatcatcagcctcagccatgtcttcttcgctcttgcacctcctcttccttccacaactacgatcttcgatagtgctttctcagattcttccttcgtggtaaccggtcgaatcatggagcccatggacattgttggcaagtcaaaggaagacgcttcgcttcctaaagcaacaatgacaaaaattattaaagagatgttacccccagatgtacgtgttgcaagagatgcccaagatctattgattgagtgttgtgtagagtttataaaccttgtctcgtcagaatccaatgaaggtttgaacagagaggataaacggacaattgcacctgagcatg

SEQ ID NO: 24557 - DNA, 287 bp, Glycine max
  modified_base (255)..(255): a, c, g, t, unknown, or other
ggaagccagcgaagctgtctttcgattccttcgtgcgtgcgattctcctgatatccaaggtgaagcaccgacaccggacctatctccggcgaatccccagtccccactttcttccttcgaaatgaatcccgagtatgattatctgttcaagctccttcttattggagactctggtgttggtaaatcatgccttcttctgagattttctgatgattcgtacatcgaaagctacataagcaccattggagttgattntaaaatacgtaccgttgagcaagatggaaaga

SEQ ID NO: 24558 - DNA, 356 bp, Glycine max
gaatgttgaattatttgactttatttcatgaattttgacttggttgtatgtggttgtgattctttgaatactgagcacattgttttttccttattggctgagatatcaagtcttctttgatatattgctgatttataatttattgacatttgagtttggtttgcattcaatagctattgtaggagatataacaccatctgatggtgtgcccaaggctgaaaagagcagaatggagctggaagctttgaacaaaatgtgtgaacttcttggtggagggatgagagctgaggagatcaaagaactttgggaagagtatgaaaacaattcttctgtagaggcaaatcttgttaaggatt

SEQ ID NO: 24559 - DNA, 422 bp, Glycine max
ggtttcggtcttctttctcacacaatctgggaacagcacacacaaaccattcccttttctcgctccggcaatgaccacccaagcttccaccttcgccgtcgccgttccctccgtcacaacccccttccgcagccaccggaatcccttcgttgttcgagcccaagcggaaccttcagataaatccgttgaaattatgaggaaattctcagagcaatatgctcgtaaatcaggaacatacttttgtgttgacaaaggagtcacttctgttgttatcaaggggttggctgaccataaagatacgttgggtgcaccactgtgcccttgccggcattatgatgataaagctgctgaggttgcacaaggattttggaattgcccttgtgttcccatgagagagaggaaggaatgccactgcatgctat

SEQ ID NO: 24560 - DNA, 395 bp, Glycine max
acgcgccaggccacccttccgttccgatacgacagacggcggaaggcggaggtcataatacgagactatgtgaagggatgtatgtctattctggcctgcaaagctcttccacgcaaacacatgacataacacaacgcaccgctatggatcgcgctgtcccttcaaatcacacactcatgattcattgcgcgctaaaaagagcacagacagctgagggacatccgtgttggccccaaagttaactaaaaaatagatgtgcagacaatagctttggactatgcaaaggagatgatcttgatacagttgctgacaaaagaccactcatgctatacactcctaccgggaaccccaaaattgatggcagacacacacgaatgactgctactatggctatt

SEQ ID NO: 24561 - DNA, 302 bp, Glycine max
gatttgtgagtgtgtgagagagagagcgagcagtttcagacacagagagaggggtttgggattggagggattgacgctgcgtctcttcctcttctctttcgatccatccctcattcctaatcctccaatccaaccacctcagcctcacactcacatatacacatatctgaacgcgtatcgtccctcctatggcttcaaagcgcatcctcaaggagctcaaggacttgcagaaagacccaccaacttcttgcagcgctggtccagtagctgaggacatgttccattggcaagcaacaataatg

SEQ ID NO: 24562 - DNA, 279 bp, Glycine max
tcttttcttgatagcgggtcacatgtataggactaactggggtataggtcacagtataaaagacattttagaggcacataaaggtccatttacgggccagggtcataaaggtctatatgagatcctaacaacgtcatggcatgctcaattatctattaacctagctatgttaggttctttgaccattgttgtagctcaccatatgtattctatgcccccttatccatacctagctactgactatggtacacaactgtcattgtttacacatcatatgtg

SEQ ID NO: 24563 - DNA, 345 bp, Glycine max
  modified_base (291)..(291): a, c, g, t, unknown, or other
ctattcctccggttagcttggaagaagtattcattcgtcccattttcaacggcggcgcgtgggataatcaatgttcaaaaataaaatttagaaaagaatattcactggaatggaaattaatacctcaagccaaagaacatttggttgagtgtgtgccttgatgaaataatcggttccccacttgatggcctccagagcgtgagcgtactcgccggcagcagcgatttgttcgccgtattctatagcaccccatgagaggaagtgttatggtgaaagccattggcaacccanatttcacattgtcccctgcatcattataccctccaccaagtccactaactgcct

SEQ ID NO: 24564 - DNA, 464 bp, Glycine max
gaagacgacagaagggggtgtgtgtgcacggcgtcaggtaaggtattacggggtcactcacacatccacatccactctctcttcttcttcttcttcttcttcctctccacgacgattaataataataatggagcagcttcaaacacccaccaccacccataataacacgaatccagaaacctccaactccaacaatggcgatcttttcttcgaagacttcgacagcacttgttccaccccttacgttagcgccccttccagccccggccgtgggcccctcccaggcttcttctacagcgctccggccagtccaatgcacttcgcaatcactgccgcatcgtcttacaagaacaccccttcttccggaccaatgggctacgagttcgaattctccgcccggttcgggtgctctggttcggccgggtccggttcgatgagctcggccgacgaactcttcctgaacg

SEQ ID NO: 24565 - DNA, 186 bp, Glycine max
gtctcttctggtctgatctgttcttctacgcaaacacataacataacacaacgcaccttttcttctgtttctgtaccttcaaatttcaacttcttcatccattttgtgctccaaacagcacaaacactgcaatcacaccgtcttcgctttctactcatctaaaagatagatgttcatggtttgctt

SEQ ID NO: 24566 - DNA, 153 bp, Glycine max
agagagaaattaaggcacagccctcgctactatggtcccataaaccttttaaatatataggtgatgcagcagtttaatcactgtcactgctgctgctgctgtcatggccatgctcatggccatgctccttcttcttcttctccttctgtcgtc

SEQ ID NO: 24567 - DNA, 267 bp, Glycine max
accgctcgtacgagctgttgaaaggggttttctgagggggaaatcttatttgtgactggcggggtaatcctcaggaaccatctatcatacatggtttttataaatatgatgaattgacaccggcttttgctagcacctacttatttttgatgaattaactttttctttatttatcgaacgcccggatagaacaaacaagttttttttgttctttcttcaacaaaatctgatctgatagtatacccctcagtcggataataacttata

SEQ ID NO: 24568 - DNA, 333 bp, Glycine max
  modified_base (279)..(279): a, c, g, t, unknown, or other
  modified_base (302)..(302): a, c, g, t, unknown, or other
catccatgaatggagcccctggccttgacctctcatctattgcacagaacccttcaatcatgccgagtaatcataactatcatataatggcagcagcacaagctgccagtgctcagttgaagaagagttatcatgccgctgaggaagggaaaaatgtagttaattcttctaatctagacgaagatagaaaagcaatatctgctggaaaaattccggcaacaatgggacaatccattgcattcggaaggccagaagtgtctgatccctcattagcgtcgntatcaggtggcaacaatgtgatngatacctcggggtcgtaatctaaaccttggg

SEQ ID NO: 24569 - DNA, 315 bp, Glycine max
cagtcccgctgcatcggcgagctctccttccgctccgaagttaaaggcgtccgtttccgccgggccggattgtggtcgtcctcgcccacaagatcttcgtctacaacttctccgatctcaaggtgctgcaccaaattgagacgattgtaaaccctaagggcctttggcgacctttccattgtttccgccacgatggtgttggtgtgccccgggttgcagaaggggcagggtagggttgagcactacgcttccaagaggaccaagttcatcatggctcatgattcccgaatcgcgtgttttgcactcacgcacgat

SEQ ID NO: 24570 - DNA, 282 bp, Glycine max
  modified_base (99)..(100): a, c, g, t, unknown, or other
  modified_base (115)..(115): a, c, g, t, unknown, or other
tatgtgttggttcatcactcactcgtgaacacaacatgtgcatataactagctaccttttatttttggtgttcatggctggcaagctagttatagtctnntgggtgctttcattntctactcacttttttctagtttctttgttttgcctctcacatggggggtaataatatgttggaatattcaaatattgcatcatgggtcatgcatgacatgaatcacggcactaatgcaccattttgagggggttcttttttcttttctttattttttgcagagaaat

SEQ ID NO: 24571 - DNA, 379 bp, Glycine max
gggtcttgggggggaatggttggtggtggaacttcgtcttcttcttttggtggtctgtggttgggtttgttttttctctcacctgaaaatgtcttgctgggggggtaactggggttgcggaagcttctgccagtgcggcaacggcttggggggcttgcagaatgtcccagacttgagctacactgagtcaaccaccaccgagaccttggtcatgggagtggcacctgttaaggctcaatttgagggtgctgaaatgggtgtgcccgctgagaacgatggctgcaaatgtggaccaaactgctcctgcaacccctgcacttgcaagtgaggtgttgggagagcaagcttcaagcagagatagcccttaattaggaataat

SEQ ID NO: 24572 - DNA, 335 bp, Glycine max
  modified_base (162)..(162): a, c, g, t, unknown, or other
tcggccaagccttccgaccggttgcaagaggccaacagagggggaatgaaatcttattggaactgtccagttcacccttgggaaccatatcacatccgggtttgatgaaatgggtgaatgaaacgtttttgtaggacatattatcttggataattcactatntctttattttccgatcgcctggaaagaacaagatgtttcttttgttctttcttcaacaatttctgatctctagtagacctctcagtaggattcgaactcagatgaagttctgaccatctgtcagagaaaaaagaacgagtagctctgtatcaatggaatctcatcatccatac

SEQ ID NO: 24573 - DNA, 329 bp, Glycine max
  modified_base (28)..(28): a, c, g, t, unknown, or other
aggaccacaaagacgacagactggcggnccgggtggatccgcgagctctccttccgctccgagaaaaaagaaaacagaaacaacgcgaccgctttggaggtctactcgtccacaagatcttcgtgtacaacttatcctatcttaaggtgccccaaaaaatagtgacgagtgccaaccctaaaggcctttggcgacctttcacatgtttccgccacgatggtgttggcgtgccccacattgcacattgggcaccttgcggttgagcactacgcttccaagaggaccaagttcatcatggctcatgattcccgaatcgcgtgttttgcact

SEQ ID NO: 24574 - DNA, 224 bp, Glycine max
gacgacagaagggagtgacaagacagaaaccagttcttcagtagaattgaactctggcaactttgatgaattggtgatcaaaagcaaagaactctggattgtggaatttttcgcaccttggtgtggacattgtgagaaattagctcctgagtggaagaaagcatccaatagtttgagagggaaggttgaactgggccatgttgactgtgatgctcaaaagagtc

SEQ ID NO: 24575 - DNA, 352 bp, Glycine max
catacacgcaccttagttactcttgaggtcctattgtggaagaataacccaaaattgaggctttaactttttggtttttacttgtattactgtggtaaagttgtgccttggtgacttgttggtcatcggttcgaatccggaaacagcctctttgcatatgcaagggtaagactgcgtacaacatccctccctgataccttcgcatagcgaagagcctctgggcaatgaggtacgaagttacttgtattactgtggtaactggactaaaatctgctggttgggagtggaaagtaactttgagatgctacataaaaccacaattttgctttgcctctcttggatgtgtgaatat

SEQ ID NO: 24576 - DNA, 368 bp, Glycine max
gggtggaaaaacactcaatcaacacacatgattgaagtgcaagcaaatgccatggagcagagttggtgggccaatatgcctcacgagcttctcagagaggtcctcctccgaattgaatcgtcggagtccacgtggccgctgcggaggagcgtcgtggcttgtggcggagtgtgccgcacctggaggaggctcatcgtcaaggagattgtcaagccacctcaattctcttccaacataaccttccccatctctctcaaacagcctggcccgagggaacatctacttcagtgcttcattaggcgcaacagtgcctcacagacatattatctgtttctcagtttatctagtgccctagtagctgatgatgg

SEQ ID NO: 24577 - DNA, 313 bp, Glycine max
accacctggaatggcttggtcccaaatttgatcaaattgatcaaaataataataaccttaacgaatgaatctaacataaaaatactagtcttcccaaactattcaaacggattattcaagacttaataccatggcttatggcaaatgtctacaagaatcattggattcagtctcaaacgggaatctaaggttcactcagcatgaacaacagttgtttatattgcaaattacattgatggcgtacaagaacatacaaatatcgacatcaacagttgtgagactagtcataaaaatacacgcaaaagcaagatgc

SEQ ID NO: 24578 - DNA, 247 bp, Glycine max
gggcggcaaaacactcaatcaacacacatgattgaagtgcaagcgagtgccatggaacaaagttggtgggccaatatgcctcacgagcttctcagagaggtcctcctccgaattgaatcgtcggagttcacgtggccgctgcggaagagcgttctggcttgtggcggagtgtgccgcacctggaggaggctcatcgtcaaggagattgtcaagccacctcaattctttttcaacataacccttccca

SEQ ID NO: 24579 - DNA, 305 bp, Glycine max
ggggtttcaaagtggacagaagagagcgtcctagtcgcaaccctaataagaagaaccacagcttcaagcgagtgacatccaccagccatgggtcgtatgcacagccgcggtaagggtatatcctcttctgctttgccctacaaaaggacaccccctagctggctcaagatctcttcgcaagatgtggaagaaaatatctgcaagtttgcgaagaagggtttgaccccgtctcagattggtgtcattcttcgagattctcacggtattgctcaggtcaacagcgtcactggcagcaaaatccttcg

SEQ ID NO: 24580 - DNA, 265 bp, Glycine max
gagggaaagaaacgcactttttggttttggttttggatttcgatctcactgcattgccttctgctactgctagttgcatgatggttgtgcagaactttgtagttgatttgaataaggcccttgttttccaggttgggcatcttggagaagcttatgaagagtgggttcaccagcccattgtcagcaaggaaggcccccgtttctttgaaaatgagattctggagttcttgacgcgcacagtctggtgggcaataccagtcatttg

SEQ ID NO: 24581 - DNA, 414 bp, Glycine max
gattgattgtctgcttttaaaataaaaaagaaaatgggcgaccaagaagtttattagagacttgtagaagagccatgttaatttcttgaggatcaatatcaagtgaaaaataatgagtatgtatcctctacgtttcctttaagcaggtatctttgagtaggaagtaaaacgaaactttttcagagggagacaattacattaaaagtacaagaaacaataagcaataatcaactcatgaagcttgttgaagagttctcgtattgaaggaaataattgactattggaacattggtaatattaatggtattaagtgttgtcgtggtcatgtttttttcctcaatgaatatagtaaaaactttttattttctataaattaggaatctagatcttttaagtttcattcttattattttg

SEQ ID NO: 24582 - DNA, 390 bp, Glycine max
  modified_base (235)..(235): a, c, g, t, unknown, or other
gtcctacaattttgtttaagagtctactttgtgatcatttagtatataccaatacatgtgtaaaaataatcatgtcattaaactttataagaatcaaaattgacttgtttgtatgatataaatatatttttcaatatttaatatgatattcataataatttatttaacacatattttgcaatagaaattctaaataagacataaatttatctgagttaaacttaattataagctntagcctgattctatatatatatatatagatcaacattaacatatacgcttaacatttaaaaagataaatataagattatattattaatattaataataataacttttggttattatttttaaataaaatggagtggttaggcctaaagaattttt

SEQ ID NO: 24583 - DNA, 307 bp, Glycine max
caatcctcagctaactcgtgcgctggacattatcttcatcctgcatgcagaacatgaaatgaattgttctacatctgctgttcgacaccttgcatcaagtggcgttgatgtatacactgctattgccggggctgttggagctctttatggaccacttcatggtggagctaatgaggctgtcctcaaaatgctgagtgaaattggaactgttcagaacattccagagttcattgaaagtgtcaaagccaggaaacgaaagctctctggttttggacaccgagtgtacaaaaactatgatcccaggggc

SEQ ID NO: 24584 - DNA, 321 bp, Glycine max
tgtctcaaagatgattccagcatctgacaagggcagattttttgcttttggtcgtgtattctctggcagagtttcaactggtttgaaggtgaggattatgggaccaaattatgtccctggggagaagaaggatttgtatgttaaaagtgttcaaagaactgtcgtttggatgggaaaaagacaggaaactgtggaagatgtcccctgtggtagcactgttgctatggttggtttggatcagttcataacaaagaatgctactttgactaatgaaaaggaagttgatgcccatcccattcgagctatgaagttttctgtctc

SEQ ID NO: 24585 - DNA, 418 bp, Glycine max
ggattgattgtctgcttttaaaataagagagaaaatgggcgaccaataagtttattagagacttgtagaagagccatgttaatttcttgaggatcaatatcaagtgaaaaataatgagtatgtatcctctacgtttcctataagcaggtatctttgagtaggaaggaaaacgaaactttttcagagggagacaattacattaaaagtacaagatacaataagcaataatcaactcatgaagcttgttgaagagtcttcgtattgaaggaaataatcgtctattggaacattggtaatattaatggtattagttggtggtgtggtcatgtttttttcctcaatgaatattgtaaaaactttctattttctattaattagggaatcttgaatcttttaattttcaaatcttattattatt

SEQ ID NO: 24586 - DNA, 388 bp, Glycine max
gactgtcctttgtgtttcgatacgaacaaggcttccttctcagaacctccgccaaacttagcggcgatttttccaacttccatttcccccctcaccttcttcttatacccctcacactctcttcttcctcgtccaccccatttctctctctttctaacaatggctcaggtcgtggcttcacgatccattcaaagcaccccattgtgccccacttctggatctgcacgtgacagaacccaaaacctgttaaagcctccatcttttgcttccaaggtgttccctttgggagagaacaataacaaacgctccaaactcaggctcagaagccttcagatcagtgcagggaaatctgccccttctgaagtcatccccatgtcacccgaagatg

SEQ ID NO: 24587 - DNA, 427 bp, Glycine max
gaagtgcgttagaacagaaaagaagtgcaaacaaggcgcacataataatagtacccttcttcttcgtttcttagctctccactcgcctattaaccctcaccggaatctctgattcgatcttggttttcccatatagcacaagacatagagccgtgtgaatttgcgatatgctgggtaattgtcgccaatacccaatctcttgggtactcctttaccaacccccaccgccgcattaattatttttctcttggaatcggacaaaggttccactgagactgaaactttttaaggccaaaaaaatgctcgattcggttcttctggcgcttttcttgccgcgccttggcatgagcggcgtttttatcttctacatgtgccttctatggtacgccactacccgcctaaaccaaccccccattgacggtcaacc

SEQ ID NO: 24588 - DNA, 380 bp, Glycine max
gacccacgcgtacgaccgccagaaaacaacaaaaggggacagatccgaacccaggcacaaaatccacttcagtgcggcataaatcgacaaagacaaccaacggggaaaacactgtatgaactgaccaactatcttcgtctctctctcgattcttccaaacggtgcttcgatcggaaaccctaactatcacttacctccgtcaacggagcttagttctcgtcgacgcctctacaatccttcactatccactaacgagcaaccacctgcggatgatgctgctggcgaagatgaaactactactggcaagggccgtaacaataaatatacaaagcgttgctgtatatcatcaaactcagatatagtttatggccctgattcac

SEQ ID NO: 24589 - DNA, 339 bp, Glycine max
tactgtgatttcattaagtggatgtgaatcttttaccttttgaattttttaaagtaaatgtgttttaagaaaaattaattaatttcgcatggttttctttccttttattattatgtgtttaaaaacctttaaattaattatgtatgattttatttccttttattatttatttatatttgtgaggggtaggggtggttctggcttccagaacccttcatcttcatcatctatctcgtcgtctgtgtctccatcatgttcatcgcaggaacaatccaaatcacacatttcaggagcaatatcccaaataaagtgtccttccactttattcgtatgtatcac

SEQ ID NO: 24590 - DNA, 423 bp, Glycine max
ccaccgaaggggagaagggaaatgaagaactactggtagggaggagtctgcttggcgtttgctgatgaagtattatgctggctgtatggaacaatcaaagaaggggaagaatatattttgcaggttgctccacctttcaacccgttaaagcttctgcaagcccagtcttgcccagatgtaattactagtcatctggagcttttctgaaaatttggagaccttaacagttattattatttaaacaattcaatatacgaaggggaatcaaccctggatttttcccctccgctttgatcagtccacgaatttttagtataggggcaccctctgtgagtgctgagaaattgcattgcatctccatagaaattgtggaaatattatggccctacttaagtggaatataagtcctttcaactttattgc

SEQ ID NO: 24591 - DNA, 295 bp, Glycine max
gggaccttgggggggtggatgcttggtgtgttggatatcatagtgaagcggatgctcctagacgccggcttgctcaaccgctaatcttttggagaactgagagtgactgcccgactggaaatggctatgcacgtccagctggacgaatccatatactcgtagacatgcagaatatggcaattcttgagcttgaacacctgcaactaactccccttccacctgctgatccattgataaattatacttgtggtgaaactaggggaggagttgatcgaagcgatgtgaaaccattaca

SEQ ID NO: 24592 - DNA, 414 bp, Glycine max
  modified_base (375)..(375): a, c, g, t, unknown, or other
gaagagagagagagcgatgggtgtgaactccaacagagtggaacactttgctagccatgatagcgccatcgaggagacaatgcaaatccatgcagtgcagttgccaccacaccagaccacactccacaaactcaggcacagagtctccgaaatcttcttcccagatgaccctctccaccgtttcaagaaccaaactcgctttaaaaagttcctcctcgcacttcagtatctcttccccattttcgactgggccccaaactacaatcttacccttctccgctctgacctcatctctggcctcaccattgccagcctcgccattcctcaggttcacaacatttagccacccaaattgctttttttcttatatagctngcttgatttgcatgtttaaatgtaattttcatgtttttt

SEQ ID NO: 24593 - DNA, 344 bp, Glycine max
gggtctaaagaacatggtttggagattcctttggcctatttgacaatgttttagcaatttcccatcttttgatactttcaaagactgattcttttggattcaaatcctttcaatttcgttccattgaagaaaaacttaatctggttcgtgcttttcttgcccgagttgacgtttgcaggcaacaagaaaatgagcaaaaactggaaatctagctgctttcgggatcctgggggagttctgttccttcttgtgttgtgtttgttgtttcagaactttagtttgtgctgctctttgaatgaagaaggtaaagctctttttgaagttcaaacagggaatagtaaacg

SEQ ID NO: 24594 - DNA, 372 bp, Glycine max
aatgcttcaaatccatgcactgattatgtcactcagttacgctagaattgaaatcaagactgcacagtctctagaatcttggagtggtggtgttcttgtgatggtttctggatctgtgcaagttaaggactacagccggaggaggaaatttatgcagacattcttccttgctccccaagagaaaggcttttttgtgctcaatgatatttttcactttgttgaagaggatccagttcaccaacaacaaccagtcttgttacctcagagcaatcttgattcaaaattgaatgcttcaagtgcaaccaataaacctgtgtccaactacctgctgggtggagatatccaagctagggactacgttgctacaaatga

SEQ ID NO: 24595 - DNA, 341 bp, Glycine max
ctgtccataatcggattttgatgcatttgatatgatatgggtgtggtgtttgaccagtcctaaatgggtagtccccattataataccacatttgttcccattagagtttgggctttatgacaacttgaaaatggatgcacctaccaacaacacttcttttaatacccatgctgctgccaatgtctgtttactgtgtcccaatacagcagcgcaacaagggtagttctgtcattttacactttttgtggagggaggttttgtagtagggtcacatgcccccaaagtgattcacccaaatccaaaaatgagccttaaattctggcctaatttggttaattggt

SEQ ID NO: 24596 - DNA, 294 bp, Glycine max
tggagccctttgtttcatggaaagcagctggggcgtacttcaaacgctcatgatgctaggaccttttggagtcagattgtgtgggtggtctccaaaaaagcctacacttttggctaaaatggaagcggcattgttgtgcatcgcgatgttatttaggtattacgacctcttaggaagtatcactttgatgatgcttgcgtctactttaccaaagatgttgatagttactccccatattatgtcttctcaagccttctaccatttaatacgagagcacctacaattaggaaaata

SEQ ID NO: 24597 - DNA, 381 bp, Glycine max
  modified_base (368)..(368): a, c, g, t, unknown, or other
tcggccacgcgttcggccacgcgttcggccaagccttcctaccggttgcaaaaaaacaccaaaagggaaggaggtcaacctacatatattctttggatgggttaagaaaactttcccaagcatttgcaccggttaatgcttgttattggggaacatatattttgaataaaccttaatgccaaggaaaatttgattaagaaaggaaagtttgtggtgttacatctgaaagggaaacttgcaaatggaaaaaagttgtttgtgatccatcatatttgcctggcaaggtgaagaaagttggtagggttgcaagggcgatagccatcatgagccacccaatccccagcactgatgattcccattcagtgcanattattttaccac

SEQ ID NO: 24598 - DNA, 190 bp, Glycine max
gggttctagtgtgtgattgtttgttggtgtaactcgttcttcttcttttggtggtctgtgtttgtgtttgttttttctctcacctgaaaatgtcttgctgcggtggtaactgtggttgcggaagctcctgcaagtgcggcaacggctgcggaggctgcaagatgtacccagacttgagctacactgagtc

SEQ ID NO: 24599 - DNA, 396 bp, Glycine max
  modified_base (14)..(14): a, c, g, t, unknown, or other
gagattgagatggngtcgtttggtcggagaagcatgtccactgtggcgaaagcggtggaggaaatcaccggcactggcaacaccaagatccgcaaatcttccagcgagctctgcaccttcctcggcatccctcgccaatctcgttccgaaatcgctctcattctctccaagttcatcaaactctataatttcaagagtcccggcattaagaaggacaagatttgggagcagaatttgcagacactgttgcgtggcagaaacaatgttggttttcctgagattgcgaagatactgtctccggaattcggtcatggcgcgattaatgtgaaggacagtagtattggggattcttccggggacgccaccaaggggaaaggccctaaaaaaaaagggaag

SEQ ID NO: 24600 - DNA, 369 bp, Glycine max
cgaccggtggcaaaagaacaacagaagggggaacctttgcattctattcattcaagattcagcaagtgcgttttggaagcagagaccgaaatacttcgagatggcccgtacaaagcaaactgctcgtaagtcaactggaggaaaagctcccaggaagcagcttgcaaccaaggctgcacgtaagtctgcaccaacaactggtggtgtgaagaagcctcatcgttatcgccctggaactgttgctcttcgtgagattaggaaataccagaagagcactgagctcctaatcaggaagcttcctttccagaggttggttcgtgaaattgcccaggatttcaagactgatctgcgtttccagagccatgctgt

SEQ ID NO: 24601 - DNA, 241 bp, Glycine max
  modified_base (215)..(215): a, c, g, t, unknown, or other
tcagacagtatctctcaacagcgtgggatcgttcggtcttaatctaaaaggcaaagcgtgactcgattgtggctctctgagtaatacacttttgcacactgatgttaacgtttcttatcatttttagctattgttattaattgtcacccaccagttcaatgaatttgaacgatcgacccattgaaagagtcttccttacctaattttttaagaantcttcggactctccttgttccactaa

SEQ ID NO: 24602 - DNA, 402 bp, Glycine max
ggaactctttccataaataggtcatcataggttggatgagacctgttttatattcggttagaccgaatacctagcgtagggatatcaagtagtcagttaggtcgagtgactgatactacaagggtaccatgtattaggttaggttgagtacctgatacaaggatattaggtactaggtttggctaagcaactcaaattatagaagtgtatcaggtattcggctagatcgagtacctgatacgaggcatatcaagtactagacttggttgagtacttaaaactataaaggggtatcaagtattctgttgggctaagtacatgatactagggacatcaggtactaggcttgggcaagtacctgaaactatagaaaggtatcaagtattcagttgggtcgagtac

SEQ ID NO: 24603 - DNA, 365 bp, Glycine max
gaatccaagaaagacacgattttgagagcagtaggagacacccgataagaatctgattcttggagcattgccattttatcttgtacattcgcttaatttgtaactacaatggctgaaattgtagtggtttttgacttcgacaagaccatcgtcgactgtgacagtgataactgggttgttgacgagttgggtttcaatgaattgttcaatcggctccttcccacaatgccttggaacactctcatggataagatggtgatggagcttcattcccatggaaaaaccattgaggacattgtgtaagttcttcagaggattcctatacaccccagaataatccacgccattaaagcagcacatgcttt

SEQ ID NO: 24604 - DNA, 409 bp, Glycine max
gattcaactcatgcattgacacatcacaccttatcacgatatcgatcaccttcatcacaaatggagcttctttccttcctcttcctctcccttctcttcttcctctatctctacatccagttcctcgctagaaaaaaaccccgcaacaacaaagccttcaaagactaccctctcatcggaaccctaccggagttcctcaaaaaccgccaccgtttcctcgagtggaccacccaagtcctccgcgactcccccaccaacaccggcgtcttctctcgcccctacaaactccacggcatcttaacggccaaccctgacaacgtggaacacgtgctcaaaaccaaattcgacaactaccccaagggagaacgcttcatccacctcctccaagattttttgggtaacggaattt

SEQ ID NO: 24605 - DNA, 311 bp, Glycine max
ctattgatgactgctacgaagctccattatttttgctgtctaataagaaatagctggaggaccaatgcttagggtctgttggggaacaccatttacaacttctcattaaacacaaactgacgagtgggagaaataaagcttggcattcccattggtggaaggaccttagaagactgtataatcaggctttttttcacaggatgcaatacaatatggtatggaaggttggttgtggggacataatcaaattatgggaggattcttgactgagtgagggctgtatgcatttataaaaaaaaattttggcattc

SEQ ID NO: 24606 - DNA, 320 bp, Glycine max
ggccatcacaaaccctacccttcgggtatctaatccaaatccaagacgatgtcgtattgacctttcgccaacgccaggaccgaaggtcgtcggaaccgctaccaaggcgccggggaccccgattaaaggcgccctcccccagaggataccatggtggagatcccaaagaaccctaaggaagagagtttgcaaaaaaaaagacgcgagggtctccaatcgcagcagattccttcgtcacttcactctactgtaatagaagaagaaagtggaacaccttccagccatgggtacaggtgttttcaccgatgacaataacatgc

SEQ ID NO: 24607 - DNA, 183 bp, Glycine max
gctgcgcaggtaagacagagagaaagaactgacctcagcggcggcggcggcggcaacagaagaacaaccaccaccacacacaatgggtcgcgtgagaacaaaaacggtgaagaaatcctcccgccaggtgattgagcgttactactcgcgcatgaccctcgacttccacacaaacaaaaagct

SEQ ID NO: 24608 - DNA, 418 bp, Glycine max
gttgcaaggtttggagggagaaatgttgaaaatccttatgtaaagatgaaagatttgaagcaaacagggactattgatgactgtatagaagcttttatattcttgtctttctaataggaaattgctagaggaccaatacttggcttattttgtagaacacttgttacaacttaacattaaacagaaactgcagagtggcagagataaagcttggcattcccattggtggaaggaccttagaagactttataatcagtctgatttccacagtatccagtagaatatggtatggaaggttggttgtggggacaaaatcaaattttggcaagattcttgactgagtgaaggctgtaagcatttcaaaaaaaagattcttggcaatatggaaggaagggtagtttattaataatattcaaag

SEQ ID NO: 24609 - DNA, 320 bp, Glycine max
aaggaattatcagattttgattctgggtttttgttggggtggtagagaacaaggatttgaaaaacaggatttttgttttttggagtgcctatgactgattgacggtaattgcgaccgcactcggtcacatttgtctgcaattttccttaatatcaaggaataggataaaactgtgatcgcaatttaaaactttgttggagaaagtgggggaaatgagcatgagtgtggcagaagatgaatctagtgaagaggttcatgttccaggtgagattgattggcaaatgcttgataaatccaagtttttcttccttggtgctgct

SEQ ID NO: 24610 - DNA, 337 bp, Glycine max
acattttgtttgctcacacaatattgggtctatctacactagcccacttttagctcaactcctagctgtccaactcacctgatcataccttctccatcttgtcagatatacatttatttatccaatttatattaactaaactgttttaacccttcaaccaacaatctctattgaaattattattttatagctcccttgataaatgaagttattatcttcagggttattcttcttcatttcttgaacatcggtaccattgtaatccattcaattattttagcgaatatcttttataaagatggccatcattttctcaaccacatgcttcttatttttt

SEQ ID NO: 24611 - DNA, 321 bp, Glycine max
ggctcctattatcaccgtagacggcggaggtggcggtggtggtgtagacacggcgtgacggcgatctcttgagataaatgttggttgaaagaggaagaagaagaagagttgtattgtagaatgagccaaccaacggtgatacttgccactgcgagctatgatcacactattcgtttttgggaggccaagagtggccgttgctaccgcaccatccaatatcctgattcgcaagtaaaccggctggagataaccccggataaacgcttcctggctgcagctggcaatccacacatacgactgtttgatgttaactcaaatagt

SEQ ID NO: 24612 - DNA, 369 bp, Glycine max
aaggatggggttgccaatggcgcacaccaacctcatgttaaaggtctctcctcttcttttaagctgctacttgttgttgggttgctactatgttccattgcttttgctgtggctgcaatattcaaggcccggtcactgaagaaggccagtggggctcgtgcatggaagttgactgcgttccaacgtttggacttcactgtcgatgatgttttgcattgcttgaaggaggataatattatagggaaaggaggtgctggcattgtctacaaaggggctatgcctaatggggatcatgttgctgtgaaaaggcttccggctatgagtagaggctcttcacatgatcatggcttcaatgcttagattcaaaca

SEQ ID NO: 24613 - DNA, 322 bp, Glycine max
gggaaggacaagtggctataacactacttgcatgcagttagactttgatagtttgattagctctaataaggttaaggaccagagagagaaagagaaataagaagaaaaacacaagatgggttattggaagtctaaggttcttcccaagatcaagaaggttttcgagaagaatagcaccaagaaagctgctgctgctgaagccaccaagtcctttgatgagtcaaaggaggaatacaacaaagcctttgaagaaaagaagactgaacttcaaaccaaagttgttgaaatatatgaagcttcatcaactgaaatcaaaagtttg

SEQ ID NO: 24614 - DNA, 371 bp, Glycine max
agaaggggtgggatttagctgccagtaaaacacacgcggaactcatggtggagaatctaatacttgaagttcttttaggtaatctacttgtttgcaaatcagagcgggttactgaaattagcataggaattattgggaaccttgcctgtcatgaagttccaatgaagcatataatctcgacagaaggactgattgagataattctggacaaattgtttatggatgatcctcaatgcctatgtgaaacatgccgtttgttgaccgtgggtcttcaaagtggtgaatctattgcatgggctgaggcattgcagtctgaacatatactatgtcaaatattatggattgcagaaaatacattgaaccttcagctt

SEQ ID NO: 24615 - DNA, 365 bp, Glycine max
gacgccgtgtttcgctatctctcccattctctcgcatctcaatacccttttgatttgtgaaaggaaagcaaacatgcttgatcaggtccaacaccctacaatcatggacaaggttgctggccagctccatctccgttctggtgtttctggtattaggagttatgaaggagcctactgccaccccacaatgtaccaaagaccctcttttgggaattactcgaatgctgcattgcagtatcctgtgatgccctcatgcaaagctactatggatttgtctgctgctgcaacaactgcctcccccgtctttgttgctgctccagcagagaaaggccattttcttatagactttctcatgggaggtgttt

SEQ ID NO: 24616 - DNA, 392 bp, Glycine max
  modified_base (347)..(347): a, c, g, t, unknown, or other
ttacttgaaaagaatcttttctatgatcagactcgattatattctacatgaacaggctccgtaagatccagtaaaataagtaatgtagtatagtctgaattatatcatatgtatttcagtaaacttaatagtatgacaacgcattcatttcctatgcattgattcgatttctgatactatcggagtgaaaaaagtagatctaaagaaaaacgcgggttggattatattagtaacaagtaaattctttgtacgtaaaaagttccaagattttgttggacagaataacaattgctaaagttgagatcacccagaaagcattatcaattttaaaagcctactcgggtatngagcggttattataagtttcttaattagaacctaatttttttttt

SEQ ID NO: 24617 - DNA, 433 bp, Glycine max
ggtcctctttctatctcatttcatttattaaacaaaaccatttttcaacaacataattcggacaccctttatagcaatggagttggacctctgatttctctaactctagctaggattgagaaacaagaacaatatcaacgacaacgagttgaagagagtggttttttcaacttttaataatggcggtggagtatcagtgttgtgaaactcagtttttcttacggttattgataattctgctgcttgtgttgtttgctggattgatgtcagggctcactttaggactcatgtccttgagtcttgttgatcttgaggttctcgctaagtctggcacccctcaggatcgcaaacatgctgcgaagatattacctgttgtcagaaatcaacatttgttgctttgcacccttctaaattgtaatgctgcagccatgga

SEQ ID NO: 24618 - DNA, 200 bp, Glycine max
gcaacattaatagtgctaaaagcattggtggcaataaccgcaacagtgatagcactaaaagcggcgacaatagcagcaacaaccgcaacagtgataacactaaaagcggtgacaatggaaacaaccaccacaacattgatgttgcttatggcaatggcagcaccaaccgcaacaatgatagttctaaaatcggtgacaat

SEQ ID NO: 24619 - DNA, 372 bp, Glycine max
gtctgcatggatgactgatgaagaatttgcaagagaaacaattgctggtttgaatccaaatgtcatcaagattattgaggagttcccactaagtagcaagctagatactcaagcctatggtgatcatacctgtataataacaaaagagcatttggagcctaacttaggtggtctcactgttgagcaggctatccaaaacaagaagttgttcatcttaaatcaccatgactatctcattccatatttgaggaaaataaatgcaaataccacaaagacttatgctacaagaaccatatttttcttgaaaaatgatggaactttgaccccattggccattgagttaagtaagccacattctcagggtggagcata

SEQ ID NO: 24620 - DNA, 335 bp, Glycine max
cccaacacaatggaatcatgattttgttgtatattttttaaccaccctagacataacaatggaaacacgattttcgttttagcattgctacaatgaaatcacgatttcgttgaacataaatttgcgaaaaaaatacaattgtagtggggtaagggggggaaatgaggagaagaaggtccaagaggaagagaagcccaagcccaaccccgaagagaagaaagaagagcctcagattgtgacggttctgaaagttcacatgcattgcgaagcttgctctcaggaaatcaagagacgcatacagagaatgaaaggagtggaatcagcagaacccgatc

SEQ ID NO: 24621 - DNA, 369 bp, Glycine max
ggagaaaccacaatccccgaaaccttcttctataaagaagaccttcatccaggcaaaacaatgaaagtacaattcagcaagcctccctttcaacgaccatggggtgttggtacatggttaaaggaaattaaagacactactaaagaaggatatagttttgaagagctatgcatcaagaaagaagccattgagggagaagagaagttttgtgcaaaatccttgggaacagtaattggttttgccatttcaaagctgggaaagaacattcaagtactttcaagttcctttgtcaataagcaagaccaatacactgtggaaggagtgcagaatcttggagacaaagcagtgatgtgtcataggctaaatttc

SEQ ID NO: 24622 - DNA, 365 bp, Glycine max
ggtgaaggggaaaaaaaaaagagtagagtggataatggcttcgttatcgctttgcatagccatgagagcacccactccctcagcttctctcattctcactaccccaaaaccatcttcactctctttgaaccttacccgcacttgctccagcgctcgctctccgctcctccattgctccttcctctcttctccttcccatctctcttccccttcctccgtttcaggcttgtcacttggattggatttgacatctaatgttgggaccagaagaggaaaaggttctggcctagttgtgagggcaggcaaggctgctctttgtctgactaagagaagcagatcaagaaaatcattggcacgcactcatg

SEQ ID NO: 24623 - DNA, 299 bp, Glycine max
atattccttcaaattgatgagttgtctttacatccatgtgtcacaaactcattctaccaagtgttagccacaaaactatgatgccaaacttaaccaaccctcaaccttttcctcgtgcaactttttccagctagaaactagaatagaaacccaacagaatatttaagagtgatgaatcaattcattacactctctctatatatttttaacacactttctttatatattttaatataagtgaaggtaatgcatgttatctttgtaattattgatgccagaataattaaataacatttttt

SEQ ID NO: 24624 - DNA, 349 bp, Glycine max
caagtaattgccaaaatttcaaggcttatttttaataaaagaataatatagttgaataaactagttaaattggttaaagatttacaactgcaaaaaacaaaaatatttaatttataggattttgaacatttttaaagtttttattattttgtaattcaagtttgtacttaaaattattgaatttgcatatttaatttctcttgtttcaaattctttagccatccacggaccacggtttctactcatttaaattttctcgtaacacataattctgtcgtagttttggtattagaaaaaagtacaagaatgctgagaaaaggacaagggaaaaaattggtaaggttatatt

SEQ ID NO: 24625 - DNA, 289 bp, Glycine max
gcgagaagacgacagagggggacacaccgtttgttctatacttaactcaacttctgctaccgactcacttcttccaagtacaaccacgcttttcactacagtgatgggcaacgtcaagatcggaatcaacggatttagaacaattggccgtttggttgccagagtcgctctgcaaagagacgatgtggagctcgttgccgacaacgaccctttcattaccaccgattacatgacatacatgtttaaatacgacagtgttcactgacactggaagcatcacgatgtcacc

SEQ ID NO: 24626 - DNA, 162 bp, Glycine max
gatcaccgagtcgtgttgcgattgaaaatggggagcgatgttgtagaatctatgcagtagaggcccagataatctcctctctcttccgactaatactcatgggatgctacttgatcaatatactgtactgacatttcttattatggaggaagtgttttttat

SEQ ID NO: 24627 - DNA, 312 bp, Glycine max
tacgagaatccacgaaaaaaaacatcatctattatctctcacaactagacagagagagataacgactgaggggacatttcaccatgctacttattaatttctctatagaagctccatctctacataatcatatcatttaattttccctaatgataatgcactactactaactcattcataattacctctccacatcaagaactccttctactcttttatcctacacactccttccttcttatactgcgcatattacaccgagatcctccccttcgcatcttcactttccaccatttcacaggaaaacaatca

SEQ ID NO: 24628 - DNA, 246 bp, Glycine max
gacccaatcttccgttcggctgacacaacactaccgaatgctaccacctgctagaacacctcagataggctgataacattcaccttatctaagcatatataatatatggtaagaagattataatatgcatcctacttagaatttctatcatttgtgtacatgtattcgaatatttcaactgtaatctaagtacatcttacattaattaaatgttccccaatattaaccatacttaatgattaaacc

SEQ ID NO: 24629 - DNA, 437 bp, Glycine max
ggcacatcaaattctttatttataacatggagtgcgtctgtggaaactttggaaagagatcttaagaacacgaggaaatactacgggagtggaaaaacaaaggaagcaccatggagagaatcacagcttaaagggttgcacaattttctcgtggaaaaagaggaagaaattgtgacggccctcaagcatgatttggggaagcattacgtggaggcttttagagacgagcttggaacattaatgaagaccttaaacttggcaaccaagtctttgaaaaattggatggcggggaaaggggcaaagctgccacgaatagcactgctctcaagtgcagaaatagttcctgagccacttggtcttgttctcataatctcatcatggaactttccctttggactttccttggagccactgatcggagcagtagctgctgggaa

SEQ ID NO: 24630 - DNA, 412 bp, Glycine max
gaatcccgcaaggtaaacgacggtgacgattggtgggtggcgccgtacgcctcatcccatccatcgccatcggcaccttccttaaacgacatcgcgtccatcaccccttttctcttcctcacagtcacagcagtggtagcttcccaaaaaagagtgccaatggcatcttcttcagactcatgggtgaaggaatataatgaagcactgaaacttgctgatgatatcagtggcatgatttctgagcagagttcatttcctgcatctggaccagaaacccagcatcattcatctgctataaggagaaagattacaatattggggaccaggcttgatagcttgcagtcccttttgtcaaagcttcccggcaagcagcccatatctgagaaggagatgaatcggcgcaaggacatgc

SEQ ID NO: 24631 - DNA, 124 bp, Glycine max
gaacccactgtaaatgttaatggcactgaagatacattagggaaattgctatctgaccattgctatctcctttcattaccttagatgtaatatttcttaggttagcactgtgccactaacaatt

SEQ ID NO: 24632 - DNA, 408 bp, Glycine max
  modified_base (389)..(389): a, c, g, t, unknown, or other
ggaagagtgaagagaatggctcccaagggtttaacctttctggctgtgttaatatgcgtttcagcactgtcactgagtccttctgttgcgggggaagggcaaaataatggccttgttatgaacttctacaaggaatcatgccctcaggctgaagacatcatcacagaacaagtcaagcttctctacaagcgccacaagaacactgctttctcctggctcaggaacatcttccatgactgtgctgttcagagttgtgatgcttcactgttgctggactccacaagaaggagcttgtctgagaaggaaacagatagaagctttgggttgagaaatttcaggtacattgagaccatcaaagaagctttggaaagagaatgccctggagttgnttcatgtgctgatatcctc

SEQ ID NO: 24633 - DNA, 427 bp, Glycine max
ggaccggagtagaatgccactataacaggacccgggtccaaagattattcttaacgggtcaaaaacccgaaaccatgttatcgggtaccatctcacccactatctcaaaactcaaactcctcgatggactctacctcataaacctcatcaacatttcgggtcccttcccaaatattcttttccaacttccaaatctccaatttatctatctagaaaacaacaatctctcgggtcgaatacccgataacatcagtaaccttacccgattagatgtactcattataactggtgaccggttcattagacccttacacgagttcaataaccaaggttactcatctcactcaggtcaaactcggtgacaatgttctcaccggaacatttgcccaaggaattgccaagctcgttaatctaacctatttgagtc

SEQ ID NO: 24634 - DNA, 428 bp, Glycine max
  modified_base (361)..(361): a, c, g, t, unknown, or other
ggcacatcaaattctttatttataacatggagtactctgtggaaactttggaaagagatcttaagaacacgaggaaatactacgggagtggaaaaacaaaggaagcaccatggagagaatcacagcttaaagggttgcacaattttctcgtggaaaaagaggaagaaattgtgacggccctcaagcatgatttggggaagcattacgtggaggcttttagagacgagcttggaacattaatgaagaccttaaacttggcaaccaagtctttgaaaaattggatggcggggaaaggggcaaagctgccacgaatagcactgctctcaagtgcagaaatagttcctgagccacttggtcttgntctcataatctcatcatggaactttccctttggactttccttggagccactgatcggagcagtagct

SEQ ID NO: 24635 - DNA, 342 bp, Glycine max
ggatatggcctacatagtgtatgtcaccctgggcctcggttaccttctcccatggaacgctttcatcactgccgttgattacttctcctatctctaccccgatgccagcgttgaccgcatcttcgccgtcgtttacatgttgatcggcctcgtggggatcttcctcataatcttctacagccacaagtccaacgcctatgtgaggatcaacgttggcctcgccctcttcgtcggttctctcctcatcatccccctcctcgacgccttttatctcaagggtagggtcggcttgtatagcggcttctacgtaaccgccgccgccgttggactttccgccgtggc

SEQ ID NO: 24636 - DNA, 382 bp, Glycine max
gggagaagacgacagatcgggcttctggttcttgaacctcgaattgataatcctatgaggaatttactatctagctgttcagattgaacgagtgccatacttaattcaatcacgcccatgaaacatcgcttcatcttgctattacttttctgcttagttcaatctctataccttccttgcatagctcctcgctatttccaaataggtgaccccctctttgacaaaaacaacaaggtatcatactccaatacttaacttgcatatgaccactaattcttgaagtattgcacacccaaaacgatattaaacaatgcataaactttgacatagggtcttagaacgaatcgtatcgataattcagaatatacatttcatatgaaga

SEQ ID NO: 24637 - DNA, 324 bp, Glycine max
ggcattggacagagagtgttagcaccaaaaatagcgaagttaatcttcgtggtgccttgcactaattcctcttctctgcacctacctctcgccagaaaaaccctcagatcagcgcatcctcattttgctcgatgacttcgccatcaaatcctctcactctctcttcttcaactccctcaaatctctcggcttctatctccaattccacctcaacgaccaccccaaaattgcgcttcagagatactgtcagtacctctacgactccctaaatctctttttccccaccattgaacgttttgaaggatccattgacgcgtctgcaat

SEQ ID NO: 24638 - DNA, 156 bp, Glycine max
gggcactcatcccatcattcttagagattactttacagagtgaggctactctaatccgggcaatcattggccaagctaaatttgccgctacatctgctaaactttaacaaacttttgccactaaccacaacctttattgagcttatttcatttcct

SEQ ID NO: 24639 - DNA, 279 bp, Glycine max
  modified_base (243)..(243): a, c, g, t, unknown, or other
actagaacagatagtgaagatcaacaaattttaagtactcattatagcccaggatcatcttcccatgcaacaaatgggggagctgtatcacctggtaaaagtaagatgagggatattgcaaatgagtttgagccttgctcgaagcttgaggacctaaatttggatgttagaaagaactcaaaggagacagaggaaaaatttctctctgacaattttttccagaggcttgaacattcaagtgtncccgttcatgaaataatattttccactggtgacaag

SEQ ID NO: 24640 - DNA, 284 bp, Glycine max
attgtgaaactaatggatagacgtactcagtatacatatattgagagtggagggttgtgtgaagaagttgctatgccttgttgggtttgtggtgttagtgagtactattggtggcgtggagagtgctcgtaaatgggggaaatctacaaccactgataatgaggcttataagctcgcaccatgtgcctcatctatgcatgatgagaatgatagtgtttctcagaggtgctgtgctcaagtgaagaatattgtgcagaaccgtagatgcctatgtgcagatcttg

SEQ ID NO: 24641 - DNA, 383 bp, Glycine max
ggcagcgcttgatttgaggccaggcaagccccacgcaaccagcacacctctcctcggtcacgctacccctttctgctcttcttctacctttcaagttttaaaagtataaagatggcagagacattcctatttacctcagagtcggtgaacgagggacaccctgacaagctctgcgaccaaatctccgatgctgtcctcgacgcttgcctcgagcaggacccatacagcaaagttgcctgcgaaacatgcaccaaaaccaacttggtcatggtcttcggagaaatcacgaccaaggccaacgttgactactagaagatagtgcgtgacacctgcaggaacatcggcttcgtcttaaatgatgtgggacttgaatccgacaactg

SEQ ID NO: 24642 - DNA, 418 bp, Glycine max
aaccaatgctggaaattggttgattgggggtgacctagaggtcattgaaccaattcagtacaatgatggacttgatcattttcgtctatctccgacacaactccgtgcagagttcacaaggcgcaatgcggatgctgtgtttgccttccagctccggaatcctgttcacaatggccatgctttgctaatgactgacacccgaaagcgccttcttgagatgggctataagaatcctgtcctcttgcttcatccacttggaggctacaccaaagctgatgatgtcccacttgattggcgaatgaagcaacatgagaaggtacttgaggatggtgttcttgatccagagacaactgtggtatccatattcccatctcccatgcactatgctggacccacggaggtgcaatggcatgcaaag

SEQ ID NO: 24643 - DNA, 429 bp, Glycine max
ggaccggagtagaatgccactataacagcacccgggtccaaagattattcttaacgggtcaaaaacccgaaaccatcttatcgggtaccatctcacccaccctctcaaaactcaaactcctcgatggactctacctcataaacctcatcaacatttcgggtcccttcccaaattttcttttccaacttccaaatctccaatttatctatctagaaaacaacaatctctcgggtcgaatacccgataacatcggtaaccttacccgattagatgtactcagtttaactggtaaccggttcatcggacccgtaccgagttcaataaccaagttgactcagctcactcagctcaaactccgtaacaattttctcaccggaacagttccccaaggaattgccaagctcggtaatttaacctatttgagtctcg

SEQ ID NO: 24644 - DNA, 462 bp, Glycine max
gaagacgacagaagggggtgtgagttcattaacatatacaaattctctgtgttgtgttgtgtacttgtgttaattgtgttgttgttgtaggaaatttaagtgaagagagaatgatgatgaagtctgctatgtgtgcattggtgcttgtggcactggttgtggttgaagtggggcccatggctgaggctgcggtgacttgcaacccaacacagttgactccttgtcttccggcaattaattcaggttctgcaccttcgagtgcttgttgccagaagctgaaggagcaaaagccatgcttctgtggctacctcaaaaaccctagcttgaagcagtatgttaactctcctaatgccaaaaaaaccgttagttcttgtggtattgcctatccaacttgttaagcacctcttatatatatatataaaatgtgtgaacaatatatatatattgattaaaaaatatagt

SEQ ID NO: 24645 - DNA, 225 bp, Glycine max
cacctttgtcagctgaattttacaccgggtggcttacacactgaggagagaaaggtgctcagactgatgctgattttacagcagctgctcttgaaaaaattttgcaaaaaaatggttctgcagttctatatatggcccatggtgggacaaactttggattttataatggagcaaatactggtgtagatgaggctgactacaaacctgaatctacttcatacgatt

SEQ ID NO: 24646 - DNA, 302 bp, Glycine max
tggaatccaattggagtgataagaaccaagagtatacaactagcatatttaagggtccatttgctaagaagaaattacatacgtccaaattacacttcttattattattttgttaatgtaagtttatttttttaattttaacacaaacttatgtaaacaaaaattaaaaaaataaacttggaatgaaaaaaattaaaaaaaaatgctaacttacaaattataaaaatatattaaaccgaaaaaaaaacaatggataaaagtagggaaggggattgaaaatacctaaatggttatctaaaaat

SEQ ID NO: 24647 - DNA, 407 bp, Glycine max
  modified_base (345)..(345): a, c, g, t, unknown, or other
ggacttattacaaataaattacattctcctctctagaagaatggaatggaaacccatagaagaattttgagtttgaaggacagttctggcaggagtgttgaacttacattgcaagagatggtgaatgctagattttttttccttttttttttgtttcccacatgtttccttctttgaaggcaagacaattacactaacagtatgtttggatagagaattttaactgaggaaagtaatttatcaaagaatttaaatttctgtaatctagaattcattgtttggatgttttttttttgaataatttaaaattttttgaattttaaaacagaattttaaacaactaanaatctagaatttcaatttctttctaaaatgtgagaaaatgaagttctcttcttacagttttt

SEQ ID NO: 24648 - DNA, 271 bp, Glycine max
gaaaagacgatagtgacttatgtacatattcacaatggatcattaacgcaacttacataaggaatggtgagggaatagatactacccatggctctaccggatgctcagacataacagaactaactggaaattctgtaagtgaattaattagtatgcccagaaagataactggtgcacattatgttcaactggtaaccatattgcatgatgtatttgacgctgacttcaatgctggcggagctcagatcataatcgatagcgcatatatatg

SEQ ID NO: 24649 - DNA, 438 bp, Glycine max
gaggattcatcattttccaaataagtatcttcgtagttgcataagtcaagagaagaagtgaagtggctgcaatggcttcaagtcaggaagaggtgacccttttgggagttgtgggaagcccatttctacacagggttcagattgctctcaagttgaagggagttgaatacaaatatttggaagacgatttgaacaacaagagtgatttgctcctcaagtataacccagtttacaaaatgattccagtgcttgttcacaatgagaagcccatttcagagtcccttgtgattgttgagtacattgatgacacatggaaaaacaatcccatcttgccttctgatccctaccaaagagccttggctcgtttctgggctaagttcattgatgacaagtgtgtggttccagcatggaaatctgcttttatgactgatgagaaag

SEQ ID NO: 24650 - DNA, 426 bp, Glycine max
gacaccaacacatccattcattgtcttaatgttagcaatgtcttcctctttctccatccatttcttcctcctcctctcaatagcccttttctcagtttgttgcttagcagcatctcaagctcccaccaccaaatcacacccctatatccttcccattaagaaagaccccgcaacaaatttgtactacacttcagttggcattggaactcctaggcacaactttgatttagtcattgatctttctggtgaaaacttatggtacgattgtgacactcattacaactcatcatcctacagacctatagcttgtggctcaaagcaatgccccgaaattggatgtgttggttgcaatggccccttcaaaccaggttgcacaaacaatacacgccctgctaatgtaatcaaccaattagccaaattcattta

SEQ ID NO: 24651 - DNA, 436 bp, Glycine max
ggccattgttgctgtcatcatccgcagctgctgttattcgcaccgcaaacaaacagtgagccatggccgtcggaaagaacaagcgcatctccaaagggaaaaagggtggcaagaagaaggcagctgatccctttgccaagaaggattggtatgacattaaggccccttctctttttcaagtgaaaaatgttggcaaaaccctcgtctctcgtacgcagggtaccaagattgcttctgaaggacttaaacatagagtgtttgaggtctccttggctgatcttcaaggggatgaggatcatgcattcaagaagattaggttgagagctgaagatgtgcaagggaagaatgtcctgacaaatttctggggaatggatttcacaactgacaagctgaggtcattggtgcgaaaatgggcaactctaatttgagcccatgt

SEQ ID NO: 24652 - DNA, 439 bp, Glycine max
gggcagagagcgaacccaaaactagagctaccttcccggcaaaccttccactcttgtctccttttccaatcaagggaataatatttcttagagatattccgaaaccatggctcacgccaatcctatgatttttgttgttggaattctaggtaaccttgtctccttctgttgctttctagcaccagtaccaacattctatcgagtttgtaagaagaaaaccacggaaggtttccaatcacttccttacgtggctgcactcttcacttcaatgctttggatattttatgcttacataaagacgggcgaaatacttctcatcaccattaacgcattcggttgtttcatagagacagtttaccttgtcatctatatcacttattgccccaagaaagctaggttctttaccttcaagatgattttcttgttcaacgttggagtg

SEQ ID NO: 24653 - DNA, 310 bp, Glycine max
gagacaacaaaattcgacgttatctcatatatgatattgggcttttttctcctttttatttgtggcgtttacgtcaagggtgtgaaagaaaatctaacacttttccaaagggacaaaggaacaacataacgttaacaataacatggtttggttttcttccattcctcacatttgagactttcatgctctctcttggtgtctggatttccttgccaaagtttgaacctttttccttagaatttgacacccagataagattttcttcattaccaaattctgggtctttctctctctttctacaacccttttt

SEQ ID NO: 24654 - DNA, 444 bp, Glycine max
tgcattggtctatgtgattccgtgaattttatgtatcttatctccaacattatctgctgttgaatccattgaacttcaaagaaagttgcaagtaccaaagacaatcaccacaaaacaggcacagaagaacgccacgggaatggacaacccgagaaagaagacaattagaaggaagaaacaccaagtggctccaaactccaaatagatgagtgtcccatatcagatcagaatcattggaacttatcaaacaggccaagatcattattagaatgtcacacgtaattggaaaactaccctataatggataagaaatacggaaaccaaacagcaagaaatcaaccaaaagctagacagaactaccactgctggccagtaagctgttaccaactttctgaagtgacatatcatgccagaaacatctcagatggctttgaaaacttaata

SEQ ID NO: 24655 - DNA, 243 bp, Glycine max
caatgtccagtgggttagagatccagcgagcgaccagtttcaaagagaggatttcccattgtcaatgcgactgattgcgctgcgtctctacctcttctctctcgattcatccctcattcataatcttccaatccaacaacctcagcctcacactcacacatacacacatctgaacgcgtatcgtccctcccatggcttcaaagcgcatgctcatagagctcaatgactttcataaagacccac

SEQ ID NO: 24656 - DNA, 399 bp, Glycine max
  modified_base (50)..(50): a, c, g, t, unknown, or other
cagctgcgagaacaccaccgaaaggagcatgcaacggaaacatggggggncactgcaagttgcgacagcaaaacaagggagcttgactttaatgaggatggcttcttggaaattaatgatctcattgatactgaacctacattgtcaaatgttgaaaattctgcctagtaccaccattttgaaaatgggttaagtgaacttgatttgttccaaaatgcacagatgtttcttcgtgacttggggccaattattcatgaaacacattcacatgcatatacaaatgcccttgtaatcagcaatattgaatgtcacaattaccaaaaacttccaaaaacataagatgccaatcaaactgctggcgaattctgtattcatagtgaaagcaatcaactatcattc

SEQ ID NO: 24657 - DNA, 168 bp, Glycine max
gctctctaggggtaccgagcgcacttgctctatagctcttatctacacattcttctttgacacaacatcaatgtctccagactaacttgcaaaactcataattgcttctattgaaaataacgttctagacttggtgacaaaccctttattcgacaaccgtcctaagca

SEQ ID NO: 24658 - DNA, 375 bp, Glycine max
gtggctgagagcggaccccagactggagctacctggacttgagaccatctaactctgtgctccttttccaatgctggtggatgatatgtcttagagatattcctaaaccatagttaaagccaatactatgaccctagacgtttgaactttaaggtactccaggcttcatcaggagctgtctagcgccagtacctacatatctatcgagcatgttagaagaattccacagtaggtttgctatcacttcaagaccttgcttcacgttctagaataacgcatctgatattgcactcctacattatgtctgtctgcatgcatttgatctgcgttgacgcatacagatgaatcatatatacgatgtaacttagatgctat

SEQ ID NO: 24659 - DNA, 400 bp, Glycine max
cacaaaactgagacgacaagagcttactctgtgcctttggagggtgctaatggggttagggttaaagcggtagcagtgtgccacactcacacgtcggaatggaaccctaaacatttggcctttcaagtgctcaaagttaagccaggaaccgttcctgtctgccacttcctacctgaggatcatgttgtttgggttcccgagtagatttgctttaatttcaagtccttctttcctgttcttgaataacttagcttcagtagcactacagaactctatatatatgcatgtatttgcactgtgtagttctctagatattaataattttttgctggttatttagatgctatgcgtggcttcttatgtataaactatgatgcattatatgacttattgtgtgttc

SEQ ID NO: 24660 - DNA, 436 bp, Glycine max
gagagtcaattcatcaattaggagttgggtgagagaatggaagcctcagagcagaacaattcaaaggtagtgttgattgattctttgcagtcatgggagttccacgtcaaccaagcctataatcagaatactcctgttgttgttcacttcactgcttcatggtgcatgccatcggtggctatgactcctgtttttgaagaactggcttcaagctatccggaagttctgtttctcactgttgatgttgatgaagtcaaggaggtagccaccaaaatggatgtaaaggcaatgccaacatttttgctgctgaaggacggtgctgcggtggacaaggtggttggtgccaatccagaagagataaagaaaaggatagatggggttgctgagtccactcgtgtctcactggcatagttaagcatctgtatgatattctact

SEQ ID NO: 24661 - DNA, 313 bp, Glycine max
gggcagagagcgaacccaaaactagagctacgttccctgtaaaccttccactcttggctccttttccaaatcaaggaataatatttcctaaaaatatttccaaacccttgcttaagcccaatctaagaattttggtggtggaaatctaaggaaccctggcttcttccggtggcttctaacaccaagacccacattctattcaggttggaagaagaaaaccaccggagggttccaatcactttcttacctggctgtactttttaattcaatgccttggataatttaagcgctaccttaagaccggccaaatacc

SEQ ID NO: 24662 - DNA, 420 bp, Glycine max
  modified_base (407)..(407): a, c, g, t, unknown, or other
gattcttcgctcaatcgaggtcggctcgatttccttctctataacacaacgctctcttctcttgcaaccaaagtacttgttccagtgtctactctactcaaaaaggatttgggacatcatgtgcagtgattcgaaaagtaaactttcttccccaaccctcgtcgtcatggagaatagtaacattcagaagcagaatctggatggtctctacaactcggttttgcttgaattgtctgcatctgatgattatgaagctttcaaaagagaggtggaggaaaaaggcttagatgtgaacgaggcaggcttttggtacggtagaagaattgggtcaaagaagatgggatctgaaacgaggacccctctgatgattgcttctttgtttggaagcgccaaggtgctcaattatnatcttcttcagaa

SEQ ID NO: 24663 - DNA, 221 bp, Glycine max
acaatggtgcattattctcaaacatctgagaacacttctaggtcctacattaaaacatgggagctccactttaatgattataacttcttggacattaattatctcattcatcctgaacctacattgtcaaatgtttaaaactctgtgtattaccaccattcttaacattgcccaagcgaactccatttccaccacaatacacatatccttattcttcacta

SEQ ID NO: 24664 - DNA, 343 bp, Glycine max
cattacaacaaagatcgagtcattgaaatcagtgcccggatggaccctcattctgtggtggacctgactgaggataaagatgtagatgttgagttcgtgtacactgcaaaatggaaggaaacagagactccttttgagaagagaatggataaatactcccagtcttcttctttgccacatcacttggagattcactggttctcaatcataaattcctgtgtaacagttcttcttttgactgtgtttctggcaaccattctcatgcgtgtattgaagaatgactttatgaagtatgctcaagatgaggaagcttgtgatgatcaagaggagacaggatggaagt

SEQ ID NO: 24665 - DNA, 336 bp, Glycine max
gaacgaagatcatcatcaacaacctcacaccctgatcacttgaattcaactcttcgccctataaaatcaaaatccgttacatcacttttcacatccattcctaacctccccaacctatacaattacacatttctttcacagaagctgacatgccttcagtttacatggtagatacgatggataattctaactctagctagagctctaactctcaagatagcagcgttgttggtaatgggacacagacgtgcaacaaactcttgcttgcattactgcccaaatgccttgcacacagtaattattatcaccttgcatcattaaccgctgtagactttt

SEQ ID NO: 24666 - DNA, 443 bp, Glycine max
  modified_base (354)..(354): a, c, g, t, unknown, or other
  modified_base (366)..(366): a, c, g, t, unknown, or other
gttgtggtggccttgattaaaatgttcctgttaggttttacattaacttaaggtttgagtggaataagcctctattaaccgtgttaaatttctttcttcatatagatcacaacacattatataggttgtgttgatattgtgctgtagtctacattgagtcactttttttttatcagcacaagtatatatattatatagaccatttaaattagtacaagcggtactgttgtatatacctcctagcatttgcaaggtgcagaactgtggtgacctaatacatgttaaccaacttgaattaggaaaccaaagatcactgtttttttgcttgcaatttttggttcattattaatttgntaaatgttgtgntattagttgttatttgattacttcaggaaccctaatgactagtatacatactgtgtgcataggttttgaaataattt

SEQ ID NO: 24667 - DNA, 423 bp, Glycine max
atggggttatgtttcaaatgatgatcggcccagggaattcttcttgagtcttctaaagtgtttgcaacccggggaatatagtgatatgtccgagagaagggagagcgacgaagaactgaagatgaaggtgcgagaatgcttgaataaaagcggaaagtacttggtggtggtggacgatgtttgggaaacccaagtgtgggatgagattaaaagcgcttttccagatgccaacaacggaagcagaatattgataacaagtcgttcgacaaaggtggcttcttatgctggaacaaccccttcctactcgcttcccttccttaacaaacaaaaaagttgggagctacttttcaagaagttgtttagggacgaagaaagtgtcccccagaattagtggaactgggaaaatccatagccgaaagatgt

SEQ ID NO: 24668 - DNA, 372 bp, Glycine max
gatggcaaagggataagcaactgggatggcttcagtcacaaaccaggtagtatatctgacgaaagctacggtgatgttgctgttgatcaataccaccggtatctggaggatattgatctaatggaagctataaaagtcaatagctaccgggtttcaatatcatgggcaagaattctaccaaaaggaagatttggagaagtaaacttggcgggtatcaactactataacagacttatagaagcattgatactcaaagggatccaaccatttgtaacattattccagtttgacatccgtcaagaacttgacgacagataccgatgttgacttaatccccaatcacaggaagattttcaattatttgcagatatc

SEQ ID NO: 24669 - DNA, 380 bp, Glycine max
ggtggcagagagcgaacccaaagctagagctaccttccctgtaaaccttccactcttctctccttttccaatcaagggaataatatttcttagagatattccgaaaccatggctcacgccaatcctatgatttttgttgttggaattctaggtaaccttgtctccttctgttgctttctagcaccagtaccaacattctatcgagtttgtaagaagaaaaccacggaaggtttccaatcacttccttacgtggctgcactcttcacttcaatgctttggatattttatgcttacataaagacgggcgaaatacttctcatcaccattaacgcattcggttggttcatagagacagtttaccttgtcatctatatcactta

SEQ ID NO: 24670 - DNA, 87 bp, Glycine max
ctcataacggcgttctaatgtgtgattgtttgttggtgtaactcgttcgtcttcttttgttgttctgtgtttgtgtttgttttttct

SEQ ID NO: 24671 - DNA, 417 bp, Glycine max
gaccaccaaaaggtggtccacatttaatacactcactctcatgtcaaagatctctatctaatatgagacgtaatcatatatattatcattaataccattaattcttacatttattacaccaataactctttcaccttaaccttctcatttctaacatacctatcatcttaaatattcaaacttcatcacttaccatatgttacaactcataatctaaaatgctcttaaagaaacctactactattaattattcaagaaaacaatgttattaaactaaccttaactatatataatcataaattaatccaatttagaccctacttaacactactatcgtgttatcacattataatccaatctccagactatcactactattcaagcattacaaccacacttaatcaattttactaacac

SEQ ID NO: 24672 - DNA, 418 bp, Glycine max
ggacatcacagcaagggagtgatttggagtttggagcgactgaactaatcattaatttgcactcgctgtttcagcttcatcacccttcttttgcatcatttatatctcttgagaaatggcacaagaaacctttctattcacatctgaatctgtaaacgagggtcaccccgacaagctgtgcgaccagatctctgatgcagtacttgatgcgtgccttgaacagaaccctgacagcaaggttgcctgtgagacatgcaccaagaccaacatggtcatggtcttcggagagatcacaaccaaggccaacgtagactatgaaaagattgtccgcgacacatgccgcgaaattggattcatctctgatgatgttggtcttgatgctgacaaatgcaaggtgttggtcaacattgagcaacag

SEQ ID NO: 24673 - DNA, 441 bp, Glycine max
  modified_base (432)..(432): a, c, g, t, unknown, or other
gatccagcgacagatcggagcagaccctgtatggagtggcgaatggcgctgtggtctcaaattttatgcatagtcactctgctgttatgcagcgattgtgcagcatcttttgccaaggagcagcaaaaggaccgggttggtaggctcccaggtcaaggcttcaacatcagcttcgcacactatgctgggtacatcaccgtcaatgagaaagctgggagaacactcttctactggttcattgaggcacttgaaggtcctcattctaagccccttgttttgtggctcaatggagggcctggatgttcgtccattgctttcggacagtcagaagaagttgggccttttcatataaattcagatagcaggaccctccatttcaatccctattcttggaaccgagttgccaacattctttttcttgacactcctgtnggggtggga

SEQ ID NO: 24674 - DNA, 326 bp, Glycine max
gaagaggttgtggaagattatttggaaggagttggtggtagggacaacatcatggaagcgaaatggttgctaaaacctgttttggatgagtcaaatgatgatagttcttccagcagttgctatgacgaggcattggagaagttgagtggctttgtccttcaagaagcctccagggaatatggcatgaagaaagctcaaccatggaagaaacgctctgtaggttctggacctttagctttggaagacctaatgttggaaaaggatccaagatccatctctgctagaaagaagcatgttcctcgattcgcttaatcttgatcttgaca

SEQ ID NO: 24675 - DNA, 430 bp, Glycine max
ggactgatttgagtgtgggcgttggtgcgcacgctaatgttgggagttatcggagctggaacgtggttgcgatattcaaaggcccttcttcaaccatggaaggtagggttctcctctttgtccgctgtcgacggccggaaacaccaccttctggatttgcaggagatcgagacggttctcaccgacgttaaagctgacaacgttaaggttataccagttcccaagcactgcgattgggctgatttcatggtactcgccactggcaggtccacctggcacgtcaagaacatcgcccaagccctaatttacaaggctaagcagaaacagagaggagttgaacgaatgatgctaccaagtgtggaaggtcaagcaggaggaaagtggatcgtcattgactcttgtaaagtgatagttcatgcacttgatgaaa

SEQ ID NO: 24676 - DNA, 431 bp, Glycine max
gcaaggtattgaccggattacctgtcctcctcatgctgactattcatactctgttcaagctggtgtcagtgctggaattgatatgattatggttcccttcaactacactgagttcattgatgaactaacccggctagtaaagaataatattatacgaatcagcaggattgatgatgccgtggcaagaatcttaagagtaaaatttgtcatgggcctatttgaaaatccatatgctgatccaagcctcgcagaccaactgggtagcaaggaacatagagaaatagcaagggaagctgcacggaaatccctagcgttgctaaagaataggcaatcttacaagaaaccactgctttctctttccaaaaagtccacataaatactggtagcaggaagtcatgctaacaatatgggttatcaatgtggacgatgga

SEQ ID NO: 24677 - DNA, 425 bp, Glycine max
tatgcggatcattattatcagtggctattttagtgattacatttcaagaactcatacaaattattggtaaaagcaagaatttctattttttaaatgaatcattttcttttgctgaaatcaaatacatgaatatgactgataaaaataatgttttacaaaaaacttcttttttgtcttatagaaattattatagatctcaatttcttcaacaattggatcgttggggttaccgtactattagtctaggttttatctttttaacgataggtattatttcaggagcagtatgggctaatgaggcatggggatcatattggaattgggatccaaaggaaacttgggcttttattacttggactatattcgcgatttatttacatactagaaaaaataaaaaattggaagatctaaattcttcaatagtc

SEQ ID NO: 24678 - DNA, 221 bp, Glycine max
tgactatagacaacaagaagacgtttcatacactgggcctcggattgcatttctaatcgggtctatacctttctttcccctaacctcacaaagcacaaatactaactcatcctctctgctatcaaccatatcttcccacccttcttattatatcatgcccttacccttatatcaacagtaaagaatatcgtatacctatattaaaatccctattctgatcc

SEQ ID NO: 24679 - DNA, 361 bp, Glycine max
gaaacataacctcaaaatctatatattaaattaatggcagaaacttgatatatggttacgcaaccaaactttcacacctttgaattttaattgtcaacaccctctttttaaatctttgaaacatctctgtcttctaattagcttccaataacaaatggtacttttgatagagaaacttacaaaacattactttaagctggagaatcaccaccatgccatcacacaccttcaaccagaagagttatcatcctcactgcttgcatttaaatcccatatgtccaaatcaattgaccaactagcatcggatttgaaacccggatcaaagacccccctgtccttaacatggtttggaaagtgtttc

SEQ ID NO: 24680 - DNA, 335 bp, Glycine max
accaattcgatcggccgattcttctttttttgtctctatttattttttgggccattattacttgtgacttccattaacttggacacataccttatcattctacagacatttaaattattccttccaactcctttccttcaattttttccacaaactaacccaccctacctttcttacccaaaccccaatgatttaaaacactattcaaacactcttattgataatcccaaaccttctttcacttttacaccaactctttaaaccttccactacccactaagatcttctttccttaaacttcattttcaccacctttccaaacatcttatccacca

SEQ ID NO: 24681 - DNA, 135 bp, Glycine max
ctaccttacgactcaataattatattaagctccctttcaaacctttgaactctcatctcttattttacaccttttaacattaatttttcacaacctattcatttaattttcaaatttccatttattatctttacc

SEQ ID NO: 24682 - DNA, 370 bp, Glycine max
ggagaaagagtctaacgagaattttttttctctcggtcataacctagtgagactctgtgtcagagtttgtgaagtgaatcccataatcatgaagaaaggaaacttgggacttggtctcaaactctcagttcctgtgtctgatcaatctaattttgccaggttcctgactgaaagtgggacttttaaggatggggatctgcttgtcaacagggatggagttcgaattgtctctcagaatgatgtcgaagctccaccttcaatcaagcctacagacaaccagttaactttggcagacatagatgtaatcaaagttgttggaaagggaaatggatgggtagttcaattggtgcatcacatatggactaatcag

SEQ ID NO: 24683 - DNA, 377 bp, Glycine max
agctctggttctaggaaggaggttatcaggtcgaacaagaagaatgttgatgatggttcttctcggtctcgcaccagggaggctgatggttcccgtgggaaaaaggaggtgcctaattttgttaaggttggcaatgttgtttctggtaaattgacctcgaagattgtcaagaagaagaaaattgttaagagagtggtgaagaaaggtactgcaagttccaagtcatctgcgtcaaattcactaccggctaaaacccttcctggaactgtgaaagcggagagtgttgcacgtatttcattgactgcctctggtcctgagaaaattgaagctaatttggatgagaaaagcaacactgtcatccaaagcaacactgttga

SEQ ID NO: 24684 - DNA, 141 bp, Glycine max
ttggtcatgaagctggagggaatggtgaaaagccgtaggtggaggtgtaactaatctggaacccagggaacattgccttccttgggttaaccgggaattgtgggacctgccttaattgcagtgaaaagaaaaccaccttgt

SEQ ID NO: 24685 - DNA, 388 bp, Glycine max
ggttgcacatatgacagtggacaacatagttcccatgtgtgatcacatgcctgtaggattcagattccgtcccacagatgaagagctcgtcgactattacctcaaacacaagcttctggctgatgatttgcctgtccacatcatccctgaaatcgacctttgcaaggtggaaccttgggacgtaccaggaagatcagtgatcaaatccgatgacccagaatggtttttcttcagtcctgtggattacaagtacttgaagagtcaaaggtttaacaggacaaccaagcgtggcttctggaaagccactgggaatgaccggacaataacgataccgagcaccagcaatgtcattgggactaagaagactcttgatttgcaccaaagccgt

SEQ ID NO: 24686 - DNA, 272 bp, Glycine max
ggatatggcctacatagtgtatgtcaccctgggcctcggttaccttctcccatggaacgctttcatcactgccgttgattacttctcctatctctaccccgatgccagcgttgaccgcatcttcgccgtcgtttacatgttgatcggcctcgtggggatctccctcataatcttctacagccacaagtccaacgcctatgtgaggatcaacgttggcctcgccctcttcgtcgtttctctcctcatcatcccccttctcgacgccttttatc

SEQ ID NO: 24687 - DNA, 431 bp, Glycine max
ggcacaagtgagtttgttgatcgagataactagaaacagtgtgatgaaaatgaaggtccttgttttcttcgttgctacaattttggtagcatggcaatgccatgcgtacgatatgttccctctccgaatgaacactggctatggtgcccgtactccggaggtgaaatgcgcaagtcggaggcttgctgtggaagcacacaacatctttggctttgagaccattcctgaagagtgcgttgaagcaacaaaggaatacatccatggcgaacaatatagatcagactccaaaacagttaaccaacaaacttacttttatgccagagacctcgaagtccatcccaaggacacatttgtgttcagtatagatggcaccgtactctctaatattccatactacaaaaaacatggatatggggtgggagaaattaact

SEQ ID NO: 24688 - DNA, 322 bp, Glycine max
ctgctgagttaatcgcgtcatggtggtcctactcgttgtttgaaactggagagcctttactcgtcaaaagtcctcatttcatgacctagctccaagcgttgctccacgacgctaaggtgttctctttctcaaagcttctttgttaattcatctctgttaattgaatgtatgaaacaatgcttatcaagagagtatctgttaattgaaattctggcaagactattgctagcttcattgtagtgctgagttttgggttatgctgctaaattaatggagtatctgctaattaaaatctctgatatttgaaaagttgaaacaatgc

SEQ ID NO: 24689 - DNA, 432 bp, Glycine max
  modified_base (352)..(352): a, c, g, t, unknown, or other
gggttggaaagaaggtgagggtctgggtggatccaggaagggtattgcggatcctatcatggccggtaatgttaagaagaataacctgggggttggggctcaggaacctggagaggtgagtgctgaggatgacatatatgagcagtacaaaaagcggatgatgcttggctaccgttacagacccaatcccctgaacaatcctcgcaaggcttattactgaacttgacattgggtgctttgtgcaactcttcaggaaaagttaacttttacaaagtgggatgaactggtgtgttgatagtagggtttttattgtgtgctgcagtgcttgtagtcttttgaaactaagatttgngggagaaaagatggggaaagggtaatggtcacttcaattgcatttttattcgccaagaataatgggtttttgggtatttt

SEQ ID NO: 24690 - DNA, 297 bp, Glycine max
agggattcttgcttttgtgtttgcaattattgccttacaccctcaggtgaatgggagcttgttgcctgcggctgtggtttctctttactgtgcttatgtgtgctacacagggctttctagcgaacctcatgactatgagtgcaatggtctcaacaagtccagagcggtcagcacaggcacactcgttcttggcatgctaacaacagtgctatcggtgctgtattctgctcttcgggctggatcttcaaccacattcttatctccaccatcttcacctagattgggtgggagcaaacc

SEQ ID NO: 24691 - DNA, 438 bp, Glycine max
  modified_base (430)..(430): a, c, g, t, unknown, or other
ggcagcgcttgatttgaggccaggcaagccccactcagaccaccacacctctcctcgttcacgctacccctttctgctcttcttctacctttcaagttttaaaagtataaagatggcagagacattcctatttacctcagagtcggtgaacgagggacaccctgacaagctctgcgaccaaatctccgatgctgtcctcgacgcttgcctcgagcaggacccagacagcaaagttgcctgcgaaacatgcaccaaaaccaacttggtcatggtcttcggagaaatcacgaccaaggccaacgttgactacgagaagatagtgcgtgacacctgcaggaacatcggcttcgtctcaaatgatgtgggactggatgccgacaactgcaaggtcctcgtcaacattgagcagcagagccctgatattgctcanggtgtaca

SEQ ID NO: 24692 - DNA, 426 bp, Glycine max
  modified_base (393)..(393): a, c, g, t, unknown, or other
gatcccacatatcatcaattaccttgttcctctcaaagtgtgattctttttctcttgaattggattgttataatttttgttcatacttacatgttatgcagttatgaatgattgagagacaacacaaatgtcttctccagtgatctccgagatcctcctctctggcttcaccataaactcttccctaagacgcaggacacacttggtgcaatctttctctgttgttttcctccactggttctacgttttctcatgaactaaataaattaacctcgtacatagtataaacatagtacgtaccagtgttcttttttcaaattcaatcattaaacctagctagcagattagggttattattgttcaaatagcagactactgcatggcttctcctgntggaagtggaacctattcatctggttccagttc

SEQ ID NO: 24693 - DNA, 416 bp, Glycine max
caattatttaaggcctgatttaaaaagaggaacattcgcacaagaagaagaaaaccttatcattgaacttcatgcagtattagggaacaggtaattgtaattgtaattttaattcagtctctctcatgattgaattaatgaattctctccctttttcttttctactgtggttaacatttatttttctttttcatttgcttgacatgcatattattatcctgtgctgtctcaggtggtctcaaattgcggcacagttgccggggagaacagacaatgaaataaagaatctgtggaactcttgcttgaagaagaaactgaggcataagggaatagaccctgtcacacataaaccactgtctgatgttgagaatggagagaaagcagcagaagtgtctaatgaactgaacctcctgaaa

SEQ ID NO: 24694 - DNA, 433 bp, Glycine max
ggatttgtagagtgagcttttgagttcatcatcaacaatgggtacattgacatcaaagaagattatccctaccaaggtgttgatgttatatgtgatcataaagtcaattttaacttgattatttgataaattaacaaatgttggtaataatttcgttgtaatgcttatataatttttttttcttctttatataaaaatgctcgaattattacaattgatgattatgatagtcttcatgcctatgatgagttagtcttgtaaaaggcactatcaaatcagttaatgagtgcttgcattgacgcaaactttaagacatatactttaataaatttttaaatcaatttgactttaaaagtaaagttagcatttagcaatgcattagatctaaactaaatctaatgagctgcaagatacattgagaattttgatcaat

SEQ ID NO: 24695 - DNA, 408 bp, Glycine max
gaagagtgaagagcgaagagaatggctcccaagggtttaatcggtttggctgtgttatgcttctcagcactgtcactgagtcgttgtcttgcggaggataatggacttgttatgaacttctacaaggaatcatgccctcaggctgaagacatcatcaaagaacaagtcaagcttctctacaagcgccacaagaacactgctttctcctggctcagaaacatcttccatgactgtgctgttcagagttgtgatgcttcactgttgctggactccacaagaaggagcttgtctgagaaggaaacagatagaagctttgggttgagaaatttcaggtacattgagaccatcaaagaagctttggaaagggaatgcccaggagttgtttcctgtgctgatatcctcgttctc

SEQ ID NO: 24696 - DNA, 399 bp, Glycine max
gcacctaccggtccttaacttgccagtctagccacccgttcatacacctgacagaagacgacagaattccatcctattttatactattgcttctattcgttctcatgcgtctctatatacctccggtggcgtttccccctttcatttttctctcaccttaaactgtattactactgtcccaactgatccttaacaaaactcctataactgcagcaccatttctttactacctcataaactccgactttaccaatacaccaattacatctacatcgatattatggacatcataattgcaccatttaatactcaattctctaatgctgacactcccacaatcgcctataacgatttaccccaatgtgttactaactgcacctgcaaccccttcacttacaa

SEQ ID NO: 24697 - DNA, 435 bp, Glycine max
gcacccaaaggtgcaaaaatattaagatgataaacattggagcacttgttgtactctttgcatttctcttcctcagttgtgcctatgcacaagacacaacaacccttgtgcctgcaatcataacttttggtgactcagccgtggatgtagggaataatgactatcttcccacccttttcaaggctgattaccctccttatgggagggactttgctaaccaccaacctactgggaggttttgcaatggcaaattagctactgattttactgctgacactttgggttttaagacctatgctccagcatatcttagcccacaggcatcagggaaaaacctccttattggagcaaactttgcttctgctgcatctggttatgatgaaaatgctgctactttgaatcatgcgattccgttgtcccaacagttaagttatt

SEQ ID NO: 24698 - DNA, 433 bp, Glycine max
ggttctagtgtatgtgattgttgtgactggttcttcgtcgtcgttatcttcttcttttgttgtttgtgtgtttgttttttctctcacctgaaaatgtcttgctgcggtggtaactgtggttgcggaagcgcctgcaagtgcggcaacggctgcggaggctgcaagatgtacccagacttgagctacaccgagtcaaccaccaccgagaccttggtcatgggagtggcaccagttaaggctcaattcgagagtgctgaaatgggtgttcccgctgagaacgatggctgcaaatgtggagctaactgcacctgcaacccctgcacttgcaagtgaggtgttggagagctaaagcttcaagcagaaatggcccttagaaataatgataaaaactatatgtagtttcaaaacttcaaaattatgtagtatgtattat

SEQ ID NO: 24699 - DNA, 409 bp, Glycine max
gaagagtgaagagcgaagagaatggctcccaagggtttaatcggtgtggctgtgttatgctgctgagcactgtcactgagtcgttgtcttgcggaggataatggacttgttaatgaacttctacaaggaatcatgccctcaggctgaagacatcatcaaagaacaagtcaagcttctctacaagcgccacaagaacactgctttctactggctcataaacatcttccatgactgtgctgttcagagttgtgatgcttcactgttgctggactccacaagaaggagcttgtctgagaaggaaacagatagaagctttgggttgagaaatttcaagtacattgagaccatcaaagaagctttggaaagggaatgcccaggagttgtttcctgtgctgatatcctcgttctc

SEQ ID NO: 24700 - DNA, 467 bp, Glycine max
cccacgcgtccgcggacgcttcaagcccagcaattctcatcgtgggtcgtgtatttgttggcattggtgtcggtatggcttcaatggcatcacccctctacatttcagaggcttctccaacaagagtaagaggggcccttgtgagccttaacagttttctcatcactggaggacagttcctttcctacctcatcaacttggccttcaccaaggcaccagggacatggaggtggatgttaggggtagcagcagtgccagctttgttacaaattgtactaatgttgacactcccagaatcgcctcgttggctttaccgcaagggtaaggaagaggaagcaaaatcgactctgaaaaagatttatccaccacatgaagttgaaggcgaaattcaggccttgaaagaatcagttgacatggaaattaaagaagcagaatcatcagagaagatcaacatagtccaactttta

SEQ ID NO: 24701 - DNA, 474 bp, Glycine max
gcgcccacgcgtccgcggacgcttcaagcccagcaattctcatcgcgggtcgtgtattgggtggcattggtgtcggtatggcttcaatggcatcacccctctacatttcagaggcttctccaacaagagtaagaggggcccttgtgagccttaacagttttctcatcactggaggacagttcctttcctacctcatcaacttggccttcaccaaggcaccagggacatggaggtggatgttaggggtagcagcagtgccagctttgatacaaattgtactaatgttgacactcccagaatcgcctcgttggctttaccgcaagggtaaggaagaggaagcaaaatcgactctgaaaaagatttatccaccacatgaagttgaaggcgaaattcaggccttgaaagaatcagttgacatggaaattaaggaagcagaatcatcagagaagatcaacatagtcaaacttttaagaa

SEQ ID NO: 24702 - DNA, 427 bp, Glycine max
  modified_base (379)..(379): a, c, g, t, unknown, or other
tgaatcaggtgttgataatcaccagagatatcttttgggtaagcaagatcatgggaagcaacatgctttttcaaagaaatctgaatcagcacacttacaaaattcaagtaagaagagcaggagtgggtcagatctcaacaatccatccttggataggcaggttgagttacaaaaatctactgttccttcgaataactcatatttcaaaggatcgcctacctcccattttagtagaggaggaagtatgccaccccagtaccagcctttagatagtacaaattcatcatttggtaactatggtctgagtggctatgctggaaatccagcattggcatccttgatgactaaccaacttggcactggtaatctgccacccttngttgaaaatgttgctgcagcatcagcaatggcaagccctggaatggac

SEQ ID NO: 24703 - DNA, 418 bp, Glycine max
cggtggcagagagcgaacccaaaactagagctaccttccggttaaaccttccactcttctctccttttccaatcaagggaataatatttcttagagatattccgaaaccatggctcacgccaatcctatgatttttgttgttggaattctaggtaaccttgtctccttctgttgctttctagcaccagtaccaacattctatcgagtttgtaagaagaaaaccacggaaggtttccaatcacttccttacgtggctgcactcttcacttcaatgctttggatattttatgcttacataaagacgggcgaaatacttctcatcaccattaacgcattcggttgtttcatagagacagtttaccttgtcatctatatcacttattgccccaagaaagctaggttctttaccttcaagatg

SEQ ID NO: 24704 - DNA, 482 bp, Glycine max
aattcgagcggcgctttttttttttttttttttttttttttttggccttaaatgcacattaatgcacttaactacctacataatttattaaatgtacattaaggccaaagaagaaaaaaaacaaagttaaattataattttgtccctaatttttaaatctatgattttagtctttttgatttttaattgaaatatttggttcctcaattttataaactaacgattttagtacctgatagattattaacaaataattttgattaataaattattaagttaattataaattaattaaaaactattaattattaaaaaattattctaattctctacaaattgtgttttttttttccataaatatctcttaaatattgcaaattttttgaaaaaagaaatcatttaaagattcacctcacaaaaattaaatatttaaaagatcgcaattaaaaaaacattttaaaatatattaattattatatcac

SEQ ID NO: 24705 - DNA, 442 bp, Glycine max
ggcatacatttgcatttgttgcgtgtgggggtctcagctgcatacgtgagtcgggtcatcaccatttttgggaacaggtgttcggtcctttggttgtctgcatttcatgtcagcaacatggtcatggagtctgctttttcatttttatttttttaaaatttattgttctgcattgctatggaggaagtcggtgggtgatgaccaatctttctgctaacttggcagaaaagatgcggtttcgtacaggaggagaaacagggtgaaatggggggaaggagcaagaaaggagatatcccatgatatctgccaataccgtaactattgggcttgcatgagttattgaatgttttggagtctatggtggtggtccagatattatgtcctttactatttttttttccttttactattggctgtagagtgaaacaatcatcttagtcca

SEQ ID NO: 24706 - DNA, 428 bp, Glycine max
cctgcataccgctgcgacaagagacaagaagcgacggcagagagcgaacccaaaactagagctaccttccggttaaacggtccactcttgtctgcttttccaatcaagggaataatatttcttagagatattccgaaaccatggctcacgccaatcctatgatttttgttgttcgaattctaggtaaccttgtctccttctgatgctttctagcaccagtaccaacattctatcgagtttgtaacaagaaaaccactgaaggtttccaatcacttccttacgtggctgcactcttcacttcaatgctttggatattttatgcttacataaagacgggcgaaatacttctcatcaccattaacgcattcggttgtttcatagaaacagtttaccttgtcatctatatcacttattgccccaagaaagct

SEQ ID NO: 24707 - DNA, 492 bp, Glycine max
atacccaggccgagccacgcgtgcgaccacgcgtccgcaagaagacgaccgaaggcgatcccatctgattttagcgaccagactactctgtatttccaagctcccaggtctcttaaaccgtgattcaattcttgtcctctttaaagagttaatgagatttcataagatgggaatgtaaaatactgggatgatgcatcacattcatcatgttcttaattatcttgatttgagtgccttaatttaaaattactctgaaaaccgaagtttctattaatgtgcatgttttggtctttgtaacgaccatttgtgcctataggaagttacttctatgacaaagtctgcacattgcttcttctttctaggacaagtctaatgtttaagtttcaacaagtccattagttaagtgtctatttacaaaccaatctgtaagtttcacccatctacttgttcaagctgacctcagaccattacataactaaacactaaaatatc

SEQ ID NO: 24708 - DNA, 414 bp, Glycine max
ggaaggagaacgcgatggcttttttgtcttttgttgttccccttcccaatcttcaactttagggttcctttaatctcgttattcctcttcactcccaagctccgttcactccaacaacactccgatttacaaatggatggaccagctggccgaggtggtgctggcctggacatgtttctaccaaattataaattgggaaaaacactcgggattggatcttttggcaaggtgaaaattgcagaacatgtgttgactggccataaggttgcgatcaagatccttaaccgacgcaagataaagaacatggaaatggaagaaaaagtgagaagagaaatcaaaattttaagattggtcatgcatcctcacattattccactttatgaagtcattgaaacttcaactgacatatatgct

SEQ ID NO: 24709 - DNA, 426 bp, Glycine max
gagaggttgacgcaattcagaataacactggatgctgggtgaggatccagaggttcttggccacactggccataactgtctccatactcttgggaaatggaaaccccgttcagtgcttcgactgcggtagccaccaaaaacagcaacacagtttgtgtgaagagctcattatcccctacggttacccctgctccgagcatactattcaaacgaaggatggcttcttgttatgtcttcaacgtgtctcttcttcttcttctcttcggcttcggaacgatggagaacgaggccctccggatctgcttctgcatggcttattcatggcaggtgatgcatggattctaaatactccggaccaatcacttggcttcatacttgcagatcatggatttgatgtatgggtaggaaatgtgcgtagaacacggt

SEQ ID NO: 24710 - DNA, 318 bp, Glycine max
ttgttctagtgtgtgattgtttgttgttgtagcgtcgtgcgtcttctttagtggtggtgtggttgtgtttgttttttctctcacctgaaaatgtcttgctgcggttgtaactgtggttgctgaagctcctgcaagtgctgcaactgctgctgaggctgcaatatgtacccagacttgagctacactgagtcaaccaccaccgagaccttggtcatgggagtcgcacctgttaatgctcaatttgaagatgctgaaattactgtgcccgctgataacgattgctgcacatgtggaccaaactgctcctgcaacccctgc

SEQ ID NO: 24711 - DNA, 425 bp, Glycine max
acgacataacggtgagaagtcaaaaaatggtcatttgttaatcttgtggatgctaaattttgtgttataaattactgcatatacattccatgtaaagtgtaattcctgctgtgttgaatacttcaatatatatatgtgaataaaagaagctggatgatatgtatagaatcctatttcacggtctactttgctgtgtgattttatatataatctttaaactttcattatcagttctgattttacatatgaacggcacagcacctcaaagaaagcattcatctatcgtgactctaagaataattttcaacatttttggtgttgtcatgcttggaacttttgtgtacactcttattacccattgttcttctttccctatagagcttataacatcctaaattctttatacttttttattttaacattat

SEQ ID NO: 24712 - DNA, 262 bp, Glycine max
atgtgaaatcaacatcttgaattgggcttgctctgtataacgggtgcgggtgcgagaaagcacttgtgttgtttttcgtacgaaatggacactaaacagagttcggtgacagttacgctcaattactgcgcgtttacgttcaccactgaatttctcgcgactatactagcttatgctgtcatcaaagcctcacttttagcccctgatctctatctgctgctattgatcaacactcctactgccaaaggatacagcaaaattc

SEQ ID NO: 24713 - DNA, 439 bp, Glycine max
gatgaaaatgctgatgacacgaagtcagttgtgattgaggctggggaaagaagaacagggcggggatgtatcagtttcagatgatgttaatgaacgtgctgatactatgggtagaaaagaggctattggtcagtgttctggctcatcagttcattcagatttaccaacagtgcctagggaagagaatgatgcatttaaagcatctgagcgaaagttggatacaaataaatctgaggttgcaggagagaggcatgcatgttctgctgctgggtctgatactgctgtataactcgacttcgatttaaacgaaggctttcctggtgatgatgtaagccaaggggagattgcttgacaggaagatcctaccacatcatctgcagttcatgttccttgcccaatgccttttcctatgacattcatctcttgggtctttcatgct

SEQ ID NO: 24714 - DNA, 441 bp, Glycine max
  modified_base (35)..(35): a, c, g, t, unknown, or other
tagggaaggtgcaagagtttgttgtgagctgtaanctagtttatcgtgaggagaatatgaagttgtttgttttctttgttgctgcagtagttttggtagcatggccatgccatggcgcaggctaccaaaggttccctctccgaatgaaaactggctatggtgagcgttcttcggaggtaaaatgcgcaagttttaggcttgctgtggaagcacacaacattcgagcctttaaaaccattcctgaagagtgcgttgaaccaacaaaggactacattaatggcgaacaatttagatcagactctaaaacagttaaccaacaagctttcttttatgctagtgaacgcgaagtccatcacaacgacatatttatattcggcatagataacaccgtactctctaatatcccatactatgaaaaacatggatatggggtggaggaat

SEQ ID NO: 24715 - DNA, 321 bp, Glycine max
ggtagttgtatgacacagaaattaagctagagctacagagtttttgtcttttctcaccttccttgtctcccttcagacaagggacgaaaaatcagagagagagagagagagagagagagaaattccaaaaccatgtcgtcccacagtcatctaagtttcgcctttggggttctaggtaacatcgcctccttcgtgtgctatctggcaacactaccgacattttatagagtttgtaagaagaaatcaaccgaaaggttccaatcaattccatatgtggctgcactcttcagtgcaatgctttggatcttttatgcctatgtg

SEQ ID NO: 24716 - DNA, 436 bp, Glycine max
gtatccactttctgccatgcccaacacgagacatgctcgggtaggcggccggaagatgagtgggagtgcttttaacaagctgcttaatcgacttgcagcagaaagtcatgatctgtcaaaccctgttgacctcaaggaccattgggcaaaacatggaacgaaccgatacatctcagtaaaatagagggcgagacattgtttctggggcagcattacacgaatagaaactgcttttagtgatcaattatggattctcaagtcgaatgagaaaaataatgttaagtgtaaaggccatccgggaaagctaatgatttatagtatgcccttgcttatatgcaggatgcataagcctggtggaagctggctaaatttaagggttgaagaagtgactatatagtcattctctgcatttgtcgcacttaattgtcttaaatag

SEQ ID NO: 24717 - DNA, 427 bp, Glycine max
tgagaagtcaaaaaatgttacaggtgttcttcttcttgttgctaaattttgtgttataaattactgcatatacatgccatgtaaagtgtaattcctgctgtgttgaatacttcaatatatatatgtgaataaaagaagctggatgatatgtatagaatcctatttcacggtctactttgctgtgtgattttatatataatctttagactttcattatcagttctgattttacataggaacggcacagcacctcaaagaaagcattcatctatcgtgactctaagaataattttcagcattttgggtgttgtcatgcttggaactttggtgtacactcttatcaccgatggttctcctttccgtatagagcttataactccgtaagtgcttcatacttttttatttttagcattatttgacgttatta

SEQ ID NO: 24718 - DNA, 466 bp, Glycine max
agaagacgacagaaggggtactactcaatctagaagaacttaatatcattttgatagtatagtatattttttttgattcttatgatcgatgattattatgttgttttaattctattaagaaattgtgacaggatatttgaaagatttattttaatttatctggacatttatattatgataactactagtataaaatatttatgattgctttggttttaataaaatcatctttggaattcatatataatgattgttttcataaattaaaaataatagaaataagcttttaaagtaattaaacatttattttaaccaatgacttcgttctttaatatttttaactatattaaccttaatttaattatttaagaaatgaatttttcataaatatttttaaaatatctatttaaataagtttgggtctctgggatgacctatttctaacacttctactgacaactgaaat

SEQ ID NO: 24719 - DNA, 449 bp, Glycine max
ttagtcgagctatgtataaccattggagttctactcgggtaatttgtgtaattaaataaacaaattcttgacatttgattatttaaatgagtcctaagtttttcaagctcaacattttaccatacaagaaccaaaataaaaaacatgttcattttataggaaaaattaaggaaaaaaaagacaaaaatactctactataacactactagagatgtaatacaatttggtagcgcatttgttttggctacaaaatgtcacgggttcaaattttgtcaatttctccatttgtggcatttttgtaattcttttatcaaattaaattaatattttttatttgtttatttaattaaaaatatcatttttcaataattcttaaataccttcaattacataatgcatatacttgaaaaatgtccaataaataatcttctataaatttcactaaaatt

SEQ ID NO: 24720 - DNA, 435 bp, Glycine max
ttagaccagctatgtataaccattgacgcgctactcgggtaacaggtagattgaaatactcaaattcttgacatgcgattattcaaacgagtcctaagctttctaagctcaacattttaccatacatgtaaccaaagtcaaaaacatgatcatttgataggaaaaattgagcgcaacaaactacagggttactctactataacactactactcatgtactgcaattcgtgagcgcatatgatctggctacaaaatgtcacggcctcaaaacccgtcaatcatatacatcttgaggcatactctaacgccaccatcatagtagatgaatacctggtgactgctaatacaattgaaaatatcattggtcaataatcattaactacgtcaacttacctaatgcatatacttgaactattacaatactgtaatccccta

SEQ ID NO: 24721 - DNA, 447 bp, Glycine max
gaaaataattgatctattgcgataaaccgagtataggagtaatggggtagtagtagtggagagaaatcgcgatctggaacagagtttatctgaaagaaaaagaatcgagttgaaatgggtttctttggtaccattttggggtttttgggaattggagttgggatttcaattgggctcgtggctggctacttactctgcatctaattacaacccaccaatgttgaggatcctgaaatcaagccattggcggagcaagagcaagagactctgcaacgaatgtttcccgagattcctctttggataaaaaatcccgattttgatcggcttgactggctgaacaagtttgtagaatatatgtggctcgatcttgacaaggcaatttgcaagactgcgaataacattgcaaaacctataattgctgagcagattcctaaattcaaaattgat

SEQ ID NO: 24722 - DNA, 428 bp, Glycine max
gacagcggaagaatacaccgtcacgcgctgcatgccctttaccttgtgcttcctgcgttcctgtgagaacccacgttctctaacgcgcttctccttcaaagttcaaattcctatacatttgcgtaatcgcttctcaaatctcaacaaaagtattcccaaaaaaccctaattattattattaaacatgaggccgattctgatgaaaggccacgagaggccactgacgttcctcaagtacaacagggacggcgatctccttttctcctgcgccaaggaccacaaccccaccgtctggttcgccgacaacggcgaacgcctcggcacctaccgcggccacaacggcgccgtttggtgctgcgacgtctcaagagattcgggtcggctcgtaacgggaagtgcggatcagaccggcaagctattgaacgtgc

SEQ ID NO: 24723 - DNA, 354 bp, Glycine max
ctacatatttgacatggttacatgcaacaaaagatgcatcgatcaggtggaactctgatgaagggtgcagagatctacgcactgcacttagcactgccaaatggcagttagaggaatttgcacgggcggtgaggtcaagttatggcaaaagctcaagtgaggaagcgagaaataggcaccgagattttatcactgcaattgaggataatataatgaaagttgagcattcgttgagtgaatcagttgttcctggaggcaaggcgtctctgccttggttgcgtttagatgaatgagaacaggatgaaccttgctttgttctttcaggaatgccagcagctaacaacaaggacattg

SEQ ID NO: 24724 - DNA, 422 bp, Glycine max
tatccaggatccagtgaccaaaaactggtggtgaaatatggcaaatataaatattggatattttccagcagccttgttctccaacatgacctcagctgatcaagtggggtggggtgggcgaacaagaactcctcctaatactcctagtcccccaatgggatctggacactttcctgatcatacttttcatcatgcgtgttattttacatttgtctcgtttcaaaatgaagcaacaagaaattatggaattggaccacatggagcacaaacattctctgatagatctgattgttttggtgttcgatacttgggatatattgcagaggaggttggatattctctccaatttggaggacccggtggtagttgtggaaattaattaatttttataagcaagctttgtcagatatttgaaaaaataa

SEQ ID NO: 24725 - DNA, 452 bp, Glycine max
gaagggagatgttgtcacaaacctagatttcatccgtgagatgttgatatctagtgacttcaacatgatgatggatcagaaaatatacacatgtgagcatccccaatgcccttatagcgaagttcgccttggtttccatgataggtctgctagggacaatcatcaattgaattgtgcatacagaaacagttctgcatattatggttgttgtcccaatttccatgctatttatgataatccactcatattcccatatacaaatttttattctaacactacatcacattttttatgaactgttgcattttaatactattttatcttttcttatatatttttgtactttttcaaatatttcttatattttttattacaatatttttttattatttttttatgtttcattatcttatcttttttatatttttttttttctttttaatattattttt

SEQ ID NO: 24726 - DNA, 203 bp, Glycine max
gcgaccacgcgttcggaagacgacagaacggtagcttctatagcaagttaaatcagtggaaattctagataatcgggttaacaacattcaacacaagatatgtgaggaaatacatgaataaaaaatgaataagcaacaatggaggtttaaggagcatctacttgaacctctggtgctttaattaccacttggtgggacttgat

SEQ ID NO: 24727 - DNA, 447 bp, Glycine max
atatgattttagtatatttatattgttcatagttctgatagttctggtattctccttttcatttatcttacccaactttttctaaaggattttctttcccaaattattctctaaagattttatccaaagaaatttatttgttttacgtgtgtgtataaatatatccatgcaaaatgaatgtctaattctacgcaacaattatctatttattttacctggtaaatttacatatttcatacattgatatttatttgtaaatcaatttattaatataaatttatatataatatattaacaaatttaaaggagtttctttaaaatttggagttaatcaaagtcaaactgatgtactcttttgcaatttctctaaagttgttaaatttttaaaatttatttgtcagattttgtagaatgtaacagaacaaatgatcctacagtattatatgt

SEQ ID NO: 24728 - DNA, 438 bp, Glycine max
acatggagatacaaaaatatatagctaaagttttctcgcccaaacaatacatcgaagttaatcattggaagatgtatcacaggtctgtcactgactgggaatagacaaaataatgagcagctaagaagagcagcaatcaactcctgaaaggccagaatctgataatgttaactataaccatctttagcatgcatcatacaataaaaatggtagtagaagcagcatcaacagttgtgatagcagtagcagtcaagttttactataattgtgtaatttatttagtagttttgatgctgttggagtaaatgcacataaagaagaaagtaacctgggtaaggaagactatccctggttgctgtgaatccaacaagcgaagagcagtagtgagcatagctccggcctctccatctatagccatattatcagtgttttgatagt

SEQ ID NO: 24729 - DNA, 428 bp, Glycine max
gacttcactcaattaactcttccgttccttgtttctttggcatcaccagtgttccatatttcagagaaaatggctttatcatctccctctctagtgttcaccgtacagaggtgtcaaccggagctggtggctcctgctaaacccactcctcgcgaagttaaacccctctccgacatagatgaccaacagggcttgcgtttccaaattccattcatactattctatggtaatgaaccatcaatggcagggaaagaccctgctaaggtcattagagaggcacttgcgcaaactcttgttttttactacccttttgcgggtaggattagggagggacctggtagaaaattggtggtggattgtactggaaaaggtgtcatgttcattgaggctgatgcagatgcaacacttgatcaattgggtgacacact

SEQ ID NO: 24730 - DNA, 431 bp, Glycine max
  modified_base (398)..(398): a, c, g, t, unknown, or other
  modified_base (412)..(412): a, c, g, t, unknown, or other
tacatgacactcgttgtgggtggcatgtactggagaggtaatggcatattcttgtatacgtgcctcttacaaagtggcacgcactggaaacatagtggtgtgaatcagtaggactcaccaagggcggaccttaggttttacgagccctttggaggatcaactagggaactgtcggacctgggttttaggcatcgtgctcttgcatacatggcacttgtcgtgggtgacatgtactagagatgtaatacctgtgaggataaccaagcacggagcttgggtttttaaaaaagattatggaactcaataaatcaagatgggggtgaattggttttcaaacaaaaaggtactttttaaaaaatgagttacgaaaaaaacttttctaaacgaatctatcacanaacgaatatgaatngaatgtaatcaatacttaa

SEQ ID NO: 24731 - DNA, 445 bp, Glycine max
gatccaacgataaaacaagatactcaatggtctagtggaagagcttcaaacgaagattcagaacgagaaaaaggggaaatgggttgtgcttatatcaacatgccaggcttcatgagggcaatgtttgttgcgttatgtgcgctgatgatattgccggagctaacacatgcaaagcatgcatgagtcactaggctctacatgtttaatatctggatgcaaaacttcacaaggctttgccaaacaaataacattgtaactgtcaatggacgatttactggtcctagaatcatagcatgataaggcgacagaattatggataaagtggttaaccacgttcaatacaatgttacccttcattggcatggaattcgccaactgaaaagtgcatgggcagatggacctgcctatatcacacagtggccaattcagacaggccaaagttttg

SEQ ID NO: 24732 - DNA, 53 bp, Glycine max; identical to SEQ ID NO: 1282

SEQ ID NO: 24733 - DNA, 436 bp, Glycine max
tggtacatgacactcgatgtgggtggcatgtagtggatacggatggcatattcttgtgtacgtgcctcttacaaagtggcacgcactggaaacatagtggtgtgaatcagtaggactcaccaagggcggaccttaggttttacgagccctttggaggatcaactagggaactgtcggacctgtgttttaggcatcgtgctcttgcatacatggcacttgtcgtgggtgacatgtactagagatgtaatacctgtgaagataaccaagcacggagcttgggtttttaaaaaagattatggaactcaataaatcaagatgggggtgaattggttttcaaacaaaaaggtactttttaaaaaatgagttacgaaaaaaacttttctaaacgaatctaatacaaaacgaattttaatttgaatggtaacaattcttaaac

SEQ ID NO: 24734 - DNA, 302 bp, Glycine max
tactgatcatcttacttcgctcattctcttccaatctcattccattctgcccatttaattcctcttcaagttgcatactttatttctcatcgcatattcttataaaatgtggaacattgtgcgaccttgtccaactcactctgtgcattaatcttcaccttatttgcatggttatcgattctgtcgttgtcttaccccgtttcggtcactatttctaactaaattacacacataacacaccatcctattttaacaaatataatttctttgtcatgaatcaatacacacctatctttttttat

SEQ ID NO: 24735 - DNA, 290 bp, Glycine max
atattgacaaaccgtacggctgatactcctttataatcacttacattttcatctaggtcaactttcctatgaaaatcgccatccgtgagagcacaaatcccactttatatcatcaagcttgcctatcgtcattgatacatcacattcgctcactgcattgctgaaccttaacaccttaacgttaggatttcttctactatcctcacatgatgaactcataaactactacctatgattctatatcaactgaaatcatcatcattttcacttttatcaattatattcatcac

SEQ ID NO: 24736 - DNA, 450 bp, Glycine max
gaccacttcccatcttcgcacacaacacagccatccgtgtctctcgcttcttttgctctctgccctaaccagcctcaccagatcttttacctccatttccagtgcatcacaccttagcttcaagccatcacaagttgtagatacagttaatactcaatatggagctgagtactataaaagatgcttttgaccgtgttactaagaagcaaaagttatcttgttccaagactcaagaagcaattgatcagatcagacaggaaattgagagtgttttagacacactgcagtcagcgaataacactgaccatgaacttgattataaaactgtcctgaatgagcttaaggccggttttcttttaattgctccacttagtcaaatggaaggtacacagaaggagctaaatgtagcactcaccaagtatgggaagcttcttgagaaacatttcaacc

SEQ ID NO: 24737 - DNA, 453 bp, Glycine max
acagcgggatcaaactacagatgttcagaagaggaagtcggtagtagatgtttctgttagtacaaataaatctgtattgagaagatggagtgccggtatgggggaaacctctgttcaagaccaggcagaacatgttcctgaagatcctgttccagtgacttctaatgatgtggtacatgctgaggctcctacaaattcagaagtaggagtggtgtctgattttattaccgaaagtcacaataataatgataacactgatcccgacgtaaaaccagaaagacaggaaaatataggttcttttgctgcagataatccagatgaaaccaacccaacagtgaaaggggaaactaacaaaaagttagcagcatcagcagagtggaatcaacgaaagcaagaagagttcaaccaaattcttaaaaaaatggtcgaaagcaaacctgttttatttgggaa

SEQ ID NO: 24738 - DNA, 394 bp, Glycine max
gacagatacagatccttagccaccaagtagagaccgagtaacaatgagtattctcttcccaagaagttcctcagcagcaaagaggaaaagggtcattagagaacttgttcagggtcgagactatgctactcagttgaagtttctgcttcagaagcctattggccctgatgggtctgtttctgctaaggaacttgtggccaatgtgctgagatctttcgctgaaactctctctgtgttgacttcttcttccgaggattcaacaagtggtcatgatcatgacgacgaggttattgctcagaatcttgtaatttccggagaagatgcctcgcaagtggcaagcattaatgatccgagttctgaagattcgactgaaagtaagaaaggatcaaaggat

SEQ ID NO: 24739 - DNA, 419 bp, Glycine max
atggtgaaggtgcatatgcgtcccatgggttttaagaacaaaccttactggatcattaagaattcatggggcgagagctggggagagaatggatattacaagatctgcagaggtcgaaatgtgtgtcggagtagattccatggtctcaactgtagctgctatatatgcatccagccattaaatacaaagatatgcctgattgtggttgtgatgtgatactggactaaggggagtttgtctaaatatttatggtgtgaactttatcatttggtactggtaaaattatctccgtatacgatcaggaaactgctaacaccatgttgtttatgtagtatgtaatttctgtatgtatgcttgacatatacaagtgggaaatccgaggaaatgtgtggtcctaaaaatggtgcaagataagcaac

SEQ ID NO: 24740 - DNA, 360 bp, Glycine max
gacacacaacacagtttccactttcgactttgactgtaccaaagtcacgcttgctccctctctcaacggcttccctcttcttcctctctctctctctctctctggacacacacatccttggtgttgaacgggtttttgggtgaaggagtagtgttggtggcttcatcttttagtgaataaggatacagcagcatgcggtggtggcttactctctctgttgatgtataccgcaaagtgatttccttgaatctgtattgcaaagttattctgtaactcttaagtcccttttgatcaaaaaaccttttacaatcatctcactcatctcttccttgccttgaatcaatgggatccaaatttttt

SEQ ID NO: 24741 - DNA, 419 bp, Glycine max
gaaggtgtaagagtttgttgtgagcgataagctagtttatcgtgaggagaatatgaagttgtttgttttctttgttgctgcagtagttttggtagcatggccatgccatggcgcaggctaccaaaggttccctctccgaatgaaaactggctatggtgagcgttcttcggaggtaaaatgcgcaagttttaggcttgctgtggaagcacacaacatccgagcctttaaaaccattcctgaagagtgcgttgaaccaacaaaggactacattaatggcgaacaatttagatcagactctaaaacagttaaccaacaagctttcttttatgctagtgaacgcgaagtccatcacaacgacatatttatattcggcatagataacaccgtactctctaatatcccatactatgaaaaacatg

SEQ ID NO: 24742 - DNA, 331 bp, Glycine max
taaggtgtaagagtttgttgtgagcgataaggtagtttatcgtgaggagaatgtgaagttgttagttttctttgttgctgcagtagttatggtagcatggccatgccatggcgcatgctaccaaaggttccctctccgaatgaaaactggctatagtgagcgttcttcggaggtaaaatgctcacgttttaggcttgctgtggaagcacacatcatccgaacctttaaaaccattcctgaatagtgcgtttaaccaacaaaggactacattaatgtcgaacaatttagatcagactctaaaacatttaaccaacaagcttttctattatgc

SEQ ID NO: 24743 - DNA, 397 bp, Glycine max
acgcgacaacactacatcaggttaccgatgccagaacacgacagcaggtggagtgatcatcattcacgatcagcgagaatgtctcccaagggttggatctttttacctgtgttatgcttctcatcactgtcacttagtctttgccttccttaggataatggacttgctatgaacttctacaaggaatcatgccctcaggctgcagacatcatcaatgaacaagtcaagcttctctacaagcgccacaagaacactgctttctactggctcatacacatcttccatgactgtgctgctcaaagtcgtgatgcttcactgatgctagactccacacgaaagagcttcactgagaaagaaacacatagaatcttctggttgacaaatatcacgttcattg

SEQ ID NO: 24744 - DNA, 450 bp, Glycine max
gagggttgttttttctggtgttagtgttagctctatggatccatgcttcctctgtgtggattttcattttatcttctcctccttaattttccaacaaaatctcaaacataaataaattaaaaaatagcatttttatttacaattaataaagatatcgggattcatcttgttcttattttgccccctttttcttctggtctcccgaatcagaaaccctaatcagtgtttgggatttcagataaagaaatttaaacagatgaagggtctcttcaagtctaagcctcgcgctcctgcagatgtagtgcgccagaccagagatcttctgctctttgttgatcgcagccccgaaacccgcgaaagcaaacgtgaggagaagatgtccgagctatttaaaaatatcagggagctaaagtcaatcctgtatggaaatagtgaatctgaaccagtctc

SEQ ID NO: 24745 - DNA, 449 bp, Glycine max
gatgttacggttgggccatcttgtccatctatcccacggctaatggttgattttccttgtttatttatcttcttcctcccttgtttgtttgtttctttgtttctttggcttgacaagaagaagatgatgatgatggacaagggggtgttggatgatgtgataagaaggcttctggaagggaaaggagggaaacaggtgcagctctctgagtccgagatccgtcaactctgcgtcaacgccagacaaatcttcctctctcagccaattcttctcgaccttcgtgctcccatccgcgtctgcggtgatatacatggtcagtaccaggacttgctgaggctttttgaatatggtggctaccctcctgcggcaaactacttgtttctgggggattatgtggatagagggaagcaaagtttggagactatatgtttgcttttggcctacaaaat

SEQ ID NO: 24746 - DNA, 367 bp, Glycine max
aatccagcttaagcggagaagagtatgatcgctattcacaccaatatgaactgatacgaaatcttaatgaagtttacgataatgatcccggaaacttcaacaagattgttgagcttatgcaaaaaatgcaagaatgtggacaaccaccaaatgatatcgtccaggagcttgctcctgattttgatttagccagtcttggccagttgtaagtccccttggaatcttgaatatgcaagcttagggcatgtgctgttgtttattaccctatgtatgtaacattaatctttatttatttatcttgaaataagaccctcattagaaaatatgcattggttatttttagctccctaaatactcaaagtaatga

SEQ ID NO: 24747 - DNA, 427 bp, Glycine max
gttgcagagctcggatggtgtaaaatgagtgtatgatgtgaagctatgggctggaaaatgtggatgtaggagatttcgggacgaaaggcctcaaaacgcttcgtcgtttgtggttactgagtcctgagtgatcttgtcatccgacctttgccatgacaggtgcgcttgcttggcaggtcaaaatatgttaataaaaaaagttttattggtttagggagagatcgcacgggagttgcccggtgtctctctctcgtgtggcgtgtggtgtttgctgtgctctccttttcgatatgccttttattattacctatctgtcgattcactccgtattacgactctggatcagagggatacatcagaggattcgctccaacttctatcgaataaggtattatctgtcaatttacattgcaaagggttaggatat

SEQ ID NO: 24748 - DNA, 473 bp, Glycine max
tgtggaagactacagattgtgtgttgtcagattggtgtggcgttgaccgtgaagtgagcaggtttaatatggacaaaggttcacagctgatactcctttatagtcacttccctcttgaggtatgtcaattttctcacgaaaatgggaatccttgagagcataagtacaagtgtctctaatcaatcttgtgtatggagattgatatatctgattgcctctctccatggaagaattctttgatttgaaaatatgcatctttgctaatatccttactgtcttcaagcttaatcttctggttatgactctctggagtttgttaccatcatcacttgcacttttccaattctgttcattacttccataaatagaatcattaaactttcttgttgattttttgccctttacagctgctatacttatttaactttaaaacttcatttccctcttttgatcaattcttcccaataactttt

SEQ ID NO: 24749 - DNA, 443 bp, Glycine max
  modified_base (5)..(5): a, c, g, t, unknown, or other
ttatnggaaccatgctaaactcattcactattgaggtaattgtgatagtacatacatgacagctaatcttactgttttattaatgtcttcagttaatataatgctgatgcttagactaacaagaaatttattggtaatgaattgaatcactgtatatatcttaattactactacaacataacacaatgtgatagaggttagatttttaggtctctatatatatatgaatttttttaatgagtttaatcctttaaataaatagaatacacattctgactaattatgtgtttgagtgttataattgttttttctagaccttttttaattccattagaaaactgataagaagtaattttttttaaaataaactaaatcaaatatgaactagacatattttatagaaaaaggatgaaaggactaaaaatcaaattctggttgtcaat

SEQ ID NO: 24750 - DNA, 330 bp, Glycine max
aaattcatcaaatccttcttcatttggtttactgccaataattcatggactaggtctcaaatttgaaatgggtcttatatatcaaaacaacacttactatagaatatattaccctccattatatccttcccactaacttttttcatatctttacatatttgtctataaatatcttcttgtaacaatttctactttttacatgattcaacatccatatttcttcattactctttctaattctcatcaaatgattcaacacttgaatctttacctacacatttctttttatatatcaaatttaattaattcaatgatatagtaaaatcattt

SEQ ID NO: 24751 - DNA, 275 bp, Glycine max
catgcatagtgtgtcagacatatgagatcttttaatgtgcccgttctattgctcgggggaggtggctatacaataagaaatgtggcacgttgttggtgttacgagactagcgttgctcttgggattgaactagatgataagatgcctcaacatgagtattacgaatattttggtcctgactatactcttcatgttgctccaagtaacatggaaaacatgaactcccgacatttattggatgaaataagagcaaaacttcttgataatttatctag

SEQ ID NO: 24752 - DNA, 455 bp, Glycine max
  modified_base (248)..(248): a, c, g, t, unknown, or other
ggatgtcatgtgtgatgctggtaggtcttgtggtgtgcaatcaatctgggtgtatggtggaacctctaaagggccacaaatctcctcactaaaatctggcattgacattatcattggaactcctggtcgtatccaggatctgattgaaatgggtatctgttgcctaaaagaagtatcgtttgtggtacttgatgaagcagatcggatgcttgatatgggttttgaacaaatagttcgctctatactgngtcagacatgttctgatcgtcaaatggttatgttcagtgctacatggcctttgccagttcattacttggcacaggagtttatggatcctaatcctgtaaaagttgttgtaggctcagaagacttagctgccaatcatgatgtcatgcagatagttgaggtcttggatgatcgttctcgtgataagcgcctagctgctttactggaaa

SEQ ID NO: 24753 - DNA, 440 bp, Glycine max
  modified_base (429)..(429): a, c, g, t, unknown, or other
gagggtgttgttacttcttctctggttgattcggatgtagagtctgcagtttctcctcgttgttcttcgctttcctgttttcaatttcgattctttcgttaatttaataagatgtttgggagggcaccgaagaagagcgataatacgaggtactacgaaatcctcggcgtctccaagaacgcttcgcaggatgatctgaagaaggcttacaagaaagccgccattaagaatcaccccgacaagggcggtgatcccgagaagtttaaagagctggcgcaagcttatgaggttctgagtgaccctgagaagcgtgagatatatgatcagtatggtgaagatgcgcttaaggaggaatgggtggtggcggtggccatgatccatttgatatcttttcatctttctttggcggtgggagtccctttggatcangtggaagtagt

SEQ ID NO: 24754 - DNA, 380 bp, Glycine max
tacttttggaactatgctaaactcattcactattagagtaattgtgatagtacatacatgacatctaatcttactgttttattaatgtcttcagttaatataatgctgatgcttagactatcatgaaatttattggtaatgaattgaatcactgtatatatcttaattactactacaacataacacaatgtgatagaggttatatttttaagtctctatatatatatgaattttattaatgagtttaatcctttatataaatagaatacacattctgactaattatctacactagcgttataattgtttattctagacctttcttaattacatttcaaaactgattataagtaatttattttataatttactacatctac

SEQ ID NO: 24755 - DNA, 413 bp, Glycine max
catggaagtcgtcacgggagatgtggtgtttgtgggccagttttcatcaacaagctgcatgaggatattgtgcttcgtggactgtaggatcagatctctggtactgcttgatcacatatatgttggacataagtctgctggctaatgtatcatatacatgccaagatcgattggaaaaattatgtgccactggtatggctatgacacttctaatgatgtatcctatttgatgcaccaacatattgcaaagtgagaggtcatacaactacttttgatgggccaaatgatgacatctgacacaaattgctaggtactaaatgtccagaaagttgctaatgctgaggagacttacctggtcatcatgatcaatcacgtttaaagcgacaatctgatcatcaaagtaaacatgagtg

SEQ ID NO: 24756 - DNA, 414 bp, Glycine max
gtagacgttaccaggacaattgtaccacaaattagaggcttgccttgaggtgaggcactagcttgcactacgttgggcaaacgtgcctattcatgtcatgccccaaggtcaagtttttgaaattggtgactagcaattgaaaggcttcagagccattttttttcattactgtaattccacatttctacctctctcttgcttgccttattttctttgacgctacaatgctagcttatatatatgtctagtaccttttttctacctttgtccatgtaactaaaagtacagagcttgcaatcatacaatggaacacattataaagaacatgaaccaatcttgagaatcactattttagagtatgcaactatttaaaagcttaaaaatgacaaagtttgcacatcagaagtaacatta

SEQ ID NO: 24757 - DNA, 177 bp, Glycine max
actcttctcaacacaacattaaacgacatcccatgcaactcttactaataaactctgttctctgaaaaccctcatttctcttcttctttcatcatctctttctcttctatcaacttccatctatgcctctcaaaatcatacatttcatttaaacccacatcatccactccattattc

SEQ ID NO: 24758 - DNA, 458 bp, Glycine max
acagaagggaggttttgatgttgtcatgataaaccctggtacagcattgggccctctgctgcctccaagaatcaattcaagcatggctgtgcttgttagtgttctcaaagggggcaaagagacctacgaggacttctttatgggaacggctcacttcaaagacatagcattggcacatattttggcacttgagaacaagaaagcagcatgaaggcacttgtgtgtggaatctattcgtcactttagtgatcttgtggacaaggttgctgagttataccctgaatacgatgtggctaagttgccaaaggatacccaaccagggttgttgagagcaagtggaaaggatgcatcaaagaagctgattgatttaggtctagaattcactcctgttgagcaaatcatcaaggatgcagtggagagtttgaagagcaagggctatgtctaatatctctgctact

SEQ ID NO: 24759 - DNA, 303 bp, Glycine max
gatcacagcttgaacaagtgaccattcaaatcttctgtcacagatcccgttctcttctattcagattgaagatcacggttgatgtcttcaatgggtcctcctgctgatgaaaatcttgaaacaaaagagatcgatctcagaagtatgtcatcttcttcacttggtcaggcaccacaagcccacaaagtagcaattcctccaagacagaacctcttcaaggaattccaatccactataaaagaaacattcttttctgatgatcctctaagacccttcaaagatcaacctagatcaaagaagatt

SEQ ID NO: 24760 - DNA, 449 bp, Glycine max
aaccggacaacgctcatgataaaaaatattcccaatgagtatacttcaaagatgcttcttgttgccatagatgagcaatgtcgaggaacttatgattttctgtatttgccaattgatttcaagaacaaatgtaatgttggctatgcattcatcaatatgattgatcctggacaaattattccattccaccaggcttttcatgggaaaaaatgggagaaattcaacagtgaaaaggtagcggtactcgcctatgcccgaattcaaggaaaatctgctcttattgctcattttcagaattcaagcctaatgaatgaagataaacgttgccgccccattctcttccatacagatggcccaaatgctggtgatccggagcctttccccttgggtaacaatattagagtgaggcctggaaaaattcgcatgaatggtaatgaggagaatggcag

SEQ ID NO: 24761 - DNA, 448 bp, Glycine max
aggaagaggacatgggttgctgatgctgaggaatgcaagagaagaggttctattgagactgcccgagctatatatgctcatgccttgactgtcttcttaactaagaagagcatatggatcaaagcagcccagctggaaaagagtcatggtaccagggaatctcttgatgcattacttcgtaaagcagttacctacagaccacaggctgaagttctttggcttatgggtgccaaagagaagtggcttgctggagatgtgcctgcagctcgtgctatcctccaagaagcttatgctgccattcccaattctgaggaaatatggcttgctgctttcaagctagaatttgaaaaccatgaacctgagagagctaggatgctgttggctaaagccagagagagaggaagtacagaaagagtctggatgaaatcagcaattgtggagagagaac

SEQ ID NO: 24762 - DNA, 443 bp, Glycine max
ggtgaagtaaaagctgctaacccaaattcttgtcagtggtaaccatgacagttgggtccttcttcatcaggacctccagggttctcaactcctccaactttctgcttctctgcactctcagtggtggtggtgtagtggcatactcagaatcacaatcaggagctgaacgtcctagtattgaagctaatgagcctgccaaaaagaaagtggtggttcttggaacaggatgggctgctaccagtttccttaaggatctggatgcttcattatatgatgttcaagttgtttcacctcgtaactactttgcatttactcccttattacccagtgtcacttgtgggacagttgaagcacggagcattgtaaagccggtccgaaacatcattaaaaagagaaaaggagaagtgaatttttgggaggcagaatgtgtcaagattgattat

SEQ ID NO: 24763 - DNA, 432 bp, Glycine max
attaaaactcatggcaataagcaatctatgttctttgttgaatttaaattgaggtcaccctcaggatcatcctggtatgcaccaaaatgtagattgtaagtttatgtattttaggtgaataagaatttgtgcaattttaatatgaaggtggtaatatatgattgggatactaatatgaactttttataggaataattcaagcataaatagcactgtatgttgtgttattttgtttctctctcaaggttgtgagaaaatggaattgttcaattgttctgatattttcttggaactattcttgtaacaggtctctcacaattggtcaaatgcaagggaagtttcaaatggtagttgtaaggcgtacagggcatgctattcaggtttgtactagccatgtctctttctgcattcattataaaaatgaagttacta

SEQ ID NO: 24764 - DNA, 200 bp, Glycine max
tgcattaaaactcatgtccataagcaatctagggtctatgtggaatttacattgaagtcaccctaatgatcattctgctatccaccaatatgtatattgtaaggaactgtatacaaggatcatacacttagcgcaattacaatatcaaagaacaaatctatcatctgtacactcatctcaacaacactattggaataatg

SEQ ID NO: 24765 - DNA, 393 bp, Glycine max
gagagacaatcagtgtcccacgttgttgcgattgcggggctctgttcctacgataaccggttcctctcgccggaaaaccgacattgatctctctctccggcgatccccgcccatccctccgccatgagttccggcgagctcctccacatacagccccaggagctgcagtttccctttgaattgaggaagcagatctcgtgctctttgcagttgtctaacaagactgacaactatgtggctttcaaggtcaagacaacaaatcctaagaaatattgtgttagacctaacactggagttgggatgcctaggtctacttgtgatgtcatagtgacaatgcaagcccaaaaagaggcaccttctgacatgcaatgcaaggataagtttcttcttcaa

SEQ ID NO: 24766 - DNA, 263 bp, Glycine max
tgttggttctagtgtgtgattgtttgttgttgtaggtcggtgctcctcctttggtggtcttgggttgggtttggtttttcttttaacttgaaaatgctttcctccggtggtaccttggtttccgaaacctcttccaattccgccaccgcttccgaagccttcaaaatgtccccaaccttgacctccccttaatcaaccacaaccaaaaccttgtccatggaattgccacctgttaaggctaattttgaggttcctaaaatggt

SEQ ID NO: 24767 - DNA, 414 bp, Glycine max
agaatacgacagaaggggaagtggatctgaattcagattcacaacaacaaaacgttgctttcccctctctgctattaggagagacagacaactcactccttcgccaatcggagcatggcggagctccggcactcttcctccctcggcagccgagcctccaattctccgatgaagcgcgacgccgtcgccgtcggtagcgattcctcccctctcattcccgacaaccacctcgcccacgacgacgacgagcacgatcgacactcgtccaaggaccgcgaccggcaactctgctccttcttcaccgacgaccctagggtttcgccttacaactccaggatctctatctttttcacattacttcttcttctcgttggtttagtttccctattcagaatctttcataatctcaatgcg

SEQ ID NO: 24768 - DNA, 352 bp, Glycine max
tggggtggcagatagcgaacccaaaactggaactaccgggcctgcaaaccttccactattctctccttttccaatcaatggaataatatttcttagagatattccgaaaccatggctcacgccaatcctatgattattggtgttggaattctaggtaaccttatctacttctgatgctttctatcaccagtaccaacattctatccagtttgtaataagaaaaccactgatagtttccaatcacttacttacgtagcttcacttttcacttcaatgctttgtatattttatgcttacataaatactggccaaatacttctcatcaccattaacgcaattctttgtttcatat

SEQ ID NO: 24769 - DNA, 422 bp, Glycine max
acagaacagtttctagggccaacgaatatgcataaatacaacgagaaatgcgaatactgattccagtgagtataccgtaatatagcataatatccatcctggatatttacattatatctatatatctatctatatatagatagatatatagatagatatatacatatattgctaatatatatctaacggacttatttaaaattctttaatataatgtttactaaacaaatattccatttgaactaatcctctgaatctccaccatcgactaaaaattagctatcatgattactagataagccgctatcgtgaaattactacacacgctgctcttaggaagcagtgcatgagcatcttgggtcgagacctagtagcggcatgacatcttatcttctaaaaaataagtcctataatgaacctca

SEQ ID NO: 24770 - DNA, 357 bp, Glycine max
ggtgcttcagtgaatttctctgtgattggtctcccaaggttttcatctctcgccatcgccgttggagaacgctccaattttctctccaacaattcgttctttcccttctcaatttccggcgagttctccctcttcaatttctcgtaagattcatcgatcacaaacttatattgatttcgtttttctgacactgatcttatttttccaatcggttttcttctccaacatttatcgcttccagaatccagatctggatgcacatgaaccattgtttgcatttggggcaaccttgatttgggtttttaagtgctttatggaaactgtggtctttaaatttttaaacttttgtcgaatgac

SEQ ID NO: 24771 - DNA, 221 bp, Glycine max
acctattatttaattactgatctaataatattaacattcggacaagattaatataaacttatcattggactttatacagtattattcatcatttaattaacatttcatcttaattcattctctctcatcatttaattaattaatcctatccatttttattttctactttatataacattaattcttctttctcattatctttacatacatatatttattct

SEQ ID NO: 24772 - DNA, 402 bp, Glycine max
gcccacgaatttgcaaatctcaaacgaagccctgttctcgctctcttgaatttcacccttttagcatttgtacattcctttcccttccttgaatcgttcttaattgcgagaggggatatcggagaagttgattggcctcccattaattgcaggtctgaatgatctgatggagtctaaagttgggaagaagaagtcgtctagtagtaagtcccttttgtacgaagctcctctcgattacaccattgaagacgttcgaccacacggtggaattaagaagttcagatctgctgcttactccaactgcatccgcaagccatcctgagattccctaggttgtgtgacgacatagcccccgtagtcttgcatctgctatattattctagtctcttcttttcccttttc

SEQ ID NO: 24773 - DNA, 399 bp, Glycine max
gaccacaccgagtcgcagaaaaagaaaaaagcgatcatagtttcacttcggccttatcgagtttagggtttcggttctctaccctatctttcacgtatcgaaaccttaaatttacgatcaggtctgagcaatctggttggtagaacctttggtcttagtgagtcaagttttatgtctgaattagacgatcaaattcctactgccttcgatccttttgctgatgcaaatgctgatgactcgggtgctgggtcaaaggagtatgtgcatattcgtgtacagcatcgaaatggtaggaaaagcctgacaaccgttcatggattgaaaaatgaattcagctttaacaagatacttaaagacgtcaagaaagagttctgttgcaatggaacaatttttcaagac

SEQ ID NO: 24774 - DNA, 339 bp, Glycine max
acacaacttattttaatcacattactccatttccatctattcacattacttaccattacttctctactctttctatacctttattactcttacattcttgtatataactctatcatacttttactatctttctaaatgtatacattacatatatctctattcatttgattcacattaacaccaactcttctttcattcacccataatttaaaaatacctctatacctcttacctatataacataacattatatatttaaatcttttatcatattaaattttctacattcattattacacttaaaccttatttatacttcttctcttccattatatattt

SEQ ID NO: 24775 - DNA, 324 bp, Glycine max
aggtgtgcgaacacctgagagaagaccacttaagacgcctatcaatatgcacatctcatacgagtccctacaatatgtatttccaattcctcagtcttaccatttgtacattcatttccattacttgaaacgctctaaattgacagacgacatactagtcaagctgattggtctactattaaacgacatcctaaatgatctgataaacttcaacgttatcaacaagaactcaattaatatatagtccctaatgtactaatctcgaatctaatacacgattgcctacggagaatcacactgagtaaagatgcacatcagatttac

SEQ ID NO: 24776 - DNA, 420 bp, Glycine max
gccgctgagctccctttctcctcggtccacagagacaaaatggaagacaggtgccaacagttcatcacgaaagaaaggactagctgagccgagatcactaactaaaacgaatttaatactaatcgaaaatactaatagaatagaaatagaactgtcttttcatatagatatcccttcaacacaacataggtcatcgaaaggatctcgaagacccaccaacgcacgaaagccgggatctttcagaaaatggattcctattcgaagggtgcataaccgcatggataagctcacactaacccgtcaatttgggatccaattcggttccttaggaggtatcgggaaggaattttggaatgtaataatatcgattcatacagatacagaagaaagggttctctattgattcaaacgctctaccta

SEQ ID NO: 24777 - DNA, 280 bp, Glycine max
ctttgactcaccggcgagtccatctatcgccagcggcgacggcgctccggccaccggtccggccaccgcctatggttccctcactttctcgtccttcttcttctcagaaatatgccttctcagaaagttgaaacaggtcatcaagacaccgaccatgatgttgcaatggattactatggtaagaggctggccacggcttcatcatatcacacaattaagatcattggggtcaataatactgtctattaccatcttgcaacatttactgctcaccaaggac

SEQ ID NO: 24778 - DNA, 310 bp, Glycine max
cccactcgtccaaccccttacaaaagaccacacaatttacttacttctaattacacatactccaaacggcttactggaaactacaggtgagcactaaataaactactatctaatcaataattactaactataactaatataatactaattcttaatactcctagaatacatcttcaactctctattcatatacatatccattcaacccaacatatttcattgactggatctcgatcacccaccaccacactaaaactactatcttttaaaacatctattcctattttaaacatacataactgtatccata

SEQ ID NO: 24779 - DNA, 208 bp, Glycine max
ccactcctacaaccacacatacggaccctgctaaactaccactcttctgcatccacagtgacacaccagtatactggttccaaccgggcgggacgaaagaaacgactagctgatcctagatcactaactaaaactactttaatactaattcaatatactaatagaatagagataacactgtcattatatatagatatcccttcaacac

SEQ ID NO: 24780 - DNA, 344 bp, Glycine max
tgttaatattttgaatgtagcttttatgtacaaagtttgggggaaaaatcaaagtgcgggtgggtgaatgatatattataatatatacattatgacattccaaggatttctcaatcaatcctataaaattcctcaccttaaaacatttacgattatatttattatcctgagaaacacattgttaatgtagaactgcatacatttaatgatatagtcaattattacaatgccttgcctagtgatcctgaaactgatataaaaactgtctaataatcttttactactaaatctctatatatttatttttatctttatccttatttaatcaaacaaacttttttaat

SEQ ID NO: 24781 - DNA, 423 bp, Glycine max
ggcagcgcttgatttgaggccaggcaagccccactcaaccaccgcacctctcctcgttcacgctacccctttctgctcttcttctacctttcaagttttaaaagtataaagatggcagagacattcctatttacctcagagtcggtgaacgagggacaccctgacaagctctgcgaccaaatctccgatgctgtcctcgacgcttgcctcgagcaggacccagacagcaaagttgcctgcgaaacatgcaccaaaaccaacttggccatggtcttcggagaaatcacgaccaaggccaacgttgactacgagaagatagtgcgtgacacctgcaagaacatcggcttcgtctcaaatgatgtgggactggatgccgacaactgcaaggtcctcgtcaacattgagcagcagagccctgatatt

SEQ ID NO: 24782 - DNA, 414 bp, Glycine max
cagggactcatgccatgcatatgctgatggactatgactctgatcatgtcacatccatggctgcatgctcttgcaattcccaaatgaaatatcccccaaagccactctagatttattcaacatatctacacacattatacaaaattccaacttgtcaatcgtactcaatcttctatccatttgtcaaaccataccattcaacctacctcgatgcttattgagatcactctttgaaccaccctcattgatattgatcagtcttagtcactctctgatgatagctacctagatttcacatgaataggctacgaagcataagccaatgcaaagttcctttcgaaaattggactcaaaaggagtctttaacatgtactacttacgctcatgaccaccaccaacgttgagaactcaact

SEQ ID NO: 24783 - DNA, 407 bp, Glycine max
attccgcaatgtttaaagatgttctcctgtatcaaggcagggttggccacttaatggagaaaaggagcatattgattaattttagttttaaaaactccaaatctccaatgttaaacacgagtaatacttgatactaatcaagtacctataacgtgtttggtttaggatataatttgaggggaaaagttgtattatattgaatcaataattacatgattaatgaatcgttaattcatgtgatattgaatttaatttttaaaataagatctttaagttttaattttataaataaaaaatgtgaataaaaagaaaatatattatcaaatatcatcggtggaaattttttaataaaaattaatcaataataaaatcgggttgtactctgaattaataatatatatatttat

SEQ ID NO: 24784 - DNA, 166 bp, Glycine max
ccaaattgcttaactctacaacttcaccgattcataggtaatttaggcactgcttctctactctctttctatctctcaatatttctatcttacactatctttctctcattcttattcttcttaacttctttaaactatttacacattaacatattatcacaccaaa

SEQ ID NO: 24785 - DNA, 410 bp, Glycine max
gaacacctttcactctcattgacaaccaacggtagttagtatcaccaataccagcaagtcgtgaatcaaagacagatctttgctcgagtggtgattttgttgctcatgttcttagttggagccaggtttgctaaagcaaaagaaggaggataagaatctgctgataggattttgaaacttcctggtcagccaaaagtatcatttaagcaattttctggctatgttactgtcaacaatgttgctggtagagctctcttttactggctcgcttaatctgcccaaaatcctctcaccaaacctttggtcatttggcttaatggaagtccaggatgttcatcagtggcatatggagcatctgaagagattggcccatttagaataaacaaaacagcttctggtctatacaaaaa

SEQ ID NO: 24786 - DNA, 408 bp, Glycine max
tcttcattagtcattgagtcgcataaaatgtatagaagatgacttgcaaaaaacagagagggccctgctagccactgcttcaaagcaagttgagcttgccgagtcattggaaagcttaaaggagagtaaatttgacggaagaaattcatgttggcctaaaaatagaagttatgccccaggaagatgagcccgtttttcagcatcagtttgcagtccattgtttttgatactttacagctgaatcactaccagagctaaacttctattggcttatataaaagaattactctcattatcatataggcttgaagaatgtgggctatggggagtgcatagccccaatgtatagaacgcaacaagaattttttatgaagattctggactccaaatactccttttaaatgtata

SEQ ID NO: 24787 - DNA, 405 bp, Glycine max
gacaacacatcacatcacagcacacttacacacgactaagggtgctcagttacgcattgctacgcgatggacaaaatggaactggctgagacacctatacctttgctttcactaaaccacgtttcttttgcatgtaagagtgtgagcgagtcagtgaaattctattaggatgtccttggatataagctcatcaagatgtcatcttctttcaaatttgaaagggcctagttattcaattatgtcatatgcattcacctgttagagtcagaaaaggtttctgagaaaaataagagagatcaacccaaatgataatcatatatcgaattcaatgcttagacatgaaagttatgatgcataaacttgatgcaatgaacattgagtatgtgacagcagttgctgaataaa

SEQ ID NO: 24788 - DNA, 276 bp, Glycine max
ttaatgctaccgctgctacacgaccacagatgggtactggtgccataagacaacggatggggattcaagcacttgttaacaaagatccatctatacttcatgttttacgtgcaaaaggttcttcaactgcatcaaaggctaacaatcttttaaaacaatgggatatggttttagcaatcaacattgaaccagtcacatgctctcgtgacattgaaaatgcttgccaatctttacacaaattcgactcccatgatggcaaacttcacttgactattt

SEQ ID NO: 24789 - DNA, 148 bp, Glycine max
tgtgtctaacattatgacaaggcatcatatggggcttcaggtgcacatagcatggtagaatgtccaatcactaatttaaactgatccatccacactttcggttacaatttccaaaacatccttccctaaaatacttgacacataaatc

SEQ ID NO: 24790 - DNA, 392 bp, Glycine max
gatccttaaaaatgaaaagaagcactcactggtgaacgccacgcattgttcgatgatcagagtcttctttctttttcttccgcagtcccaaccttcatggattctcactcacacatcattgcttggggctctggtgaagatggtcagctaggaatcggaagcaacgaatagaaagaatgggtctgcctcgtcaaatcccttcagccccaccgtattcgctccgtcttcgtctgcatcataaacttcctcgccatctctgactactgcaaattgttcacttggtgtttgaaccaaagggccacacttggtcaccctgctgataccaagtcttataacaatactgataacacttccatccaggtcaaggcttcttttcattgttaaaatttttc

SEQ ID NO: 24791 - DNA, 342 bp, Glycine max
tccggttattagaatactacataaattttcggctggtgaaaaactacctaaggtgggagacaatcacattcccacgatgcttcgaaatccactctctctttctacaattacctattgctcttgactgatcacccactttgatccttttctacctatatccccgtccattcctccaccattagttacgacgagctccttcacatacagtcccatgagctgcaatatccctttgcattgacgaagcagatcttctgctcttttcatctggttaatatcactcaccactatatgtctctcaatgtcaacacaactaattctctgaaatattgtgatttacctaac

SEQ ID NO: 24792 - DNA, 197 bp, Glycine max
attcccactcctagccactcctccaaactgctgctacaagactacatacatctccggattcaatactactactcaaatttacgtctacagaaatactacaatacatgccaggcaatatccctacctccttgttccctatcaactctcactcactacaattacctcatcatctttacttatcacctacattcatcttt

SEQ ID NO: 24793 - DNA, 456 bp, Glycine max
gtggaggcagattggtgtggcgttgaccgtgaagtgagcaggaagaatatggacaaacgttcacagctgatactccttgagagtcacttccctcttgagggaggtcaattttctcaggaaaatgggaatccttgagagcagaagtacaagtggctctaagcaagcttgtgtatggggattgagatatctgattgcctctctccatggaagaattctttgatttgaaagtaggcatctttgctaagatcctcacgggcttcaagcttaatcttctggttatgactctctggagtttgttaccagcatcacttgcacttttccaattctggtcatcacttccataattagattcataaaactttcttgttgatttttggcccttgacagctgcaaacttgattgatcttgaggacttcagttccctctttggttcagtccttccagataactttctgg

SEQ ID NO: 24794 - DNA, 205 bp, Glycine max
aatccctaattccaggcaggagtcacgccacccttccgttccgataccacaacacaacattaaggttaatgtgtaacagtttgttgttagctgtaagctagcatatcgtgaggagaatatgaaattgactctttactttgctgctgcagttataatactagcattgccatgccatatctcaagctaccaaatgttccctctccaa

SEQ ID NO: 24795 - DNA, 331 bp, Glycine max
tgggagagcttatagtttaagagcaagagctatggaaagggacaaacgggccttcttagatctcaagggccttaccctcgttctctcctaactctcactttgtcttcttatttgctccttttcttctctcttccctccccaattatttcattccctcatggccaccactctttattcaacgccttgtctttcactggctacttcatcctcctttttctcttcttatcaaccctgtcctctgtcctctaactcttcttactctcaactcattaaccttttacaacgctttttcgccttcatagtctctcttaaatcttataccctcacctta

SEQ ID NO: 24796 - DNA, 420 bp, Glycine max
ccatggatgactaattaattatttaatataaaaaatgggttcaagccatttaaactgtatttaactattaatgtactagtttaaaaataaaaatattaaatgtgtaaatggtgcatttattactttactaaaattagtatattaaatgaatatatcaattactatttggcaactaatttcccgcatgaccctaattagcacatataccttaaatttgtttttcttattacattttaaaattatcaaaatagataataatttggtaaatatacatgttatcattatctttttgacattttaattttcccacccaattgaaggttagttttatcaatttacttgagaatttctaaagcccattaatgcctaatgcaaatggttttttcctgcaacaatttatgagatttttattctataatt

SEQ ID NO: 24797 - DNA, 149 bp, Glycine max
tggcgagctagcattttcagacacataaagaggggcttgggatttactatattgactcgtgcggctcttactcttctctttttatccatccctcattcctaatccttcaattcaaccacctcatccttacactcacatactcacatatc

SEQ ID NO: 24798 - DNA, 164 bp, Glycine max
tttggacagggcattgatcttctttttgaattgtggcctagggattaaagtactgagattggtagagattgcatgtatgggaagcttaaaatgcctttagaagctttttaacttcatattgacccttactggattagccattgtagtctatggaatctataatt

SEQ ID NO: 24799 - DNA, 404 bp, Glycine max
tttattacgattaaatttccatttttgttcacatgactgtcgtcactatttacttgccctgacgttacaaaactctcaattcactccctgaatttgtaaaatttctattttggtccccatgactgtaagcactatttacttactctgactttataaaactcttaattaagtccttgaatttgttaaatgtttcaaaatttgtttctcttttgtcctttttcgctggcattagggattgaaatgaatgaaattttacagcattttatggagtcatgtaccatattgaaagtttcgtaaagtgatggactaaagtgaataacacttacaatcttaacaaaaaagtgacatgtctactcaattggatatcaccatcatgttgtgatcatattcaatgtattcaaact

SEQ ID NO: 24800 - DNA, 373 bp, Glycine max
taattcccggctcgagccgctcctaactacactcatacataccacaacgagacatacgactttcacacatcacacttccgacttaagagcacgtcaattatctactgcctgtgggagcttctttgcattaacagccactaactcaccaatcttaatccttgtttttatcattagatccatacataattacttattgacgaacactttttctacacctcataattccaccttcaaattcttttccatcaatttcaccatagtgattgtctaatctcaataatgggattgtcactatagatatgactatgagtccctgaaatgtatatgcctgttgctacctctgtcattcatcaccataagattgcctacttac

SEQ ID NO: 24801 - DNA, 356 bp, Glycine max
acatattgacagccttatgttaaatggcgcttaggaatttaatttagggttggattaaatggctgaattgataaaggataaattctcgtaacctaggataagagacttgcttgcgaatcaagggggaaacaacgtgttttaattatgatattttctaattaaatttgctcgctatttaatttacaaaaacatacaaccttcctctcctcaattcgttattgtctaattactattatgttatgaacgttttggctaaccattgcttcgtgggagacgacctaagatcactttctaaatactgcattttaaaaattcatttgattcgggtacgacctttatcaaatttggtgcccttt

SEQ ID NO: 24802 - DNA, 451 bp, Glycine max
ctcagatgcgagtgtcaaatttttcataactcgtcaggcaaaccttgttcttcctgttgaatgatttaaacatggcagcagtgtggttctttttgaacatatatagctcttccctttgtctcatatgaaggcactgaagattctgaaatccaaagtacattagtttaccttcatgggtacttcaacaaaatgtctactcactgtcatgctacgtacctttccttcattagaattacatacaaatgaacagagagagtaaagaatgtaaactaaattatggtatagcaataataacatcatacaatagtcacattaaggaaatatggcacgggaaacagtaaatgattcgtatttcaattaaggataatgcaaatggttcccgtaactgttgtactaactgtgctacattccaatagttttttttgcaaatgtcacacacatgaacatgata

SEQ ID NO: 24803 - DNA, 443 bp, Glycine max
ggtttgcgtttgtgtttggtcttagacgccgcacgcggccaccgtcactgtttcagatcctcgaactgtgtcttcttcgctttctggtctttttattaggttttgttcatcgatccatcgccaaacatgccttccagtcacttgcttctcgaggaacctattaggatggtctccatccttgagccatccaagcctagttttttctctgcaatgacaaagattgttggtaccctgggacctaaatctagatccgtcgaaaccatttctggttgcctcaaggctggcatgtctgtggctcgttttgacttttcatggcatgaccctgagtaccaccaggagactttggagaatttgaaggctgctatcaagagtactaagaagctctgtgctgttatgctggacacagtgggcgctgaaatgcaagttgttaacaaaagtgagag

SEQ ID NO: 24804 - DNA, 372 bp, Glycine max
gtccctatctttctcgctcacatgtcactttttatcggtgatgctgttaactctttatctatatatgcctctctgatgccgattggtgcctccaattttccggcaagcttcaaacttaccttcttctgccccttttcttatcactttacctgtattaatcgttttctactccccctatgcttatttataaattctatatctattcgtcttatctcacgttttatccaaaaccatgttccacaatatgtaaataaaccacctacttcattctcataaaccttaattctattttccttccaattttttaacacttattgcaattttcaaatttctacagcttataattttttattcatttcttttttttaattt

SEQ ID NO: 24805 - DNA, 211 bp, Glycine max
cgtatggcccacctactatacactcagaaaagacaaattggggtatatatgtttgtgaaggagctttatatgatgcaaatccatgacaaaagctacagaaaaccctttatagaaacacctactagctctacatgactatcaatcattgcttcctcaacgcaatcatgaaccactttacaacgatcttactgcttctatgggccttgataac

SEQ ID NO: 24806 - DNA, 423 bp, Glycine max
ggcagcgcttgatttgaggccaggcaagccccactcaacgcaccagagctctcctcgttcacgctacccctttctgctcttcttctacctttcaagttttaaaagtataaagatggcagatacattcctatttacctcagagtcggtgaacgagggacaccctgacaagctctgcgaccaaatctccgatgctgtcctcgacgcttgcctcgagcaggacccagacagcaaagttgcctgcgaaacatgcaccaaaaccaacttggtcatggtcttcggagaaatcacgaccaaggccaacgttgactactagaagatagtgcgtgacacctgcaagaacatcggcttcgtctcaaatgatgtggtactggatgccgacaactgcaaggtcctcgtcaacattgatcagcacagtcctgatat

SEQ ID NO: 24807 - DNA, 213 bp, Glycine max
gctatctatatatatatctaactaatataggaatctgggaaagatgattagtctaggcataagaggagatgagatcatatgaaatatttaaccgattctttcctttgtttgggctactggccattcgccggaagttacgggtttaataccgatattttagcaacaaatctaataaatcttagtgttgtgtgaagagtattggttttttttgga

SEQ ID NO: 24808 - DNA, 303 bp, Glycine max
cgggaggaaaaacagaaaggagggtttctgtcttcaaattttgagggagtgttgtgtaggatataatagctagggaaaacggacaacagtgtggatggttcaggaggcaatggagggtgtaatttcttctaaagggatggtttttggagagaatacatgtagtagtggagtttgaccaatgatgatgatgcctttagtgacttctcatcatgttgatcatcatccattaaatcatgctattcttaataatcccaatcctaatgaacacacagacactatattccttgccatgccttgtactaa

SEQ ID NO: 24809 - DNA, 423 bp, Glycine max
tactgctgctataagactacagaatggctcattttcatgggggattatctctagtccggaatgcaaagtttatactataagagagaggcattactccaactattgataggattgcaaaataccttaacatgtctcaaaagaaagtcagaaatgctactgatgcaatcagcaaaattatctcgcttgatatataagcatttccctctctgaatggtctacaaggagaaactcatcataattatattgcagataatcttatggagaacatcccatggaatggagtagactagtggacactaaatgatgaagtgaacagactcattaatgttacccttttggaacgagagaaataaatttatcgaccttattattgactggaaaaagaatgtcttacctgggaagacataatcaaactgataagtt

SEQ ID NO: 24810 - DNA, 415 bp, Glycine max
ggggaagttgtaggggtttcaggtcacgcattctatcgctgggtgtgtcgagtcaacaaaacgccaccgtttcattgatctacttcctccaaggccaggtctccaagaattggtaccaattcaagctgcaaatatacttgaacttcaacttatcccacattctccactctcaatggcttcaactctcaaatctggcggaattcatacaggggcaatcaatgatgatttatacaaggaattgtggcatgcatgtgctggtccccttgtcactctccctcgtgaaggggaacgagtctattactttccacaaggtcacatggaacagcttgaggcatctatgtatgatggattatagcatcagatgccttccttcaacctgccttctaaaatattatgtaaagtggtcaatgttcat

SEQ ID NO: 24811 - DNA, 395 bp, Glycine max
ggaaaacaccgccggttcctcggcaccgacggcaacctcttcgtcgctgccaaggccttcgccgccggcgtcattctcgccaccggattcgtgcacatgctctccgacgccaccaaggcacttcgccacccgtgcctgccagcgttcccgtggtccaagtttcccttcaccggtttcttcgccatgttggccgcgctcctcacgctcctcctagatttcgtgggaacgcaatactacgagcgcaagcaggggatgaaccgcgccccctccgaagaaccagtacgggtcggctcatccgaacccggtgggaatgggaaggtgtttggggaagaagaaagcggcggaatgcacatcgtggggatgcatgcacatgctgcacatcatagacataacca

SEQ ID NO: 24812 - DNA, 383 bp, Glycine max
aaggcaaagttagaagagactcagaaaagacagattgaggtatataggtttgagaaggaactttatatgatgcaaagccttgttgatggctacagaaaagccttgaaagaaacacggaaggcttttgctgactatagagcaagttgtcctcaaggtgatgatgaaccactttacaaggatcttcctgggtctgggggccttgttttgactgctgtggaggtggaaagggaacagctgaagaaggaagctgaagaaagggcaaagatgagagattttatgatagattatgaaaagaagactacagattttgaatccacttggtttggtaaatttgaagctcatatgagtacaagtgaatccctaagtcataggttgcaggtttt

SEQ ID NO: 24813 - DNA, 360 bp, Glycine max
tctgaatgcgggtttattaaatctacattagttggtatactcccaggggtctggctgacgacagaataggattaagagctttgaaattctggcacaaggtcttattgtctaatagaatattatgactgatgggggtattactatgcaattaactcctgaaagcttatgatacttggatttgtatccacaactgaaaatgtccttattcaaaaatccttacattctcttactgactgctgtaatctgcattcttggtctcctaatcatatactacactgttttgatatcacttgctcttttatacaatattgatgattttttagtattttatatacagcattttatttctataaacaattt

SEQ ID NO: 24814 - DNA, 255 bp, Glycine max
gatgcattgctaacatagactctgcaaaggcaaattgaggcctatagcacactgaagcagccatatatcatgcaacaactgaatcatagcgactgaaaatcatgtgatgaaactcagatagcttgaggtctatatatatcaagctgaacgcaaagggattaagaaccattatacatgtacctcacgtcaaaagtcttactagagaaaacggctcaccacatgtaacggacacagatcattgaccgaacctaaaat

SEQ ID NO: 24815 - DNA, 388 bp, Glycine max
gaagatggtgtttcatcagtagccacaaactgagagcgtctaaatttacactcaggtgatcaggggacagaaccagaggaggaaaattcttctgtagtaattccaaatcatttacaactccattccgtcgaatgcttaaatctgagctttggaagttttggatctgcaaatgatgcttccctttctggatctggtccgtatgcatctaggcccttgaaaagtaacttggaggatacatctggagctaacgatgtttcaacaattgggtcctcagatgttagaaatcctgactattatgccgatgagcatcttactactacctcggatgggaatttagctcacataactggttgtgattcttggacttatgagcattccttcatttcac

SEQ ID NO: 24816 - DNA, 355 bp, Glycine max
cagttgagtcctatttatgatgtggctgctatactcgcatggatccagtcatggcgttggtgatcccaacccaaattctcctgcaaactctgaagcagctctaatgtttattgagaacaagcgtgagtacaatcgaagagttagggaaattgttgatcatagttttacagcatattaagttcatccttatatgcatatgatgctttcaaggcatgaatttggtttcattgatggcaactataacaatgattgtgcaaactcatcacatttatattctctgcttatatgaatgatagcatcatcttatctttaacttattatagcttctgcattgcatatttcatctaatgtaaaa

SEQ ID NO: 24817 - DNA, 236 bp, Glycine max
tactgtccaatggtttctaagtggcgaatcgagtacacatcatatggaatccggtccctctgacactgaatgtttagcatacatctttaaaattaagggacacaactgttcattataaacatctgtataatctatcacactaatactgcaatctaataccaattagtattattaatgaatattgccaacagtcacattttatcattcggatatttaatgtccatcaattgcctata

SEQ ID NO: 24818 - DNA, 326 bp, Glycine max
ggaaggtgaaggtgatgatggaattggaagtcgacgagaacgacttgaaagccgccggtgctgagctcttcgtcgacggtggtcggcgcggcattcgcatcaatggctgggtgatcgagactcggaggcactccatactcaactcttccacactccaagagtgggaacagaatctcgatacgtctcatttaccagaaatggtttttggggaaaacactttgattctaaaacacttgagcagtggcaccaacattcattttaatgcatttgatgctctacgtggctggaaacaggaagcattgccgccagttgaagttcctgcggcg

SEQ ID NO: 24819 - DNA, 447 bp, Glycine max
gattgaagccaaagaaaaagagacaagaccaaaggcaggtgtggaaggaagaagaaagctctcatcgatcggtgttcaactttaaacactcaggaagagccacaaaattcttctttctgcagggtgcaaggtacagcttcgatgggaaattgctggggttctccacctcacaacccaaccccaacaactaccggtaaccttagtacaggtacgacggggacatctcaggcgatcagcagcggtagctatactactactactacgacgactactacttcttctggaagtgggagcagctccataaatagcaagttctcagtgtcaagcggtggtcagccttatccaaatggacagatcttacctacctctaatttgaggatcttcacttttgccgagttgaaggctgcgactagaaatttcagagctgatacagtgcttggggaggga

SEQ ID NO: 24820 - DNA, 213 bp, Glycine max
catatcaccaatcttcaacaaatgtcttggggaacacgggcacatgcgagtacgcatactctctcatttactcagatgaccaaaatttcgctctatctggcatacccaaatcattcttatattcttccttctaacaagaaccctctgtcaattcttcacgacggacatccttgacaatatggacgtactacttttctcaccaaactagtttat

SEQ ID NO: 24821 - DNA, 143 bp, Glycine max
  modified_base (29)..(30): a, c, g, t, unknown, or other
aattgtggcacccctttattccattccanncaaggggcactcagccaccacagggttgcttgttcacactacccctttctgctcttcttttacctttcaagttttaaaagtataaatatggcaaatacatttcctatttaacc

SEQ ID NO: 24822 - DNA, 365 bp, Glycine max
aaggtgtggctgatccaagggtatctgtgcggaaccatgctgataggcgaccccctgttctacatttaccaaaaagtatatacctcaacttgatttcgtcaccccgtgctgcttttaatcaaggttttgggcatcttccatcttctagatttagtggcagaagtgcttaaggagcctctcctgtatctggaggggcaccaactttatcagagagactcttgatacaccgtcagattcaacaactactttcaataaataggatggcctctacacctggcataaccaatggtatttctgctaccagtttaactagtaactttatatagctctctctttgatcaaaggtggggaaccaccactcttca

SEQ ID NO: 24823 - DNA, 76 bp, Glycine max
ggctgctaatactctacataatgatattgcttaacgaggacatctgattactatggctgtactatgactatataag

SEQ ID NO: 24824 - DNA, 421 bp, Glycine max
gcctacagatactaataatatttacatttacgatcgaatagatctgagtactaatactatactattactaaattaagaatagaatagaaagaatttgtaaatttctatcggaacatattaatattcgatagaataatactaatagtagtatattcagatactagtctaaaaaaacttatactttattatttaaacgttagactaataattaatactaatccggtatattttccacattcagaggagtacgtttatgttttttctttacgaatatgatattttttgggcatttctaataatatcaagttatattcctattttggcatttctaattcctggaattgtagccccggatagcaggggaccagataaactttctagttttgaatagggaatagaaccaataggtgatgcttggtta

SEQ ID NO: 24825 - DNA, 317 bp, Glycine max
aggactggtgtaatgtgatgtaatcttttggttgttgatgaattctttggtagggtataatagatagggtttactatgcattcgaaccaatagttgacacatgaaaatgataatgaatggacaaatgtgttgtgttaatggtgcccatctaagaattagtcttgttttccaacttttatggggattgaaaaattctttacttacacatttggatccgaatgagatgtcaactattaatatttcagatggaagcacagttggtccatttattgaaaagaagataaaatatagctttcatgagaaagctaatataaact

SEQ ID NO: 24826 - DNA, 424 bp, Glycine max
ggaatcacagtggtgccttatcgctgtggttttcatcggcttccttctcttatatttcttttttttttttgtcttcgccgcacgccgaaacaatggccggaaaaggagagggtcctgctatcggaatcgatctcggaaccacctactcttgtgtcggtgtgtggcaacatgaccgagttgaaatcatcgccaacgaccaagggaacagaacgacgccgtcttacgtcggcttcactgataccgagcgtctcatcggtgatgcggctaagaaccaagtcgccatgaaccccatcaacaccgtcttcgatgccaagaggttgattggtcgtagattcagtgactcctctgttcagagtgatatcaaattgtggccttttaaggtcattgctggtgctgctgacaagccaatgatcgtggttaacta

SEQ ID NO: 24827 - DNA, 278 bp, Glycine max
gactgttaaataaacctaatctttgtttaactgggtttgcaccttgatgaggggagcctgcaacctataatagagaggattttgggaagttgcagtacggatgcgagcactataagagacgatgcaaaattcgagcaccatgctgcaatcagattttttcatgttgtcactgccacaacgacgccgcgaactcatctagcaaccccgcagatcgtcatgaacttgttagacgcgatgttaagcaagttatatgctctgtctgtgatgcttaacaagat

SEQ ID NO: 24828 - DNA, 293 bp, Glycine max
atatgatacactatatccctctttctttctctctgccaaaacgagtatttgggggaggattacattcatattgctaccgttgcaaccaccatccttatctttaaactctaaaaatgcatcatctaaagctacaatactccttcaattataaaccctattcatatgcataaccccaacaccttactctcacctataaccgctttcgcaactcttaatcttcttattatgtagacagataaaaataaggttgaatgataaaacaagtatccaagttcgatatctaaacgtactaa

SEQ ID NO: 24829 - DNA, 454 bp, Glycine max
aaatgacttatatttgatcaatgttgtggtggacatgctgactgatgttgaggtaatgttttgtaaagcatgttgaaagcattattgctatatctgttaccctcaacttatatcttatgcaggcatgttccaaggtccatcttcctatccttgactacgatgatccttcccaacttgaacctgtaagttgacactgtgacaatgttttccaaatctaatatgtgtcggtagaatctcattgaaaaacttcgctacctctattttcaaaattaagctattgatcgatgtttgagttatgcagcacacttgggacctcacagcagatcaaggttttcttgtggacaccccaataacaccaacaaagcggatgacatctgatgaatgtgatgatgaaccccaaagctctcaaatttcacccgcccaactttcatctaacaaattaacatgacatgat

SEQ ID NO: 24830 - DNA, 430 bp, Glycine max
gactgtgattattatttgataagtagtattgcttattctcttgtggttttcgtgcggaatggtagcattttcagtagggtcttcaatgattaggatcattgatgagaaatttgaaagcaggtatatacttacacaatgggtttgaagtaacttaaaggcaaactttatcatgattcacaaaaggttgggatcattgttggtatgggatgtcgttatacaatatcctccgaagcatgataaagtatgtctttcggttactttgaacccatattctacaataactatatatctgcttttaaattttcatcaatcactgaagacctcttgaagatgttgtctttctgtgcttaaaccacacgagaataattagtactacatatcaactaatgcaacactcatgatattgaattactaatctatctataatata

SEQ ID NO: 24831 - DNA, 340 bp, Glycine max
gacaccaacaccaaaacaaacccactaagagggcttcctttgtatccttcctagtgctgcttcttgcagcccttatgctcatgcctcaagggcttgctacttactacaaaccaattaagaagccaccagtgtacaagccttcaatgtacaagccaccagtgtacaaaccaccggtttataagccaaaaccaccggtttacaagccgaaaccaccggtttacaagccaccatataacaagcccccatacacgaaaccaccttatggaaagtacccttcagtagaggacaacacccatgcctaaagcgagcaatgaggtctattatctacttacataataag

SEQ ID NO: 24832 - DNA, 214 bp, Glycine max
aaatggcaatcagcaaggaccacctttcatggctaagtactcttggataaccgggggtgaattattaccgtcagggaaaggttaaaacaacccctatctgttagtgaaatataacatgaaacctttagctcccaatcaatgtgaggagtctcaaaactattaccgcgtgccctttgaataaataacctacgactcataggcaatggcttggtta

SEQ ID NO: 24833 - DNA, 317 bp, Glycine max
gaacgcaaaaccggatggcacaacatgcacatccgcattgtaaaactctctatacataccaaggtcccttcctttcctctctgtctcttgagcaatccctttcttcttcgctgctcaggtgcaccttctgtaataacagaaactcagcggtgtaaagttatcagaaatagatgaaacatcggttataaatatataatgtctggactgatcgaaagacttactgatgctgatgcaattaagtgccttgcacgtgtttccttgtactttcacccagtgatagagctagtctctcgatcttggcaagcagctattcgtag

SEQ ID NO: 24834 - DNA, 117 bp, Glycine max
gccggctgcgggtatacgttgttttgttgcataaaggaggcctttggttaatattgatttaataagtttatttaaggttacagtaaatggatgaactgctaatggattaactgtcat

SEQ ID NO: 24835 - DNA, 442 bp, Glycine max
ggtggcagttgtgtgacacagaaattaagctagagcgggatagttgcttcttctggtctcaccttccttctctcccttcagacaaagggacaaaaaatcagtgtgtgagagagagagagagaaattccgaaaccatgtcccacagtcatctaagtttcgcctttgggattctaggtaacattgcctccttcgtgtgctttctggcaccactaccaacattttatagagtttgtaagaagaaatcaaccgcagggttccaatcaattccatatgtggctgcactcttcagtgcaatgctttggatcttttatgcctatgtgaagaccggagaaacgctctttatcaccatcaatgcattcgggtgcgtgattgagacaatataccttgccgtatttatcacttactgcccgaagaaagctaggatgacgacattgaggatgat

SEQ ID NO: 24836 - DNA, 428 bp, Glycine max
gacactaaacacgttaaacgaagagcatcactgaactgacaaagcaaccctatgtcgaaggcggtttgtgtcaccggagccagcggcgccatcggatcatgggtggtcctactcctcctacagcgtggttacaccgtccatgccaccgtccaagatatcacggatgaaaatgagacgaaacatttgtaggaaatggatggagcaaagagtcatctccatttttttgaaatggatcttcttgacatagactccattgccgctgccataaagggttggtccggcgtaatccaccttgcatgtcctaacatcattggtcaagtcgaagatcccgagaaacatatattggaaccggcgataaaaggaacggctaatgtgcttaatgcggctgacgaagcaagggtggcgcgcgtggaggcgacttcatcgat

SEQ ID NO: 24837 - DNA, 403 bp, Glycine max
ggtccctagtggaagcaagcaagcaacaagataagaaagcaaagaaggagagagagaggatgacaccacatcctctgttttctttcattcccattcttagttttccctgccattcaaattttcacatgacctctcattattattctttttattattattagttcttttttgtttccatcaccaaccaacctctcatctttggatggtgaattccccatctgagttcctttgatctcttcgccttctctcaatttcttcttctctgatcccagcaaagaaaagaaaaaaaaaacaaactaaaaaaaacattagaaacaattgttttttttaaaaaaaaacatagctgcttggttttccctctttgctggattagatattatggctcagttttttttattgatgc

SEQ ID NO: 24838 - DNA, 431 bp, Glycine max
ggatggcaagcatatgtagcatacatgaatataggatgctactaccttatcgggctcccctcggaattatcatgggctgggtcttcaaaagtggtgtaactgtaagtataatccgctacttaattatcacatctaaacactgattttgggtttgaataattcttaagtggtgtgctgacatgggaatgatatgcatggcagggaatcttgggcgggcatgatcttcggtggcacagcaatccaaacgctgatactgattatagtaacgatacgatgtgattgggaaaaagaggtatagttttactgttacataaataatccggagcttattccaaatccttatcagcatcacttggcatattgacaaacttgaaattaagatctccacataataagttattcatatcaatagcgtaaatatgcatgttcta

SEQ ID NO: 24839 - DNA, 363 bp, Glycine max
cttcggatcaattctatatactgtgtatgggtatccatgaatgtgcatgagtatgttaatatgaatgcatttaaccaacatacattactttatatacactgttcattttgcaggctcaagataatattattaaccttccattatcaaaaggatggggtgaaaaacatcatctttttgtgaaatggaagtatattgaagcaaatgcttgagttttaactcaccacacatttgcatcttgctatttaattattatgtattagtatatctgaatacaattagagtggaatttgctgaatacaggctgccttttgactattaaacgcagatgaagtataaaatgaatcaaattaatatatggtccac

SEQ ID NO: 24840 - DNA, 435 bp, Glycine max
ttgggacatataagacaaaattctaaactagaggagtctatgagatgagaggtagaaactgaggacttatctagtagttagagatgcctgagttttgcgtgacaggtggtactgggttcatcgcatcttacctggtcaaggccttactagagaagggtcacacagtgaggaccaccgtgagaaacccaagggatgtggagaaggttggttttctgactgaactaagtggagccaaagagagactgaatattttgaaagcagatctattattggaaagaaactttcatgaggcagtgaaaggagtttattgtgtctttcataatgcgttccctgtgcttatttcttatgatgagaaccgttcaagtattttgccctttataccccacttgtagaatttttgtctttatctcaatgggctttcttacaaaaaaaata

SEQ ID NO: 24841 - DNA, 277 bp, Glycine max
taaaacacgtgggaccacgaccacaccccgcgcacataggtactattatactctctaaaccaacaaccaaatcttctataattttctaatctttatgacacactgttcacatcctacagagcaaggtccatactttgtgaacgactacactgaaccaactacgctaatctttaccgacctagactttcacacactatataacatgtacagagccgccataacttaattcatagcaacactcctttttctttacatcaccgagttgaccattattggc

SEQ ID NO: 24842 - DNA, 309 bp, Glycine max
ggcgactgcgcctttacatcttattgcgccacccatgcggactctgctccctatgctgcgagacagtgtgatcaaaataaagagacatggaccccacactcttccactctttgttggacggcaagtgccatgcgctctacactttacctattcatatgtacactctctataaggccccttcactccttgtatcatgatcgggttggaggcatgctattctaacacactatggccaatggttcaacaccattttttgagattgcgtaaaaggcacaagagcttttatacatggattacaacttagatcac

SEQ ID NO: 24843 - DNA, 323 bp, Glycine max
ggtgactgctgcttgacaccatgatgcaccagcgctagagacactggactctgtggtgcgagagtgtgtgtccgagagcgacagacagccaccccaaccactggctgttttagtttgacgggggtgacatttactatatcttttaccccattactcgttccttctaaaaacttacgttgtagctctaacatgataattgcgtgtgcaacgttctatgctaattcactatggcatatggcgcttgcacgctttgtgatattgaatacagggcaactgaccttaaatacaaagaactcgcctaccctcacgtgtagaggctctta

SEQ ID NO: 24844 - DNA, 334 bp, Glycine max
ggctgcttttgcttttcactccttggacaacacaacggcagtccttccccctgaggtttgtatctgacaaaccgctgctgacactttcatgaaaaccataggatcccgagagataacaggtgccaatgatgtcaaaaatgatcgaggagtgacacgccctgattggcgatttccacttaaagtttgacgtatttacaacttcatggctgttcgtagagtttgacagatcttcaaggagatgccggactatttctgactcaactgtgtcatacccagggaaaaagcaagtccttggaagattaaaaagagcagccaaacttcttttttaaggaac

SEQ ID NO: 24845 - DNA, 457 bp, Glycine max
agaaaaggttaataatgatagacattcctcttgatgacgacaaggatgatccagacttcaacaagtatggcaagagagatcacactaggattgataatcatatgcttgagttatgtgaaactgatcagcatgatgttactgaagaaaataaacagaattctgtttcactagaggatgtaattacatgccatgagtcagaaagatgccaaaattactcttcagaattggagacagagaaggaattaggggttgacaagctagagttatggaagactcgaaaagagacaacaagtgaagatagcaagaggaaaattctggagaggcttgcctctgattctcagaggcttgccattcttaaaataacatgaaaactaattttggtaatatagttatttttttaatacatcgctgaaattagtattcctgagatttctgaaaaaagtagaacaaaaatatg

SEQ ID NO: 24846 - DNA, 379 bp, Glycine max
gacagcggaagaatacaccgccacacgctgcaggccctttaccttgtgcttcctgcgttcctgtgagaacccacgttctctaacgcgcttctccttcaaagttcaaattcctatacatttgcgtaatcgcttctcaaatctcaacaaaagtattcccaaaaaaccctaattattattattaaacatgaggccgattctgatgaaaggccacgagaggccactgacgttcctcaagtacaacagggacggcgatctccttttctcctgcgccaaggaccacaaccccaccgtctggttcgccgacaacggcgaacgcctcggcacctaccgcggccacaacggcgccgtttggtgctgcgacgtctcaagagattcgggt

SEQ ID NO: 24847 - DNA, 458 bp, Glycine max
gacgacagacgggggctggcataaagtgccctttgttgtgcaaagagttcatcatagatgcatggcaactctactatgctcgaactaaaggtgcagatgcagaccttttaattgctgctgttttgcctgatcttgacatcaaatacatgatcaagatatgcaaattactgggattgactgcacttgttgaggttcatgatgagagggaatttgatcgtgttcttgcaattgaagggattgaacttattggcattaacaaccggaatatcgaaacatttgagctggatatcagcatcacaaagaagcttcttgaaggagagcgaggcaaaataatccgcgagagaggcataactatggttggagaatctggtctgctcacccctgatgatattgcctatgttaaggaagctggtgttaaagctatattggttggagagtctattgtaaaacaaaatgat

SEQ ID NO: 24848 - DNA, 217 bp, Glycine max
acgcgtgaaaacaacagagaggggtcattgaatggctctttcttttttccagggcctttcatgtataccgggcagcctgataatgataatgataaagaggatcatgctcacctgctctgtgcataaccatgtcttgatcttataacaaaaaactttaactactcaagctatctactacttatgatagtcctagggaagattaatgaacatacccaat

SEQ ID NO: 24849 - DNA, 458 bp, Glycine max
atcatcataaaaaaaatattttattatgaaacttattcaaacactataaatccttttcatcattaacttgttctgaaaatcaggtccaaaaaggaggggaaacgatcctaaatactgctgcagaaaagaacaatggtggcatggtcacagaaagtatgaaccacaggagtgatgccacaaagaataatgcaacgaacgataacctcaaacgtgtgagaaagctgacaaatatgacagaaaggttaaccaaatctttgcttgatggtgttggaataatgagtggatcagtgatgactcctgtgctgaaatcccaaccaggacaggcattcctaaatatgctccctggagaggtgctgttggcttcccttgatgccgtcagtaagtaacaaccaaagtctaaaatattactactatacggctagcatatatggtcttcatattatgaaaatatcaagaca

SEQ ID NO: 24850 - DNA, 365 bp, Glycine max
ggatgcaatcaagaatacaatggcgtggcatagagtgagaagttatataataataatgtcaatctacatacttattgaactaatatttataaatagacagtgattagtgcctgttttcaactatctagattaaatgattacacccgctactgatgacgttataatgattaatgaaaactcgtctaatcacactgtctttcttgcggttgatgctgctaaaagagcctttttccataacaaaagcaaagattggtcttcagctcctggctctgttcgagctcgctatctattagccattcattccaagataacagataaaaaagatgaactattaaagcttgaaacaatttattgttgaaaatcac

SEQ ID NO: 24851 - DNA, 455 bp, Glycine max
tgatataaaattaacattgaattttgacctgttgcataatagtttacgatcagcaatcatggttaatcacctatctttctataaataccacaaaattgaagctgaacgcatgagttctaatatatcattcaaaagtttttgaaatgttgtcaccccttcttctatttctatgcctaactcttcctttgtttttgttgtccttcttcaaataccgcaaaaccttcaagaatccaccacttccaccaggtcctaaaggccttcccataatagggaatcttcattcaactatatagtccttctcttcatgatcagctatggcatctcttaaagaaatatggtcctttattttcccttcaatttggattaaagccaaccatacttttttcctcttcaaaattttccaaataggtaattaaagacaattaccttgaatgcttttggacgacctaaaatac

SEQ ID NO: 24852 - DNA, 428 bp, Glycine max
gcccgcagttaaaattaggcctgcttgcccaggactgggtcgtgtgcctactccatatcgatcaaagttgaatcgtgatcctattaatggagcacattcaatgaaacaccaactagcaccatagagaagcggacataaactgtataatcttgaccaattcaaaagatcatttaaggcagttgaaataactgaattatcgggtgttagatcaactatgggaaactaaatggaattcataatcgtctccatatttttagatagcggtctaatctaaatgccttaatatgccaggaattcagaccattctaatgccctatattgccatgcataaactgcactaacatgtaggataagcacgcatgttaaagctgttataaacacggtgaccgctaattcatccaaactcattgcccaagaattattaaaat

SEQ ID NO: 24853 - DNA, 456 bp, Glycine max
ccacaatacaacttcagtttcaacagcgaatctctcttttttccattctcatgcctcttgtcttcttgtaacacacccttttctcttttctctctaactcccctccaagaaattctgagagaatagaatagaaaagagggtgagtggttttttgagttttgatagaatagctgcatggggaagctggttgagattcttgaccaaggggtcaggattgctgcaaggtttcactctaattgcccccaaacaggccgtaagtactaccaccctccatccctctacgacaaccacggccaccactaccatggtggagccaacacaagcagcggcctagtcaaagatgctcgcgcggcgaggagccttgacgtaattctttattctgtttgacagaaccatatttgcttattttttggctgttcgattcaatcattgtaaggcgtttcatacatgtatttt

SEQ ID NO: 24854 - DNA, 392 bp, Glycine max
gtggtgcatacaggaagacatgtcaatgaggccatctatgaccagagttgtccaaatgttggagggtatttgtattgttcctaacccaccaaccagttcttcgttgggttctcgcctttatgccactgtgttcaaatcctccagtgaaggggccacctcttctggtccctcagactgtaccagtgatgcttatctctccgcggttcgcctttcagggcctagataacaatacctgtctcttttgtttattttctgtgtgttgtattgttgagtaaattagtttgtgtaatacagcagagctactctggattgtgtgggctttgcatgcttccagctcttgtacattttgttcaagttcctcaaattttgtaatataaatagctattcataat

SEQ ID NO: 24855 - DNA, 459 bp, Glycine max
  modified_base (437)..(437): a, c, g, t, unknown, or other
gaagggtttcaagttattgtgagcaaagagagatagtgagtgaagtaactgaagagaagaaaaaatgccgtgcctcaacctcagcaccaacgtgtccctcgaaggcgtcgacacctcttccatcctcgccgaagccacctcctccgtcgccagcataatcggcaaacccgaagcctatgtgatgattgtactgaaaggatcagtacccatagcttttggtgggaatgagcagccagcagcttatggagaattggtttccattggtggtcttaaccctagtgtaaacaaggaacttagtgctgcaattgcttcaattctggaaaccaaattgtcagtgccaaagtcgcggttcttcttgaaattctatgacaccaagggttccaacttcggatggaatggatctacattctgaaatccgaattccatgttacattggntgtggtaccttgaatgttggat

SEQ ID NO: 24856 - DNA, 347 bp, Glycine max
tctcgcattggatatatagatggtgcaggggatctcttgcatactgggcatgttgagattcttaggattgctggggatcatgtagatcttctttttgttggaatacacactgatcagacagtgaatgcatctagaggatcggatcgttctatcatgaatcttcattaaggaagtataaatgttttaacatgattctatactggattatgtaataaatggggccgaatggtatcatttctcaagatttgcttactacatttaacatgtcattaattgttcatggaaccattgctcttagaaatgattgtctcaaagtaaaatgcaatccatgtgctgatactattagc

SEQ ID NO: 24857 - DNA, 320 bp, Glycine max
cgaccctctaaaatctaaagttaacacccgctcatctcgttcattacgcgacaaaggcattcactccaattctctcataccttaacaatatacaattgtttaactcataacttccctcgcatgttacttttcacacccttctctcctcggtatacaccctctatatgataaatattacaactctgaagtgatcaagtgcacggatggatcaaaatacttctccagagaccgtctcaatgacaatttctatgattgtcctgatgacacttatgagcctcaaacttcagcttgccccaacggaaaattttattgcaaaaacc

SEQ ID NO: 24858 - DNA, 438 bp, Glycine max
agccttctaaagtaagaatttgtcaagtcattagacaggagaggacaatgcttaaggagttcattcattgcacatcaaagttattcatttgtatttgagcttaagtgtttatccattacattgactaatttgaatctgtgtattcattcaaatattatttgtttgtgaaagtcgggagtgacttagtattagacaatacttgagtatcttggatttagttagggaaagtctaagggtgtgtcagtagtgacctagagaatactattgtatcatgaagtagtaggacaaaatacttgtttgtaatcaagctttgattagtgaaaccctccacgaatttgtgaaagagaacttgagatagctcttataaattttaaaatcatatgtgaagaaaaactggacatggctttgattagtggaaccctcactttttgaaaagca

SEQ ID NO: 24859 - DNA, 415 bp, Glycine max
accacttcatattattcttaagtagcgaaggtattgcagactacggaaaagggttttcagttcaatcctttcataacttaaaaaaataagattgtttaatgtataaagtggtatttatcttaccctctgagtttgtctgaattgacaacgactgtgatgctgattgaaatctgttcaaacgttctgctcctctatgtcccatgcctgttacctatcacttgctatgtataattaaacgcaatatcttggcatacatctaataccttcctctgcaattcccaattgcgacaccttcatatctttgctatcctctaaatatgttaaaatctctaatagatctctatcaatcacctaagcagtcaagttatctagctgcattaaaactcttccactttcacaagataaacaaaacttc

SEQ ID NO: 24860 - DNA, 337 bp, Glycine max
cctcgtacaggtccactccccatatctctctatctgcggtgtccccgcccactccggaactcggtaccctattccgttctctcttatccatcatgaatgggggagagtactggaccgagtctatagatccgctctcaacttgcgtgtaataagaagggcaccgtcatcctgactaggatacccgccagcatggtgatggcatctatagaatctctcatgcctaagaggccttctagggctttattcgcattcatcggggcatacatgaaagtgcttaacatggaacatcccgtcgccacaccatcgtatgctggggacacagctgatgtagcaaaat

SEQ ID NO: 24861 - DNA, 373 bp, Glycine max
gcagagtggcgagaggtacttgctcacagatatattcgttttttgtctccatcatggtctcgagagctttcagcttctgtggctcatctttcttcttcttaatcatttcccccctctctgtaacatcccggttctctgaatccctttctgctaatcatctgcctttcaagctaatatttactgggctgccttttaattcaccacatagcaaacttctatggatttttcgtaagccaggtgttttcaaagacgagatccggcttatattgtcgacatttcgctagccatattaatattgcaacatttctttttacttcgaaaccaggcaagagggttatatttgatccctctaagctaattgactcattttctt

SEQ ID NO: 24862 - DNA, 364 bp, Glycine max
gagcgcaacgggatacacgcattgaattcaaactctaagtacattccgtgtgttgcgctttcttactaaaaaccacacatgtagaacacatgcggaatctgacactgctctcacaagactatctgcaccaagggacacatctatggtgttattgtagacactgagaagagacacatcgacactgttgacatggatgttccaacctctgcacattatgaaaagcgcaagtgtggctctaactgctcttgcacagactgcacctgtggccattaaagaatatgtgagaaaatgaaattgccatgtgtttggctatacatatatccaaattgtgttctcttcgtgtgaataaatgtgtgctctgata

SEQ ID NO: 24863 - DNA, 288 bp, Glycine max
gcttccgctgagtgtcgcaatcaaacatggaatgtttggaataaagggcttgactgtgtgatttaattccaagattttgagactgtctatctgagggagtacaaatatctgcaactgatgcagaaactgctggatgcaacaagtactctatttacttaagctatctctagtagacaatcacagagactcttgattagggagacggttatgggaaagcccaactggagggtgcttaaacgtgttttgcagcatacaactgtggctgcaactgtctatcaagctacacct

SEQ ID NO: 24864 - DNA, 350 bp, Glycine max
cacaggcgtccgaaggtgacagatgacgacaccacgggacttatttacgtaatagggaataaacggaaaaaactgcaaggggtggtcctatataaattttggattttagcacgtaccttgctacagaggacaaaggggcctatattctcgagatcttgtcagatcggaacgcaaccgttaccgagatcgctttgtttgtgcgctatggcaagggaagctactgtcatacatgttattgaaaagaagccaaatggtgccatatgaacttcaaatggcagtttaagtgatagaatgcgtgtttctatcaaaattgccgcaatggttcaagcaatggatgattggacaaaaga

SEQ ID NO: 24865 - DNA, 413 bp, Glycine max
taagcagaaatatgcacgttacctacttagatcttatattgaagacaataagaagtccaagtggtgtcctgctccaggttgtgaatatgcagttacttttgatgctggtagtactggaaattatgatgtctcttgcctctgttcatatggcttttgttggaattgcactgaggaggctcatcgcccagtggactgtggcactgtggcaaagtggattttgaagaacagtgcagagtctgaaaacatgaactggatacttgctaactcaaagccatgtcccaagtgtaagcgaccaattgaaaaaaatcatgggtgcatgcacatgacatgcactccaccctgtaaatttgaattttgctggctatgcgttggtgcatggtcagaccatggtgaaagaactggtggtttttatg

SEQ ID NO: 24866 - DNA, 451 bp, Glycine max
gggcgcaccgccccaaccaaactatagcgctattttctttaaacacgggactcttttctctttttttaaaaaaaagaatattatatcttttagatatattcaaaccatatctcacacccaacctataatatttattgtttaaaaactatataacaccttctcttcctctgactctttataaccccaacccacatattatatagtttttatgaaaaaaacaccacatagttttcaaactctttcttacacgtctgtactctctactctaatactctttatattttatactcacatataaacactcgcaaaacttttcatcacaatttacacacactcttgttttatatagaacacatacactctcatctatataactcatattgcccacaaaacaactttctttacactctaaataatattttttttttcaactttagttatattcttttat

SEQ ID NO: 24867 - DNA, 433 bp, Glycine max
gatatccatgagttacaagaagctgcctgtccacttgaagcctggaaacaccatattgtgctctgatgggacgattactctcactgtcttatcttgtgatcctgatgctggtactgttagatgtcgttgtgaaaacactgctacgttgggtgagagaaaaaatgttaaccttcctggtgttgttgttgatctccccacacttactgagaaggataaggaagatattcttcaatggggtgtacccaacaagattgacatgattgctctttcatttgttcgcaaaggctcagatcttgttaatgtccgcaaggttctggggccacatgcaaagactattcagttgatgtctaacgtatttttttgttgaacttccttaataactagaggttttattattcatgccggttctcagttgctctggcaatggctgtgt

SEQ ID NO: 24868 - DNA, 450 bp, Glycine max
ggtggcagagagcgaacccaaaactagagctaccttcccttcaaaccttccactcttctctccttttccaatcaagggaataatatttcttagagatattccgaaaccatggctcacgccaatcctatgatttttgttgttggaattctaggtaaccttgtctccttctgttgctttctagcaccagtaccaacattctatcgagtttgtaagaagaaaaccacggaaggtttccaatcacttccttacgtggctgcactcttcgcttcaatgctttggatattttatgcttacataaagacgggcgaaatacttctcatcaccattaacgcattcggttgtttcatagagacagtttaccttgtcatctatatcacttattgccccaagaaagctaggttctttaccttcaagatgattttcttgttcaacgttggagtgattttcttg

SEQ ID NO: 24869 - DNA, 410 bp, Glycine max
ggtggcagagagcgttcccaaaactagagctaccttcgcttcaaacgttacactgtggtctccttttccaatcaaaggaataatatttcttagagatattccgaaaccatggctcacgccaatcctatgatttttgttgttggaattctaggtaaccttgtctccttctgttgctttctagcaccagtaccaacattctatcgagtttgtaagaagaaaaccacagaaggtttccaatcacttccttacgtggctgcactcttcgcttcaatgctttggatattttatgcttacataaagacgggcgaaatacttctcatcaccattaacgcattcggttgtttcataaagacagcttaccttgtcatctatatcacttattgccccaagaaagctaagttctttacctt

SEQ ID NO: 24870 - DNA, 386 bp, Glycine max
gggggagtttcttcttggatcttacggtcttgtttgctaatattctcattcttctgtctctgcttcttctccttctgaactaagagatggggttgtctttcaccaagctttttagccggctctttgctaagaaagagatgcgtattctcatggtaggtcttgatgctgctggtaagactaccatcttgtacaagctcaagctgggagaaattgtcacaaccattcccacaattggattcaatgtggagactgtggaatataagaatattagctttactgtatgggatgtgggtggccaagataagatccgtcctttatggagacactacttccaaaacactcaggggcttatctttgttgtggatagcaatgatcgtgaccgtgta

SEQ ID NO: 24871 - DNA, 395 bp, Glycine max
ggaaccggcgcaagcaagaacgcgggttggaacttggaaccatgacagagtccagagcaatgtgtaccctcgaacccgacgtcatcggcatccgcggcttcgagctacgcctcattcgctgtaccatcactttctcacagccctcggattcccgccacgaacttgaatcgttggatggccacatcaacgacctcttgaattccatcgagcgcggcaactacgtcgaagcactcacctccgaaccttccttctccctcgtattccgactcgacggccatgaatcgctgccactcgacgcggaccgagtctactccgagttggtccaccgcgctgagtcctttctcagagacgccgccgccgccgaacagcgtcgcagggcaatactcgtcatgtgt

SEQ ID NO: 24872 - DNA, 387 bp, Glycine max
gggaaggaggatgagcaggaggtgagaaagaatgtgctgcagaagcttgatgcctgctttggtgggtctgtgtcgaaagaggctaattatgcgagattggacagggtttcggatttgctcatgttttacttatcctcaatgtgttatatatttggttttgattcgccatgtggccctggcagttcgttcaagtctggtaaattgatttgggcttacgatgctgctggttgtttaaaccaattagaatctagatcgtttatggggaaattggctggtcttcaaactgttgtgattgttcctcttaagtccggggtgagggagcttggttcgctcgaaatggtgcctgaagagcacggagatgtggagatggtcaggacagcatttggg

SEQ ID NO: 24873 - DNA, 263 bp, Glycine max
gaacctgtcactctgccttactcactctggactttgctgatcatcgtggatgaaccaacacttctagtctctcttactgtataaccatgtaaaaatgagtcacctaatgaaaaattagtagcttcttgctgagctttatattgtgattgagttgagataaatttgtctggttgtctggtattgttttgcgtgttatgaattatttgatgggcgaagaatgataagtggtgagaaagccaagacaaatgggtgttggtggagat

SEQ ID NO: 24874 - DNA, 365 bp, Glycine max
cacacagcaagggacggtgcgagtgagtgagtatggcgtctccattgtcagctcaattgggtcaatgtcagaactcacttccacctcttcagggtaattttagccaagatgtgtctaaggttcaaaggtcgcgtgtggtatgttacggtaccagatcaccgcttggttattatgaggaagcattgacatcaagatcacataacgccctgaggttttctgtcacgcgacaatctgaaacacggtccattggatataggagaatgacatgtgtcaatgctgcagacaatgttgtagagcttcaagccaaggtgacaaccaagcgcttctttgatgtagaagttggtggtgaacctgtgggcaggatt

SEQ ID NO: 24875 - DNA, 367 bp, Glycine max
gggattcataggtcagcaaccttcttgtcttgagtgatggcgaaggacatcaacctcagctctcgaacccctctgctcttgctgttatgtttcaccactctcaccgaggctgtatggttaaccatccccagcaagggaaccaagtgcatgtccgaggaaatccagacacgcgttgtcgttttagcagattactatgttgtagccgatgatgtccagggtcaccaacttcaaactatttccgccaaggtgacatccccttatggaaataatcttcaccagaatgaaaatgttacccacggtcagtttgcatttacaactaccgagtctgggaactacgtggcatgcttttgggtgaataacaaacatc

SEQ ID NO: 24876 - DNA, 318 bp, Glycine max
ggtggtgaactaatttttggaggtatggatcctaaacactttaaaggagatcatatttatgtcccacttactaaaaagggctactggcagattgaaatggagagatttttttattggaggtctctcaacaagtgtttgtgaaggaggctgcgctgctattggggattcaggaacatttttgcttgctaggccaactactgtggcaactgaaatcaatcatgctcttggagctgaaagagttctacgtgtacaatgtaaggaagttgtatctgaatatagagaatagttatgggatctcttggtatcacgggtacgacc

SEQ ID NO: 24877 - DNA, 333 bp, Glycine max
acgcgtgcgaacacgtccgagaggactgctgaacgaaaccttaccggtttggagccttcgcactttcacagcgatcttattcattttacggttactaatactgactcttcctttgacgaatcgaaacattatattattgattgggtctgaacaatcttgttggaagaacctttggctttaaataggcaagcattatcattggattttactatcacatctacactggctactaaacttaagcttactcatatacttataactcgtctacttgttcaaaggaatgtattcgtatttgcgtatagcaaatagatgttggagtatatccttacaacc

SEQ ID NO: 24878 - DNA, 466 bp, Glycine max
gactgaaccagacatccgagtaaaaagatactgtagttggaagttgctcggagcttcaacattcaatatcgagcgtttcgatatattacggaactgaatcggacatcagagtaaaaagttgatgtcgtttgaattatctcagagcttcggtattccatttcgagcgtctccatatattacgggactcagtcagacatccgagtaaaaagttactgtcgtttgaattttctcagagcttcgataatcaatttcgagtgtcttattatattacgcgattcagtcagacaaccgagtaaaaagttattgtcgtttgaattatctcagagcttcggtattccatttcgagcgtctcgatatactacgggactcaatcagacatccgaataaaaagttactgttgtttgaatttgctcagagcttcgataatcaatttcgagtgtctcaatatattacgcgactccgtcag

SEQ ID NO: 24879 - DNA, 339 bp, Glycine max
gatagcagcatcatacaaagcattgaattcaaaaactgaagttcattccttgtgttttgctttcttcctcaaaaccaaacatgtcgaacacatgcggcaactgcgactgcgctgacaagactagctgcaccaagggaaacagctatggtgttattgtagagactgagaagagttacatcgagactgttgtcatggatgttccagcagctgagcatgatgggaagtgcaagtgtggcactaactgcacttgcacggactgcacctgtggccattaaagaatatgtatgaaaatgtaattgccatgtgtttggcaatacaaatattcaaataatgtaatct

SEQ ID NO: 24880 - DNA, 411 bp, Glycine max
atacctcctcttcccactgacccagagaaactgtttcgttacttggacctagtactcacccctctccctctttcaaaaaccagccaaggtaatttgagaagatgggttcccctcattctcataacggtttaaatgtttcagcctcagccttcggcaaaaggggataaacttctgcatcaccttctttggtcagtcctgtctcctctaacattgagatttcaaagtagttccagaaggttgtctgaatttctgtcaaagaccttgctgaaaaggcattgagatttgtttgagcgaccttttctctacttctattagcttaccatctaaagtttcctcggcaaaaaacatcactgtaatactgttgcaggacgcagaacacgcgttaagcattaaaatacatgaaagacaaag

SEQ ID NO: 24881 - DNA, 438 bp, Glycine max
  modified_base (69)..(69): a, c, g, t, unknown, or other
gcacttcaattgcaatcaaattagttcattctctttgcgcagttccctacctctcctttcaagatgcanatcttcgtcaagaccctcaccggaaagaccatcacccttgaggtggaaagctctgacaccatcgacaacgtcaaggccaagatccaggacaaggaaggaattcccccggatcagcaacgtctcatcttcgccggaaagcagctcgaggacggccgtaccctcgccgactacaacatccagaaggagtcaacccttcaccttgtccttcgtctccgtggtggcatgcagatcttcgtcaagactctcactggcaaaaccataaccctagaggtcgaaagctctgacaccattgacaacgtcaaggccaagatccaggacaaggagggaatccctccagaccagcaacgtctcatcttcgccggaaagcaa

SEQ ID NO: 24882 - DNA, 78 bp, Glycine max
tgggcaccttaatctcacccattcaaaaacttgaagttcattgcttgtggtgggctttctttctcaaaaccaaacatt

SEQ ID NO: 24883 - DNA, 397 bp, Glycine max
  modified_base (279)..(279): a, c, g, t, unknown, or other
ggaggatttggatctgttcacagagggcttctgccagatggacaagtcattgctgtcaagcaacataaattggctagttctcagggtgatctagaattctgctcagaggtagaagtcctgagctgtgctcagcaccgaaatgttgttatgttgattgggttctgtatagaggataaaagaaagctattggtatatgagtacatatgtaatggatcattggattctcatttatatgggagacagccagaaccattagaatggtctgcccggcaaaaaatntgctgtggagctgctcgagggttgcgatatcttcatgaagagtgcagagtgggttgcattatccatcgtgacatgcggcctaacaacattcttatcactcatgattttgaaccactgg

SEQ ID NO: 24884 - DNA, 456 bp, Glycine max
  modified_base (63)..(63): a, c, g, t, unknown, or other
ggggatcaaagtgttgttatagcggagcggcaagagatggaggaggcggtcaatgctacaganaatcatgtggaaggaagaccagagataggtgacaatatggttctgcgaaagctgcttcggggtccgaggtattttgatccaccagataatagttggggagcatgttttaattgcggtgaggaaggtcatgctgctgtgaactgttcagcggtgaagcggaagaaaccgtgctatgtttgtggttgtttgggacacaatgcaagacaatgcagtaaggtgcaagattgctttatctgcaagaaaggtggtcaccgggctaaagactgtccggagaagcacacaagtacttctaaaagcattgctatttgcttaaagtggggaaaattcgggcatgatatcttttcctgcacgaatgattattcacaggatgatctcaaggttattctttttctt

SEQ ID NO: 24885 - DNA, 333 bp, Glycine max
aataatcagaatcagcatcatcttctggcgcagcagcagtaacaaccacaacatctgcagttgcaacatccacaagtggtcgatcatcaacagatttcaagtgttgtctctacaaggtctcagcttagcacagcagctcaatgtcaattaccacccatgcaagctatctctacacttggccatcagcaaagcttttctgattcaaatggaaaccccacgactactgctattgtttctcccctgcataggatataggattcatttcctcttgatgacacatctcacctttttaggctttctagatacacttgttgcgttcctgttcaacattct

SEQ ID NO: 24886 - DNA, 457 bp, Glycine max
ctatagaggagactcgcaagaagatatggcttgtggactcaaagggtttgattgttggttcaagaaaggcttcacttcaacacttcaagcagccttgggctcatgagcatgagcctgtaggcagtctcttagaagctgttaaggtaatcaagcctacagttttgattgggtcatcaggagtgggaaaaacatttacaaaggaagtaattgaggctgtgacttctataaatgaaaaacctcttgtcctggctctctccaatccaacttcacagtctgagtgtacagctgaagaggcttatcaatggagtgagggtcgtgcaatttttgctagtggaagtccatttgatcctgtagaatacaagggcaaagtgtactattctggccaggccaacaatgcttacattttccccggctttggtctggggttggtaatctcaggagcaatcagagtgcatga

SEQ ID NO: 24887 - DNA, 449 bp, Glycine max
gatcacagaagcaattaacatattctcctctcatgctcactcaaaacacaaaatcctaactaaggtgaaaatgaaggcatcacgcattgctttgttcactttggtggtgcttctttttgtggctgaagttcaagtgtcaaaggcagtgacctgcagcccagtgcagctgagtgcatgtgtgagtgcaataacctcttcaacccctccatcaaacctatgctgctccaagatcaaggaacagaaaccatgcctttgccaatatctcaagaaccccaatctcaagaagtttgttgactctcctaatgcaaggagagttgctaacacttgtggaactcccttcccaaggtgctaaggtgttactaaatttgaagtggttttaatttctctgcctgattatgcatcttgatatctatccatgtgttctggccagagaccagagagtgaaagaa

SEQ ID NO: 24888 - DNA, 204 bp, Glycine max
ctactgaactaaaccttaccgatatggagccttcggactttcacggcaatcttattcatttcacagttactaatacttactccacctttaacgtatcgaaacattaaattattgattatctctcaacaatcttttttgatgaacccttggctttaaatagtcattctttatcatcttattttactatcacaaccccacttcctt

SEQ ID NO: 24889 - DNA, 390 bp, Glycine max
gtgctcaagcctatttctttttttggaatgaatctacaacataacaaataaatgttgatttcaatcccaaatatactccaaatataacttgatcatcaaaattaaataaaattaaaaagtatagttagagttttgtcacaattacttgctcaaacacactccaatttctttcacatcctgaagcactgcaagtcaaactcaaaatcttaatagccagcttctgcaaatttggagtttgtgacccaaacattcgccaccaatatgctgcaataccaattaccaaccaagagcataacttagaattctgaattctaacactaatacataaaaaaaatagtatgataaaagtttcttactaagagaatgggttttcctttgagccattgcaaa

SEQ ID NO: 24890 - DNA, 408 bp, Glycine max
agaagggggggggatcaatggagaagagaagagaagagaagaggtggatagggttagccacttgttcttgttcccttatctcttatggtgaaatccctgttcctgatttctcgaatcccaatgtcttccaccaccatccaccacaacggctcccacatacccaaaaaacccaaactctcttccttggaaatcgaatcagaattcggccaccacgactcctccgtcgcccgcatcaacaacggcagcttcgggtgctgcccggcctccatcctctccgctcaacgccgctggcagctccagtacctccgccagcccgaccacttctacttcaacgacctcaaatccgccgtcctccaatcccgaaccttaatcaaggacctcgtcaacgccgaccacgtcgacgagatc

SEQ ID NO: 24891 - DNA, 262 bp, Glycine max
gaaaccaccaaagcctacggctactacattacattcttttttttctttcccaaatgggttccatcttttcacccttaaccactatcttcctcctactcctactcgtactttggggtggcgaggcacgtgacccttttgcttgtgaccctaagaacaccgccacaaaaaacttaccattttgcaaggcttcgttggcaacaggggcaagggtgaaggacctcattggaaggttgacactgcaagaaaaagttaacttgctagt

SEQ ID NO: 24892 - DNA, 339 bp, Glycine max
  modified_base (18)..(18): a, c, g, t, unknown, or other
aaaccaccaaatcctacngctactacatgacattctgtatttttttggccaaatgggttccatcttttcacccttaaccactatcttcctcctactcctactcgtactttgatgtggctaggcacctgaccctttttcttgtgaccctaataacaccgccacaaaaaacttaccattttgcatggcttccttggcaacatttacaatggtcaatgacctcattggaatgttgacactgcaataaaaatttaacttgctatttaacaatttcctctcaattccactccttgttatcaaaagatattatttattctcgtaaacactacataatgtcttaaa

SEQ ID NO: 24893 - DNA, 408 bp, Glycine max
agaatccagaatccatattaatctatctgtgttggaacatagaggactagtatataagggtaattgggtaaatgaagccattgttgattcttgatgcctttatttttacacactgcacaatcatttatttgagcactctgttttgtcattaatccaacatttgagtagctgaaagtctcatagtaaagttatatgatatgatgtattgttaactttgtgttttgaccttgattgtgaagtttcaggatgcagtttgtgttctaacctctgtttcttaaccaggtaaagttggaagaagaggaaaccaatcatttcaaagatagtcttcttcctactgtaattggattgcttagaactgtaagtaattagttattgtgaaagtttgagtattattttttattgggaaag

SEQ ID NO: 24894 - DNA, 429 bp, Glycine max
ggttctagtgtatgtgattgttgtggctcgttcttcttcgtcgttatcttcttcttttgttgtttgtgtgtttgttttttctctcacctgaaaatgtcttgctgcggtggtaactgtggttgcggaagcgcctgcaagtgctgcaacggctgcggaggctgcaagatgtacccagacttgagctacaccgagtcaaccaccaccgagaccttggtcatgggagtggcaccagttaaggctcaattcgagagtgctgaaatgggtgttcccgctgagaacgatggctgcaaatgtggagctaactgcacctgcaacccctgcacttgcaagttaggtgttgtagagctaaagcttcaagcagaaatggcccttagaaataatgattaaaactatatgtatgttcaaaacttcaaaattatgtagtatgta

SEQ ID NO: 24895 - DNA, 250 bp, Glycine max
ggaatctttgaagaagaaagaaagcaaaagaagcgagcaatggccaagtccaagaacaatgccaagaagttgtcctacatctcagttccatcttaggtcatcaacttcatctcatcttcatctcttcaatctctgcttgaatctcccaagacgtgtgcaaggcactccaaattcttcaactttgtcaagtgcgtgaagccaagactcttcttccttttaaccctctttttccttggtttctttgccatgc

SEQ ID NO: 24896 - DNA, 298 bp, Glycine max
  modified_base (75)..(75): a, c, g, t, unknown, or other
gactccgagatctggtcatcgttgggatctccatacgccggatctgctaaaatacgcttgatccatatgggcctnctcgaccacttgtgggacgacaccgtcgccggcccaaggccggaaaacggtctcggcaagctccgaaaacaccacaccttcactttccgacctagctccggcaagggtacgccctgcctcgttaatcatactcatataattcaccaacgattttcgttaactacaagtccacaactacaatcggtaactcaactcttaatataattatcaatcctttaatatc

SEQ ID NO: 24897 - DNA, 429 bp, Glycine max
ggagcttaaggccgtgtttgtgtgttgcgtttgagttggcgattccgaaatggaggacgacggttccaactcgatccgccgcatgtcaagccgaacgcgaaaagttgcgtccaaaatggccgccgcgcttgccagcgttgacaaccgcactcaggcggcacttgcacgcttggatgcattggagaatgacaatgcgggttttgaaatcgcagatgccaataatgatgacgatgacgcttctctagacgaggaggatcaattttatatgcagaaaaagcagtctaaaggcaccaaaaggaaaactaggcaggcaaaagcacttgaagctagaatggccccaagaacattccttgagctcttacatgaagctaacttagaatcattgcctcctcatgtgccctcctattggaaagccgcagttggaccccc

SEQ ID NO: 24898 - DNA, 412 bp, Glycine max
aggcctaccagaccaagccgactcaggtccaattagcatactaaataattgcctggattggtcggttattgtgtatttatatgcttctctgctcattatttcctccatttttttaattgttagattttaaaaaaataattatttttatttatctattattcagaaagttcaaaatcatattaattattattttttatttattatacctttatttatcacatggatctatcgtagagtgaaaaaaaatggataaaataagaaattttacaaatattttattaaaatcaagaaaatttattacattttttttagtttctacataaaaatattaatttacgaagatgttaacgttaatggctagctctgtaacatttacatccgcttcggccgccacttgaaaaacattaatttg

SEQ ID NO: 24899 - DNA, 85 bp, Glycine max
acgacagattggggatcttaatctccgagttgagaagagaatctgggttggcgaatgacacagggacgacaccacctacaaatga

SEQ ID NO: 24900 - DNA, 380 bp, Glycine max
ggattccagtcatctctataagtaatcgatcagtggacgccgtctcaatctccttttctggctacacactttcttcaacggtaaatccctctctgcacttcgtctctgttagggattaatcattattttccgcgcaccaaacagccaaagtcaattttcttctctcttctaagacacaccaatgccagagaagaagaacaagaaagtttctttcaccgaagaagatgctgttacgctcatgcagaggtacgacgcaactacggtgttcactttacttcaggaagtggcgcattaccctcaccccaagattgattggtgcgagttggtgaagaaaagcgcgactggaaattctaacgccagagaatattaaatgctatggc

SEQ ID NO: 24901 - DNA, 366 bp, Glycine max
ggcctattgtatcgtgatatacgcgtcaactcaagcaacaaaacaagcattacatatcatatctttgattcagccttcaaacgcgccactcccatttctctctctcattcttcttcagatgccaaacctaacctaacctcccaaacaaactcaaccttatcatcatcatcgtcgtcgtttaaataaattctgatctccacgcacacgctctgagtcagatcatgctgcgtttgtgctacggccctctggattgctgcttccgacgccgacgtgccgacggactcctctggcacaccgacttgaagccccacgcctccggcgacttctgcatcgacgtcgtccaggccaattactgtctcgaggatc

SEQ ID NO: 24902 - DNA, 377 bp, Glycine max
ggtgtgacaaatggagggtccttagttctgtttctctttcttctctctgtgctttcaaccaagttctcaaatcactcttcttcttcacccttctgatctgctaattctcaaggtattcaaaattgggtggttttcgattgaactgtgatgtccaagccactgctaggcatagcggaagaggaaggtcaaagcaatgtcactttgttggtttcttcctcagccaccatggaaagtgtgtgcctgaatagctcaaaactgaaagagcgcaactacatggggttatctgattgttcatctgtggacagctccgcgccgtccttctcagatgagactaagagcaatttgaacctcaaggctactgagctcaaactggggct

SEQ ID NO: 24903 - DNA, 394 bp, Glycine max
ggagggttttgacttgtgattttccttcaacacagtcggcaaaatctttcaccaccaacacacagccatggcaggctctcaccttctttctcactcaccctcccttcccaaaacctataactactccttaaaccaaaaccctttatcccaaaatcttttttttccacccctcaaattcaaaagcaccacaaaaccgcgtgttctcagagctgttctctcccaaaacgctgcaaaaaccgcggtagaggacacaaagaacgctcattttcagcattgtttcaccaaatccgaagatgggtatctgtactgtgagggcctcaaggtgcatgacatcatggaatctgttgagagaagacctttctatttgtacagcaagccccagataactaggaac

SEQ ID NO: 24904 - DNA, 433 bp, Glycine max
tctagcacttttcacatgttgtagaaaaatgtgaagtaccacgaacaatcatgaactttttttggtgtacaaactatatagtatgtccacattgaaatttctacgtaattaatatcacaaaacaagaaggcaggggtattattggcatacatgattacatcattgaacccgaaaaaccagaccaaatatctacagctgatagaatctgacaatttagcaaatttaattatagaatagtaagattagtagtcacaattctacacctataactttcattttatttttcttaaaattgaatcaaatctacgcgtttacattcttaccgactcatattatgccaggttttataatagtaaatcaaactttatcgacaacattgagttatcaaagtatttatgtagaatatgacatggcatccgattgtcggtatact

SEQ ID NO: 24905 - DNA, 415 bp, Glycine max
gagttttcatgacattaatctggtttgcaaaattaatactttgttgtaggaaaaggagaggtggttacctgctcagggaaccgaaatgctgaccttttttatggcgttcttggagggcttggtcaatttggcatcattacaagggctagaatttctcttgaaccagcacctatgatggtgagtgtacattcaaaactctaatattaagacaaaaaaaaacagttcctaataatatttattgattatgacatgatatgtgcctttttgacaggttaaatggattagggtgctctactcagaattttctacatttactatggatcaagagtatttgatatcacttaacaacacatttgattatattgaagggtttgtgatcataaacagaactggcattcttaacaactggagatca

SEQ ID NO: 24906 - DNA, 439 bp, Glycine max
  modified_base (410)..(410): a, c, g, t, unknown, or other
gtgttctttgatgaactctatgcatgttttgtagggattggattttgtaattgcagaagcaggaaaaaatggggtacgactgatactaagtctagtaaataactggaatgattatggtggaaagagtcagtatgttcaatgggcaagagaacgtggtcaatatgtaaacaacgacgatgacttcttctcacaccccattgttaaggaatactacaaaaatcacgtcaaggtaaaaattaattatatgagttgagaatatttaattataactattagattaaaattaattatttacattacgtatttaattataaaatttacatgttttttccttaaagattacatgagatctgtaattaaatacgtaatatcaattgttaattaatataataattgtgattgaatgtttntatttacataataaccaaaaactctgaac

SEQ ID NO: 24907 - DNA, 416 bp, Glycine max
gacgtcaacaacattcatcaatgtgttgtgtacacactgcacaccaccccatcccatgtgactctctgccccttccttcatcaatcatagtttctctgtgttttgttccgctaaatctccaaagcaatcaagcagagttctttaattagatgcaacctcagcacgagggttaacagattccgaccgtctcaatgaatgttgtgatttgtggtactgttgactccttctttttggttggacttagagtccaaaatggcggtgctggggtgagttgagttgaagtgaggcacctactttgcagtctgagtttgtgttgtctagtctttttttttctttttcaaacatacaataatgaaggccttttccttcagtggggtttggattttattggttctgagctcggtttcagctttttc

SEQ ID NO: 24908 - DNA, 424 bp, Glycine max
ggagctgcaggcattcgatccactaaaatgctgcacgcacacgaggactgtacacgaaccattatgactcctgtcgacatcgtctcgtcccttagcttcgatcacatcatatgactctctgtgctttgaacacaatccagcattcaaaggggatcgatacatgacatttgatagcatatagtgcgacggaaaaaacgacgctaacggaatccgagcggcttaagagaggtggggagtggactttcagatgacaaatatgctgtggtgaacttaaactcggactggatttaaagctgtgagtccagatctggtcagacgaaaagttggcctacatagtgcataatccctacatttgtttgatggtcttgaatcggacagtgctgaatgacatatcaatgcttcaggtaactggcttaatgcaaat

SEQ ID NO: 24909 - DNA, 390 bp, Glycine max
gaataacataaaggttgaagggttatagattcctgcacccacctaccaccgaagaacggatattacaagagagatagatgttttgcttcctctaatctggcgaatcattcgttctagcaaattttgccgaaaactccaaaacccccccttttagaaaactcgattaacaacaatctcaatcttctacagcttatcctctctctctctcttcttcgcttcccccaacagcaatttcattcaaaactctctctcaggtgattaagagaatcagagtttgcttatccatataacagatcatttgaacagaagaaggatggtactggtttgcggaggcaattggacttctgcgagcttagaatcctctctgctttatttattaatgaaatcata

SEQ ID NO: 24910 - DNA, 426 bp, Glycine max
gacacatgctttttcttttagagaaattacatatgcttatttataaccaataatgttgggaaaggaacatacacaatttggagaaaagaagaagataagctagctaaggcagcaatgggtaatccttctaagcttttcccatttttctttgcattcattgtgtttctgatgcccttagtttccttatcccacaatgacttctctacctttgccataaaaaccgtttcatacctagtttcctttagtgaaaatccaaaccataatggccacatcaccacaagctccaatgaaagagacaaatcacgtctttggaggaaagccttcattggcttaaaaaatactcacgagccatcttcgaatatttctcgagcaatatcccttaatgcaagagagtgtttttctgtggaagtaccttctgatgcaata

SEQ ID NO: 24911 - DNA, 430 bp, Glycine max
ggttgcggattgctcccaaattcttcaccacggtgcctcttcggaccatttcacccttcgcatgtcgcttctcagtccgttccatcgctgactcttctcctttcaacaaaatccgcattcaaagggatgatactgcatttgatgcatatgtcgttggaaaaaacgacgctcctggaatcgttgtgcttcaggagtggtggggtgtggactttgaaattaaaaatcatgctgtgatgatttctcaacttggtcgtggatttaaagctcttattccagatctgtacagaggaaaggttggtctagatgttgcagaagcccaacatttgtttgatggtcttgattggcaaggtgctgtaaaagatatcaatgcttcagttaactggcttaaggcaaatggttcaaaaaaggctggtgttactggattttgtat

SEQ ID NO: 24912 - DNA, 421 bp, Glycine max
agagatacatgcttgttttgtacgtgtacgtgtatgtttctgagttcatatgtaatataggcatggtttatatcttttatcttttattttataacctttttcttccaatgttgcatacgattgggtgatttacttaaccttgtgttatatgacttatctcatatttcatttctatattgtgtagatgagccgggcaaacaggttaagagtgccatcacgattaaaaacaccagtaaatctaatgtagctttcaaggtatggtgaaacatgtacaccattgattttggtcctgatttttatatttctcttttccttatttgcaatttttgtcatttaagtacttccattgagtcttgaactgaactctatattcttgctgctactatgtcacaattttgcaggagaataattaattgatttc

SEQ ID NO: 24913 - DNA, 364 bp, Glycine max
gccagacgaccacagaagggcatatgcgaacaatccattgcatagattgtgaaccgtgacggctgggcgtaacatgatcagttctcaagcggatgacttgtcaccacattgcctgagttgttatcataccttcgccagagagtttgctgggacccggaactgtgacacccaagacgcttctggatcaattctgctatttggttagatcatactatctgctgaaagtgatttgcatgatggtgattgcatggatcgtgattgcagccagggcagtattaaacttaagacagttggggcatgctattatttatagtatttatgcagcataatgcacttaaatacttgttcatggatgcttatatat

SEQ ID NO: 24914 - DNA, 430 bp, Glycine max
cccagatgtgactccaccaacaccaaattctgctactacaataattacagcctctcccaaccaaggtatttctgcaagtcctgcaggagatattggaccaaaggaggtacacttaggaatgtccctgtgggaggagggtgcaggaagaacaaaaggtcatcatcatcatcatcttcaacatcaaagagagttcaagaccaagcattcacaccaaatcctaactctctcattggccttccttcattgtcctatgactcaagtgacctcactcttgcattggcaaggcttcaaaagcagtcatgtgggcaattggggtatgatgagcatgatctttcaatgttggggaaccaccacccaagcaccccatgtgataatatccttggcatgcatcatcactcatcatcatccacaaacccagggttcttggatg

SEQ ID NO: 24915 - DNA, 430 bp, Glycine max
  modified_base (416)..(416): a, c, g, t, unknown, or other
gaaccaattccaaattctcaacgtttcctaactttagcaaccatccaagaagttgatcagttccttgtctctccttgaattataaaaccattcacagtcttgaacccaatttcactctttgcacctcaaacaccttataagcctcaatttcacaaccaaaaatgcaaagttcaatctcacaatctgagatttgcatcactgattaccttctaccccaagaagttccatctcaatttcaatttccagatatgagcaacaataacataccaatgaaccataccaaccttcaaatgcctcaaatcacatctttctccaagccttcaaggtcctcatcaaatctaagcaaccgcaaaccgtccttgagaaacatcacaatcccttccataacctcaggtcttacaacaactatgtcacanacaacaacaacaac

SEQ ID NO: 24916 - DNA, 427 bp, Glycine max
gagggatagggatagggatggagaaagtgaaggtgcttcggcgactcctcgagacaccaggggttcaccaggggccagcctgtttcgacgctctgggtgcgaagctcatagaatccgctggcttcccctactgcatcaccagtggcttctccatcgccgcttccaggttggctctgcccgacaccggcttcatctcctacggcgaaatgctggagcagggccaactcatcacccaagccgtttccattcccgtcattggcgacgccgacaacggctacggcaatgccatgaacctcaagcgaaccgtcaagggtttcattgccgccggtttcgcaggaatcattctggaagaccagattgcgccgaaagcgtgtgggcacacgcgcgggaggaaagtgataccgagagaggatggcgttatgaagat

SEQ ID NO: 24917 - DNA, 366 bp, Glycine max
ttccttacatcatgtaggagcttttgaaacaaggaagatagaataggttcaggtatccttctatgcatttgctagtgatcctccatccatgtactccaaagctctgctcatctgtccatttagaagcagacattaccaataagtcctataacaaagtgtctagtattgccaaattaaatcttcaaaaacaaaacagataaatagtgtattaccctgcataaaaaaaataccacatttagacagccggataacatgtctcttgtactattattcatgctcagccatgatgatgatgatgatgatgatgatgatgatgatgatgatgatgatgatgatgatgatgatgatgatgatgatgatgatgca

SEQ ID NO: 24918 - DNA, 457 bp, Glycine max
aattcgagcggccgctttttttttatgactactttttgtttctaaacgggacctaaatgcggtggattcaacattttcaaaccatttcctttcctaaaaaccaaaaccaatgtttatgccctttcattctagcttcttctatcacatttttcatgagtgccaagccaggggtaatactctgcaccaaaagctggaaaaaagcattgttgctaaacttaggctattgactgtttctaaaaaccaatttatcttggtaaactgatgcaacaataatgagatatatagaacccatcaattgatttctccttcttctacatcatttggttctcttgtagtactctgaggcatttcttcttcttcttcctcctcatgagccttcatgtacaagcctagttgttctaacggattacaacttccctgtagtttgaaacttccccacccattttcaagatgatca

SEQ ID NO: 24919 - DNA, 384 bp, Glycine max
tctgctggttgttcagcttcaacaagtgttaaaaggggtggagattcactgcggaaattcgatggtgctatcactttcacaaggtttgctgagaagcatcgccgactgtcaaatgctttcattaggcagaatccaggtttgttggagaaatcactttccatgatgctcaaggcaccaaggctgatagacttcgataacaagagagcctatttccgctcaagaataaggcaacaacatgaccaacacttgtctgggccattgcgtataagtgtaaggcgggcttacattttggaggactcttataatcagctaaggatgcgttctactcaggatctgaaggggccattaaatgtgcaaattcaaagtgaagagggtattgatgct

SEQ ID NO: 24920 - DNA, 434 bp, Glycine max
  modified_base (381)..(381): a, c, g, t, unknown, or other
  modified_base (387)..(387): a, c, g, t, unknown, or other
  modified_base (424)..(424): a, c, g, t, unknown, or other
ggttcatatctctctgttctctgctacctctcaagttttggaagtatagagatggcagagacattcctatttacctcagagtcagtgaacgagggacaccctgacaagctctgtgaccaaatctctgatgctgtcctcgacgcttgcctcgaacaggacccagacagcaaggttgcctgcgaaacatgcaccaaaaccaacttggtcatggtcttcggagaaatcacgaccaaggccaatgttgactacgagaagatagtgcgtgacacctgcaggaacatcggctttgtctcaaacgatgtgggactggatgccgacaactgcaaggtcctcgtcaacattgagcagcagagccctgatattgctcaaggtgtacacggncacctnaccaaaaaacctgaagaaattggggcttgtgaccagngtcacatgtt

SEQ ID NO: 24921 - DNA, 302 bp, Glycine max
ggttcatatctctctgttctctgctacgtttcaagtttaggaagtgtagagatcgcatagacattcctatttacctcatagtcagtgaactagggacaccctgacaagctctgtgaccaaatctctgatgctgtcctctacgcttgcctctaacaggacccatacagcaaggttgcctgctaaacatgcaccaaaaccaacttggtcattgtcttttgagaaattacgaccaaagccaatgttgactactataagatagttcgtgacaccttcatgaacattttcttttgtctcaaaccatg

SEQ ID NO: 24922 - DNA, 325 bp, Glycine max
cggttcatatctgtctgtactctgctagctatcaattctgtggagtgtagacatcgcatagacatttctatttacctaatagtcagtgaactagctacaccctgacaagctctgtgaccaaatctctgatgctgttctctacacttgactataacatgacccagacagcaactgtgcctgcgaaacatgcaccaaaaccaacttcgtcatggtcttctgacaaattaccaccaaagtcaatgttcgactacgagaagatagtgcgtgacacctgcaataacatcggcattgtctcaaactatatttgactgtattccaacaactg

SEQ ID NO: 24923 - DNA, 405 bp, Glycine max
gaaccacacaagtcatgagctggaatagtgaggctatcttttcttggtgttttcttgcatgtggcaattggggttacagtgttcatgactagtgggagtctcaggggcactaccacttttaggcctgtatatgctgcgtactttacaatggtaactctgtgcactataggatatggagatattgttcctgactccacgtttaccaagatctttacatgtggtttcattttggtgggttaatggatttcttggacttttgctcaatggattggtagcatacatttgtgatacacactaggcattcttgttgggcatgatggatgagaatagatattagataattctcaggacttatatggtagatgaatagtatggaagtttgagaatatgaaccaaagtttgtct

SEQ ID NO: 24924 - DNA, 391 bp, Glycine max
gggtggtggcggcgggagagagagagagagagagatggggagattgcgaagactgagccaagcttcagttgatgctactaagaaagttatatccggtgatcttgatgatttgatgcctccaccggagtgacccatctgcagcttcaattccaagcaagagttaagcatgtggcatttgtattctgattctgaattttgaggtttgtactctgcgtctttgcaaataactgagtcggaaaatggagcaacttctggaatcttgtccgggaacctatctctggatgtctttgaaggctctaaatggaacattagtggaagtgacttttgtggaatgcgcttaaaaaagtttgatggctttattgatttgggttcatattatactattgctatg

SEQ ID NO: 24925 - DNA, 428 bp, Glycine max
gggtggtggctgtgggagagagagagagagagaggggtggatattgcgaaaactgaggcatgcttcaattgatgctactaacaaagttatatccggtaatcttgatgatttgatgccaccacctgagagacccatcttcagcttcaattccaagcaagagttaagcaagtggcatttgtattctgattctgaatttggaggtttgtcctctgcttctttgcagatatctttgtcctaaaatggatcatcttctggaatcttctcctgaaacctttctctgtatgtcttctgaatgctctaactggaacattactcgtagcggcttttgtggaatgcgctcaaaaaaagtagatggctttattgatttggattcatatgatactattgctatgaatcttaatggatatttatgattttatatatctact

SEQ ID NO: 24926 - DNA, 216 bp, Glycine max
tgggaacctaaagatgctaaaatataattaatacctagttaacatccaattcttctgttgcgtatatattttacaactacaaagctccgatctaattcattgacaacataaccgatagaataattaacctcatctcacagtctttcgtagcggctaactcttcatacttcaatatctccgtcaaagccgataaccctaacgacaagatcgggatcc

SEQ ID NO: 24927 - DNA, 387 bp, Glycine max
tgaaaccaagacatagcaaacgatgcaaacgctttattcatttgcagcatcaaaatgagtggtagcaacgatggtagcggcagctggagctctaggtttttgaaggtggctagtgcagctgccgctacagccgccgttgccggcggtttatatgccattctttcatcctcaacctctgctagctctgagatggaagtgccgtttggcagcgcacggcgtgagagcaaagaacgtgactatggtggctccgggtctcatcctcgcgagggtgccaccacggtcagtcgttggaagaaacctgagattggttgggtgaagctgaacgtggatggtttacgcgacccatacaaaagttccttcgctggttgtggtggggttcttagggac

SEQ ID NO: 24928 - DNA, 429 bp, Glycine max
gaaccgaaagaggggaaaatataattaataccgagttcgcaaccaattcttctcttgcgttgaattgggacaacgagaaattttggatctcagattttggcaggaaaaaaaattgcatttgagtcaaaataacagagtgtattgtagggtcttagttcttgatactgtgctaaatttgatggatggcggagaaatcatgcatcaagcgccttcagaaggaatatagagccctttgtaaagagccagtttctcatgttgtggctcgtgcttcaccgagtgatattcttgagtggcattatgtgttggagggaagtgaaggaacaccttttgcaggtggatattactatggaaaaatcaagtttcctcctgaatatccatataaacctactggaatcagcatgactacacctaatggacggttcatgacac

SEQ ID NO: 24929 - DNA, 234 bp, Glycine max
gaactttaagaggtgacaatataattaataccattgtcgcatccaacagttgtgttgcgttcaataagtacaactagagattacggatctcagatgatggcattaaaaaaaattgcatttagagtaaaaataacagattgtactgtacttgactagtatttgatactgtgctaaatgtgatctatgacgctaaaattatacattaagcaccttcatatagaatatatagacctt

SEQ ID NO: 24930 - DNA, 417 bp, Glycine max
ctacagaaggacgacagggaagagggactgctatgaatctctcttatcttactcgggggcccgagcgtaacgatgctcctctttatgccacacttcccactacagctactactattggaaataggcctgagaattttgcgattgcagggcgtcatttgaaatactgattcacgacgaggcatacacaggacgtaccggctcttacggattgctccattcgcattaattgcacacagtttcggatgctacttggacccaatgggagtagaaaatctaccctcttgaatataatggctaggtctcttgacttcaacttcaggaacagtgtacgcgaatacacctaacagtctcgtattacacaatgcagatcatcaggtggtaatgcctactgtacatcctgatgttgcataaggactt

SEQ ID NO: 24931 - DNA, 299 bp, Glycine max
cgtcttgtctatttaatctacattacatggtagatgcaacatttcgtcgaagggttttcatctatactagtctatagaatttcttctatgttaaacgacccttaatattatctttgcgtaatcaatactattaatttctcattctttaagacactaattatcaaactatatcgagaatactacttgtgtataacaatttctgtgacccagaatgagctattagctacacctatacctcacaaggatatcactgtcattgatgattttcacttaattatcgtctccaactactgttactt

SEQ ID NO: 24932 - DNA, 453 bp, Glycine max
accgaacttcaatttcggcctagacctacgcacccgtgctacaagacgacacaacatatagcacttttcacatgtatgcataaaaatgtgaattaccgcgaacaatcaggaactttttttggtgtacaaactatatagtatgtccacattgaaatatctacgcaattaatatcacataacaagacagcattgttattatctgcatacatgattacatcatataacccgaaaaaccataccaaatatctacagctgatagaatctgacaatttagcatatttaattatagaataataagattagtagtcacaattctacacctataactatcattttatttttcttaaaattgaatcacatctacacgtttacattcttaccgacttatattatgccatgttttataatagtaaatcaaactttatctacaacattgaattatcaaagtattta

SEQ ID NO: 24933 - DNA, 384 bp, Glycine max
  modified_base (275)..(275): a, c, g, t, unknown, or other
acctgtgcatgctgctgctggaggtatttttcgtagtcatcttggtggcgtgttggcatgcttctcttattatgttggtattcaataagctttttttgttgagatttttggggctattattgctcttgaaatgactaaggagaagggttggaaccgcacctggcttgagtgtgattttactttggtgattcatgctttcaaaaaaccttctattgttccttggcaggttagatatagatggaaaaattgtttgtctttttgtaaacatatagttntttttttctctctcatatctttagagaagctaattcttatgcatacaaacttgtttcttttggtgtttcatctaggactacaactttttgggttgactccatacttttc

SEQ ID NO: 24934 - DNA, 400 bp, Glycine max
cacctccgatagggattataattggcatgtcttgtgttggagcaatggacggtgttgtattcgatcacactggtcaattggttaaatgtaatggcatctcattcgctataggtgactatggatattactttgcacgacattccgtgttcccaaatatttaccagtctatggctgacaggacacaatttaccacaacactactaatatgtaatggcttgtgtgtcaagatatatgcaggcactgcaataatgggatatctacatgtttggtgatggcactctgacatagataacattgtatatgccaccagactcatttgcttccaaagctgcattgaggacaacaactattaacccgccgtctaaatctgctcagttgatgaacaaactgtcatctagtt

SEQ ID NO: 24935 - DNA, 361 bp, Glycine max
ttagaacacctcagattgggaacataatgtgcatgtataacgtttaaggaatagatagatatttattaggtcacagtgctcaattcattaaatctaatatacttccattcgatattgctgtctaaggattttaattttcaactcattttaatcttatacatataaaccaactctatagcttacacacatcaatttacaaaaggactaacaatatttaatcatactatatatcatttatatatatacactcataaacatttatatctcatatttgattatagcacttatactaatatgacaatgtatataacattaatcacatttgcttttatacttatcatttaaacaactataattaaca

SEQ ID NO: 24936 - DNA, 423 bp, Glycine max
ttaaggaggaagagtgaagagaatggctccgaagggtttaacctttctggctgtgttaatatgcgtttcagcactgtcactgagtccttctgttgcgggggaagggcaaaataatggccttgttatgaacttctacaaggaatcatgccctcaggctgaagacatcatcacagaacaagtcaagcttctctacaagcgccacaagaacactgctttctcctggctcaggaacatcttccatgactgtgctgttcagagttgtgatgcttcactgttgctggactccacaagaaggagcttgtctgagaaggaaacagatagaagctttgggttgagaaatttcaggtacattgagaccatcaaagaagctttggaaagagaatgccctggagttgtttcatgtgctgatatcctcggtctctc

SEQ ID NO: 24937 - DNA, 249 bp, Glycine max
tactggtccacgaagacgacagatggctggggatgccaaatgacgaccgaggggtacagttgctagaagactacatagggctactgttgcgaaaagacaacctacggttacgattattagatgactacagatagttactggtttgaaaagacgtcataatggttctgcagctagaatacaacagaatgatacatgcatgtgagaagagacatacttatcaactagacatacatagatcacatgaaggta

SEQ ID NO: 24938 - DNA, 364 bp, Glycine max
aaccattctcatacgcctgataaaaacaatatggggatgcgccccatacatgtgtaggtagaactttaatgtgagaggagtggttcatttctataaattatgtttttctcgagggatttttccttgattattatattattgaatttaatacaaagatataattattgtctacatcttaatgatttactaagagacgtgttttaatgaattcaattcacattaaatgttgcttgataaaattatttgattagtcaagaatggataataactataattagaaattgaatatagcaaatgagttctattcatatcattcataagcttgcattgttttggagtgcacatccacctgttaagtattcgt

SEQ ID NO: 24939 - DNA, 401 bp, Glycine max
aaccattctcatacgcctgatataaacaatattggtatgcgccccatacatgtgttggtagaactctaatgtgagaggagtggttcatttctataaattatgttgttctcgagggatttttccttcattattatattatttaatttaatacacaaatataattaatgtatatattttaatgatttactaattgacttgttttaattaattatattcacattaaatgttgtcttgattaaatatataaataaatcaagtctggataataattataattagaaattgaatatagcagatgagctcgattcatatcattcataagcttgcattgattgggagtgtacatacaccttttaagtatttgacgaatagttatattgcttactttatgcatacttatt

SEQ ID NO: 24940 - DNA, 366 bp, Glycine max
gacggacgagggtttggtttcgggtatgactttgttcacagtcactttctgcgcttcactcactcccttcgtgcgtgcttctttctttgtctaactcttgcgaaaatgcgtgagattctttacatacagggagggcaattctgaaaccagatctgagcgaatttcttggacgtggtgtgcgctgagcacgggatcgattccactgtgaggtaccagggggacaacgagttgcaactcgagcgagtcaacgtctattacaatgaatcgagtttgctgaaggttcgtgccgaaggcggtgctcatggatctagagccagggaccatggacagcgtcagatcttgtccctactgtcagattttcctacc

SEQ ID NO: 24941 - DNA, 183 bp, Glycine max
gactcacgagggtttggtgaccgggatgactataaacacagtcacttacttcacttcactcactcccttcgtgcctacaactttcttatgtataactctgccaaaaatgcgagatattctctatatacatgaacatcaattcttaaaccagaactgagcaaatttcatgcacatgttgtacgc

SEQ ID NO: 24942 - DNA, 405 bp, Glycine max
ggtgtgagagagcgagcgagcgagcggtttcaaagagaggatttgggattgggaaggcgagggattgcgctgcgtctcttcctcttctctttcgattcatccctcattcataatcttccaatccaacaacctcagcctcacactcacacatacacacatctgaacgcgtatcgtccctcccatggcttcaaagcgcatcctcaaggagctcaaggacttgcataaagacccaccaacttcttgcagcgctggtccagtagctgatgacatgttccattggcaagcaacgattattggtcctgctgatagtccttatgctggaagtgtattcctagtcactattcactttccttcggattattctttcaaaccttccaaggttgcctttaagacttaagtgtttca

SEQ ID NO: 24943 - DNA, 404 bp, Glycine max
aaccattctcatacgcctgataaaaacaatatttgtatacgccccatacatgtgttggtagaactttaatgtgagaggagtggttcatttctataaattatgtttttctcgagggatttttccttcattattatattatttaatttaatacaaaaatataattaatgtataaattttaatgatttactaagtgacgtgttttaattaattaaattcacattaaatgtttcttgataaaataaataaataaataaagtatggataataattataattagaaattgaatatagcaaatgagttcgattcatatcattcataagcttgcattgtgttggagtgtacatccaccttttaagtatttgacgaatagaaatattgtcaaatagaaacatacttatacaaa

SEQ ID NO: 24944 - DNA, 115 bp, Glycine max
ctacacgtatttcttgtggggctcaggggcagttttaaaaaaccttgggaattaactctgattactgttgtagtttttgctttattgacagcatcttttggtgtatccttgtata

SEQ ID NO: 24945 - DNA, 385 bp, Glycine max
ggttgcggattgctcccaaattcttcaccacggggcctcttcggaccatttgacccttcgcatgtcgcttctcagtccgttccatcgctgactcttctcctttcaacaaaatccgcattcaaagggatgatactgcatttgatgcatatgtcgttggaaaaaacgacgctcctggaatcgttgtgcttcaggagtggtggggtgtggactttgaaattaaaaatcatgctgtgatgatttctcaacttggtcgtggatttaaagctcttattccagatctgtacagaggaaaggttggtctagatgttgcagaagcccaacatttgtttgatggtcttgattggcaaggtgctgtaaaagatatcaatgcttcaagtaactggct

SEQ ID NO: 24946 - DNA, 268 bp, Glycine max
gacacctaaggtcaaactgcgatacccggtgagggtaagcatatcaataagcggagaagttacaacacatacattaactaaaaatgactctatatacaggatatatgcgttcttacactatcatacaacgtcattaaatgtctatacttgcatatatatgaaattcattgtaactatcgataaactaaacgcactgtgcacccttagccattaatgatcttattaatcttgcctgacattcacatattgatagcttaactcatacctt

SEQ ID NO: 24947 - DNA, 419 bp, Glycine max
agaaggggatccccaatcagagagaaaagttagggttcacaacttttccttttccttttgcttgcgaatctgaatcaaataatcaatcatccattcattattcatcatgtcgtcggcgaagaaaatcacgctgaagagttcggacggcgaggctttcgaggtggaggaggcggtggcgctggagtcgcagacgataaagcacatgatcgaggacgactgcgccgacagcggcatccctctgccgaacgtgacgagcaagatcctggcgaaggttatcgagtactgcaagaagcacgtcgaggccgcgaattccgaagacaaacccttcgaggacgatctcaaggcctgggacgctgaattcgtcaaggtcgaccaggccacgctctttgaactcattctggctgctaactacttgaaca

SEQ ID NO: 24948 - DNA, 400 bp, Glycine max
acaatatgaaaaagaggaaaaagattctaacgaaatataactaatgttctttagaataatcaaaaagaatattatactcaaataaattttagatagaaaaaagacttaaaatggaggatctgaaatgcgagatctaaaaacatatctttacgttgcaccagtagtacgtactctatggttcggggctatggcgggtctcttgatagagatcaatcgttattttccagatgcatcagatataccctttattttcattctagttattgacacagaaaggggtcaagactattatagatccagtttagtatttactctatcgagttaatatgtcatgaatcttctgatctttattttgtcagatatctcttcttggttttacaattctaatagcatctgtttt

SEQ ID NO: 24949 - DNA, 263 bp, Glycine max
acactatgaacaacagctaaacggttctaaccaaatatcactaatatctctttataataatcaacaataatattaaattcaaatcacttttatatagaataatgacttaaccaacacaattcgaaatgctacatctaaaaacatatcttttcgcgttaccacgagtaactactctatggaccgaagccttgtctgcactcttgatagagatcaatcatttctttccaaattcattcatattcccatttttttcattctattta

SEQ ID NO: 24950 - DNA, 315 bp, Glycine max
gttatggtttataggtttcatgaggatgagcatggggaggttgttgctgagactaagaggcctgatttggagccttacattggattgcattatcccgctactgatattcctcaggcttctaggtttttgtttaagcagaatatggttaggatgattgtggattgtcatgcttctgctgctagggtggtgcatgatgaggctcttgtgcaatctctgtgtttggttgggtccacgctcagggcgccttacggttgccatgctcagtatatggctaacatgggctctactgcgtcgttggtgatggctgttattatc

SEQ ID NO: 24951 - DNA, 328 bp, Glycine max
tggggttctagtgtgtgattgtttggggatgtaactcgttcttcttctgatgctgttctgtgtttgaactagttctttctctcaccctaaaatgtcttactgcagtggtaactgtggttgcataagctcctgcaagtgctcaaacactctgacagatgctgcactatgtacccacacttgatctacactgattcaaccaccaccgataccttgctcatggtagtgtcacctgttaatgctcaatttgacggtactgaaatgagtgttctctataagaactatcgctacaaatgtggaccaaactgctcctgcaacttttgcactttca

SEQ ID NO: 24952 - DNA, 338 bp, Glycine max
ggtgctagcgtgtgattggtaggggatgtaactcgatctggttcttatgctgatctgcgttcgctctagatgattctatcttacgaaaacgtcttgctacgatattaactgtctatactgtaactccaattaaattcaacgtccgctgctttagaagctagatactcggcaaaaccgtgctacacatcaaacttatacgaccgtcaccacattcatcttactgccacttgctaaagatcaattagaggctgcccaaatgtgttttccaacagataaccaatcctaatgatgaataccacactgcttgtattgccgcattaattgcgcgtgatgtgttg

SEQ ID NO: 24953 - DNA, 410 bp, Glycine max
gtgacttggaataagtggaaacaaaatgtattctgttttttgccctccctgtttttttgccataatgtcaactactttccccacatagtcagtgagatttttaagttctgcatgcttattgttctattgcagtgaatagttcagaatttggcctagacgttgaagattacttaataggtgagtcttctaaacatgtacttgcattaattgtttatgtgtaatgatcattaatggagatgaatatgattctattgcatgttttcttaggctagcttccttcaagaagtgttgactaatttaaatatgattgtcattttgaagaacatgggtgtggcagttagaatcagtagggtttccaaggcaaaggagctcaataaccaaatgcgttatggtatactgttagttatatt

SEQ ID NO: 24954 - DNA, 444 bp, Glycine max
agttcaactatgaaacatgttcatatggttgatcactaatgatactaacaaatatctctccatccctagatgagatattcattagatgctctattcaaaactcatttttcaagcatttttcaatgacaataaaaacaaagaattgaagctaaggtaatcaaaccataaaacaagcaatcaaaatggaaagaagcaataacataggaaatgacattgaataaatataaagattaattacatgagagtagcttagtacaccaatcccccaacaatagatgaattagtctttcattgtcataaaaggcctcaaaattacaaaatgaaaaggagaaaatgaaagaaaatggaagatggagatagatgagagcttcaatcgtcgcacacaaccctaggtttatgctttcactttcatgtccaagagaatgtcctttatattggacctaa

SEQ ID NO: 24955 - DNA, 274 bp, Glycine max
attgcttatgattttggtcatggggttaatgtggcgctgccattggtgttctggtggtggtgttcaccggcttatcattgattgtggaatgcacatacttctctgctgtactcttcaaagttgatcaatgttgatgggctccccttgcaattgctggagcatttcttctcattatgtatgtctggcattacatcacggtgaaacgctacgagttttaaatgcatagtaaggtctcaatggcatggattctcagacttggacccagtttatgact

SEQ ID NO: 24956 - DNA, 392 bp, Glycine max
ggttctagtgtgtgattgtttggtgttgtaactcgttcttcttcttttgttgttctgagtttgcgtttgttttttctctcacctgaaaatgtcttgctgccgtggtaactgtggttgcggaagctcctgcatgttcggcatcggctgcagaggctgcaagatgtacccagacttgagctacactgagtcaaccaccaccgagaccttggtcatgggagtggcacctgttaaggctcaatttgagggtgctgaaatgggtgtgcccgctgagaacgattgctgcaaatgtggaccaaactgctcctgcaacctctgcacttgcaagtgaagtgttgggagagcatgcttcaagcagagatagcccttattaggaatcatgataaactattaat

SEQ ID NO: 24957 - DNA, 176 bp, Glycine max
ttccggcgtggtccctcgcctacgcactctctcgagcactcaaactcacttacacgtgcactctacttaataactatcggatagaatcacctagattgaattcactcacctatacttttcaacattttgactagaacatccctacctttactccaaatctttgctcatcagcacat

SEQ ID NO: 24958 - DNA, 347 bp, Glycine max
  modified_base (303)..(303): a, c, g, t, unknown, or other
  modified_base (323)..(323): a, c, g, t, unknown, or other
ttacatatatgcgttataggaaggttgactccaaaactttgtgcttaatttgtgcacaccttaattctatgctcaaggcttctatatgcagagttagccagatactgaccatggggttgtagttgtgttgtgatgccctttatgctggaaagggagaaattaggaaactcgaaggaaagatgatttccctcgaggtgaatgatgaaaaggaaaagaaaaatggggaaaagtaatgggagtaacatagaggctgtggagcatcgagaggacagcatggtagttcatagattgaatgaagatttntctcatcaaaagccatgatngatttataacctataatatttaac

SEQ ID NO: 24959 - DNA, 371 bp, Glycine max
gaatcacgcactatcagtacaacaactcactcacgaagctaaacaatttcatgaagcctgccatggcttcctcgtgtgcttcctctgccattgcagctgttgccatctccacaccaagttcccagaagaatggatcactcttgggaagcacaaaagcttcttttcttagtgggaggaaactgaaggtgaacagttttacagcaccagttggagcacgatccagcactacagtgtgtgcagttgctgagcctgataagcctctgtggttccaggcagcaccccttctccatggctagatggcagtttgccaggagattttggctttgatcccctaggtcttggatctgatcctgagagcctgagatggaatg

SEQ ID NO: 24960 - DNA, 376 bp, Glycine max
cccaacagtgagaagccgagcgattttggttaccggccaagatatgaagcatttgggcacttgaagtcatcagattttctcgcttatggaatcaaatctgtatcccaagatgtctcgcctgacttgactgatgcattcgatggaaatattctgagccttgagtatgataatttagctgaagtgcacagactctatgaagggggagttacactacctacaaactttcttagcaagatcgcccctataccaatgatcacggaaatttttcgaactgatcgctaacagttcctacagtatccaccatgtaaagtgatacaggtggataagtctgcatggatgactgatgaagaatttgcaagagaaacaattgctggtt

SEQ ID NO: 24961 - DNA, 431 bp, Glycine max
tgaatcaggtgttgataatcaccagaggtatcttgttggtaagcaagatcatgggaagcatcatgctttttcaaagaaatctgaatcagcacacttacaaaattcaagtaagaagagcaggaatgggtcagatctcaacaatccatccttggataggcatgttgagttacaaaaatctactgttccttctaataactcatatttcaaaggatcgcctacctcccattttagtagaggtggaagtatgccaccccagtaccagcctttagatagtacaaattcatcatttggtaactatggtctgagtggctatgcttgaaatccagcattggcatgcttgattactaaccaacttggcactggtaatctagcacacttggttgaaaatgttgctgcagcattagcaattgcagccccttgaatggactcta

SEQ ID NO: 24962 - DNA, 252 bp, Glycine max
gggaacagacctgccgcgcaatgatgaagtgtttctcggtgtccttagcctctttatgggttctccttgctctcttttctctgagtgtgtcatctcaaaatatatctgagagtgggctacagcaagctagcctaccaccaagaggttggaattcctatgattccttttgctggacaatttctgaagacgaatttttacaaagtgctgaaatggtttctcaacgtctcaaggctcacggatatcagtttgtcg

SEQ ID NO: 24963 - DNA, 412 bp, Glycine max
aattcaagcggccgctctatggggtgtgttagatcatttacctttgcaaagggacggggaagggatttattacatgatcgaaaacagaaaatgttgagaactattcaaaactcataagaattaccggaaggggccattgaacagcttgaaaaagtgccaagcccggttaatgaaagtcgaaaccgaatcagttcggtttcaggtgaatggctattctgagatccaactacataaatttaatttaattaattcaatttataccactttggatcaatgtgaaaattacctaaacgaagccattcatttttaacaataataactgattaatcaagatcggcaacaggttttacaacatgccttacagggagctttaggaactctttggagttgctggaacaacgagttacattta

SEQ ID NO: 24964 - DNA, 454 bp, Glycine max
actcgaatttcaattcccggcgcgacccactcttcacgccttccttcagatgcgataacactacacatcaattcctctacctcatgtaatatctgtttagtcaattaagactgaatatgaccctattttcttttatacatctgctatcgatcctccatacatgtacttccaaaactatgctcatatgtccatttataaacatacatttccaataagtcctataacacactgtatagaattgtccaattaaatcttcaaaaacaaaacatataaatactcgtttaccctgcatataaaaaataccacatttttacactcccataacatgtttcttctactacttatttattctcatacatcatgattatgatgattctgattattattatcaatattattatcattcattattcttattattattaccttttttcattaacattttaatttccac

SEQ ID NO: 24965 - DNA, 375 bp, Glycine max
tggacttacagggccatgggaaatgctccgatgcctaaaactgaaatgaatgcttacagagctgcaactgcaggcacccctcaacttgttcaagttcctacgagccaacatcagctgcagtatgtcacatactcacagacttaccattcttctcagtccatggctcccaattctgctgcccctgccaattatgcttttgattattcagatcctgctcatgctcaaatatactactcttaacctatggcacccacaatgccttcacagtaccagactatgatgatgcatgaaggctcaacttatcattccttatacagctttaatcaacatcatattataacctcacaaccattttaagccatttcttaataaaaa

SEQ ID NO: 24966 - DNA, 381 bp, Glycine max
ctctagaatagatagtcaatctagagtccttagagcgactcactgagacattaaattttattcctttaagcttaatgtttttacaagttaagtatttgggcatggagttgtttgcatgtaaaaagattaatatagtttgtatctcccaatgtatgagaattagtttatgttttatgtaccttggtgatcatgttttgtaaggcacataagtgtcaaaggctttgtataagttttgttcttatgacgtatgtgtaagttttagtttacatgcagttaattatggtattcttctattctaagttttcaaaatttagtaatataagcgtgcaaaaagtaaattctttgggctctaacattgttttgatagccaaatcaatagaa

SEQ ID NO: 24967 - DNA, 456 bp, Glycine max
aattcgagcggccgctttttttattgtatattaaatatatttattggatcgctataattacggatattgttataatatgagaaggataaaataaaagctgatataataaattagcactagaaaaatactaaatatatactaactttttctttcatatcattttttatctctatttttatttttcatcgtattatttgttacatttataatttttatcttctttatctagtttttctttttgttcatacgtcccaaaaatagaattgtgtatatcattactcttaatactttataaaactgtgaaggatttttttttcagacatacttttaataaaaataattcatttatttaaaatacatatgtacgaatctataattctacataatagctaaactcgtcttacatataataacttaaaattatgcaaattcataacttaatcttatatacctact

SEQ ID NO: 24968 - DNA, 246 bp, Glycine max
actcgctagaacacttcagatttgatattaaatagatatacttcactatcatggttactgataaatctttaatattcaaattatcttataatttcttttttaatttaaaaactctattcatatacatatatttttactaactttttcacttctattatttattatatttattttcatatatcattttattatatgtttcatatttaataattttcattcttaaataccttttatttatattttata

SEQ ID NO: 24969 - DNA, 350 bp, Glycine max
gaccttcacagaagcaattaatcatatggctctctggttctcactataaacacaaaacccttcccatcctaattaaggtgaaaatgaaggcatcacccattgcttggttcactttggtggttgtgtttcttgtggctgaagttcaagtttcaatggcagtgacatgcagcccagtgcagctgattgcatgtgtaagtgcaataacctcttcaacccctccatcaaacctatgctgctccaagatcaaagaacataaaccatgcctttgccaatacctcaagaaccccaatctcaagaagtttgttgactctcctaatgcaaggagagttgctagcacttgtggaactccc

SEQ ID NO: 24970 - DNA, 379 bp, Glycine max
tctgctggttgttcagcttcaacaagtgttaaaaggggtggagattcactgcggaaattcgatggtgctatcactttcacaaggtttgctgagaagcatcgccgactgtcaaatgctttcattaggcagaatccaggtttgttggagaaatcactttccatgatgctcaaggcaccaaggctgatagacttcgataacaagagagcctatttccgctcaagaataaggcaacaacatgaccaacacttgtctgggccattgcgtataagtgtaaggcgggcttacattttggaggactcttataatcagctaaggatgcgttctactcatgatctgaatgggcgattaaatgtgcaatttcaaagtgaaaagggtattg

SEQ ID NO: 24971 - DNA, 311 bp, Glycine max
cgtctgcgcctgatctctgagggctctcacacactggttcggtgctcctaatctcaaattctatgattaccgttcccaatttctccaccgatcacaacatgaattcaactggacctactaccaaaggctgaacgttcaagctcactgcctccagatccattccacgatcgcagctagctaatctgcaattccacctactaagacatggtcgattccttaatgctgaccaatacccctagcgtcttcgtgctgatactcctgtgcacctgtctgcacaactcgattatctcactccttatgttactgaattc

SEQ ID NO: 24972 - DNA, 235 bp, Glycine max
aagacatcatattagacatttctatttacctaatattcattgatctaactacaccctgacaagctctgttaccaaatctctgatgctgttctctacacttgcctaaacattacccatacagtaacttttcctgcgaaacatgcaccaaaaccaacttcgtcatgctcttctgataaatcaccaccaaagttcatgttcactacgacaatatatatcgtgacacctgcaataacat

SEQ ID NO: 24973 - DNA, 431 bp, Glycine max
gaaatcaatcaaaactcttattagaagtaggtattttacaattttgtaagactaattgcagtgcatgatgattgggatgaccaagtctatcatgccaaagagaggtgatcctattacatggatttacaatgggcttgtcaggcttattacatggattaacagagggtttttcagaactagaaatacaaggaaaactagaagaagcagaaactggatgttggagaagctgtagagaccatcaggaccaacattacctttaagttagacttcattggtaacctgcgattttacagcacaataattagagtgaaattcaaagaaaacacctttgtcccttgcaaattgattaacattaataagatttttagtaatgttaggaacatgtaagagatgtttaagagacaaagagattttggtattgaaaggagaaa

SEQ ID NO: 24974 - DNA, 263 bp, Glycine max
agaatgggcaagagagagaagaagaagttgttgggttgagtggggtttggattggatttctaatctaatctatacctttctttttcctatgcttttaaggcacaaattcttctaccttctctcttctttcttcttcttctcctgacccttattattattccttgcccttaccctttatgcaatggaaggaataaagaataactatattattatctttattgtaatctatctctttattataatattaattataattattgttg

SEQ ID NO: 24975 - DNA, 420 bp, Glycine max
gatgcacatcacatgccggagacctgaggctacctctctctttcacattccctcagcgcttaatttctgtattcaaaacttttggcattaattgttttccaataccctttgagactacaatattaaatttgtggtttttacatatatatatatatataatggatagggtgacacagatggcatcagagagaccagtggtgatattcagccggagttcctgctgcatgtgccacaccatcaaaaccctcttcagtgactttggagtgcatccaaatgttcatgaacttgatgagataccaagagggaatgacattgagcaagctctttcaaggctagggtgcagcccctctgtgcctgttgtgttcattggcggtgagcttgttggtggagccaatgaagtcatgagccttcaccttaacc

SEQ ID NO: 24976 - DNA, 368 bp, Glycine max
aggctcatgtaaaaagtttgctgcgccctgatttccgggtgctggcacaaaactggtgggttcgcaaaggtggtgcttataccggtgaggttagtgcttaaatgcttgttaatttgggaattccttgggttattattggtcactcttaacggatgcagcttttaaattaatcaaacgagtttgtgggatataaagttgcctatgcacttcaacaaggtctaaaagttattgcatgcattggggagactctcgaacagcgtgaagctagtacaacaacggctgttgattctgatcaaacaaaagcaattgcagctgaaatatcaaattgggacactgttgatttggtctactagccactttgtgccatt

SEQ ID NO: 24977 - DNA, 355 bp, Glycine max
aattcctggtcgaccactcgtacgatacgcctccgactgctgctagaagacttaaggggcaagagagagaataagaagttgttgggttgagggtagttttgattggatttctaatctaatctatacctttctttttcctatgcttttaaggcacaaatccttctatcttctctcttccttcttcatcttcttctgacccttattattattccttgcccttaccctttacgcaagggaaggaataaagaataactttattattatctttattgtaaatctattcttatattataattataattattattattgacgtttattattccctcaatattgattcttcgtgtcttttcaa

SEQ ID NO: 24978 - DNA, 423 bp, Glycine max
ggtctgcgcctgatttctgagttctctcacacactcattcggtgctccgaatctcacattctacggttagggttcccaatttctccaccgatcagaaaatgagttcaactggtggttctaccaatggcggaaggggcaagcccaaagcctccaaattcggttcaagatcgcagaaagctggtctccaattccccgttggaagaatcgctcgattccttaaagctgggaaatacgccgagcgtgttggtgctggtgctactgtgtacctctctgcagtgctcgaatatctcgctgctgaggttttggaattggctgagaatgctgctagggataacaagaagaatcgcattgttcctacgcacattcagcttgctgtgaggaacgatgaggaactgaacaagcttttggtgtctggtaccattg

SEQ ID NO: 24979 - DNA, 448 bp, Glycine max
gaaagacgtaacaatgggtggatgtaagggacctatcaccacatttattgtggaacccttcatgccgcaccaggaaaaatgctatttcaatattggcttaaaaagacttgggtgcgcaattaacttcttcgaagtgtggaggaatggaaatcgaagagaatggggataaggttaaaaccatatttatccccacacgagtgtccctcacttcagaaacatgcgccgagctggtggcaacccttcctttggagatcaaaggagaaatcgcggcgtttatcaaggcaggtgataccctattccaagatctggactttactttcttggaaatgaatccttttgcgcttgttgatgggaaaccctatcctttggatatgacgggtgaactagatgatactgctgctgtcaagaacttcaagaagtggggaagtattgaatttccaatgccatt

SEQ ID NO: 24980 - DNA, 77 bp, Glycine max
gaaagaggtaacaatgggtggatgtaagggacctatcaccacatttattgtggagcccttgggaccgtacaaggaag

SEQ ID NO: 24981 - DNA, 395 bp, Glycine max
  modified_base (345)..(345): a, c, g, t, unknown, or other
ttaaagatgaaattgtcccagttgccactaagattgtggacccaaaaactggtgaggagaaatctgtcaccatttctgttgatgatggaattcgacctggcacaacagtgtctgatctaggaaggctcaaacctgtgttcaagaaagacggaagcactactgctggtaattctagtcaggtgagtgatggtgctgcagctgttctgctgatgaaaagaagtgttgcgttgcaaaaggggctacccattcttggtgtattcaggactttcgcagcagttggtgttgatcctgccataatgggtgttggtcctgctgctgcaattcctgttgctgttaaggctgcangtctagagcttgatgatattgatctttttgaaataaatgaggcatttgct

SEQ ID NO: 24982 - DNA, 339 bp, Glycine max
agactcaattgcatcagcataagaagcataagctgtatagagacacatgaggacccaaaaactgggaattgaagatggattgcagtaacagggactcaatcacagagaatcacacttcatcatcattattatcatcatgttcttattcgtcttcttcatcttcttcgtgtgactcactcagcgaagccttgcttttcaccaccatgtgcatcgttggccactccgtcaatgttcacgttaaggatggctctgtctattcctgaatcttccacactgcttttgttcacgcctattacgggtcattgcctcttttttctctcgttgatttctttacacttt

SEQ ID NO: 24983 - DNA, 396 bp, Glycine max
ctgctttaagtttgaggctttctactttctatttgtagagtaggactaagctcatacactgatcatgggagtggatttaagacaagtggtggcggatgtactcaccctgacaaagttcgtcatgcttatacacatgatcaaaagagaccattttgatgctgttgatgataaacttgctggaacggaggatgtcagctttgaaagtacaaactttgatactactcatggtagaaagaacatccggatttggaagggagatggtgatgagttaaaaccatgttggcttaagccatctgaagataacgtggatcagactgaagcgtatgctaccttttctttaaccaatgggcctgagtaccatatatttgagatagcagatgcaatggttgttgctcg

SEQ ID NO: 24984 - DNA, 392 bp, Glycine max
ggcatccgaatgtttcggtcctcgtatcctcctcatccttttatgcgtgtcttcccccaacgaaaccagcgagaccaaacgtggtaacgctttgaatctttgaattcattcaaagatcccccttctgtctccctctctacgcatatcagggcactatggctgccacggtgaaacaaatgtctttgatcgtgtcactgttcggcgtggtgtccttcattttgggtgttgttgctgaaaacaagaagcctgcggcaggaacacccgtgcctggtttggatggtgtctctgtcacctgcaagtacccagctgatccaactgttgcattggggtatccttctacagcatttcttgttgcatccactgtgactggatatctgcctttgtttaccctt

SEQ ID NO: 24985 - DNA, 357 bp, Glycine max
ttaaagatgaaattgccccaggggcgcactaagattgtggacgctaaaactggtgaggagaaatctgtcaccatttctgttgatgatggaattcgacctggcacaacagtgtctgatctaggaaggctcaaacctgtgttcaagaaagacggaagcactactgctggtaattctagtcaggtgagtgatggagctgcagctgttctgctgatgaaaagaagtgttgcgttgcaaaaggggctacccattcttggtgtattcaggactttcgcaacagttggtgttgatcctgccataatgggtgtaggtcctgctgctgcaattcctggtgctgttaatgctgcatgtctagagctt

SEQ ID NO: 24986 - DNA, 337 bp, Glycine max
caggaaccgatacgtgctttggaggatgatggcttgtgcttcacagacgctgattgctgcggattcatgctcgtttccgagccatagagccatgagaaagtcgcagagactcttcagtcaaaatacttccaatctagttttaacggtcagagcttcgtctgaagattccgactgcaatgtcgacgaatgtgccccagataaagaggtcgggaaaataagtatggaatggctagctggggagaaaactaaagtggttgggacatacccaccgcggagaaaaggatggacttgctatgtagaaaaggacactgctgggacaacaacatatattcattga

SEQ ID NO: 24987 - DNA, 52 bp, Glycine max
gagacctcaggtcaggcggggctacccgctgagtttaagcatatcaataagc

SEQ ID NO: 24988 - DNA, 449 bp, Glycine max
aactgaacagccttttgggtctgccgaaaacccattcttgttttttaaatccgacttaatagagttaagagagttcataaaaaaaaaaaaaacaacaattaaaaaaatggagaacgaagtattttcgaatatttttacgtttaagaaaaaaggtttttagaaaaattaatattgcaaaagaaaaatgggtcatcaaacccattttatttataaaaaaaagaataagagaattctggcaaagaaacccaattctattattgcaattgaaagaaatatacaagttgactgaagctaaaaaagaaaacaattcaataataagtaatggaatgatccaaagctcgtctgggtctatagattcgataattttgtcattgagagaacgaaagatgaaagagttgactgatagaataaacaccatgctaaaaataattgaaaaaatgaaaaaagac

SEQ ID NO: 24989 - DNA, 292 bp, Glycine max
gggatttcgagttcaaaagagaagtggaaagttgaaattgattcaagagataagaagtcaaaaaagcctaagtaatctatcatttgtagcagaagtctttgagatacgcccactgcttcatgtagttgaactgaaaaaatcttttggagactcatcagcttacagacaggtacaagataggacaaggctagttcaatgtctgtctattttaagtgcttaaaactacgtcttttactctaaaaaaaatacattttcatcacttggaacatcattcccatcctttgcaagtact

SEQ ID NO: 24990 - DNA, 415 bp, Glycine max
acgacagaaggggattcataagtaagataaaaacctgggtctctgtcaaacacaccaatttctctctctctctctctctctttttcctttctggggttttaaggttgtttgcttttgtatctcaatctccaggttcagtttgatcttatgtcaatgaaggatttttagacaaaacccagattcacaggaaaaacccttaaagcggagaataaaaggcaacgacttttcatctctacgcaagtgattatggcggttgttgagaatgttggggccaaaatcggttcttcgagccagagtttggagaacggtgtagtgtcagcggattcgggtgaagttgagaaatcgaaaaccagaggcgatcaggatatgaacaacggcgttttcaaccatcaacagcaccaagagacagtttccg

SEQ ID NO: 24991 - DNA, 400 bp, Glycine max
gagccattagtctttcaattttattctccttcatttccaattggggccttacagggaagattgacaatggatgttggtaggatgtggaagcagtggagattattgacgtactcactgtgaagccttaggttttattatccttacgttatctttgttttcttaattgttgtttctaacaggaaccataaagagagagtaatagggagccaagggaatttgtatattactttgtttcttctacaggaggaatatgggtagcgttaatttcttcatagatgaacaccaagtttcctggaactgacctacccaattatatcagcaagaattgaggaacatttgatatatcatctcacatgagtttgttttcttgtttcttagatgaaggttgctggtttgtctt

SEQ ID NO: 24992 - DNA, 411 bp, Glycine max
  modified_base (377)..(377): a, c, g, t, unknown, or other
agggttatagatcaagaggtgaggatttataattcagcttattcaaagatttaataatgatatgatactttacaaaaaaaacattcttctaacttaagtacctataaatggttctactagtaaaaaccatcggagtacaaacgatctcaactaagggtgagttgaaatctaataattaatatattgacaatatcatttttgttagcatatgatatagcttgtagtgtatccgtactattaatgtatgtagtaagttgacatttaatgattaatatgttgacaactagaggtgattatttataatatcattgattcttctattaatccaattcacaaactcatagcttttatgtttatccttttatatgacagaagtncaatctagtgtttatagcccaatctagtcaaatg

SEQ ID NO: 24993 - DNA, 376 bp, Glycine max
aacgcttataactcttggagttacattccgtactctacaggttcactcaatgatcttagccaatctaattaaattagatcatatatcagtttactttattgactcgcttcactttaaacccaaacataattagttacaactagatcaatgttaactaatttgcttactaaatcaacatctatttatctttaaacatttaaattcatatattttagacttagaatctaaacatttcctctattggatcttttgatcatttattttgacttttattcactgcctttagtgatattcacttgaaattaaaccaatcttaattggattaattcgatttaaaattaattattaatgatataaaaatcaaagcaaacctatt

SEQ ID NO: 24994 - DNA, 411 bp, Glycine max
ggcagcgcttgatttgaggccaggcatgcggcactcaaccaccacacggtgtgctcgttcacgctacccctttctgctcttcttctaccttgcaagttttaaaagtataaagatggcagagacattcctatttacctcagagtcggtgaacgagggacaccctgacaagctctgcgaccaaatctccgatgctgtcctcgacgcttgcctcgatcaggacccagacagcaaagttgcctgcgaaacatgcaccaaaaccaacttggtcatggtcttcccagaaatcacgaccaatgccaacgatgactacgagaagatagtgcgtgacacctgcatgaacatcggattcgtctcaaatgatgtgggactggatgcctacaactgcaaggtcctcgtcaacattgatcagca

SEQ ID NO: 24995 - DNA, 449 bp, Glycine max
cattatcaaatccaatggaagtgataaagggctagcatacatgtgttcaaaagaagaaaatggtagcagattattgggcattgctgatacaccaccacaaaaattcgacccaacaaacatttaccaagaattcgagatcagtaacgatatgtattatggcaaacccaacggttttaatttcaagtctgtggcttccaatggagtaactccatatgccatgacacacaagaattggagagcttattgcaagactctcaagactttccaacccaccaaagaagcgcttggtctcgacgtcacgcttcgagctcgtctccctccgctcacattctccctgccatgtaatttctccagccctattgttgtaaggaaatggtactgccctttcattttcgttcgagaaggcgatgtggattctcaaatcaagaactctccatattacgaaatga

SEQ ID NO: 24996 - DNA, 401 bp, Glycine max
ggcgtagtatataatcacagtagccgcgagctcgtgaaacacactctgttgttttccaaaaccctaatttatcgaaaggtagggttttgcagagcctcctcctccgttaccagtttcttcttctttatcctctctcctttcttcttccattcctctaacctaagatgggcaagtcaagcaagaaatcagctatcaaggttgacgctgctccagctgtggttccgccatccaagtctgccaagaagggaggcaagcgacaagctcaagatgaaattgagaagcaagtgagtgccaaaaaacagaagatagaggagtgtgctcagaagcataagaaggaggccaaggtgcaatagaaggaggccaaggtgcataagatgaaggaatgtagttcagatgattct

SEQ ID NO: 24997 - DNA, 289 bp, Glycine max
gtttatctttacttgtgaacggaaggacatatcagtaattctataccacccacttctcaatgatcatcttcttcagattcaattccgatgccctttttggaatcttcaagattccggcaagtaatgggactaatgattacctcattcaacgcaatttcacttctctttttttcacctcgtacgccacgcttccttcttacctttcgacaccaatacttaactgttatttatacttcatgctcgacgcatcacgaatctaacgaattcgaaaaattcgccaaagtgacaa

SEQ ID NO: 24998 - DNA, 409 bp, Glycine max
gcagaagtgattgaggaaatgggtgatagtttaggggagcctcctgaggttcaggaattgctagatgaaatgggccatcctagtataccactaagtgttatatcaaaagctgcagagctccagtttcagtatactgttgataaagtatttctgggtaataggtggttgcggaaagcaacaggcattcaaccaatatttccatatatggttgactcatttgagagaagaagtgaagcttctctactgagagctacagagtcaagcagctcccttgagaactctaaagtggaagatgataggaaaaatgctgaatgcatagactcttctaagtgcagtttggatggtaataccgaagcaatcaaacaatctagtccaagactaagtctaccatttggtaattggtttcatc

SEQ ID NO: 24999 - DNA, 383 bp, Glycine max
ggagattgaatttgtaaattcaccttagaaccctaatcccctttttctcaatagactaaatcattccatcattcggtgcaagagggactgacaatagaggcacgcggcaccagattatttccaaattgaagcgtccaagagtccaaattcctcatgttagaatctcttttgtgctcttcaaacgccagtttctctttaattttctcaaattctggtgtttctttaattctctgtttcttttttctaaatgggcattcgagttttccttctggtgcagatttttttttcttttttgtgttttttcttgatggcttgggtagattcagggattttcctttcttttggttgttgcccatcaccctttttgcatgttcttcacatgt

SEQ ID NO: 25000 - DNA, 414 bp, Glycine max
gaaggcagagaagagaaggagagaggcttgcacctggagagaaaagaggagacaataatacatggggaagctgggtctaaacacggtggagcaacaatctgtggcaccgacagcatccaagtttccgttgagcttttgggaagccacagtggctataacggtggcgctggtttctgcggaggatcttctcggctgtgtacctcaccatgcccgattccgattacagattccttaaactccctcgtaccctcgaagaccttcaactcctacgagatgaccttgagagctatacaagtgactacactgcacaagtcttggtggggtactgcgtggtttatattttcatgcagactgtcatgattccagggactgtgttcatgtcattgcttgctggagcactctttggagtcttta

SEQ ID NO: 25001 - DNA, 394 bp, Glycine max
tattggatcatcttgtatttcattcctcctttacaatttcctttcaaaaaaaattttaaaaaatattaaaaagtgctcttttttgtgaattttgacccatttggccaccgacagatttcgatcttctccgtgccaaagttgtaatcttttcgacttttggcgaggtgggtcgatccgatttcgctcgaatgattgttggtttgatctgaaaaaggaaaaggaaaaaaaaattgggttatttcggattcaagattttgtccttttttgaaatggtctatttccatagctcaatctctctctgcaagtccgttgatcaatcatcttccatggcgaattcaatatgttctgctgatttcggttcgaaatcgaggcaaatcaatcaccttcagaagaa

SEQ ID NO: 25002 - DNA, 411 bp, Glycine max
gaatcacattaagtagcgccattctgttgctactattgttcccacaaaaccaaaagccatcttcttcttccatgtcgagggcgcgaagctttgttctgtggcttcacggcctgggtgactctggtcccgccaacgaacccatcaaaaccttattcacttcttcccaattcagagacaccaaatggtccttcccttctgccccttccgcccctgtcacttgcaactatggttctgtaatgccttcatggtttgacattcttgagattcccgtggcagttgattctccaaatgacgagagtagtttacttaaagctgttcgaaatgtgcatgctactatagacaaggaaatagctgctggcataaaccctaacaacatatttatctgtggattcagtcaaggaggtgccttga

SEQ ID NO: 25003 - DNA, 308 bp, Glycine max
atgagacaaccgaaaggaggggaatcacattgaatattcacattataaccgctagtattctttttatgaagggactaaacaatttcatcattcatgacaagagcgacttactatttaatctcgcttcactcacttatttacaattttaagcgttccaaagtcctaattccttatgtcaaaatctcctatgtgctcttcaaacgctcattctctcttaattcatcttaaattcctgcgtatctccaattctatgtctctcttttctaaatgggcattcaaagttttacattttgttcacaattatatta

SEQ ID NO: 25004 - DNA, 399 bp, Glycine max
  modified_base (376)..(376): a, c, g, t, unknown, or other
ggcaccgcttgagcagacttaacaacagcacaaagcgggttactgtctgttcaagctaccatctctctctctctttcttagtgcctccttgccagaagttaaaatggcccaagaaactttcctattcacatctgaatcagtgaacgaggggcaccctgacaagctctgtgaccagatctccgatgctgtgctcgatgcatgcttggagcaggaccctgacagcaaggttgcctgtgaaacctgcaccaagaccaacatggtgatggttttcggagagatcacaaccaaggccaacgtggactatgagaagattgtgcgtgacacatgcaggaacattggttttgtctctgatgatgttggtcttgatgctgacaanctgcaggtcctcgtcaacattga

SEQ ID NO: 25005 - DNA, 394 bp, Glycine max
gggagaagaagtagaaaaaggaagaaatatagtgataatttgattcttcgtcgtcgtactaaatagtagagaaaatagaaattgtttcttcgtctttacaagaaaaaggagtaattaactgtgacacgttcactaaaaaaaaatccttttgtagcgaatcatttattaagaaaaataaataaacttaacacaaaagcggaaaaagatataataataacttggtccagagcatctaccattatacctacaatgattggccataccattgctatccacaacggaaaagagcatttacctatttatataacagatcgtatggtaggccataaattaagagaattttcacctactctaaatttccgaggacatgcgaaaaatgataatagatctcgtc

SEQ ID NO: 25006 - DNA, 324 bp, Glycine max
  modified_base (2)..(2): a, c, g, t, unknown, or other
  modified_base (232)..(232): a, c, g, t, unknown, or other
gngatggcgattgacagaggctatatttctcctcagtttgtcacaaaccctgaaaagttaattgctgaattggagaatgcacgcgtgttgattacagatcagaaaatttcagctataaaggatataatccctatattggaaaaaaccacacaattgagagctcctttgcttatcattgcagaggatgttactggtgaggctttggctactcttgtcgtaaacaagttgcggngtattctaaatgttgctgccattaaagctccaagctttggggaaaggaggaaggccatgctacaagacattgccattttgacaggtgctgag

SEQ ID NO: 25007 - DNA, 364 bp, Glycine max
ataaaatagtggtgtcaactttacacactaaactcatcacccgaatctcttcaacaatgtccaattccttccctctctaccaaaaattggccatcaaaaaacccatacaaagatctgttgaacttctcattttgattctcgccatttcccttcttctttaccgtctcctttacctccaatcccatgccctcctttcgcttctcgccttcttctccgaactctgtttcaccttcgactggtttctctaccttcttttaaattggaatcccgtcgactacaaaacataccctcaacacttcaaacaagttcatgaggttcctgcggtggacgtgttggtgacgactgcggattggaagcttgagcc

SEQ ID NO: 25008 - DNA, 278 bp, Glycine max
gggataatttatagaaaaaggaagaaatatagcggtaatgcgattctacggggacgtactaaatagcatagaaaatagaaattgtttcttccacattacaagaataacgagtaatttactgttacacgaacactaaataaaaatccttttgttgcaaaacattcattaagaataatacataaacgtaacacatattcggactaagatataaccataacttggtccaaaacttctaccattatacctacacataatcgcccataccatgtctatccaca

SEQ ID NO: 25009 - DNA, 370 bp, Glycine max
atatttggtggagtgggccactcaggaatgacctttattctcttagggtccgtgggaaccccttgatcactatttacaaaattaaggaaagtaatgcaataaagtatacctttttctatattttaatgttgattactcctaccaaaaagtatgacaaacctaaagtgtcctatatgagcaactaggttagtattaaaacccaaaataagaacaaacctacctaatgagtccctatgtatgtgaatcatgaagatgatggatgcatgggtgattttacaaaagagggttgaacctctcaacacattcatcataccacttatcatagggatttggtgccttacaatacctattttgggcacctataaacaac

SEQ ID NO: 25010 - DNA, 392 bp, Glycine max
ctgtcacaatatgtgaagccacttactgacttccttgaaaaacttccggaaggcaaaaaggttatcttggttgggcatgattttggaggggcatgtatatcatatgcaatggagatgtttcctcttaagatttccaaggctgtctttgttgctgcagcaatgttgactagtggtcaaagtactcttgatattatttctcaacaggcaggttcaaatgatcttatgcaacaagctcagacttttatatatgctaatgggaatgatcaccctcccacttcttttgatatggacaagtcattattgagggatttgttattcaaccaaagtcccaccaaagatattgcactagcatctgtctcaatgaggtctgtaccatttgcaccagttttaga

SEQ ID NO: 25011 - DNA, 391 bp, Glycine max
ttaagggtcatgcccaactcttacaccaagaccccaactcaacccgaatttccgtatccccttttctcccaaaccatctaaaaacaagagcgtctctttggcactgagctccaggtcgaatgaagggtcatcaaggggttatggcttttacaacgagcttgagtttgaggacagaaaggacaagacttttgggttggagatgaaccctgttgttggtgaagattcccagagtgaaactgggtcaatcccctttgatggggtggagggtggtgatgataagggagaggatgatttggttcgggctcagggggatgcagatggggatggggatggtttgaagaaaggttatgatgatgaagaacgtgagaatgagaaatttggaggtaaactt

SEQ ID NO: 25012 - DNA, 363 bp, Glycine max
agtcctgccgtcagacctcctgacagggggccattagacgacagactggatatttggcggagcgggccactgacgaggtgaccctgattcccctatggttcgtgggaaccgcctgatcactatttacaaaaatgacggaagtaacgcacctatgcatacctgtatctatgttctaagggcgactacgcctaccataaagcctgactaacctaacggggcctatatcatcatctaagccagtctttgaaccaaaagttagatctgacacacctaatgagtccctctgtatgagaattatgaagatgatcgctgcctgggtcattttacactataaggttgaacctcttaacacattcatgatac

SEQ ID NO: 25013 - DNA, 170 bp, Glycine max
ggagaggactttatggtcaagcccctttctgactcgcgggcgaaacctcaagcggggcaaacgggtctcctggtctagcaatccatctaatagccctacctgatatttgccactgagctctatctctcaatgaaaggtcataagcgggttatggctttcacaacaagctg

SEQ ID NO: 25014 - DNA, 408 bp, Glycine max
caatcctgcagttctcgtttctccctccgagcatcatcactcatgggaaagagcattctggggactggtggagctggatacatcggcagccacaccgttcttcaacttcttctcggagggtacaacgccgttatcgtcgataacttggataactcctctgagatcgctattcgcacagtcagagatctcgctggagatttagggaagaatctcacatttcacaagcttgatttgagggataaaccggctcttgagaaggtttttgcttcgacgaaattcgatgctgtcatccactttgctggacttaaagcagttggcgagagtgtccaaacaccactgctctactacgacaacaacttaattgggacaattgttctgtttgaagacatggcttcccatggatgcaaa

SEQ ID NO: 25015 - DNA, 403 bp, Glycine max
gacccagagaggaggaagctttgagagagagagagggaggagggagagtgttgacgctccatcaagatgggtatttctagggattccatgcacaataggcgtgccactggtggcaagaagaaggcatggagaaagaagagaaagtatgagcttgggcgtcaggccgcaaacaccaagttatcaagcaacaaaactatccggaggattcgtgttcgaggtggcaatgttaaatggagggcattgaagttggataccggcaattactcatggggtagtgaagcagttactcgcaagactcgtattctagatgttgtttacaatgcctcaaacaatgagcttgtgcgaactcagaccctggtcaagaatgctattgttcaagttgatgctgctcctttcaagcaat

SEQ ID NO: 25016 - DNA, 427 bp, Glycine max
caggagcttcaccgccatagcgataccttccagaatctctcctccttctctcttaagaaagcgggccaacattaccattttccgctactttgtagagacgaagcgcatatcctcgggtttctcgtatctcaaaaggttatcatctacccctgtagatggagatgcttactacaaattctggtgcgatgctacctcttctacccccagtgggtcagcattggggaagaatgaaggccaacaacttacctcttagatggtatagttcgcagcatcaaactcctaatagtaggagactatcaatggttgctaaagcaagaccagtatttctcaaaccaattccatctactcggacgaagggaggcgttctatgttcaagtagaaagaacaatgctttcatttgttttgctgctttgaatgctcgatgtgc

SEQ ID NO: 25017 - DNA, 448 bp, Glycine max
agaagaagagggagagagggagagagggagagagggagagggagaggagtcgaatttctgagggttcatagaacactgaggagagaaagagagaaatactctgaaagaagtttgtaattgaagataaaatttgagtcttttatctttaattctttacccttctgacttcatccgatccgtttccatggatcccttcgatttgtttcgtaaaggttttggttgaggctacaaaagcacgagcttttttctacgagaattttctttttcctttcaaatacatgtgagcattctattttgtgttagctataatgaatgtatccaagaagggaacgcaaaccagcgaggtaaaactaaacattggaagcaaggtgactgctttgaataccaatgctgctgagtttattccctttgccctcagagcatctccagttggaagtagtagtgcacc

SEQ ID NO: 25018 - DNA, 373 bp, Glycine max
  modified_base (50)..(50): a, c, g, t, unknown, or other
  modified_base (131)..(131): a, c, g, t, unknown, or other
ccgaaccgaaattcccggatcggcccgcgcgtaacacacaaacttcaccnccataacaataccttccttaatctctcctacttatctcttaataaagcgttccattattaccattttccgctactttgtanaaaccaaacacatatcctcgggtttatcgtatctcaaaaggttatcatctacccctgtagatagagatgcttactacaaattctggtgcgatgctacctcttctacccccaatgggtcagcattgttgaagaatgaacgccaacaacttacctcttagatggtatagttcgcatcatcaaactcctaatactacgagactatcaatggttgctaaaacaggaccagtatttctcaaaccaat

SEQ ID NO: 25019 - DNA, 389 bp, Glycine max
ggcttctaacgtgagatctcagattgcaattgcctcttctcttctcccagaatcggtcactaatccgatatcatgaagctcgatacgactagtctcgaatcgtttcccacactgattgcacctcaaaacgacgtcgccggagaactctccgccgctccgttctttgaccttccgaattccaatgacttcgatgggttcttgaaagacgctattcagatggtgaagcccgcgaagggtactacaactcttgcttttatatttaaagagggtgttatggtagctgctgattctcgagctagcatgggaggatatatatcgtcgcagtctgtgaagaaaattatcgaaatcaatccgtatatgcttgggacaatggctggtggtgctgctga

SEQ ID NO: 25020 - DNA, 391 bp, Glycine max
ggccgcaaagtgactgacataaccttttaaaggttcaaagaacctccctcgccgccgccgcggaactctagcctcagctctctcgccgccgttcgccggagtatcaccccaacgccgtcgtcgctgagaaatcatccaccaaaaggcctaacgctatgaagacgccgcaatctgcctctaaattgaaaaggtaatacaaattgctttgtttgttctaattggagttagtgcgtgttttgctagcttattttgaagaaataatagctttttgagtgaatgttttaaggacaagcaattattcctagaaataatctgttacgatactgcacttattagggtgattattaatagggtcaccttgggaaagctctcttgtttgatattaatgatg

SEQ ID NO: 25021 - DNA, 329 bp, Glycine max
caaatgggaaggcttagattgattattactggcggtctatctacaaggccaagcttacttacccgttcatacgtagcattatcggtgatacattgtcatctaaagctagtatactgagcacgtcgatatgcatcatccggactagtaaaaccctggactgacgaacacaaatcgccatgctgaacacatacctttttgcaaatggcgcaatcccaaacagggctagagcaaccgacattgcaaacatttacgcattctatatggctaatgaaacgcggcttgatactgatcattaagctcagctgatgtcacaactacccgcagtcaga

SEQ ID NO: 25022 - DNA, 412 bp, Glycine max
ggtatcctaagagtgcatctattagcttagttgggtattccgattcaaattatgcaggttgtaaagttcataggaagagttctagtggtacttgtcatttgcttgggagtgctttggtttcttggcactcttagaaacaaccaaccaaccaactagctggcatcatttcattagagatcaagtgcttaaaggagatcgtgtattagagtttctagatataaccaaccaactagctgacatctttacaaaacccttgcatagggatagattctacaccattagaaatgaagtagacattttagatgaagattatctagtataacatgcacatgcatttgtgttgtcataccctaatttcgtccggagattattacttgatgacatgcaacctttggttagccgctttgagata

SEQ ID NO: 25023 - DNA, 383 bp, Glycine max
ggatagcactaagttaaacattacacacaaacttcgtcgtgttactgttagctaacactttctgcaataatggcacgtactagcatccaaacaagctcttcatcacgggcaaaaaaatttgatgtgttttcatcgttgtcttctcaaaggactatgcatcatccacatggtgcatgaaagagctgacaaagatcgttgattgggttcaagaaacaggtccaagtgtgctccctgttttctatgatgtcactccttcggaggttcgaaaacagagtggacagtttggagaggcttttactgaacacgaagaaaggtacacaaatggagggaagctctgaaagcaatcaccaatcgttgtgggtgagatgtactgaataagcctc

SEQ ID NO: 25024 - DNA, 410 bp, Glycine max
gatagcatcataggccattcaaaccttcagacatagaatggaagaatccaagggttttgttggtggtgagtctcaaaaaccacatccagaaatgccctctatttcttttcaaattcctatgccagggaggaatcgatctggtggtctctacccttggggatggatgcaaagagcaataataccacagcacaccgtgcgaaactctaacggggcaagtgagaacacaaatttgaaggtgtaagtcactcatggagtaataatactatgtatgaaaatgtgaaacgtttgaacagttgttgcggatattatgttgtcttcttcattatcgtatattatcgtgcatgggtgtacgtagctcattacctgctttgaggataaaagctctactaagcttgaatatgaatatcttc

SEQ ID NO: 25025 - DNA, 451 bp, Glycine max
aacttgcacactgttctggatgtcgcatcgattggcttcaaagagacggaattcttcttcgtggagctagatagattgcttagacctggtggttatttcgcttattcatctcctgaagcttatgcacaggatgaggaggatctgagaatttggagagaaatgagtgaccttgtgggtcgtatgtgttggcgaattgctgccaagagaaaccagactgttatttggcaaaaacccctaacaaatgattgttatctgcaaagagaacctggtacccgccctccactttgccgatctgatgatgatcccgatgctgtttggggtgtgcagatggaagcttgtatctctccttactctgaccgtgatcataaagccaaaggcagtggattagctccttggccagctcggttgacttcacctcctccacgacttcaagattttggctattcaaatg

SEQ ID NO: 25026 - DNA, 391 bp, Glycine max
  modified_base (354)..(354): a, c, g, t, unknown, or other
ggagaaggtcaatttcgaagcctctcgaatccaaactcaacagaacattcatttccctataaattcgacgtcgtttcgttccgctctcactccaagaaaacgttttgcagaagattccaatcggagctcagaaaaaaaagaaacctaatcgccgatcgcgtcgaaagtaacgtagctgtggttccttttttttttataatttttttgccgtttgaagatagtcgtttcggttactgctgcgttttgtgttttctggtgttttaattctgtgcaattttttaattctacatgtttgattgtttatttttggttgtgtgatttgtttgttttctatgacttctgtgttctggagtngaaaatgtgtctaacgagtttagaaagccgtgctttt

SEQ ID NO: 25027 - DNA, 347 bp, Glycine max
cggacgcgtgggtgctccgaaacccttttcgattaattcgcggcaggaacgtacgaactttgactatttcgtggaatcatgggcaggtctccaccgccgttttcagatattggcaaaaaggccagagacctcttaaccaaagactacaactttgatcacaagtttaccctgttgctgccgaactccgatggaatgggactaactgcaaccggtttgaagcgggatcaaatttttattggtgatatcaagaccctgtacaagagtgggaagacaaccggcgatgtgaaaattgatacggattcaaacgtttctacaaaaatgaccgtgactgatattttaccaactac

SEQ ID NO: 25028 - DNA, 442 bp, Glycine max
cctatcgtaaatcaactgcaggagttgctgaagagctgtatacatggaggacaagaccagcggatgatatgaggaggtaggtagcagatagtatactattaacctgcacaaacgcctccatggctgcacgtgtaataagaaggctctcaatgccattaatgagatcacgaagtttgctgagaacgccatgagcacaaatgatgcgagagttgatgtgaaactgaacaagcatatatggagcatgggaatcatgagtgtgcccagaagaatcaaagtacgcattgctggcctgagagacgctgatgaagatgccaaggaagagttgtactctgtcgtgacagttgcagaaatcccagcttaaggactgaacggacttgggactaaagtcattgtggaagaggatagatttgtcatctgttctcgagaagaggtggtacgatga

SEQ ID NO: 25029 - DNA, 178 bp, Glycine max
aggactttcaatccgtttgatcagcagcaaaagatcattcaatctccattcctctgcgagagagagacgaagaagaaggaatcaattccaatatgtctcgtagcatttcatacataactggcactcaacttctctccttcaaacgcccgccaaatgttggcatcatcgacgttaggga

SEQ ID NO: 25030 - DNA, 417 bp, Glycine max
ggcaccgcttgggcagacttaacatcagcacagagcgggttactgtctgttcaagctaccatctgtctctctctttcttagtgcctccttgccagatgttaaaacggcccaagaaactttcctattcacatctgaatcagtgaacgaggggcaccctgacaagctctgtgaccagatctccgatgctgagctcgacgcatgcttggagcaggaccctgacagcaaggttgcctgtgaaacctgtaccaagaccaacatggtgatggttttctgagagatcacaaccgaagccgacgtggactatgagaagattgtgcgcgacacatgcaagaacattggctatgactctgatgatgatggtcatgatgctgacaactgcgaggtcactggcaacattgagcatcagagacctgatat

SEQ ID NO: 25031 - DNA, 416 bp, Glycine max
gggtggagagaggggcactgactcacacccacaatagtcgggggcagcttcaaagtacctccacattgtctcctactcttactgttctcttctcttctcatcatttttattttttccaatcaaaccaaacaaaacataagcaccgctcttttctctccgaaatccccatctcccttcacttctgagctctggacgagatcccagatctcaccatctttcacgcactcttccatcagattcaccctttcgtttaacgcaaactcataacttgaaggttaatggctgctccaccggcaagggctcgtgccgattacgattatctcataaagcttctcttgatcggtgacagcggtgttgggaaaagttgcctccttctgcgtttctccgatggttctttcaccactagtttcatcaca

SEQ ID NO: 25032 - DNA, 410 bp, Glycine max
gctacaaccgatgtggttgaggcatgcactggggtcaatattgcagtgatggttggtggattccctagaaaagaaggtatggagaggaaggatgtgatgactaagaacgtctccatttacaagtcccaggcttctgcccttgaaaagcatgctgctgccaactgcaaggttcttgttgttgctaacccagcaaacaccaatgcattgatcttgaaagaatttgctccatctattcccgagaaaaacatttcttgtttgactagattggaccacaatagggcactgggccaaatttctgagagactgaacattcaggtttctgatgtaaagaatgtcattatctggggcaatcactcatcaacccaatatcctgatgttaaccatgcaactgttggggagaagcccgtccg

SEQ ID NO: 25033 - DNA, 217 bp, Glycine max
gcttcaacctatgtggttgaggcatgcacggggggcaatattgcagggatggatggtcgattccctacaaaagaacgtatggacaggaacgctgtgatgacttacaacgtctacatttacaaggcctaatctcatgcccttgaaaagcatactgcttgcaactgaaaaggccctgctgtttctaacctaacaaacaccaatgcatttatcttgaaag

SEQ ID NO: 25034 - DNA, 215 bp, Glycine max
actacaaccgatgcgtatgacgcacacagggtggtatatatagctgggagggtcaccagattgatgagaaaagatagtgtggaacgggaggatgtgattactaataacttcaatatatacacgctacaggctaatgccagtgttttctttttgaaatcaacttatgagttcacttccatgctttctgctaaatcaccaatgtgtccatcttttaa

SEQ ID NO: 25035 - DNA, 447 bp, Glycine max
aatggttcctttttgtttgagcttttttgaagtgggttttagtcaaaatccttttttgttttgctccttttcgaattcatgatgcagcagagatggaatcgaagaaaaacccatttacatttactaggtttactctttgttttcttcatagttttgacaatcctccatagcgagcatagcattcaacaaatccatgaaaacccagatcctgaagctcaccgacaagatgcttcgctttcatttgtgaaacctaatgttttaatcagtcgaaatggagctcctgaaattttggatagattcagtaagtgtaatggaacgagagagtatagtggccggaaaatctcgtggtctggccggaaaacggaatcaagtcgtcggaaagttaagtcggagaagtgtgatgtgttttcaggaaaatgggtttttgataacacttcgtatccactt

SEQ ID NO: 25036 - DNA, 372 bp, Glycine max
  modified_base (17)..(17): a, c, g, t, unknown, or other
agctgatcagggctcangtggtggttttagaactctgattcaattgcttcctgtgctgttaagtgttgcttttgaacttctgtgcatcctcagaacctatatatgctctttcccgttcctacccttatgaattccagtttaccactcaaaagggtgtcaatttttttgtgaaatcaacaaattttgaggaaaagtatccacctggtagcccggatcgtatagcaattgatcgtcacatagagagggattattttaacattcttgctcagaattgtcgtgttgagatgcaacgtcagcaatggggatttataagagaaactccatattgtgatatgttacagaagtttcagacagctgcttcgtgaatgaact

SEQ ID NO: 25037 - DNA, 346 bp, Glycine max
ccacacgtaacatgacgcataaacagacgcttaattatacacatacactcccatacaccttgtctaatataataatatcgcccccacacacaaaacctaattaatctctttaccattcattcattcattcatttatccataataatcctcttcctatcactaccaaccaaactaaaccatattttcttaactatggttctctttttattcttaacaaactaaaacatcccactattttgtgttacatatatttactttttttttttcaacaatcatcaattactaactaatttctatccaaataattcttacacgtaacatttttttaatttaaaccacctaaaac

SEQ ID NO: 25038 - DNA, 285 bp, Glycine max
tattgtttattaattattttattttttaattaaaatataattaataacgcaatattttattttttaaaaaaatatatgaataattaaaaaaaattatattaacatcggtttttcaagcaaccgatgttaatgcatacacgttaacattggttttcaaaaaccaatgttaacgtgtatgctttaacatcgatttctttggacaatagatgttaacatattatacgttaacatcgtgattttaaaaatcgatgttaactaatgatgttaacagtaaggttttgaaaa

SEQ ID NO: 25039 - DNA, 395 bp, Glycine max
ggtgtcttgtgtggcatgtgaataagcttacgttgtacatatcaatgccctttcagtatgggtatatctatctgtttgtactttttagcatacccccagtttttatgggttatcatgattggggaaacctaaatatggaatttgctttccttaatcatggtgtctgactaggtctgtctttttaaaagtgaattgaattttcttgatcccgtgaaatccctgaggattttatgaaagcattcgcctccaacagagacatccatttatggtattgaattttgtgttgtaattgactacttatgtctgtcacttggaagccgaggggttgtttgcctaggctgcatcgaacatgagcttgcagataagcattttctccccgcttcctacttaattac

SEQ ID NO: 25040 - DNA, 394 bp, Glycine max
ggacgcacttagcaatcggtcaacacttccaattacaatatacacatcttcaattaagccatgactctctctaagcttatagttgcttcccttcttgcctcgcttctccttcttcatcttgttgatgctgatcaatcggcacatgtacaaacgcaggggtctcttctgcagaagatagattgtaatggagcatgtgctgcgaggtgtcgtttatcatctcggccacgtctctgcaaaagagcctgtggaacttgttgtagacgctgcgactgcgtgccacctggcactgctggaaaccaagaagtgtgtccctgctatgctagtttgactactcatggtggcaaacgcaagtgcccttagacttaaaagttgtgtttggattgctagctgctga

SEQ ID NO: 25041 - DNA, 400 bp, Glycine max
tcgcgtaacaagttacaatagtcattacacaagcgttatgcaacagatacactaagactcaatcctatatgaaatgtgataccatgttagtgagaaatctcgttgggcgcctaggaatatatgacatgacaaaccacatacttgtaaatcagataactcttactaggtaaaatcataagaaaatcggtcagagtcatgttgttttgcgagaatactccaaccatgtgggatcgatatatacttaaaggaacactcaaaccaggtgtatttattccaaggcctagactctgaagagtttgtcagggtttctcccttctgattcaggtccaacatagaaaacattttagcacgtagactctatctatgaactatacaaaacatacgactcctcaattattct

SEQ ID NO: 25042 - DNA, 300 bp, Glycine max
ggtgtcttgtgtggcatgtgagaaagcttacgttgtacggattaatgccctttcagtatgggtatatctatctgtttggactttttaacatacccccagtttttatgggtgatcatgattggggaaacctacatattgaatttgcttttcttaatcaaagtgtctgactaagtctgtctttttaaaagtgaattgaaatttcttgataccctgaaaaccctgaggattttatgaaagcatttccctccaacatagacattcatttatggtgttgaaatatgtgttgtaaattactactta

SEQ ID NO: 25043 - DNA, 412 bp, Glycine max
ggaggaagcgcagcagcagcagctataccacgttgctggaagaaactgataaaaagcgctgccgttgtgtctttcagtcttcgttggatcatcttcacaatcacatcatcagaacacaaagaagagaagagacccttcatcttgttattccactcgggctaggccaattttccctctaacagtcaattttcattcagattcgtaaatttctcgattagatcacgaggtgttggtgtgattgtttgtaccttctggtggtggagcttgttggaaattggagatgagtcagaggggtttaatatatagctttgttgccaaaggaactgttgttttagcagagcacacgcaatatacggtgaatttcagtaccattgctgttcagtgcctgcagaaactgccttcaaatagcagc

SEQ ID NO: 25044 - DNA, 450 bp, Glycine max
  modified_base (405)..(405): a, c, g, t, unknown, or other
ccatttttctcaccatcgattcttagcggtgaaaatggtgaagtgtttctctctcatcgtcgttctctctctcctcgcagcatcggcgatcggcagcgaggtcatttccggagaatcggatggagatttcataatccgtcaggttgtggatgacggaggagtcaacgaaggaagtaacggcgacgatctcctactcggagccgaccatcacttttcggtctttaagcaaaagtttgggaagtcgtatgcttccaaggaggagcatgatcaccgattcagggtattcaaagccaatctgaagcgagctcaacgccaccaggctcttgatccctctgctactcatggcgtcactcagttctctgatttgactccttcggagttccgaagatcgtttctagggcttanaagtcgtcgtcttggactccctgcagatgctaataaggcccctat

SEQ ID NO: 25045 - DNA, 299 bp, Glycine max
cggacgcgtgggcttcttgttcattcttcatttctctcttcccctctttacgcgttcttctggtctgtttcataatcgagctatcacaacttttatcttgataaatcccaccggcattgccatttacttctcccattccttcaaaatggcaaatcccatttcccccattgctctctttatcctacttctagccccctctgccctacccggccatgattactgacaagctctcaccaagagccttctcttcttcgaagctcacagatccggctacctcccccacaaccagcgcgtcaatt

SEQ ID NO: 25046 - DNA, 412 bp, Glycine max
gattcttcacttgtgctgagtcttaccgattttgccgatcaaagttcctcactttctctctcttgatcgacacccaccacgcgttagagagagaaaaccacgagagatcggaaaatgggtacgcttcagtcttggagaagagcctacggtgccatcaaggacaccaccaaagtgggtctggcccatgtcaatagcgattacgcggatttggacgttgccattgccaaagccacgaaccacgtcgagtgtccccccaaagagaggcacctcagaaagattctgtttgccacgtctgctgtgaggcctagggctgatgttgcttactgtatccatgcactttcgcggcggttggcgaagacgcggaattggacggtggcattgaaaacactgatagtcatccataggttattga

SEQ ID NO: 25047 - DNA, 409 bp, Glycine max
gaaggaagaagaaagctctcatcgatcggtgttcgactttaaacactcaggatgagccacaaaattcttctttctgcagggtgcaaggttcagcttcgatgggaaattgctggggttcttcacctcacaacccaacctcaacaactaccggtaaccttagtacaggtactactgggacatctcaagcgatcagcagcggtagctatactactactactacgacgactactacttcttctggaagtgggagcagctccataaatagcaagttctcagtgtcaagcggtggtcagtcttatccaaattgacagatcttacctacctctaatttgaggatcttcacttttgccgagttgaaagctgcgactagaaatatcagagctgattcagtgcttgaggaaggaggttt

SEQ ID NO: 25048 - DNA, 392 bp, Glycine max
  modified_base (371)..(371): a, c, g, t, unknown, or other
gaggagatagacagggtaaatcttgagattcaacaggctgagcgagagtatgatcttaatcgtgctgctgaattgaagtatggtagtctaaactccttgcaacgccaacttgaaagtgcagagaaagaattgcatgaatatatgaactctggtaaatctatgttaagagaggaagttactggaaatgacattgctgaaattgtaagcaagtggactggtatccccatttctaaacttcaacaatcagatagagagaagttgttgtatctagaggaagagctccataaacgtgttgtcggtcaagatcctgctgtcaaggcagtagctgaggctatccaacgttcaagagcaagtctttcagatccccatcngccaatcgctagcttcatgtt

SEQ ID NO: 25049 - DNA, 396 bp, Glycine max
aaacggacctcggccgtgaacaagagggggttaagagaagacggcggcggtggtggcggcggctgagcgatgaggtaccgcggcgtgaggcgcatgccgtgggggcgttacgcggcggagataagggaccctcaatcgaaggagcggcgatggctgggaaccttcgacacggcggaggaagccgcttgcgcctacgactgcgctgctagagccatgaggggtctcaaagctcgcaccaacttcgtttacccaacttctccgcaaccttcttccgtcaccaccgaacacttgttccctaacttcaacaacaacaacaacttttacaaacactcactcttcaatcaccaccgtaaccgccacataaccggttccaacacttgttttgaccacccttac

SEQ ID NO: 25050 - DNA, 397 bp, Glycine max
catcatttgagcaagcagggggttatggggcggcaaaatcttacactgcccttgccctaaaaactatctcaaagcaattcaggtgcctgaaagatgcaatctctgcacaaatcaaagccacgagcaagacattgggtgaagatgattgcttaggagttaaagtagaagggtcaaggcttacgtatgttgaccaccatcttcggcaacaaagggcacttcagcaactaggaatgattcagcccaatgcatggaggccccagagaggcttgcctgaacgagctgtttccattcttcgggcttggctttttgagcatttccttcacccatatccaaaggactccgattaagttatgcttgctaaacaaactggactttctaagaaccaggtgtaaaactg

SEQ ID NO: 25051 - DNA, 314 bp, Glycine max
cgataggttaaagatgaaattgtcccaagtggcacttaaattgtggggccaaaaactggtgaggagaaatctgtcaccatttctgttgatgatggaattcgacctggcacaacagtgtctgatctatgaaagctcaaacctgtgttcaataaatactgaagcactactgctggtaattctagtcaagtgaatgattgtgctgcatctgttctgctgatgaaaagaagtgtttcgttgcaaaaggggcttcccattcttggggtattcaagactttcgcaacaatttgtgttgatcctgccataatgggtgttgg

SEQ ID NO: 25052 - DNA, 200 bp, Glycine max
cttcgggtgttagaagacgacagaaggggaggagatagacaggggaaatcttgagatttaggaggcttatcgagagtgtgatcttaatcgtgctgctgaattgaagtatggtagtctaaactccttgcaacgccaacttgaaaagtgccagaaagaaatgcatgaatatattaactctggtaaaatctatgtttagagag

SEQ ID NO: 25053 - DNA, 448 bp, Glycine max
acggaaatccattgaagttttaatttggaaggatggtgagagttagtgttttgaacgatgctcttgagagcatgtacaatgcagagaagaggggaaaacgacaggtcatgatcaggccgtcttctaaagtcatcatcaagtttcttctggttatgcagaagcacggttatattggtgaatttgagtttgtcgatgatcatagatctggaaaaattgttgttgaactcaacggcaggctgaacaaatgtggggttattagtcctcgttttgatgtgggtgttaaggaaattgaaggttggactgctaggttgctcccttccacacagtttggattcattgtgctgacaacatctgctggaattatggatcacgaagaagcaagaaggaagaatgttggaggcaaagttcttggtttcttctactgaacatggttttgagcatccattat

SEQ ID NO: 25054 - DNA, 148 bp, Glycine max
  modified_base (26)..(26): a, c, g, t, unknown, or other
  modified_base (30)..(30): a, c, g, t, unknown, or other
acgggccgacccacgcgtcgccggcnttcnacattttcaagaagacatattttggccgacaggcccaacattcacgcgggtttacatattgacatgccatttccaaagcatcttaatgattaaatatttgatgcacatatatgattga

SEQ ID NO: 25055 - DNA, 428 bp, Glycine max
ccaacccgtccgaccggatgacagaagcctacaaatgggtatctctctaatcctaacaactgtgtatacggggtgcattcattaatgctttcgattgttaaaaaactttgcatgaaggataacgcaaacgctagcatcaagctgttgagagctgcgtatgtggaccatcaccggatcgcatccaataatcagctgtaaattcctcttgcggtaaaagaagatccaggacacgctttatcacggcctgcacatacattctttttaggtaaccacaatattctgttaccacaataatctggatcctctatctatcagggctttctacgatgatctgacgagtcaaggagagaatcaacccaaatcgtggaggagtgataacagaggaatcgctgcggtgattcttgatgccctcacgaggcgacaatggg

SEQ ID NO: 25056 - DNA, 310 bp, Glycine max
  modified_base (26)..(26): a, c, g, t, unknown, or other
aaaaccggccggcccacgccgtccgncaggcagacgaaaagtgaatggctactttatatcttaaatgacctcaaatttatgcggggcggctaaagcatagacagtgtaaggacaaaaaagagggctctattcttccaaaccacgacataagcagcacgacaatgccactccaaccagatgtacactctcctaatgaacactgcctattgtgcccgtactcccgcagggaaacgcgcaaggtgcacgctatctgagaaagcacacaacatcatatggctatgagaccattcgctgagagtagcgtggaaca

SEQ ID NO: 25057 - DNA, 159 bp, Glycine max
  modified_base (33)..(33): a, c, g, t, unknown, or other
cgggccgacccacgcgaccgcccattcctcccnacggtttcgataagactttataaggggagtgcacaagtgagttagttgatcgatttatctagaaacagggtgattaaaatgaatgtccttgttttcttctttgcttcaattttggtagcatggcaa

SEQ ID NO: 25058 - DNA, 188 bp, Glycine max
atgtagctgtcgtaacaggtgggagaaacatgcggcgtgttggagtgatcaaaaactctgtacatcattcaggtaactgtaacacagttcacgctcaagattccactggacatgaatttgcttctcacatgggcaatgtgttcactattggcaaaggcacaaagccatggatattacttgcccaaggg

SEQ ID NO: 25059 - DNA, 285 bp, Glycine max
acgtcttatgggggagagaaaaaggagaacctgggtttctctgtttttttgttgtgtattcttcttccagacctaaagacccaatgcaccgattctgatttcaagaattacatcatcatatcaagaaaaccttggaactacacaaaaatggtgtccgctaacaaggagatggtcttagcactgctttgacaccctcctcgctcactacaacagcacggaagcacctccttctgccttcgatcaggctcaacatccattgtttgttacatggaagaaagtggtgaa

SEQ ID NO: 25060 - DNA, 397 bp, Glycine max
gtaattgttaggtatggacaatccactaatatggatgacttatctcaccctaggttttgatatttacaaaagtataaattgttgataaactaataacttgatgttaagtgaacatgaccaacttagtaaaagggcctattcgttatctacaaatctcgttcgtgcttgaagtgaaaatggttgtgctaagatataatcagtgttcaacgcattgtaaaaccaatagtgtccactcattaggaaaattggtgtttacacactaagtgttttcgtcacttgcgttcaattggtataagtcacttactatctccttctacttttttatgtgatgtccaatcaagtacgaaaagctaatattagtcgcaaagagcagtgcacaatctctttgttttgaaat

SEQ ID NO: 25061 - DNA, 228 bp, Glycine max
atgcttctctctccatcgcgaggggggctttcggattttcatgatatcctcaattcattcaccctcgtcacctgcaatagattctttcatgcaatcgagcattgaataacacaccattacaattcctctctcgatttgttttgcacgatcgctaatcacaagcgccctgtgaacacctgtggtatttacataacacttgcttttcaaaatgaaaacgctttgccacta

SEQ ID NO: 25062 - DNA, 349 bp, Glycine max
tccggtcgacccacccttccgccggttgcaaaagacaacagaggggttgtgttttcattaacttatacaaattctcggcgttgggtcgcgtccttgtgttaatcgtgttgacgttgaaggaaatttaagtgaagagagaatgatgatgaagtctgctatgtgtgcattggtgcttgtggcactggttgtggttgtagtgctgtccatggctgatgctgcggtgacttgcatcccatcacagttgactccttgtcttgcgcgcgttaattcaggttctgcaccttccagtgcttgttgcctgaagctgaaagagcaaaagccatgcttccgtggctacctcaaaaaccct

SEQ ID NO: 25063 - DNA, 349 bp, Glycine max
  modified_base (6)..(8): a, c, g, t, unknown, or other
acacgnnncaggggaaaggttatgcctaagattagctcaagcacacattttaatcacattcaagagttaaaaaaacaattctatgaaaattgaaaacaaaacacatatatactaagtcaaaaaagtagtattaataaataatacataattgctaagaaaatatagatttttaattgatatatgaattgaaacattgcatattaagttgaaataactcaatctaaccagttgattaatttctaaaatccaaacctcttaaaattaaactagttagatagaatgatcttaaacacattgatcccattcatggtgtctatcttaattggttcaatatgacatggtaactact

SEQ ID NO: 25064 - DNA, 226 bp, Glycine max
ttttcactcagcattaatcgagaatataatcttgtttgtaatggaaacaaaatacatatatatttaattcattctgaggttaacatcatatgatgcacatgttttcactccttaccatcatcatattcattatgaaaagttcatctacatacatcaggcatgggcgagcggcatatatcaagtgctgcttctactttaattttgagtgccttgaggcgaatgaaaa

SEQ ID NO: 25065 - DNA, 336 bp, Glycine max
ggggttttgttggaatggtaaccaaccaaaaccttaccgggcccggctttcttggtccgggtttggcttcaggatggaatctcaggtggaagcacgcacttgttgtcaaagttatgggtcgtactggatccagaggacaagtgacccaggttagagtgaagtttttggatgatcagaaccgtcacatcatgaggaatgtgaaaggacctgtgagagaaggagacattctcaccctactcgagtctgaaaaggaagcaagaagattgcgctagatggtctcttttttttggcttgcccccaaattcgaacaaaagcaatatttttcttgatatttat

SEQ ID NO: 25066 - DNA, 283 bp, Glycine max
cctcccttaaggatgaggcaaccctgcactacttgcttcacctttcttcataggaagaccaaatccttccttcataaaccaagaatcaaggacatgatgagtgcatgccgcaagaggagacaatccaacagaaaattcacttcaagttctgacttgtaaacctcttcttttcttcacatggagctctctactcaggttcatcaaagtttcaagcttatcgacactaaagggggagggaagatatcaactactgagctcaatgaagtgctctcatgccctggat

SEQ ID NO: 25067 - DNA, 346 bp, Glycine max
tcccttcccatcaacagtagaaggtgtcttccatggagacttgggagcaccaatctccttctgatcctcaccaatctcattatcagcagtcaacataactgcttttttttctctctctctctctctctctcacacaaatccacccaactcccaagattttccccctctaaaccccacttgccaataaacacaacactctaaactatcaaccaaatgggtactcagagattcaccaaaaactttaagataccacaaaaagattgaaactttgtacttgccagctgaatcaacgatattgagcacaaaaaccctgagctgaacaggcgataatttcatgtgggggtgc

SEQ ID NO: 25068 - DNA, 216 bp, Glycine max
taccggtccggattcccgggtcgactccacgcgtccgcttgcatgcttggcggcccatccgtcactaaccggttggcagtatcaacgcacgggggatcactcgtattgaatgctgccaaagctttcaaaccacaaaaggtcacttatatacaattacattaatggtaacaattgaacgaggaactacatcttcgccactgcgaaaaccgctgctgt

SEQ ID NO: 25069 - DNA, 365 bp, Glycine max
ctctgctgtcagtcctatctgcagccaatttggagatggcatggatatgaaatagttgtgtattatataactgcgaggactcttctttatcatttctcttgtccctttgaagtttttcacttttttctatcggatgagtattgataacagaacttgaacaattatggattatttattggtggacatgatgtgtccccttctgctgtaggaagtccttatatttctagtattaatgtaattgtatcctttaaagtatcttgactgttgtatggggattttaggcaaggtctttgtacgcgacacgtttatgacacttgaattgacttcagatttctgctaaacctattgagaagctgattgtccta

SEQ ID NO: 25070 - DNA, 190 bp, Glycine max
gacacctcaattcacgcagggctacccgctaaggggaagcatatcaaaaaccggcggactaaaagatccaagcttacatacacaaacctgccactctataggatccaaactttacgtacgctaacatgacaacacatacctcttctatcatctcacctaatttaaataaccttgccgtaacctaacaaaa

SEQ ID NO: 25071 - DNA, 173 bp, Glycine max
actcattcttctattgaattgttggctcatcaagtatcccaattaatttcatgatgagactctgtgtgcacgtgtgtgcatgttaatttttattttctttatatttgccaatatttctttattatattatttaattacttaagcattactaatatttaccattcttatataaa

SEQ ID NO: 25072 - DNA, 396 bp, Glycine max
tcctgaattcccgggtcgacccgggcgtccgtccacgcgtccgaagacgacagaagggggtagtgcatgagaacgatgaacattacccccacgttggtgccttagagcaagtggcacacggtgcataagaagaccactttgatcatgagaagaagtctgttctgaataaggtcaaggcaaaggctaagaaaattaaggacacgatttagaagcatggccatcaagtgcttgatcgtggtcatgagtataacaatgaatatcagcatacccttgatgatcatgacttagactaggattatgaaatggctgtagacccacaagttcataaaacaccaattcacgaaagttaagatgttaaaactgcaacacctacatcttagcaagtcgaaaatttgg

SEQ ID NO: 25073 - DNA, 392 bp, Glycine max
attaccggatcggcccgcgcgtacgcaacaggtcttattgattatgatatgctggttaaaactgctactctgattcgtacaaaacggattgtttctgatgctagtgcgtatcctcggtacattgactatccctctatgagaaaaattgcagatgaagtatgtgcttttcttatgatggatatggctcatataagtggtcttgttgctgcatctgtactttgtaatccctttgagtattgtgatattgtgaccaccacaacccacatgtctttacgaggtccaataggtggtatgatattcttcaagaaagatactgtgcatggtgatgatttgtagcctgctgttaacaatgctgattttcctggtgtacattggggtcctcataaccacac

SEQ ID NO: 25074 - DNA, 266 bp, Glycine max
ctacgcatacgaccacatacggcgacttattttgaaagaagatagcatgaaacacagtgcgacttgtaacgctgaatggaggacacaaaatgccagttataggcatggtaacttcagtggagaatcgtccatcaaatgcagacccttgcttctatctatgttgaaaacattgactatggttaccgtcattttgacactgcttcagcatattgaacacatgaagccatagccctaaacatggtcaaagccatacacataagccttat

SEQ ID NO: 25075 - DNA, 274 bp, Glycine max
atatcccatatttagagtcctttttgtatattatatgaatataaataatctcattggaccataatacataacaattttttgaaatatggaaaataatatcttaatattaactagcctctggttatatttgatttgttttaagaatgactttatttattcccgtctctttttttcctgtatgaaagaatctttcctttatactatattttccaagagtctagaaaatattcattagaataatcgttaatagtttcacatataatcacgtaattca

SEQ ID NO: 25076 - DNA, 113 bp, Glycine max
agggggagaggatcgggatccgtgattttgattcatctgtacttgtagagcctttttctactgcaaagggatggatgacaagtgctaactaagcactttcttcttcttcttct

SEQ ID NO: 25077 - DNA, 291 bp, Glycine max
ggaaatccccccgaaagctttgctgattttcaatggaagatatagcttgaaatttgagcgctcctttgggtgaagaggggccttatctccctcaacagccacatgatgacatgaagcgtctcagaattgtaattcacgcttctcttttgaagaaagagatagtggcattagccacatgatgacattaaaagtctcagaattgtaattcacgcatctcttttcaagaaagagatagacattattattgtcctgaaatgatcgtaaatcatctttctcatataatatccttaa

SEQ ID NO: 25078 - DNA, 273 bp, Glycine max
gaattcccgggtcgacccgcgcgtccgacacaacgggacggcataagacaacacgacggtgagatgcttccattgatgctctcaacaaaggcgggaatgataaattggtctgctggttatcaactcgtgctagaggtcttggtattaatcttgctactgctgatgttgtcattctgtccgatagtgactggaaccaacaagttactttcaggcctcagatcctgctcataggatttgtcaaaagaaagaaggtcaaggtttcccgttttggac

SEQ ID NO: 25079 - DNA, 420 bp, Glycine max
gttgttgtaactcgttcttcttcttttgttgttctgtgtttgtgtttgttttttctgtcacctgaaaatgtcttgctgcggtggtaactgtggttgcggaagctcctgcaagtgcggcaacggctgcggaggctgcaagatgtacccagacttgagctacactgagtcaaccaccaccgagaccttggtcatgggagtggcacctgttaaggctcaatttgagggtgctgaaatgggtgtgcccgctgagaacgatggctgcaaatgtggaccaaactgctcctgcaacccctgcacttgcaagtgaggtgttgggagagcaagcttcaagcagagatagcccttaattaggaataatgataaactattaatgtgtagctaaaaacttatgtattatgtctgtgatggttttcgtgcact

SEQ ID NO: 25080 - DNA, 185 bp, Glycine max
aactccagcgatcacactacaggatccaatcttacttacgcgtaccttcaacatcatagggctggtcttcctcaacctcagtgcgattcaatgtccatcataatacaacatcgagactctgaaaacccagacgttacacaacttaatctccttgcagaacacactcctttagccatctatcttat

SEQ ID NO: 25081 - DNA, 345 bp, Glycine max
agatgtcgatacgttctcatattttgatattaacaatgatcgtgtcccatcccaatttccaattcctctttgaaacaattccatttcatacatcatttaacaaattagatggaacacatcctacaccaagccagatacttcaacaaataccccaatttataccattcatcataaaccaccctcaaacttattgttttcttattgactgattaaacgatcattattgattacttagccctcaacaaaagcatactttagaaaccagcttaaccagctcatcttccaaaactataatccaccctatttaatctcacatacccttttagttaccttctataattctaa

SEQ ID NO: 25082 - DNA, 361 bp, Glycine max
acgcctggtaaggagacttgaaatgggaacaaatggaaatgagttttgtactatcaacactgctccaccttcttctcactcaggaaccacttatgagagcattgatattcaaaacagaaagaggtttgttgctcatcagttattaccagatttcgtggcctaggaagtaagaactgatggctagctagctagctaaaacaatattggataatttatgagagaaatcttagagttctgatgagtgtttctctagacttggctaattaacttcgctagcagcaccaagaaaagaaaaggagaaggtttatgttattttcatttacatatatatacacatgcatgcaatcactaattatgaaat

SEQ ID NO: 25083 - DNA, 364 bp, Glycine max
  modified_base (27)..(28): a, c, g, t, unknown, or other
  modified_base (39)..(39): a, c, g, t, unknown, or other
  modified_base (51)..(51): a, c, g, t, unknown, or other
  modified_base (275)..(275): a, c, g, t, unknown, or other
cggaattcccgggtcgagccacgcgtnncgccacgcgtnccgccacgcgtnccgggcactttaaattgcatcaaaatagttcattcttgtgcgcaattcctacctctgctttcaagatgcagatcttcgtcaagaccctcaccggaaagaccatcacccttgaggtggaaagctctgacaccatcgacaacgtcaaggccaagatccaagacaaggaaggaattcccccggatcagcaacgtctcatcttcgccggaaagcagctcgaggacggncgtaccctcgccgactacaacatccagaaggagtcaacccttcaccttgtccttcgtctccgtggtggcatgcagatcttcgtcaagac

SEQ ID NO: 25084 - DNA, 321 bp, Glycine max
cggtgttaggaggtgaatacatggaaaaactaataataaaagacaaaaacagatatatttcaagacaatgttttgtgataaaggatcatgtaattacccggaaatgtggaaatgagaagataaacattattcttacctcaacaagctcggacaattttccttctaggcttgatgcattcatgtccaaccccaatctctcaagttcagcttcaagctcagcttcaattttgctcatggactcagaactttgttctaccttttgatgatatgattctttagagtcaattcttggagagttatccaagtgcttttcaggggaaa

SEQ ID NO: 25085 - DNA, 341 bp, Glycine max
gggagtctaatatttgcagtgctgaaaatgtcgcagttgttggaaaaggccaaaaactatgttgcggagaaagtcaccaacatgcccaagccagaggcgagtgtcaccgacgtggacttcaagcgcgtgagccgcgacagcgtcgagtacttggccaaggtctccgttcagaacccttattccacttccattcccatttgtgagatcaagtactccctcaaaagtgctggcagggagatagcagcaggaacaatacctgacccagggtcattgaaggcaagtgacacaacaatgttggatgtgccagtgaaggtgcctcatagcatattactgaactttgc

SEQ ID NO: 25086 - DNA, 361 bp, Glycine max
gaagggcagaaattgtagtgaaagcgacaattctagtactagtataataactagtacgaatgatacaaatgatagtgattccactataggagaaagttctaataatctcgatgaaagtcaaaaatataagcatttgtggcttgaatgcgaaaattgttatggattaaattataaaaaattttttaaatcaaaaatgaatatttgtgaatactgtggatatcatttgaaaatgggcagttcagatagaatcgaacttttgattgattcgggtacttggaatcctatggatgaagacatggtttctctggatcctattgaatttcattccgaaagaggaaccttataagatcgtattgattct

SEQ ID NO: 25087 - DNA, 93 bp, Glycine max
gatgattatcaaatatcaattgaaagaaccaaccttccaacttccaagtgaaaatcaaaatcccctggtaagtcatggaaaccaacacacacc

SEQ ID NO: 25088 - DNA, 318 bp, Glycine max
gacgacagaagggagagttactgaaattaaaaacacaatctttatatgctttaaccacagtgcacagaggcattcttatccaagaaacaatgcttcaatccataaataatttgtagaccctgaactcttgcaaacaaaaactagattccgcttattagttagaggaaattattataggtggggtaaaccaaaagaactgcagcttcaaagttatggtaaaggtactagacaacagtaaaacgcgtgtttcaagtccgatccaccaaaatttttagtcggaggattcgaacacaaacttttaaaaatttaaaaaagaag

SEQ ID NO: 25089 - DNA, 196 bp, Glycine max
tcatcctagaacaaccctgcctattcaaaagaagtacctcacctcacttacgaagaagtagtgggagctgggctctagattcagttggatagccagtctacctaagtaagagttacgttgaccctgcaaggtatcctagaggggcacaatgcaagctggagatcatctggttaggataatccccaggctttagata

SEQ ID NO: 25090 - DNA, 53 bp, Glycine max
gagacctcaggtcatgcggggctacccgctgagtttaagcatatcaataagcg

SEQ ID NO: 25091 - DNA, 54 bp, Glycine max; identical to SEQ ID NO: 3720

SEQ ID NO: 25092 - DNA, 361 bp, Glycine max
  modified_base (227)..(227): a, c, g, t, unknown, or other
  modified_base (237)..(237): a, c, g, t, unknown, or other
  modified_base (248)..(248): a, c, g, t, unknown, or other
gagtcaacaattgttgactagttgtcgattgtggtctgagttcgcggtttcagtgaaagatccccgctctgttggacctctgattctgattccatgttagggttttaagggatccaattccagcttcctctttcccatggaattgaaaaagggcaagcttgccaggttctacacggatggtaaaaagcataagcaatcgttttggggagcaagagcaactgagcctncagcacttanacctagcaatntgctaccactggggaaaaatagaattgctggaacatttagaattggatgatccgaagtgttcccggaggaccatgagccgtggcgtaaaagaatacttgacccgggtagcgat

SEQ ID NO: 25093 - DNA, 411 bp, Glycine max
accggtccggaattcccggtcgaccacgcgtccgcctttgttgtcttgggttgggtttgttttttctctcacctgaaaatgtcttgctgcggtggtaactgtggttgcggaagctcctgcaagtgcggcaaccgctgcggaggctgcaagatgtacccagacttgagctacactgagtcaaccaccaccgagaccttggtcatgggagtggcacctgttaaggctcaatttgagggtgctgaaatgggtgtgcccgctgagaacgatggctgcaaatgtggaccaaactgcttctgcaacccctgcacttgcaagtgaagtgttgggagagcaagcttcaagcagagatagcccttaattaggaataatgataaactattaatgtgtagctaaaaacttatgtattatgtc

SEQ ID NO: 25094 - DNA, 193 bp, Glycine max
cgacccacgcgttcccccaccccttcctaccttggagaagacaactaattggggggccagaaggttataaaaatggggaccgggttggacccaaaggggcttttttttcttgcttggcttcggggggccatttgagaagaaaaaaaagtattagggggggcggcccctgtggttcctgttgtgggaatggaat

SEQ ID NO: 25095 - DNA, 156 bp, Glycine max
ggtcgacccaccccttcctaccggttggaaaaaaccaccaaaagggggtcttttttttcaaaaaatttatttggggttattaggcccgggaaaaataaaagggttttccaaaaaacaaagccgggttggggtttttgtttccctttccaaatcggg

SEQ ID NO: 25096 - DNA, 262 bp, Glycine max
cggttgcaaaaaaccaccaaaaggggccggcaaaaaccgaccccaaaattggggttgcgttcctttaaaactttcaatttttttttctttttccaatcaagggaataatttttttaaaaaattttccaaaaccatggttaaccccaatcctatgattttggtggtgggaattttaggtaacctggcctccttctgtggctttttagcaccagtcccaacattctatcgagtttgtaagaaaaaacccacggaaggtttcaat

SEQ ID NO: 25097 - DNA, 451 bp, Glycine max
accggtccggaattcccgggtcggaccaagccgtccgccaacccttcctaccggttgcaaaaaaactcattagggtggaacagcctaaccggctggatgggatcaaccccatgatcaaggccattatgaaggcgattaaaatggggatggaaccgattcctgtgcatagtgggttgggaggtgcttactatttcaaaaacagtaagggggaaagtgttgcaattgtgaagccaaccgatgaggagcctttggccccaaataacccgaaaggttttgttggcaaggcgcttgggcagcctgggctgaagcgatctgttcgggtcggggagactgggtttagagaggttgctgcttatcttcttgactatgatcattttgccaacgtgcctcctactgcattggtgaagatcacacactctgtgttcaatgtgaatgatggtgtcaatgggaa

SEQ ID NO: 25098 - DNA, 55 bp, Glycine max
ggagacctcaagtcaagcggagctacccgctgagtttaagcatactaataagcgg

SEQ ID NO: 25099 - DNA, 90 bp, Glycine max
  modified_base (88)..(89): a, c, g, t, unknown, or other
atgccgaagaaaagctattagccaaccatgttgaacgtgaaaactatgagacctcaggtcaggcggggctacccgctgagtttaagcnna

SEQ ID NO: 25100 - DNA, 442 bp, Glycine max
  modified_base (57)..(57): a, c, g, t, unknown, or other
  modified_base (59)..(60): a, c, g, t, unknown, or other
  modified_base (72)..(72): a, c, g, t, unknown, or other
  modified_base (81)..(82): a, c, g, t, unknown, or other
  modified_base (100)..(101): a, c, g, t, unknown, or other
  modified_base (120)..(121): a, c, g, t, unknown, or other
  modified_base (130)..(131): a, c, g, t, unknown, or other
  modified_base (160)..(161): a, c, g, t, unknown, or other
  modified_base (182)..(183): a, c, g, t, unknown, or other
  modified_base (195)..(195): a, c, g, t, unknown, or other
  modified_base (204)..(205): a, c, g, t, unknown, or other
  modified_base (212)..(213): a, c, g, t, unknown, or other
  modified_base (221)..(222): a, c, g, t, unknown, or other
  modified_base (253)..(253): a, c, g, t, unknown, or other
  modified_base (263)..(264): a, c, g, t, unknown, or other
  modified_base (278)..(280): a, c, g, t, unknown, or other
  modified_base (288)..(289): a, c, g, t, unknown, or other
  modified_base (296)..(297): a, c, g, t, unknown, or other
  modified_base (315)..(316): a, c, g, t, unknown, or other
  modified_base (350)..(350): a, c, g, t, unknown, or other
  modified_base (352)..(353): a, c, g, t, unknown, or other
  modified_base (367)..(368): a, c, g, t, unknown, or other
  modified_base (376)..(377): a, c, g, t, unknown, or other
  modified_base (385)..(385): a, c, g, t, unknown, or other
  modified_base (397)..(398): a, c, g, t, unknown, or other
  modified_base (413)..(413): a, c, g, t, unknown, or other
attcccgggtcggacccacgcccgtccgcctcaccgcccgtctcgtacccggctgcngnnagaagaccgatncagaaggtnngatctattattaccaacnnatgagagtgtcctcgtggnnatgtcatcnnctgtaaattgggacgccgccccaagcctnntgtcaagaaggggttgcttcnngagcctattgcnctcaactcnntggtttnntggaagtnngatcaacaacccaacaaccccgaggagaatntgtcaggtgnnatgaagaaaggagnnnatgcaggnntgatgannagttgagaaaccattgtnnacatgtattttcggtctctttgaaatggaccacngnnggatgaaatgctcnncaagaatnnttgttacncattttcctgcnnaatagaaatttttcnttttttaaaattcaagaaagaaattttag

SEQ ID NO: 25101 - DNA, 322 bp, Glycine max
accgtccgaattcccgggtcgaccacgcgtccgggtgtcaaggtcggctatttttttttcttctgtatttattggacttggttcacccgagtcacagcctagtgttttcttcatatcgataaaactagtatttttgttgtactggaggatacaatcttggccatagatttgtaatttttttttaatctgaggaactaaactaagctagggtgtttttgttttggtttttggttatatatatcaacatctttcacttgctgatactcttttctctcctgcttgggcgagtgaagaggtgaaagcttgagagcatataaagctt

SEQ ID NO: 25102 - DNA, 218 bp, Glycine max
gactgagttggtcttagaggaaaaaattgaatacaatgatcttgtaaagtcagttcctgatgggaactcttcaaatgatgatgaacacgccaatatccagacagtccagtcagataaacaaaaggatgtggcacccaaaaatgggatcctgattgggctgatgtcaagcttgcacaagctaaatatcttctattccggatagcaaaatttaaaacact

SEQ ID NO: 25103 - DNA, 359 bp, Glycine max
cggtcttgaattcccgggtcgaccgcacgcataccgtgcgaattacgaatgtctgatgtctatttgttgattgtgttctataatttgagtgggcacggtgtaactcagatgcattgatacaagaacattctgtattttgttgactatgatataaaatttttagtacatgtaatatcaattaaaattattctcaacaagatcactgtccagcctgaaggttacggatttgcgtaatttgtatctcatgctccagcatatataattttgcagacatacaatggaactcagatgcctgtaacataacaaactattagattgaattgggccttctttggaattggagaaatgcgccctgatac

SEQ ID NO: 25104 - DNA, 337 bp, Glycine max
  modified_base (9)..(9): a, c, g, t, unknown, or other
aattccctngtcgacccactctacctttacatcccatattcgatcaaaccttcaatttccttaaatatattctaacacttcagtctagttcaaattacaagcccgctcataagaatccatcttcataccagatcaacacctataaatctccatcttataacaatcctccaccctacaacaatcttcccaaacactcctccattaccatatttaacatatccaataataccattgacacttacaacatctacatattcacatttctcaatcacttacatacctacatcacaatctctatcaaatccatcttcattatcaacatcttcatcaactacat

SEQ ID NO: 25105 - DNA, 192 bp, Glycine max
gaggacaaccgttgctgtaatggaaatcgtttacataagatgatgatttattctagtttgcactttgccatgccagctatcattgttgaaacatgcgcgagaacacttaacagcaatttattcaaacagaaatttctttattaacacttaacagcaaacacgagaacattcaatcaccccaaattccttact

SEQ ID NO: 25106 - DNA, 350 bp, Glycine max
gacatttggagggctatgtgactgcattaacccccggtactttgcggatcaatcctgacgagatacaaagccatgctagctgggataaacgacatcaatcattgttataggagataacaacatgttgtgataacggagtagccagccgctaggccttatatgctattattgatacatgttctgcacttgacaacattacacaagctgcttagaaatacagaaacgtattcaatcaggaacatgttgagcctaggataagcagggtagcattatatggatgtgctgcataattgtaacggtacttacgacttattgctgtcgcaccatatcttgcaagttaaggatctgat

SEQ ID NO: 25107 - DNA, 447 bp, Glycine max
gcgagacgacgacagaagggtttaagtgaaggaggagagggagaagaagaaggagtatggggaagaaaaggggaaaacgcaaagaaaaaaagaggaagatagatcaagatctcccttgcgtttgtctcagttgaagaaattcaagagcagaacgagactaactcaacggtatcagacgtttcagggtttcagcacttccattttttttttccggatttgagttggaagaagatcaaagagatgtctgttgtgtttgacatgagttttgatgtccaattcagttttgttcatgttgatgctatctgtacgtaggttcctagttgcttggattgttcctctgggtggtggagactttgtgtatttttaaaatattgacaattcaaaatgccaaaggagagaagggataggtctttgtcacatgaaagtagcagagccttaccttaccct

SEQ ID NO: 25108 - DNA, 116 bp, Glycine max
actcgttagaacacctcagagaagactacagaatgttatcactatgtaattatacttgggctatcggcattaattaaatcacgtcgtaactactctacatatgacgaatgcatata

SEQ ID NO: 25109 - DNA, 482 bp, Glycine max
aattcccggttcgaccgactcgtacgtccacgcgttcgaccacgcgttctgagacgacagaaggggaggcaatagaaaggaaaaccgagtcatgttctcactttgaagagaaaataacaacgtaaagatgtctgcatcaggaggcagatgaagccaagaggaagagaagaagccttctgatcaaggagcacatattaatctcaaagtcaagggccatgatggtaatgaggttttctttaggattaaaagaagcactcaactcaagaaacttatgaatgcgtactgtgatcgtcaatctgtagattttaactcaattgctttcttgtttgatagaaggagactccgagctgaacagacccctgatgagctagagatggaggatggtgatgagatagatgcaatgctgcaccaaaccggatgtggacacaagtttctttaaatgtatgatgatcatcttcatcaaaatgcttgataaaacgcat

SEQ ID NO: 25110 - DNA, 461 bp, Glycine max
gcgagaagactacagagggggttctagtgtgtgattgtttgttgttgtaactcgttcttcttcttttgttgttctgtgtttgtgtttgttttttctctcacctgaaaatgtcttgctgcggtggtaactgtggttgcggaagctcctgcaagtgcggcaacggctgcggaggctgcaagatgtacccagacttgagctacactgagtcaaccaccaccgagaccttggtcatgggagtggcacctgttaaggctcaatttgagggtgctgaaatgggtgtgcccgctgagaacgatggctgcaaatgtggaccaaactgctcctgcaacccctgcacttgcaagtgaagtgttgggagagcaagcttcaagcagagatagcccttaattaggaataatgataaactattaatgtgtagctaaaaacttatgtattatgtctgtgatggttttcgtgcactc

SEQ ID NO: 25111 - DNA, 421 bp, Glycine max
gatgagataatggctcgcagtatatcgtacataacggggtgggagcttggctctctcaggcgccatccaagcatcgccgtcgtcgatgtaagggacgatgagaggagctacgacggacacatatcggggtctcttcattacgcaagcgacactttcttcgataacatctcaaatcccattcaggcagttaaaggcaaagacactctcgtcttccactgcgctctaagtcaggttcgtggcccaacttgtgctaggaggcttgtcaattatcttgaggagaacaaggaagatactgggataaagaacattatggtcttggaacgtggcttcaatgggtgggaagcttctggtagacccgtttgccggttgaccaatattccttgcaaaggagaagtggcttcttaatcaaagacgtatttgt

SEQ ID NO: 25112 - DNA, 430 bp, Glycine max
atcataactcggcacatcatctccataacagactggcagcatggctctcttagactccatccaagcattgccgtctgcaatgtaaaggacgatcagaggagctacgactgacacatatcggggtctcttcattacgcaagcgacactttctccgataacatctcaaatcccattcaggcagttaaaggcaaagacactctcgtcttccactgcgctctaagtcaggttcgtggcccaacttgtgctaggaggcttgtcaattatcttgaggataacaaggaatatactgtgataaagaacattatggtcttggaacgtggctttaatgggtgggaagcttctggtagacccgtttgccgatgcaccaatattccttgcaaaggaaagttgtctccttaatcaaagacgtattttgggttggatggaatta

SEQ ID NO: 25113 - DNA, 250 bp, Glycine max
tataacaccacctcattagatccaatttttgattgtttgttgatttaactcattcctgtacttttgttgatctttaaaagtgggggatttttctctcaccttaaaatatcttacttctttggtaacttccgttaccgaaactccttcaaatgctgcaacacctgcttatgctgcaagatgtacccagactttatctacactgagtcaaccaccacctatacctttttcattttatattcacctgttaaaa

SEQ ID NO: 25114 - DNA, 180 bp, Glycine max
acgcgtacgtactgctcccataagacctctcatgcataatctgattacatgggaagaggggcgatcataatccctttgcgcggatccatagacgggcacttctcgttcctgatctcgctgttactacagctccaatagctgatatttaagttttctccttttcctagctcgtatttatac

SEQ ID NO: 25115 - DNA, 425 bp, Glycine max
tgagaaagctataatcgcaaatccaacatatgcagaagcatacaataacctaggagttctttacagggatgctggtgatatcgctctagcaattaatgcttatgagcaatgtcttaagattgatcctgattctcgaaatgctggccagaaccgtttacttgcgatgaattacatagatgaaggaaatgatgacaaactttttgaggctcacagggactggggtaggcgatttatgagactatattcacagttcacatcatgggacaactcaaaagatcctgaacggcctcttgtgataggatatgtctctcctgattattttacacattctgtgtcatatttcatagaagctccccttctctatcatgactataccaattataaagtggttgtttattcagcagttgtcaaggcagatgcaaaaa

SEQ ID NO: 25116 - DNA, 388 bp, Glycine max
cagggaattctttttcttcacagcatttatttattatttttttttctgttcttctctttttattttattccgatctatcttttttttttcctgtactttgtttgttttacattctcttttttttctatttttttcttggcccttttttcccttgatcatctccttctgaaaaccgaagccaacttcaaacaccaccacaacaatgtcaatattgacatttttagttttatggcttttatctttcttgttagggttgttatgatatacatatgtgatttttttattacatcttttgttttggataagatatgcatgttattggaagtaaatattgatttatccatgttattacaggttcattagcatcatcaattacaaaattgcattt

SEQ ID NO: 25117 - DNA, 99 bp, Glycine max
gaatttacatcacatttcgttgtgcctttgatctctgatcccgttgcgtctctcgtaatcatgcctaagcaaatccacgagattaatgatttccttttt

SEQ ID NO: 25118 - DNA, 382 bp, Glycine max
gaaggtgcaagagtttgttgtgagctataagctagtttatcgtgaggagaatatgaagttgtttgttttctttgttgctgcagtagttttggtagcatggccatgccatggcgcaggctaccaaaggttccctctccgaatgaaaactggctatggtgagcgttcttcggaggtaaaatgcgcaagttttaggcttgctgtggaagcacacaacatccgagcctttaaaaccattcctgaagagtgcgttgaaccaacaaaggactacattaatggcgaacaatttagatcagactctaaaacagttaaccaacaagctttcttttatgctagtgaacgcgaagtccatcacaacgacatatttatattcggcatagataac

SEQ ID NO: 25119 - DNA, 232 bp, Glycine max
ccacacgtgcgacggggcgagaatgacgacagaagggcaagttttaaaagtatggagatggcggacacattggtatttacctcacaatccgtgaacgagggacaccctgacaagctctgcgaccaaatctacgatgctgtcctcgacgcttgcctcgagcaggacccatacagcaaaattggctgccaaacatgcaccaaaaccaacttggtcatggtctttggagaaatta

SEQ ID NO: 25120 - DNA, 256 bp, Glycine max
gggccgacctacgcgttcgcccactctttcgttctgttacagtatgggattacaacataataggcgtgtacaggggtccatttcctaacatatcagggcctgtttacataacatgtctagatggtggaaatcaataaggtcttgcttcatggtttttggatccacagccagaatattctgttattcgagaagcatgctactgtcattccacactggagatatataataggacccatgctatctaccactggaatcg

SEQ ID NO: 25121 - DNA, 95 bp, Glycine max
ggttctagtgtgtgattgtttgttgttgtaactcgttcttcttcttttgctgttctgagtttgcgtttgttttttctctcacctgaaaatgtctt

SEQ ID NO: 25122 - DNA, 222 bp, Glycine max
cgacatgactactgaagagggatacatctacaatggaaagaatcagatatacagggtgggggatggttaaatgccaggcgaaatgataaatccatatttatctcttcgttcaaacggcagattctatcctccctacattcccatctcattgtttctctcgaggatccattgaaacgacaagtctatgttggaccatcctgtgtatccgattgccgttttgat

SEQ ID NO: 25123 - DNA, 222 bp, Glycine max
tggccaattcaatataaatggctcctgaattaacacctgctagtagtggtttacttttaacggaggttcataaaactttacatagaaaatgatccctccacacaaattcacataagcgactgctttttaaaggaaaaaaaataaaaattggttttttatcaaagagtcctaactttaggaccttatattacccacccttgctttcttctttttttttttaaa

SEQ ID NO: 25124 - DNA, 283 bp, Glycine max
caggggttgcacttctgctgcgtgtaagaatccaggaaacggagatatgggattcgctggaacaactcataagtgcatggattgtgacacaacagcatatttggctgattagtcaacagcagataaccgagtgtaccataaggcttgcttcagatgccaccactgcaaaggaacactcaagcttagcaactataactcttttgagggggttctttactgcaggccacacttcgaccaactgttcaaaagaactggtagtctcgacaaaagcttcgaagggaca

SEQ ID NO: 25125 - DNA, 365 bp, Glycine max
  modified_base (67)..(67): a, c, g, t, unknown, or other
aagacgacagaagggatattgaacgaattaattgacttttctttttgaaagtttcgttacctgttangcgtttgatttctgctagtttttgaaatatgcttactatagttacattccaagactttgcatgtgtgtatggtgctactgttacttaactttcttaagcatgcttctttttttttttcatctacttggcttccttttatgttggcagatctaattccaaagctggaaggttgtgccatgtgccatgtgcacttaatacctctggaaggttgtgccatgtgcacttaagcattccaagactttgcagttttgatctgatcctagcatgttatacatggatagggacgattctgcaatac

SEQ ID NO: 25126 - DNA, 366 bp, Glycine max
taccggatcgacgcacgcgtgcgtccactcgtctgtacggatacgacaaactacacaatgtttgtgcctgcgacaccttattcaggtttcgcggccatcatctgtggatgggaatattctctccccccaccttcatctctgaagaatgacatttatattattgttcatcatatggtcaccaatatacagcgtcctattccgaatacagcagggccctcacttacgaccctataaattcgcttatatgttgtgtcgcctttatacagttccgggctcatttatacactttattgttttgtgtacaatctagacaccttaactattacccattggatgacaagtctattaacagcacactcataaatt

SEQ ID NO: 25127 - DNA, 295 bp, Glycine max
tgggccaaaggagtgatattgggatggagcaaactaataagaacatgacgcaacggtggagggtcaacgacaacaccttcacgcgttttgctccgaaggcttgcgagcacatcggttccatcccaagtgcttgacccgacagcaccgaataacctgtgatgttcgcgaacgccattcctagggaccctgctggcagttctaactcttccaagtgtgccaagaacagcatcgataccatggaacgcgcgtagaatatcaacgccgttatttctatcggaaacgccagcttcaccac

SEQ ID NO: 25128 - DNA, 392 bp, Glycine max
attgctgctctccaacaaagatgatccacttgtccaccctccctcaagacataaccgaagaggagattgtgagccttttggaggagcatgtaaccattgtcaacagcaaggtctttgagatgaatggaaaaaagcatgcacttgttcagtttgagactgaggagcacgctactgaagcccttgtgtgcaagcatgcaagcccactttctggatcggttgttcgcatctccttttcccatttgcagaatatatgatccagactttgataagggctgaagggaaacagttttatggttgcaacttgctcggcttattatggacaaagaattctgaattttggaaggataattttatgcaaataatgtcaccttcattgtcattgtaatggtctc

SEQ ID NO: 25129 - DNA, 417 bp, Glycine max
agaagacgacagaagggggaagagtgaagagaatggctcccaagggtttaacctttgtggctgtgttaatatgcgtttcagcactgtcactgagtccttctgttgcgggggaagggcaaaataatggccttgttatgaacttctacaaggaatcatgccctcaggctgaagacatcatcacagaacaagtcaagcttctctacaagcgccacaagaacactgctttctcctggctcaggaacatcttccatgactgtgctgttcagagttgtgatgcttcactgttgctggactccacaagaaggagcttgtctgagaaggaaacagatagaagctttgggttgagaaatttcaggtacattgagaccatcaaagaagcttggaaagaagatgccctggaagttgttcatgtgctga

SEQ ID NO: 25130 - DNA, 426 bp, Glycine max
agaagacgacagaagggggaagagtgaagagaatggctcccaagggtttaacctttggggctgtgttgagtatgcgtttcagcactgtcactgagtccttctgttgcgggggaagggcaaaataatggccttgttatgaacttctacaaggaatcatgccctcaggctgaagacatcatcacagaacaagtcaagcttctctacaagcgccacaagaacactgctttctcctggctcaggaacatcttccatgactgtgctgttcagagttgtgatgcttcactgttgctggactccacaagaaggagcttgtctgagaaggaaacagatagaagctttgggttgagaaatttcaagtacattgagaccatcaaagaagctttggaaagagaatgccctggagttgtttcatgtgctgatatcctc

SEQ ID NO: 25131 - DNA, 433 bp, Glycine max
caacagaacggaatgcaattgaaagagagatttgttagcctcaactcacggtatggttgtcactttgggaaaatcccatcttacaccttttcgtgaccactttgagtgacataagagaaattatgaaacatactcaaattagattcaagagaaatgtccattaaccatgaaactcgcgctttcatttaccatcttctatgcaacgtgatctactttatggctgtactcgctccattaccaactctttaccaaatctacaagataaaatctacggatggtgttcaatcactacctatatattgatgcactattcacgtcaatgctctcgatttattacgcactcagcaaaaatgatgctagcctacttctcattactatgaactcctttctatgagtgatacagacaatctacctagcaatcttactaatttac

SEQ ID NO: 25132 - DNA, 494 bp, Glycine max
ccggaatcccgggtcgaccgcacgcgtccgccacgcgtccgcccacgcgtccacggacgcgtgggcggctgcaagaacacggcagaagtgtatagcagcatcatacggggcattcaattcaaaaactaagttcatttcttgtgctttgccttattcctcaaaaccaaacatgtcgaacacatgcggcaactgtgactgcgctgacaagactaactgcaccaagggaaacagctatggtgttatagtagagactgagaagagctacatcgagactgttgacatggatgttccaccagctgagcatgatgggaagtgcaagtgtggcactaactgcacttgcacggactgcacttgtggccattaaggaatatgtatgaaaatgtaattgccatgtgtttggcaatacaaatctccaaataatgtaatcttcgcatgaataaatgtgtgctgttatcctacttcagggtctgtgtagtcatgcagtctgaatcatg

SEQ ID NO: 25133 - DNA, 92 bp, Glycine max
gttgctgagagggttgttgtttctacaaagagcccaagatcagataagcaatatgtgtgggaagcagaagctgacagtagctcttatgtgat

SEQ ID NO: 25134 - DNA, 138 bp, Glycine max
cacatgtttgttgttttcggtagtaatgatctggtacatagatacaagagatcgttattaattggaggccaaaatcctcttaatatacaaaatatgccattggcttgcacaatggaaaaaccattttaaggattaccc

SEQ ID NO: 25135 - DNA, 410 bp, Glycine max
  modified_base (106)..(106): a, c, g, t, unknown, or other
gacccacgcgtacgaacacccatacaaacggctgcaaaagacctccaaatgctaagcctcaataccgggcacaatgggaaaacttgattagttgcgctctccacanatgaaacaacactaaatcacgtatattcaacactactcatatgtgaaccttttcaaaaaaaaactgtttttttatcactaacacatcaatgaagatgcattccaaatatatgcttccctaaaccaacaacgaacaaacagacacacatctatttccaatattagacaaacatacctgactactctcttgggaccaatatatatcacattccaaaacatttaacaaacaagcttacatatattctaaatgcctcacactcaccacctaatatatttttgtatttgacaatgaaaacactactatc

SEQ ID NO: 25136 - DNA, 402 bp, Glycine max
acgcgttcgaacacgtctgaaaacacctcttaaaagactacagaaatatctggtagaagtcgaattggagtctcgagcagacattcgaaccattgtaaaaacccaccacacgaacctacttcacttgttattcttctataccaaccgtcctaaatcacttctcacttattaatacatacctaatgcatccctttaaaaccttatcttccgaacttaaagtcataaacctccattgctctatgatagagtacgaatttccctggatatatcaccatggattcttcatctccattaagagtttgacgcaccaatcctatattgtgacataaagcctcataacatttagatggatgaattatagacttcttacatatctcatttctgtctttcaaaactttttat

SEQ ID NO: 25137 - DNA, 52 bp, Glycine max
taccggtcttgaattacccgttcgacccatgcgttcgaccacacgaccatac

SEQ ID NO: 25138 - DNA, 310 bp, Glycine max
ttcccgggtcgacccactcgtcacgtacagccgcccgaacacgctccaatatacactatccaatctacttattaacttattaaatagcactaattgagacacttgggctcatcctcttcattattcaaactaacacttccttacatctttcaaaagttttatatccttttctatcattatctacaactccatctatatactccatctatctttcaccagaacctcatttacacctctttttttactcattatcattaccttttctaatttcatcactacacactctacacttaccataactccttaccta

SEQ ID NO: 25139 - DNA, 359 bp, Glycine max
tactgggtgcataagacgacagaaggggacatacaatcagtgtcccacgttgaagctattgcgactctctcttcctactataaccgttacctctcgcctgaaaaccgacattgatctctgtctgccacgatccccgcccatccctccgacatgagttccattgagctacttcacatacagcccctggagctgcaacatccctttgaattgctgaagcatatctcgtgctatttgcagctgtctaacatgactgtcatctatgtgatttttaaggtcaagacaacaaatcctatgatatattgtgttagacctaacactgcagttttgatgcctacgtctacttgcgatgtcatagtgac

SEQ ID NO: 25140 - DNA, 323 bp, Glycine max
gccgctgctgcagcttgtctctgtgttcaagtgaagggagcctctcccagcatgcctgataggaaatctgttttggatcttcttaattgtcaatgataatactcgcaaaaggtcacaattcgaactatcaggaatagaataactgtgtatggcagagggaaagacccttgaaaatggcagcaaggaaagcaaaaatccttttacagagtatatctgcaagatggattcttcaacataatagtttgttgtcattgtaataagattaggacaaacactttaccgtttggtaatggaaggaaaatgaaaagaaaaatgtttatatg

SEQ ID NO: 25141 - DNA, 422 bp, Glycine max
  modified_base (21)..(21): a, c, g, t, unknown, or other
ccacgcgtccgcccacgcgtncgaagacgacagaaggggaccgcgcgctcattctgagtattctgatcgctcggtgagagagctcgtcgcggaggttgctgaaaaagattgcatcgatgaagttcaacatcccgaattccaccactggattccaaaagaaagttgaaaaccgccgcgaaccttaactgtgaaccattttggaacaaaagattctcacagaaggacttcgaaaacgcactcggtgaggaattaacggactatgtcttcaaaattaccggaggtggtgacaaacaaggatttccagtgaatcagggagtgctgactcctgatcgtgttagacttttgcttcacaggggaactccttgcttccgtggatatggaaggcgtaatggagagcgtaagaaaaagtctgttcgtgggtg

SEQ ID NO: 25142 - DNA, 224 bp, Glycine max
cggaattcccggctcgacccacgcctccatatgcatgacaaaaaacgacttactgtcagtgtctatcaaaataaaaccaatgtgaacattgtaatttctgaaataacttaaataatatacatcatactatatcaaaatacctatgatccgcaatttatgaagacttctaattaaagcttataaattatactgccccatctgaccctgtttacaataaatcaaaa

SEQ ID NO: 25143 - DNA, 80 bp, Glycine max
ttcttctgcaagaagaccacatatgggtacgggtgctattagacgacagggggttactgctgctataagactacataagg

SEQ ID NO: 25144 - DNA, 354 bp, Glycine max
  modified_base (276)..(276): a, c, g, t, unknown, or other
acaatacaccatgatacttattatttgttctagagaagataaataaataaataaacaaatcattgtaagttgtaactaataataatgcactagtagtaactcattcatcattccgtttccagttcaagaacttgttctactcttttatcctacgcactcctaccttcttatcctgcgcatctttcaccgagatcctgcccttcgcatcttcactttccaccatttcagtgggaaagaatcatgagttgtttcagctgttgcgaagaagatgacctncacaaggctgctgaaagtggaagaccatacgtcgtaaaaaattcagcaggaaatgatggaaattatcttgcttctgaa

SEQ ID NO: 25145 - DNA, 329 bp, Glycine max
tatttgccctctctccatcactcttcctcttagcacttcggtacaactaagacctacggtttctactttttataaacacattttaatctctacaatctatacaccctcctcaccaatcacttcataaattcccaaccttttcatctataaccttatcccctttctctttataaaccctgttacaaccacattatacattactcaacctacctcatacactcacaacacctcttacccatttactattaacatcactcattatcctccccacaaactttaacaactcaacaccttctttcccacaatactcacctattcactacacccac

SEQ ID NO: 25146 - DNA, 368 bp, Glycine max
  modified_base (67)..(67): a, c, g, t, unknown, or other
ttggattctataatagataataataataagggaccgtgtagtttctggggaacagggactattttcntgtttgtagctctttgcttgtttgggatttggatgatgacatcgtcatctgttacgcccgtgcaaaatgtatatgtgtctcaagagaataacaatgaggtgaaggaacagagtgaggcgaatgaacatccaactgacccctctaataacaattctcagcagtttgaagataatcggggtgatctgtctgaggatgcaaccaaaggggatggtagtgtcaccccttctacaaactattacttgacagaaaaacatgacgagaaatcatacgaaaagtctcaagaaaaaccttctgaagattc

SEQ ID NO: 25147 - DNA, 341 bp, Glycine max
caccttcactgattcatagattatagtcaatagtagttatgaggttatccccatgcatctacaattctaaattgcaccctttttggaaaatggtccataaagttatcggcttctgatgaattttactgttgacctttttatatgttctttgtatatatccaaacttgtttatatttaagagatcaaaccatatctcatgcaattgatcttgtctgctcttgttctgtgcaattgatactctagatttagttctttgcaggaaatgtgcagccatacaagtttatcctccccccgacttggaaacaggctcgtgtagcaaatatattatctggaaattactg

SEQ ID NO: 25148 - DNA, 391 bp, Glycine max
gagtgggaagggaaaaatcgaagtgactattgcaggaggaagagttgtttgggaaaataatgaactgaaggttgctcctggtactggcagatatataaaaatgccaccctttagttatctgtttaacggaattgacaaaaaggatgccttttatctaaattccctccaagccccagtaaagcgagccaaatctaacacttaaaagtttctgatatcctttggtcaaagttcaacattttaaggagcgggggagacaaagatgtgtgttaatccagttttttgcttaaataaaatagtatatatatatatatacacacacatatgtatattacaatagataataggtatgcttcgtgttaccttttccactcatgtaatgttcattagttac

SEQ ID NO: 25149 - DNA, 480 bp, Glycine max
ccggtccggaattcccgggtcgaccgactcgtccgtccacacatccttacagatgtgataagcgtcttattgttcgctgataccattcgggtagcgtgatcttcctgtgctgtgaacctttcactctctctctaatttcacattcaaatgaataatattccttagagatattacgaaaccattgctcactccaatcctatgatttttgttgctaagaattctaagaaaccttgtctccattccgttgctttctatcaccaataccaacattctatcgagtatgtctgaagaaaaccaccgaatgttttcaatcacttccttacttggctacactcttaactccattgctctgaatattttatgcttacataaagacgaacgatactcttttaatcaccatttacgcattagatttgtttatagacacagattacctcgtcatctatatcacttattgccacaagaaagctaaattcttta

SEQ ID NO: 25150 - DNA, 301 bp, Glycine max
ggaattgccgggtcgacccactcgtacttccactcatccgtacgcgagaatactacattatgttgaagattaatctcctgggttgcgagagatacatgggaaggtgcgtaatttaatactatctgctcaagatcctgcaaatactcttgcaattgatgcctattaaaaaataatagattctcgatccgtctttctaagcaatgtagactattcatgcactcctgaagaaattcaacttcattctcagtctactgtaacacgaaacaaactcaccattcaaactgttaagattgtgcaacct

SEQ ID NO: 25151 - DNA, 262 bp, Glycine max
ggagaaaacgaaagagagaaagaagttgagacagagagagcagaagaaggatccacatcgttctcttcctctcttctgtcttcttctccttcaacattcccaaacccaaaaagccagccacattgcaatcgccgaaatttttccacttcacgaaacggcgagtcgttttggaatcctgagttttggtttttgctttcgtaggttttgattggggttaccgagcgaacaggtgttttaacagctacaaaataagtgatttatg

SEQ ID NO: 25152 - DNA, 394 bp, Glycine max
gtcctagctaccttaggatcatatgtatgtaagtcacctggtttggacctagtcatacataacttagtggtaacataaataacaaaaagaatactctaccaggacattattcactatattgagtgaaatggtacagaaaatggaaaattgtcccaaatttattttttaaaaaaatcaggaacatcatagcaaatatctaaaaatcattttttattttttgtaatttttggcgacttttaaaaatcatgaaaatagaaaaaaattgaaaaagtggtttaaatcatcgaattttgttgtattaattttttcccacattttgaccaattttcaggccatttgagctagttgtaggtgaaatgaccaaaatatccctgcatctaaaactcctacttat

SEQ ID NO: 25153 - DNA, 402 bp, Glycine max
gggcaattatgatatgtgattgccattagctttgacacaaggctgatcatcctacagacatttaaattatttttcccgtcgagtagtagtgatgttttacaacaaactagcccaccaaacaatactaaaataaaacaaaatgatttaagaaattattgaagcagtattagtgatgttaccagacctgcattcacaagtacactgacttcttgatccttccactacacgttgtgatcttctggtgtgaagcttgatgttcaccaccttgccagccatctgtagcaccataacatccagaaaacaataaccatgacatccaaaaagaggtcaaggaaacatcacaaaatataagatgcctactgaaccatcttcaaaatagttaagaaatgtcaagagaataaa

SEQ ID NO: 25154 - DNA, 358 bp, Glycine max
tgcacgtaccggtccgtaattccaggctcgacctacgcataacaccacacatccgcacaatcgttcgtcaattaaccgaacacgacagacttggggtaacatggttcaatgtgtataacactgtatttactatttatatgacatctagctactctataatcttactctcgaactagacattgtgattatcatcctaaactatttgcatcgaataatcactcaatatcataccatatactttgttctaattctccatcactcttcatatatttcacaccatcaattcttatctaaacctttggcttaacatccataatccaacatattctttatctcaatttcgaaatctctcttacta

SEQ ID NO: 25155 - DNA, 161 bp, Glycine max
cctcacattaccaagttctatcaatgacatcattggatttatgagaacacctcgacccaagggggaagtccctactaacccactaactatataacttgatcatatcgctacagattttaacatccgatgaaccatgatacactcttacaaatgacattcta

SEQ ID NO: 25156 - DNA, 362 bp, Glycine max
  modified_base (291)..(291): a, c, g, t, unknown, or other
agaagacgacagaagggaagccatggtggcaaaagatgcaaactcgtgaagagttggttgaagcttccgctaccctcatatggattgcttcagctcttcatgctgctgttaactttggacagtatccatatggaggtttaatcctgaataggccaactattagcaggagattcatgcctgagaaagggtctcctgaatatgatgcgttagctaagaaccctgagaaggagtttttgaagactattactggcaagaaagagaccctcattgaccttacaattatagaaattntatcaaggcactcatctgatgagttctaccttgggcagagagatggcggtgactactggacttctgatgcc

SEQ ID NO: 25157 - DNA, 358 bp, Glycine max
tggaacaacataatagagtttagctgaaatcatagtttcattaatattttgtatcatacatgggcaatcttagtaacacccccctttaatttgatgtgtgcctactgtgttttgatgcaattttctatcctttttcttttatctgttgctacactatataagttttccttttctttatccctttaagattatttaattaaaatttaaaaaaaatactgtggtcactgggtatgattccttcgctataaatgcatcggctaattaaattgcttatgctttgatatccttccccattgattgatgtggactggaatttgatagtatgagacctaggttcaaatttctttgtattcataga

SEQ ID NO: 25158 - DNA, 220 bp, Glycine max
attccacggctcgacccaagccttcggtccggttacaaaagacaacacaacgtggagagcaaacacaccatgattgagacgattaggatccacagacgactactacgtgcattatagaaacatcagaagatacattaagatcacattcatcatcatctactactatcttcaagtattacacttactcagtatcatcgtatgtctctcaatgactctatat

SEQ ID NO: 25159 - DNA, 404 bp, Glycine max
gactgttttcaatttctgcaaaaacccctcaacagtttctcctcactcgttgcttatcggcacttctccttcttcggaattcaccccttatcgaaataatttgttcttgtttccttccaaaaaaaaccctagctagcttccatggcgtccaagaagaagcactcagagggcatcgccttgttgtccatgtacaacgacgaggaagacgacgaaatggaggacgcagaagacgaagacgacgaagaagaaggtgatgcagggatgcggatggaagaagatgccgccggagatgcgagatttgcagcggaggaagattccgccaatagaacagccatcgttgattcccgcaacgagggcggcgctgatgaggggttcattccggcggagaagagtagggttgggac

SEQ ID NO: 25160 - DNA, 218 bp, Glycine max
agcagtctctacggtgtctcaacttgtaacagctccgcaacctcaggcaccacctatgcgagggatcttttccatgtgccaacatgcaaaactattctgattcaaacgggaacactgtgactactatagtttctaccctgaacagtatctagcgttcatttacccaggatgaaacatatgacctcctgaaccttcctagaacaagctcttggattcct

SEQ ID NO: 25161 - DNA, 246 bp, Glycine max
  modified_base (6)..(6): a, c, g, t, unknown, or other
accggnccggaattcccggatcgacccacgcgtacgaccgcttctaaaaaaccaccaaaagggatatcttcatcatacaaagcattgcattcaaaggctgaagttcattccttgggggttcctttcttcctcaaaaccaaacatgtcaaacacatgctgcaacttcaactgcacttactagactagctgcaccaaaggaaactgctattgtattattctaaacactgacaacagttacatccatac

SEQ ID NO: 25162 - DNA, 366 bp, Glycine max
accggaattgaattcccgggccgacccacccatccgttcggtgctacaacacaacagaatatgtatttttatcaaatcttctatttctccagcggggattaaaacactggttggtccctctcatcctcaaaccctaacatttccaacacattccgcaccttcaactgcgcttacttgacttgctgcaccaaaggaaacagctatatttttattgtatagactcacaacacttacatcaatactatcatcatctatgttccaccaactaagcattatttgaacttcaaatgtggcactaactacactttcacaaactttacctgttggcattaatcaatatctattaaaatctaatttacatgtttt

SEQ ID NO: 25163 - DNA, 455 bp, Glycine max
cggaattcccggctcgaccgacgcatacatacctgtgagaaaacaccacagagggcgcttgattcttttgcgaccactcatctcactggcgggctatacaaaaccggggaggtccttttcatttcttctctcgaatcttgaactcatcttttcttgaatcttgaaatcaaacttctctcgattcttgaatcttcttgatttcttctcatgaagcttgaaattaaactcgatcttgaacttgttgactcaatcttaaaattattctttggagctttttgtcatcatctttgtcatcattaaaactacttgaatcaacttgattcatcatcatgaagcttgcttctacattttcaactaggaaacataccatatcaatttcatgcacaagctcctcaaaaatgataatggacacaagaaatgataaaggaagtaacctccattaattgtatgattca

SEQ ID NO: 25164 - DNA, 202 bp, Glycine max
tgcttttctcaacacaataccatacccactaatacgaccttttttataaccctgctacctcttatttttacatcctctttcatcattcttaacaatctttcatcatactacataccaatacctaatccacctttctataattcttcactctactagccctacaaatacaatccttccttttattaaccaaaaccacccattt

SEQ ID NO: 25165 - DNA, 419 bp, Glycine max
  modified_base (120)..(120): a, c, g, t, unknown, or other
  modified_base (122)..(122): a, c, g, t, unknown, or other
gaatacccgggcggacccacgcgtccgcccacgcgtccgatgacagaagactacagatcgggcaccaagagggctttttaatggagggtacttttacaagggaagtggccaatatggctntnatagggattataacaaatcaaaaggaaatggtttctatctaccaaatccccaccaagagaggggacattcattgcatcatcaactaccgacaaatgggcacaatcttgcttagtcctgagtcaacaaaaaacataagccagacaatccaattttgggtccagatatttcaactctaaatattcaacttcactagattacaccaaatattgatatttttcatttcctaaattaacctagttcagaaaatattcaacctatattttcgttcctgaaaaattttattcaaccaacctttt

SEQ ID NO: 25166 - DNA, 153 bp, Glycine max
gaaactacagaagggtgatagagggacaggtcatcgcgtccaccgccttttagtagaagcggcaactccagaatgcaaaagactccaaaaaactgattgtggtggattttactgcttcctggtgtggtccatgccgtgttatggccttttttt

SEQ ID NO: 25167 - DNA, 438 bp, Glycine max
  modified_base (5)..(5): a, c, g, t, unknown, or other
gaatncccgggccgaccgacgcgtacggccagatgacaacagacggcgacgggtgatttttctagctatgggcgaattcaagcactgcggcattgttaagttcgcggagggcttctccttcaacgacctcacaaaatgaatctcaaagttggtcactaacattatctctttctaatcctttgaatgaggacaatacattgatagcctacatatcttcagacactgtttgactcatgcattcttgatcacattcaacacaaaagaacactattttgcatttcagagccaccccaatcatatccagttctcgacatacttttcggcaactattgagaatattgcgctactggatacaccatctactctcgtgacagccccatcctgatcctacacatattcatgcaatacagattacccttttaaatttaaataatgcat

SEQ ID NO: 25168 - DNA, 159 bp, Glycine max
  modified_base (158)..(158): a, c, g, t, unknown, or other
tcctgctgtgacagcagtgagctcgccgccagcgccagttcctgtgagttctccaccagcgcctgttccggtgagctctccccctgcactggcaccgacaactccggcacccgtggtagcacccagcgctgaggttcccgctcccgctcccaagtcgna

SEQ ID NO: 25169 - DNA, 329 bp, Glycine max
  modified_base (5)..(5): a, c, g, t, unknown, or other
  modified_base (12)..(13): a, c, g, t, unknown, or other
ccggnccggaanncccgggtcggcccacgcgtacgcccacgcgtccgaacacctgcgaagacgacccaaggcgactattccctcctacttcctttgggtgtttcgcttacgctttgtagggtcttttttttttctattgctctttccctgtgtcaaaagccgacaaaggaggtcaggtgcttgtgaccacaaaaacctccgcatcgaacaaggacacagacagggataagaaaaggcctacctctcattcatccccagctgcgatccactttccagaatgtcctgaccataaacagtcgaaccaacgggtgcacagcaataaacctttg

SEQ ID NO: 25170 - DNA, 459 bp, Glycine max
gagattgtcaggagctggagccctctattggagagcagctggtatccttgcttggtcttgagccagatagtgaacttatggtatattctcctttgagtcatcatcttgctttgtgaataaaaactgataagcaataatcatgatgtacaaatgggaaaaaaccaaattgttctgttatgttactgtgagaaattgagtgactctggaatctggattgatatggtaattgttttacttgatataaaatggaactttcttgctaagaaattttatacatgattattggttggtctcaacaaacttatgtagttgaaagtccctgaaaagacacagatatcatcattaagcttggttctaagatgttacaatagtcacatgttgtctgagctgtcaaccttcagtattgaactgagatgttttaagaattggattaatcccaactctcttgtttttacaggc

SEQ ID NO: 25171 - DNA, 290 bp, Glycine max
  modified_base (19)..(19): a, c, g, t, unknown, or other
acttgttcaaacactccanaacctacatttacttacaaattcaataaaactacaaggtcggcattctttataaataaaattttactcttaaaatcttttttttttacacaaaaaaatcattccttctctacatactaataattatattaaattactacaaacaactcacacatttattcaacttcaaacaatcaaccatacatcatttaccacaaacctcttctattccaaacattaatactttcaatataatctaataaatattaaaatgcattttccaaatttctttt

SEQ ID NO: 25172 - DNA, 331 bp, Glycine max
atattggactttttagaaatagaaaagcattttgcataaatttgaaatccattggcataggattttttcagatttcttttttttttttctaaacttacgatagggatgaaaatatgtaatttagatctttaaaaaaaaatccatatgttcggaatagacctaaaatggaatagatgtatctagggattagtcgtttcaaaaagaattctccctagatacacaatacacatggcattctatttttttttatttcaaaatggaatcaattttataagtttaaaaaagacctaaagttagggatttctcaataggtaatggtgctccaatacct

SEQ ID NO: 25173 - DNA, 268 bp, Glycine max
ccacgcgtagaagcacacgtacgggcagttgctagaagacgatagatgggtggacgccaggtgccatgtctataccatgctataccagacaattgtactgatgcgagagagatatgtctgtactgacttgttcactgtctagaactttgtggcgttgaacgtttcttaattgccttctggactattcttggactactaatggatatattcattccacatacagttattatgcccacattatagctcagtaccttgctcaagacactgt

SEQ ID NO: 25174 - DNA, 338 bp, Glycine max
agaagcacaaagagaagcattagcactaggagcagcaacaactagtctcagctgaaatggcctcttcagtgatggcatctgtggccctcaaacctgcccctttcactgttgagaagtcctcagtgagaggccttccctctctctcaaggaactcttcttcattcagagttgtggccagtggcaagaagatcaagactgacaaaccttatggaattaatggtggcatggctttgagggatggaactgatgcatctggcaagaaaggaaagggaaagggtgtttaccagtttgtagacaaatacggtgctaatgtcgatggttacagtcctatctacgac

SEQ ID NO: 25175 - DNA, 306 bp, Glycine max
gagaggaatcagaatcgcgtttgggagaagaagagcaaaatcgctgtgaaaatgagcggaacggtgaagaaagttagcgatgtagcattcaaggtgggaaggaacatcgattgggatggaatggcgaagcttctggtctccgatgaggctcgcagggagttctccaatctccgtcgcgctttcgacgaggttaactcccaactccaaaccaagtttagccaggaacctgagcccattgattgggattactatagaaagggaattggcactcggttggtggatatgtacacagagcattatgagagc

SEQ ID NO: 25176 - DNA, 383 bp, Glycine max
aatccggagaccattgagtgcaaaactttcgaaggctgagaaagcgcttcttacgtgcatgatgatctccacatgtctgtctgtcaactaaaacactattgcgtttcatgatatatcaaattgtgaacatgctatgtgttaatgtttctttaaagcataatccatagccccttatgtttaatcaaaccaaaattatgccctagtttttttttttttgtgaatgctaaatcaaattaaggaaacaaatatcgattgcgtgaaagtgtagatctttacaggtgcaccgtgcaccgcgattactgcacttttgcgtgatctgttctttattatgcaaaaaaaaatatatactgtttaaaaaaaaagcggccgctctagaggatcca

SEQ ID NO: 25177 - DNA, 450 bp, Glycine max
cggtccggaattcccgggtcgacagccagccggcctcgttgccgccgacgatcccgtagacggccagcatcagcgacccggtcacggtgatcgcgcccgcgacgtcgagccgcgcggcgccggccggcgcgcgcatgcgcggcagcagcgcggcgcacatcgcgtagaccgcgatgccgatcggcaggttgacgaggaagatccagtgccacgacagcgagctcgtcagcagcccgccgagcagcacgccgatgctgtcgccgcctgtgcagacgaaaccgtatacgcccatcgcgcgcgcccgttcgccgggttcggtgaacaggttcatgatcagcgacagcgagacggtcgacacgaccgcgccgtcgagcccctgtaccgcgcgcgcggcgatcagcatcgtctgcgattgtgcgaggccgcatgccaacgacacgagcgtgaaca

SEQ ID NO: 25178 - DNA, 340 bp, Glycine max
tccggaattcccgggtcgacaggcagcctgcctcgttttcgacgacgataccgtagacggccagcattaacgacccggttacggtgatctcgggggggatgtcaatccccgcggggcctgtccgcgcgcgcatttgcagcagcagcgctgcgcacattgcttagaacgcgatgccgatcggcaagttgacgaggaagatccagtgccacaacagctagctcttgaacagccccccaagcagtacgccgatactttcggcgcctgtgcatacgaaaccgtatacgcccatcgggcgcgcccgtttgcccggttttgggaacaagtttatgatcagcgacag

SEQ ID NO: 25179 - DNA, 187 bp, Glycine max
agatgtcagaacactacataacgacacatctaataacattccacatagcggtatttgggacatagtgcatcaccttcatacttacattcattatcccatgtttaaactaaacaaatatatattattccactaatcattatacctttcctctataatactacatctaattctatttctcactatattt

SEQ ID NO: 25180 - DNA, 348 bp, Glycine max
gacaagtgagtttgttgatcgagataactagaaacagtgtgatgaaaatgaaggtccttgttttcttcgttgctacaattttggtagcatggcaatgccatgcgtacgatatgttccctctccgaatgaacactggctatggtgcccgtactccggaggtgaaatgcgcaagttggaggcttgctgtggaagcacacaacatctttggctttgagaccattcctgaagagtgcgttgaagcaacaaaggaatacatccatggcgaacaatatagatcagactccaaaacagttaaccaacaagcttacttttatgccagagacctcgaagtccatcccaaggacacat

SEQ ID NO: 25181 - DNA, 418 bp, Glycine max
agaagacgacagaaggggaaaccaaatcgaatcacttgttagttcaacatggctggcagtggcacctttgcagagatcatagatggtgatgtgttcaagtactatgcacaaggccattggaacaagtcctcttctggaaaattcgttcccatcatcaatccaaccactaggaagacccacttcaaggtccaagcttgtacacagaaagaggttaatagggtcatggaatcagcaaaaacagctcaaaaatcatgggccaagactccactgtggaaaagagcagagttgcttcacaaggctgcagcaatactgaaggagcacaaagcacctattgctgagtgtcttgtaaaggagattgcaaagccagctaaggatgctgtcactgaggtgatcagatcaggggatttggtgtcatatt

SEQ ID NO: 25182 - DNA, 315 bp, Glycine max
aggcgtgcgatgacagcagacggcggaaggcactagtgcccatcctacactttatacttcaatgtactgcgtggcagcatgtaacatcaacaatcccgagggctcttggacatcatcttctggactaccacacatggatggccataacattaatgcataccatcatcaccccatccacgtggctaaatgtaactagcatgccccttatctagataccgatataacatcgaacattcggaacatgctcaaccggactgaaagcagctcacagcatgccagtccacctagctcgacctgcatctgcatcataacaag

SEQ ID NO: 25183 - DNA, 301 bp, Glycine max
atcgatttgcattatcgacatatactgatacactcagaggatcatccttccagggtgaaccactaccttctcctatacttatctctccttacttcaacactcattatatacttcactcatgccattcctttcaataaacaattgtacacgctcatctccatcactataacattaatttcaccaacatcacttcctacaactctatataaaccggttattattctctttataacattctccatcttacctaataattgtactttcattaatccaattcttccttatgtcctatcttcttatc

SEQ ID NO: 25184 - DNA, 165 bp, Glycine max
tgtatacatgattttgatgatgtcaaagaagaatctaacaaggctgcttcaaatgataagcatttgcttcaagaataattcaagattgtttcaacaaacaaagccttgttttaagattcactaaagaccaagccttgccttaaaacaaagtactttcaagacatg

SEQ ID NO: 25185 - DNA, 427 bp, Glycine max
gaagacgacagaagggggcgctagttctgagtattctgatcgctccctgagagagctcgtcgcggcggttgcagaagaagattgcaagatgaagttcaacatcgcgaatcccaccactggatgccagaagaagctcgagatcgacgacgatctgaaactgcgagcattttgggacaagaggatctcacaggaggtcatcggagatgcactcggcgaggaatttaagggctatgtcttcaaaattaccggaggttgtgacaaacaaggatttccaatgaagcagggagtgctgactcctggtcgtgttagacttttgcttcacaggggaactccttgcttccgtggatatggaaggcgtaatggagagcgtaagagaaagtctgttcgtgggtgcattgtcagcccagacctctctgttttgaacttg

SEQ ID NO: 25186 - DNA, 355 bp, Glycine max
ggtgctctgctcgtgcctctagggttatcatttctccatttccattttctctctcacttttcaagaatcgtaagctatgggaaagtcttacccaactgtgagtgctgattaccagaaggccgttgagaaggcgaagaagaagctcagaggcttcatcgctgagaagagatgcgctcctctaatgctccgtttggcatggcactctgctggaacctttgacaagggcacgaagaccggtggacccttcggaaccatcaagcaccctgccgaactggctcacagcgctaacaacggtcttgacatcgctgttaggcttttggagccactcaaggcggagttccctattttgagctac

SEQ ID NO: 25187 - DNA, 219 bp, Glycine max
tgtacacaccctttatctgctcatttaatctctgcttttgttttttttactcgcatctttaccgctacactttccatctccctatcaccctctcctttctctttctttcctttctttctttccacgttctccatcttttcccttcaatctctaaatctgtggcttcctttaaggttcctatttaaagctttactttacctttaccccaaaaaaacttat

SEQ ID NO: 25188 - DNA, 380 bp, Glycine max
  modified_base (6)..(7): a, c, g, t, unknown, or other
  modified_base (26)..(26): a, c, g, t, unknown, or other
  modified_base (79)..(79): a, c, g, t, unknown, or other
  modified_base (162)..(162): a, c, g, t, unknown, or other
  modified_base (213)..(213): a, c, g, t, unknown, or other
  modified_base (318)..(318): a, c, g, t, unknown, or other
  modified_base (321)..(322): a, c, g, t, unknown, or other
  modified_base (325)..(325): a, c, g, t, unknown, or other
  modified_base (330)..(332): a, c, g, t, unknown, or other
  modified_base (346)..(346): a, c, g, t, unknown, or other
  modified_base (366)..(366): a, c, g, t, unknown, or other
cggaanncccggggcgacccacgcgnccgcccacgcgcgcgaacaccacgagaagacgacagagggggcgagacaacanaaagaggcgagacccaaggcgagggcggaggaaacggcccacccaaaccccgaacaagacgacgccgagacccgagacgcgcncagacgaaccacaaaggaggaaagaacgggaccgaaacacacacagccaangccaaacaagccgagagcaccaaggacaccgccaccaagacaacaaaacccgccagaaaggcgaaagccgcgaaagaaccgaacaagccaaaacggcccccaagngcnnacnacaannncagggaagccaagnaaagaagcaacacaacgagncacaagacaaccga

SEQ ID NO: 25189 - DNA, 443 bp, Glycine max
ttaagacgcataaggagattcttacagataaagcatttatgatcacagagaaactgtttaaaagattgcccgctacttcctcaatcactcttattcttcctcaactacatctacaacaacataatcatgaaccaattcttgttgctaccaactacatcatccctgaatcctatgcaataccagctccaaaaccaatcctcaaaaatgccctcaagcgctacaaccctactcaacccgacacccaatctgcagcacctaacaaaagctagaagttcaaaaccacaactgatgcttctgaagcacaagttattgatgccatgcacaatataactttacacattagaaaccctgcaaaattcatcaaggcttcaaagcttgctatacagctgattcacgcaagaaatgtaaaatcacaaattagtgattaatttttttgccatatt

SEQ ID NO: 25190 - DNA, 373 bp, Glycine max
ggagtctttatgctttctttcaatatcgagaatccattttgtaagtacaatgtttttcctaatgatatgatcgaggcttcacaccagtaatgtggacttatcatttactaaaagaattaggattccagacaaggagaaattaccaccatatacatcttgtgtaacacccaatttttgcgtaatataaattaaaaaagattctatttaaaaataaatagagttttaggaaaataatgagattttcgtaattaaataaataagaaaaaataattttattaattaaaataatgattttaaagtaaataaaataattatatgttcttataaaataaaatgaatatttaatctattcatttgattgggagtaaaatat

SEQ ID NO: 25191 - DNA, 324 bp, Glycine max
  modified_base (14)..(14): a, c, g, t, unknown, or other
  modified_base (26)..(26): a, c, g, t, unknown, or other
  modified_base (120)..(120): a, c, g, t, unknown, or other
  modified_base (148)..(148): a, c, g, t, unknown, or other
  modified_base (175)..(175): a, c, g, t, unknown, or other
  modified_base (205)..(205): a, c, g, t, unknown, or other
  modified_base (228)..(228): a, c, g, t, unknown, or other
cggaagacccgggncgacccacgcgnccggacgggagaagacaaacgacgggaggcggaaggagggagggaaccaagcagcaggaggggggggcggcgaaggaagagggaagggaccaanagaagacacaggcagggaggaggcacanaggaaaacagacacgaacgagggacanggcgcaagacacaaaggccaggagccaaanacaggcaaggaggaccgacccanagccagggcgaccgaaacaaaagagggggagaaggacacaggaggaaaccagagcagaaaaggagaacgaagacgaccacgcaagcgacaccagag

SEQ ID NO: 25192 - DNA, 128 bp, Glycine max
aggtctggttctatgttgcataaagggtgcaagaggtacagaatcatggtgagtggaaatggtttggtttaccccgttgtggggtttgcatcgatcgtgttgttcatttacatgtcttttggggatgt

SEQ ID NO: 25193 - DNA, 203 bp, Glycine max
ggtatgtgattgttgtgactcgttcttcttcgtcgttatcttcttcttttgttgtttgtgtgtttgttttttctctcacctgaaaatgtcttgctgcggtggtaactgtggttgctgaagcgcctgctagtgcggcaacggctgcggaggctgcaagatgtacccagacttgagctacaccgagtcaaccaccaccgagacct

SEQ ID NO: 25194 - DNA, 372 bp, Glycine max
ggggttatcaccctggggggtctggataggaggaactaaatgggttacaggaaaaagcgtagttagacataacaataagtggggagcatttttttttttctaaaaaactttaagaagaatcttaaaatgtaggtttgacctatctcaacctttaaaaatcagtttgtaaggtgaggattgctcctcacttggatactctattttgacactatctttaaccaatgtgggactttaacacacccactttttgcctatgggtacctgccaatgtgggacttcagcacacccctttttgcccacaggtacctgccacaactaaggtgggctaaggatgaccacaattaaagtggcttttcaacacttcccacatgc

SEQ ID NO: 25195 - DNA, 439 bp, Glycine max
aattaccgggtcggcccactcgttcttacacgcgttcgaacacctccgacaagactttttaatgtataatagggttcctcctcctttgatgctacccctacatcgggtccttctgaaactttaaattccagcagaatgacactttcacaacatgctctgacattctctccaaatattcgacggcttcagttttaattccaaatactgcaattcttacttctgaatttcaatgatgattaatactgcatacgaacatcctgatggatgaaccaaattcaaaagtttttttgatagattatctctatgctgttggctctacaattattacttccacattaagaacttgacaactctctttagttcatgcatgcaacctttcactatggcatattaactttacaccattctctaatactttaaattactttaaacacttact

SEQ ID NO: 25196 - DNA, 392 bp, Glycine max
accgttcttgaattcccgggtcgaccgacgcgtccgcggacgcgtgggagacgacagaaggggatgttttgaaggatgaggaaaggcgtcaacggggggatcagcttggtcatgaggcttatgtaaaccatcaaagcactggttttggaggcgagggtggcttcaatccttttgagcagatattccgtgatcatgatttagtcaagagcttcttccatgagaatattgatggagaggatgtcaagacttttattgaactatcttttatggaagcagtacaagggtgcaccaaaactttgacatttcaaacggatgtgctttggaatgctcgtggtggcaatggtgttcctcctggaactatgcctgaaacttgtaagccgtgttaagggttc

SEQ ID NO: 25197 - DNA, 192 bp, Glycine max
acggttgagacaacacaacgggatgatacattctcactcaaattctctgcatcagggtgggggcaccaatattgctgagaagcgtcttcaataggtgcttctcctaatacaaaaccttagagtccaatttgtcgcttcggctgaaccgataatcttgagtcgaactatgccaaaactccaggaggttccttg

SEQ ID NO: 25198 - DNA, 453 bp, Glycine max
tccgcccacgcgtccggacagaaggggggtgatgttccttgtttttgtttctggtcagttttgtgatgacatcagctaagtggcggcgaatttttggttgggtgcacaaagagaagaggctggatagtttctctttctctctccatggatcttcaggatttccttatccgtgctcgggtcttgaggctttacagacaagcattgagaattgctggtcgagccccttcttccgctaaaggtgaatattcttaaattatctgggtcattcctttatccaaatcaacagtcttgtgatgctatatacaattatacatttatacatgtatgtaagttttatatatgacattgctcggtgtaatggactgtacagctgaactgaggcagacaattaggcaagagatggaaaataatagaaactgcaatgacaagcaaaggatccgtttcttgattagt

SEQ ID NO: 25199 - DNA, 422 bp, Glycine max
  modified_base (71)..(71): a, c, g, t, unknown, or other
ggcagtgaatacaagccaaaagaacaacatggacattgatgtttctcctcaggggcgcgggaaagtttacngtgccaatggtggctcctactacgcatggtccccctccgaccttcccatgctccaccaaggcaacattggtgccgctaagcttgctctcaacaaaaacgcctttgctcttcctcgttactctgactcttccaaagtcgcttatgttcttcaaggtagtggagtggctggaatagtgttgcctgaatcagaagagaaggttgttgcaataaagaagggtgatgccttggcactcccctttggtgttgtgacctggtggtataacaaggaagaaactgagttggttgttctgttccttggggacacttccaaggctcacaaggctggtgaattcactgacttttttctgactg

SEQ ID NO: 25200 - DNA, 53 bp, Glycine max
tactgctgcggggggacgacataagggtgcgggtgcgagaaaaccacagaagg

SEQ ID NO: 25201 - DNA, 153 bp, Glycine max
gtgtgctgatggagcgataggcttttatagaggctttgggatttctatattgacttatgcgccttccaatgcggtttggtggacttcttattccatggttcatagactcatttggggtgcttttggttcttacatgggaaataacaatggtgg

SEQ ID NO: 25202 - DNA, 143 bp, Glycine max
ttcctaccggttccaaaagacaaccaaaaggttccggttccaaaagaacaccaaaaggttccggtggggaaaaaacaacggaggggtccggttccaaaaaaacaacaaaagggtccggttgcaaaaaaacaacaaaagggact

SEQ ID NO: 25203 - DNA, 206 bp, Glycine max
tccaatgacaaacaccacctttagcacaaaccaaaaacaccaaccaagaagtgaattttgcagcgagaaagcctgtaaaattcaccccaattccagtgtcctatgctgatttgcttccatatctacttgataattcaatggtagccataaccctagccaaggttcatcaacctccacttttctgaggatacgactcgaacgcaacg

SEQ ID NO: 25204 - DNA, 335 bp, Glycine max
  modified_base (68)..(68): a, c, g, t, unknown, or other
aggggaatcaaacacaacacttcactctcaatcttcgggctttttttcaaattacttcctcctatacncctccatccttttcctctccattaacttctttatccaaacaataattttcaaaaaccttccttcatcaccattttttttttctataatcttaaacctacaccaactcaatcaacctctccacctcacattccataccttatcacaaaaatatgtccctatattcttccttctattctacttcccatttttcctcttcatttcctcttctctctctgttcaataattcttcaccaataacttcattcttttttaccaaccttccttac

SEQ ID NO: 25205 - DNA, 160 bp, Glycine max
acatactataatgcgctctatctctttctttcgagcgggttactaacccttgccgtgcttataactacatacttcctaagtctcaccattccttttatcatcaataccttcttcttcttcaacttactatcttcaacaaacaccctttttctaccaaaca

SEQ ID NO: 25206 - DNA, 277 bp, Glycine max
gacgaacacaatgtgcttgatgatttctagaaggtaaaaagaagggtgggggcaaccttaagcaagaagtagcgaatcagattgacatggggtcgtttggtccgacaagcatgtccactgttgctaaagctgtagacgaaatcacctgcactggcaacaccaagatccgcaaatattccagcgagctctgcacctacctcggcatcactcgccaatcttgttccgaaatcgctctcattctctacaagttcatcaaactctataatttcaagagtcc

SEQ ID NO: 25207 - DNA, 282 bp, Glycine max
tccggtcctgaattcccgggtcgaccgactcgtcctatatgtcgacatgaaggtgtacattaatgcacttgccctcaggtccttggtctatgccgaaggtatgatagagaaggcattcttgtggggtaagttctctttggaaatgtctgctgtcatttacaatgattgggttttcacctatcaagcattgcctaatgatcttgtcaagagaggtgttgcttgttatgatccatcttcttcccatagaattctacttctgatcaagtactatccttattcttc

SEQ ID NO: 25208 - DNA, 397 bp, Glycine max
gtaccggacctgaattcccggctcgaccgacgcgtccggccacgcgatcgcattagtgtatgcgagctatatgaatacaagtagagctaactagggaagagataatacagacggaggctgcactaagactgactgcacgcacctcgcatgcatcctcactcattgcttcttattcatttcattgatcgtgcttcaaacaaactcactcactcacatgcaaacactcgctatccatttccttctgatggaggaaagaaagaacgtcactcaacatctatcattattcatccaccaagctggctcacatacaaccagctcactgacatacaatataccacagatacgtattccatgaatcatgcacatgccacatactcaattcattcacaagccatct

SEQ ID NO: 25209 - DNA, 494 bp, Glycine max
  modified_base (429)..(429): a, c, g, t, unknown, or other
accggtcctgaattcccgggtcggccgacgcgtacgctcttcttctcttgcggctagggttttagcgcagcttcttctagatttaaggaagatggagaaggaaaaggttcacatgggtattgtggtcattggccatgtcgactctgggaaatccactaccactggtcacctgatttacaagcttggaggcattgacaagcgtgttattgagaggtttgagaaggaagctgctgagatgaacaagaggtctttcaagtatgcctgggtgctggacaaacttaaggctgagcgtgaaagaggaatcaccattgatattgctttgtggaagtttgaaacaacaaagtattattgcacagttattgatgcgcctggacatagggatttcattaagaatatgattactgggacatcccaagctgactgtgctgntcttatcattgattccaccactggtggttttgaagctggtatttccaaggatggacagactcgtg

SEQ ID NO: 25210 - DNA, 419 bp, Glycine max
aattcccgtgtcgaccgcgcgcgtcgcgtccacgcgtccgcccacgcgtccgaaggtgtcacaaacacttgtgaagtctgcgaacgtaggtctgcttgattctttccggttggggtctcttggttgcaagattgttggaacatctaagaacttccagaagaggaagaaacagtcaatgttaatgtcatcagattctgaggactcatacagcagcaacagcgtccatggccttaagaacaacttcaaagttcagagcttcacaccattcacaccaccctcaacatcagctaattacagaactgccaagagatgaaagggtataccacactcgtcctcaatggttggactaatcatagaatattacatacgttggaattttaggctattggctacaatgcccttaggtataacaataccat

SEQ ID NO: 25211 - DNA, 220 bp, Glycine max
agttaatcactcccttcagtggatgtcttgctgggtgtggatgaatgatttgcgtgtttcatgactactactactactactccattcaatgtctaatgccatctcatcaatacctaaactgttcgtttttttttttctccctatactcacaatttattgtttggctatgcaatgttactgtgttgatgcaatggaaattttatcagaattttgtcccaaa

SEQ ID NO: 25212 - DNA, 249 bp, Glycine max
agacggatggagagagagagagtgaaatgttttgcttcctctaatcttgctaatcattcgttctatcaaattttgcctaaaactcctattccctgttttagttaactcgattaacgtcaatctcaatcttctacagcttatcctatatctctcttttttcttctctttcctctactacaatttcaatcataactctctatcatctgataagcatatgatgatccttctgctggtttgatttactatcat

SEQ ID NO: 25213 - DNA, 271 bp, Glycine max
attcccttgtcgaccgactcgtccggcttgtaaagatatataaactactacctcttctcttaatcctctaattcaaacttacatagatggttttcaaactggggctgtgtacaatcttccacataaatctcatttttataataataaataatctcctattcctatcttaaaatctccaaccctatctccacatttacaattcaatatcctactaattcaatattctatcaaaccctttactgatcttctatattctccttatcctactatt

SEQ ID NO: 25214 - DNA, 436 bp, Glycine max
accggtccggaattcccggtcgagcccacgcgtccgcccacgcgtccgatttccgttggaaagttggttactttgtttggatcggtctctcacattggcctgctaataacgcctggtattctctccatctctaaacattcgcatcatatcataccataagtgtgttcagtttcttcaaccgtttgccttgaattgttcatatcatcctgggaagaaggtcaaagtttttatctgtttcaactttcagcaatcggtttctccttttgaagctgattgagtttggtggatgatggctaacactaaaatttcatcttctgagtggcgtaagctctctccgagtgttaccacggccttggcgtcggcttttcttgaatggttgctgattcttttcctgtttattgatgcttgcttttcttatgttataacaaagtttgct

SEQ ID NO: 25215 - DNA, 488 bp, Glycine max
gtcctgaattcccgggtcggccgacgcgtccgcccacgcgtccgatttccgttggaaagttggttactttgtttggatcggtctctcacattgtcgggctaataacgcctgatagtctctccatctctaaacattcgcatcatatcataccataagtgtgttcagtttcttcaaccgtttgccttgaattgttcatatcatcctgggaagaaggtcaaagtttttatctgtttcaactttcagcaatcggtttctccttttgaagctgattgagtttggtggatgatggctaacactaaaatttcatcttctgagtggcgtaagctctctccgagtgttaccacggccttggcgtcggcttttcttgaatggttgctgattcttttcctgtttattgatgctgatttttcttatgttataacaaagtttgctggttactgcaaattgcaaataccgtgcctgttatgctcaaagcttgatcatgtgtt

SEQ ID NO: 25216 - DNA, 285 bp, Glycine max
ggggtgcgataacgagcgcggtgatagcagttgtaggagttcttctaggttggatcacaatagagatcgcatgtaaaccttgtcttgaaaagggtcgcgaagccatcgatcgaagtctcgatccagattacgatcccgacgacaccgtcattcgcgccccactcaaccccaccggcgtctccgacaccgtcaaagccgtttgagaaattgatgtgccatcttctcacgtttccgcctggtattcaattcggtgtctaaatcaaaaggctatttgttttctttttt

SEQ ID NO: 25217 - DNA, 88 bp, Glycine max
gacaacaacaaagggcttctgaattatcgtgttttgatcagaatctgaggagaaaatcacataatttcgaatttgagttttcgtgtag

SEQ ID NO: 25218 - DNA, 245 bp, Glycine max
ggggtgcgataactagcgcggtgatagcaattgcaagaattcttactaggctgaatcacagtctacatcgcatgttaaccttgtcttgaaaaaggtctcgaaaccatcgatcgacaacttcatccagattacgatccctacgacaccgccattcgtgccccacttaaccaaaccggcgtcttcgtcaccgtcaaagccgttcgagaaattgacgtcccatcttttcacgtttacgactggtattc

SEQ ID NO: 25219 - DNA, 157 bp, Glycine max
gagacctcaggtcaggcggggctacccgctgagtttaagcataccaaaaaaaaaaaaaaaaaaaaaaaaaaacaagcggtctatataaacgatccaagcttacgcacgcatgcaagcgacgacatatcttatatatagagctacctaaaatcaattg

SEQ ID NO: 25220 - DNA, 550 bp, Glycine max
  modified_base (272)..(272): a, c, g, t, unknown, or other
gtaccgcgtccggaattctccgtggtcgactccacgtcgtctcgtaccggtctgtcgagaaagaccgaccagaaggggacctgtcatcatcggacatatctcgctctccatcttgtagagcattcgcacttggtcggatggaaggtgcgaaggggacgccccatttatctagcagccatcttcatgatagttcgtgtgtctcttattatggactcctgtgcattcctgggcatattcccacacttctgtttttacctgcatctatataacanatctctgcatatcttaaaatcacactcacatggaagaatatcagcaccacgttcatcgctcatcaccttagaatcacaaccaggaattgcacatgaagatccttttgcaccagccatctgtggatgatttgcttcagattcaatcaccttatccatgagatgggctcgagtgacactgttgaatccacctgtgaaaagtgaatttgacacatattgttcctcaactttctgtgagattgatggatccatacgttggttatcaggggtaggtggtatat

SEQ ID NO: 25221 - DNA, 443 bp, Glycine max
gcgagaagacgaccgacgggagctctcggctggtagaagcctatatcacacatggattagggttatgaaaagatgaagcatgatggccctcatccagacatatctacatacaatattttgatctccagctttggcagggctgtacgagtagacattgctgttcaaaattctgaagaactagagaatagcgactgtaagcctgacattatttcctatataactctatgatcaatcgccttggaaagaatggggatgttgatgaaactcacatgagatctaaagagatgcactagataggattaattccggatgtcgtgacttatagtacacttattgagtgttttggcaagactgataaagttgagatggcctgtaagttgtttgatgaaatgcttgctgaagaatgcactcctaacttgatcacatataatatcttgcttgac

SEQ ID NO: 25222 - DNA, 72 bp, Glycine max
gagtctactcaaccacatattttgtcattgactgttgttaacacttaacaggatgcatattattgcttcttc

SEQ ID NO: 25223 - DNA, 436 bp, Glycine max
ggaatcgccgggtcgacaccacgcgtccgggggagttttgcggggcggtttattgtcaaatggccgccagtataaacacggctgctttgacaaaatacttgggagggcgcgtcgacgctcttacccgcaacactcccttaaccctggcttccaactttatgattcgccgcttatgtgaacacgttacgggttgatgcctggacaaggatgaagtcacagatcgcgtcatttgctgcgtcaaaaacttacagaaaggtgctccttcaaagggtaaccctactgctcacttccagaatgaccttggattggagagtttaaaatcggcagagaacgtcatggctcttgacgaggagtttgtgttcgacattactgataatgacgcagacaagatcaactgcattaaacttgcagtggacttcattgcatcttatcctca

SEQ ID NO: 25224 - DNA, 286 bp, Glycine max
acgtgtgagaacaaatcagaaaaggcttctttttttcttttataaaccccgccttctttgacattctctttcatcttcaacccatcatccatcccattctaaaactgattcctgcctatgcttttgtctataccttcatttacattgctacctactattcctttctatccaaaaattcctgaacctagaacccccaaaaccaccctcccctcaaaaaatgatacctgttactacgcacacccactcaactcccccatatcaaaataaatctcatgtacacccaatc

SEQ ID NO: 25225 - DNA, 367 bp, Glycine max
tacggtgcattggcttaccttttgatacacttcttattgtcaatcaatatgaggtatgggaagtagccttgactgcattggaggcatatcaatcttatgtctgattcatataatatcacacatataatatggaatattatattaatctagtttatctatttatgaactttataatatggatctcatatgaacctaatatttgcatcaaattagatcaaacgctcttcttagaaacctgactgaatgctattatacgttccagcattataaaaacattcatcttttcaagttgatctaacttagattgattcggaacgcaattgatcctatcaaggaaatattcatggttaaacatagtcaacataat

SEQ ID NO: 25226 - DNA, 88 bp, Glycine max
aactggagcgggcggtctacaggatgcaagcttacgtgctcgtgcatgcgacgtcgtaactggtctatggtgtcacctacattgactt

SEQ ID NO: 25227 - DNA, 298 bp, Glycine max
acgcgcagacggctgccaagacgacagattgagaggtgctagtgccaatggagctacacgcactatttgacattattatacagcacagaatgaacataatgtcttagtctgaatgatggaccatcgtgaagctatcatattccacttaacttgaactatcctaattatggcgtaccatactctagcactcaatgtccataatgatgacacgcttgattttggcacttccgcgatgcaaatgttgatacagactatatttgcccatttgatacaactcagctcatggtgaaacttacta

SEQ ID NO: 25228 - DNA, 427 bp, Glycine max
gatgatacaagagggaagttcagtaaaagggacagggagaattgctcagatacctgtaagtgaggcttatttgggtcgtgttataaatgccctggctaaaccaattgatggtcgaggagaaatttcagcttcggaatctcgattaatcgaatctactgctaccggtattattttgagacgttccgtatatgagcctctccaaacaggacttattgctattgattcgatgatccccataggacgtggccaacgagaattaattattggagacagacaaacgggtaaaacagcagtagccacagatactattctcaatcaacatggacaaaatgtaatatgtgtttatgtagctattggtcaaaaagcatcttctgtggctcaagtggtgaataccttacaagaaagatgagcaatggaatacactatt

SEQ ID NO: 25229 - DNA, 294 bp, Glycine max
  modified_base (167)..(167): a, c, g, t, unknown, or other
  modified_base (242)..(242): a, c, g, t, unknown, or other
gaaagggctaagagtaaggaagaggaagatgggttggtcttccgcaacagcatgtgcgtcgctctcctcttcgactccgctgcctcgacttccaccgtctcgcactggcactcccattcctggttcgctttcattttcatggctttcttcatttcccactttaactntaagtgcttctcgttctcgctcctccggaataaaccctgccaatccctcacgttccgatgtaagtgtaactgctntccttcctttatctgtttaattatcgcttctaattcactttagtctgtctga

SEQ ID NO: 25230 - DNA, 335 bp, Glycine max
actacagaatggcatctccattccttctaatggcttcaatctctcacttcataacctcgtctaagtcctacctctcccaatacgaacctctctctctgcttctcgctcctctcctctctctcctcttcgctcacgctctccgctccttcttccaccttctctcccagaacggactcaaagccactctcctattttttatcattaactccctcaaattagtccctggctttaaaggatacatatatgcctaaaaacaaaatgatgtggataagttgcaatctgatggtaaatctaaaagagaaggttggaaaacttaatttccaagcacaagatta

SEQ ID NO: 25231 - DNA, 340 bp, Glycine max
cattggtgccacaaattgaggaatttggctcctccctcggtatcattggcttacttgacaaatttgaaagtagagtattgtaaaggattaaggaatttaatggcattctgaacggcaaaaagcttggttcaacttaagtccatgaagataagctaatgtaatgaattagaggaaatagtaaccaataagggaaatgaagaagcagagcaaatagtgtttggcttattgattactatagaacttgaggggctaaaaaagctgaaaagttgttgcagttacaagaagtgtgaattcaaattcccgtcattggaagtattgattgtgagagaatgcccatgga

SEQ ID NO: 25232 - DNA, 293 bp, Glycine max
acaagacgacagaagggggcactcactgggttttcaaccatgggtgcgatacggacgcagctcgatgtgttgatgggagccaaccgtaacggtgacgtccgtgaagtcaatcgcaagtactacgatcgcgacgtctgtcgtctctacctcgtcggtctctgccctgacgaactcttgcagttaacgaaaatggatatgggcccttgccctaaggtccactccttgcagctccggaaagaatacgaggaggcgaaagcaaaggagaccgatcattatgacagggagttggagga

SEQ ID NO: 25233 - DNA, 470 bp, Glycine max
attcccggttcggcccacgcgtacgcccacgcgttcgcttctccgatttttatgaccgatccaaaaccgcattctccttctactactgtcccatttacttcaccgtcctttccatgccttctcgtgttatcacaatcgactactctcttcttctcaaaaccactccctctacatatttcctctatctatttcataaactacttctactgcacttgttttatataaaaccacccaacactcttactcgactcaccttcttcgtcttagagtttttgcccttcctaacccttacgccgattaacccaccaacgacttatctttagcgtctcattctcatgaaaatttaagccattctgagactgacagtttctaatatgatcaagaatcttcaccacaaatggtcaatgtttggtcaacgattacatcctcaactttaagttgatcccgtggttgcatcaaagctttacttt

SEQ ID NO: 25234 - DNA, 134 bp, Glycine max
attgcatgtgttctttatctgtcttaattgtatcccctagggtaatgtatatagcactgatttcttctacttctacaaaactttcatgtgctacttgacttgtgaagttttggattaaaaactatattgctatt

SEQ ID NO: 25235 - DNA, 235 bp, Glycine max
taacggttggaaaaaacaacgaaaggaattgattgtttctttaattggcttaaatggattccctaaggtaatgtaaaaaggactggtttcttctaattttacaaaaattttaagtgctaattgacttgtgaaagtttggatgaaaaactatatgctattgggggattaggttcaaatataagttatcattctttggatactttttacaccttttacaaaatggttgacatttcat

SEQ ID NO: 25236 - DNA, 121 bp, Glycine max
ggcattgtgaaatcaacagagaaacatttcactaatagagagacataagcataatattgagaaataatggagggttgtacttattgtgtgaagtcgctatgccttgttgggtttgtggtgc

SEQ ID NO: 25237 - DNA, 260 bp, Glycine max
ccagtcgtacgaacagatgcgataggacgactgagctgggagtcaatataaaggtacagtgttaacgttggaactgtggccaccatctgaatgtagcgagtgcactgtgcctatacctctctggacgaagcattccaaatatggaaagacgcttttcatgtgcaacagtacagtcagatttacttcgcgcgccttcattcgatgcgaacacttttatattacctcgttactcattggaaacccaatttttccgtgtgcac

SEQ ID NO: 25238 - DNA, 402 bp, Glycine max
cgacacatgactacggatgggagatgccctcagaagggactgcttcaagaaattattttagacccaggcgacgacattgaccgcgatgatgatggatcacacagatcaaccaattaacgggaaataagtccacgctatcgatactaacaacatggaagcctaacttaaccgttactagacaattcgatgactggtcctccaactcgctatacttgattacgctagagctgctttagcactgcaccggcatactgtcacttcattagctgagtaattttaacacgaatttcgatcgcatctattgaaagaggacagctacgtttatatcttatcataatttcaattggttcacaaagcatgcttcctcgcttagtgatggcaaccattcctctggtttttaca

SEQ ID NO: 25239 - DNA, 338 bp, Glycine max
tgacagaggacccaatgaacccctatcatatctctcatcatgtatatacctcaatatttggccatcacaccactctattattatcactatcatcccatccaaaattatctatcaccactaaatactccaactaacctaacctactatcccaactcttcactcatgtaaacacactgcgccaattaaccatagagtacaccagatactcataaacatatatttgcaggctcagaacatattttagaccgccctatgaatattaacgaacgagaccatcactatcgacccaaatatccacctgctcgatctcattatgcacatgtcattaaaacaatatt

SEQ ID NO: 25240 - DNA, 411 bp, Glycine max
gcacggtacgaaaggacatccgaaccatctaatgacaaaaatattaactatttcaaaaccatctcatctaatgattcaaatttacttttgtactatctaagaaatctttcactttttgtaaaatttattttgttttactatataatcttgcatacttgaaaaatcacattcttgaagatattattttgtttaggaatattattcacatagacatgttttgttggtatttaataattgcataaaaattaaaatttatttaattaaaaaattaaaaaaagtaaaaaaaaaaatatagtagaatatagtaaaaataggtagctattgtagaaaataacttgtattctcatgagaatattatatactcatccttattcatgagtagagcttgtttgaaacatgaagatataacat

SEQ ID NO: 25241 - DNA, 181 bp, Glycine max
agattggaagaagacaaggaagtgaacagaaaggtcttcagaccagacaatatctgaacaaaatacagaaatgtcacgagcaagaaaggaaagaaaggaaattgtgacttacgacacatgaggcggaccccttcttgattaccaaccagaatctctcgcgttggcgactttttcgccccgc

SEQ ID NO: 25242 - DNA, 416 bp, Glycine max
agaagacgacagaagggggttctagtgtatgtgattgttgtgactcgttcttcttcggcggtatcttcttcttttgttgtttgtgtgtttgttttttctctcacctgaaaatgtcttgctgcggtggtaactgtggttgcggaagcgcctgcaagtgcggcaacggctgcggaggctgcaagatgtacccagacttgagctacaccgagtcaaccaccaccgagaccttggtcatgggagtggcaccagttaaggctcaattcgagagtgctgaaatgggtgttcccgctgagaacgatggctgcaaatgtggagctaactgcacctgcaacccctgcacttgcaagtgaggtgttggagagctaaagcttcaagcagaaatggcccttagaaataatgataaaaactatatgtag

SEQ ID NO: 25243 - DNA, 322 bp, Glycine max
aattcccgggtcgaccgactcgtactgcccaacatcattctttccccaatagcaatattgtctacagtctccaatactatattaacgatgttgtgtgtaaattgaagatccactagaaactataccaatgacaaacctccaaataccaaaccctgtgacaaggatgatatttatcaacgacgatccataatcccttcctatgatgacacatataaacccctttataatatacagatctattccaagtctaataaatcctttatattatcaacaaattattcaatactgtgattataaaaaaattcctatactaactccacta

SEQ ID NO: 25244 - DNA, 474 bp, Glycine max
aattcccgggtcgaccgacgcgtacgctttccaccaccccttttcttcccttcactgcaaaaaatgcttctactagaatccctcctcccacatgattctcttacagcaagcaacgtagtaacagggatcccaggaaggttgtctgcgcctgcatcgctcctcctcaaaacttcaagagccaggactcttccgccattcatttcaatggttcgtccaaatcagagcaattgagcactgcgcgggatcatgaggatgattctgatgttcttattgagtgtagagacgtgtacaagtcttttggggaaaagaaaatcttaaatggtgtcagcttcaagatcaagcatggtgaagctgttggaataattggtccctctgggactggcaaatctacagttttgaagattattgcatgacttcttgctccggacaaaggggaagtttatattcgaggtaaaaagaagagttggtttaata

SEQ ID NO: 25245 - DNA, 440 bp, Glycine max
gaattcccgggtcggccgacgcgtccgcccacgcgtccggtacttgtgagtgtatacccaacacaaactaagatcaacatggactacggcacccgggtttcagaaggtgagagggaacctatcatggagtattccacaccacgaccaatgatgggcaactaccaccaccctaatgctcaccgtgtcctcaacgagaagattgtttatgaggaggatgtgattggaggatcccgccacaaccacatgcatcaccaccaccctgagactcatgagagagtcaaggtggtggagtatgaacaagttcctgagaggctcgttttctatgaagagaaagttgcttatgacaacgatcggtactactcttcaaagtatttaaattggacaaatggaagaacacctataacgtgttatcatgtggctttttattaagcatgctacct

SEQ ID NO: 25246 - DNA, 354 bp, Glycine max
gaattcccgggtcggccgacgcgtacggtggccattaaggcaatagtgttctggaagtaacatttttctatagcaaacttatttttgggtggcatctaatgtgggtgtacaaaccgttaattgattttcttgaagcataaaagaaattagttttgccgtatcgggatgaagcaatgctgtttcctgcagaagtaaccattaaatcagagtttgtgctttgtagtgtgatatttgtttatgtaagacgccttggattacatatttctaagagaatgtcattgtcatcagattttgtgccagttatattatttatacaacaattttctattaaaaaaaacataataatcacttatt

SEQ ID NO: 25247 - DNA, 124 bp, Glycine max
atctacttttttaacaacaaatataaatttatattaggcccttctaacaaactacgccggtgatttacccaattactattaacttttccactacttctccctttcacatttactaactcctttc

SEQ ID NO: 25248 - DNA, 476 bp, Glycine max
ccgcccctgaattcccgggtcggccgacgcgtacgtttttctcctcttctgccctccacacaacttctctctcctctctctctctctacaaatccggctttctgctattcgctggtcactgtagcgtatccatggctttcagagttggaggagcgggaggaggaaatgcctcttctggcatgggtgttgctgagcatagcgtaagcacgttcctggaattgcagaggaagaaagttcatcgctatgtgatttttaaaattgacgagaaaaagaaagaggttgttgttgaaaaaactggaggccctgctgagagctatgatgatttcactgcatccttgcctgaaaatgattgccgatatgctatctttgactttgattttgtgacatctgaaaactgccaaaagagcaaaatcttttttattgcatggtctccttcggtagccctcattcgccctaagatgctatatgcaacattc

SEQ ID NO: 25249 - DNA, 53 bp, Glycine max
attcccgaatcgacccactcgtaccgactcaccaaactctatattcaaaatat

SEQ ID NO: 25250 - DNA, 297 bp, Glycine max
aaattttagtttcagagatcgtgaaaactttcaaagggtccgcattcctattaatcgtggctattccttgccttatatttttgaacactgcactttatactgcttatactgtccacaagctaacgagccttactctcctgacaccatttattacataaaatctctggatgctgcataatatataaagctcttcaagtttcatggatggtaccttcctcctaaatgtgcccatatccttcatatatcaaccatgcttcttctgaaaagttcatatataggactcactcctttcacctt

SEQ ID NO: 25251 - DNA, 303 bp, Glycine max
ttggtacgggtgcgaggggacgactgaaggggacattactctgctctacttccattccgtcgattcgacgtgtaaccgttgagcgcgttgcgatcatggcgaaagtcacttccagagacgtgcaagagatcgtggaaaaactctcctccgataaagccaaagctcgcgaagtcgttttcttttctcaaactcactgtctctattccttatcgagctcgttaatctgcgattttgaatggatattaaaaacctttgttgtacgtgctaatgatatgcatataacgatggataaattgacgtgat

SEQ ID NO: 25252 - DNA, 102 bp, Glycine max
taatgttacattctctaatctcaatcacaaaattgagaactgtttacattcttatatactacaaccaaatcattacatacaatcatcattcatactattatt

SEQ ID NO: 25253 - DNA, 377 bp, Glycine max
attcccgggtcgaccgcacgcgtccgcccactcgtccgcccactcgtccttttacgctttagcggctacaacaacacgacagaggcaggctctctctttacagccatcgatccaaaacttccttccaaaattcttctgctatataatctcatcaatgacattcttactaaccctcaaccttttctctacctcagcaagctcataaaactcaccaccctcaaaactatttatgaataatacattaacaatctgcctaacactttcactatgccttctacacctacaacccctattactcccacaactacaacgacacctatatccatacctaaagctcaccaccttcttatcatccctcttccatcctgttaacaact

SEQ ID NO: 25254 - DNA, 131 bp, Glycine max
tttcggtttcaaaaagcgtacccaaaactacaagtatctggcctacaaaccagcgactcttctctcctttctcaatcttcggactaatatctctttgttatattcctaaaccatggctcacgccaatccta

SEQ ID NO: 25255 - DNA, 55 bp, Glycine max
  modified_base (52)..(52): a, c, g, t, unknown, or other
gacctcaggtcaggcggggctacccgctgagtttaagcatatcaataagcgnggg

SEQ ID NO: 25256 - DNA, 396 bp, Glycine max
  modified_base (36)..(36): a, c, g, t, unknown, or other
  modified_base (57)..(57): a, c, g, t, unknown, or other
accggttcggaattcccggctcgacccacgcgtggntccggctagacgacagcaagntagaaggagttgatctctatctttaatcaatgagaagagacactaactgacaaacccttttatggggatgacacgtttggctttgttgatctttgtttgatcactttctctagttggttttatacttatgagacatatgggaacttcaaaatggaagaagagtgtcctaaactcatggcttgggtcaagagatgcatggagagagagactgtgtccaatactcttcctgatgctaagaaggtgtatggtcttattgtggaactgcagaagacacttgaatcgaaatagaagatttcaataaatcaacccattaaataatattttcatgttaaatatgtt

SEQ ID NO: 25257 - DNA, 158 bp, Glycine max
tcaaacgaagaaaagcttatggtggatacctatgcacccaaagacgaagaaaggcgtagtaagcgacgaaatgctttcgggagttgaaaataagcgtagatccggggattcccgatatatgtcaacctttcgaactgctgctgaattcacgggcaggc

SEQ ID NO: 25258 - DNA, 395 bp, Glycine max
gctatatatgatttgatttaattcatcactggcgaaacgattaagaagaagctaaatggaagcgtccctctaagctgtgctggcatggccaagaatactggaaggatggtgaatagaccaatgcgttctccgtcaacggtgattgagcgtgacactgaaacttgaagtttaatgattggattattattcctgagaccaactagtaacaactatggttggcactaacgaaccggcagcatatatatggaaattgttttctgaaaacactggcggcgcgttacactatacaagactaattattaattttaggataaatggtagtaagtgcaactatcatccaattactaacatggtgtagaaaagttgatacattaaagtacatgatcaatcagaag

SEQ ID NO: 25259 - DNA, 363 bp, Glycine max
  modified_base (30)..(30): a, c, g, t, unknown, or other
cccggctcgacccacgcgtgcttctgctanaagaccacagaagtttacccttgcgttattaactcttttttttcccgcagcgtttatataatggaagagaataacaataatactaataataatccaaaagcaatcccatctgtgtgtttgcacatcataagggagggctatcaaactcaaaggattgctctgaatcggtttagtcttcttcgtttttcttcaaattcctcgtgacagatctaatctaatcacgcttttggcggtgtttcagacattgcatgcatatgggtggttgtgttggatgctataaaaggcctacactgagtgctactgttgatgtgccatcgaaaaggttttcaacac

SEQ ID NO: 25260 - DNA, 379 bp, Glycine max
  modified_base (21)..(21): a, c, g, t, unknown, or other
  modified_base (331)..(331): a, c, g, t, unknown, or other
ggttgcaagtcaactgagtantcctgctatgcgctggtctgctctcccaaacatctctgacacaacacacaccaaaatgcataattgaaatgacccttttgcccttccttccttccctacttctcctttgactctccgcaacgccaccgcccacaatggacggcaccaccaactccggcgaaccccgctccagttcggtgctccaaaatactggggcatccgaggatccgaatcgaagcgggtcgggtcagaattcgatggcgaggtacaagctgatgtcaccggcgaagcttccgatctcgaggtcgccgtgcatcacgattcctccggngctcagtccgacgtcgtttctggaatccccggttcttcttccaacatg

SEQ ID NO: 25261 - DNA, 303 bp, Glycine max
gactcatcgccagcaaaagaggaaaaaaaaaaaacgaaaatgctgagaatcgccgcaagcgcaaagagaattgttcaaacggcgtcgttggaggcgccaccgttggggattagggttctgccgcgtctctaccacgagagggtggtggaccactacgacaacccccgcaacgttggatccttcgacaagaacgaccccaccgtcggaacgggtcttgttggtgcacccgcgtgtggcgacgtcatgaagctccagattaaggttgacgacaaaacggggaagatcgtcgatgctcgcttcaaa

SEQ ID NO: 25262 - DNA, 312 bp, Glycine max
gttgcacaatatgtgaagtcccgagacgtgccaaaaatcaaaaggaagcaagcttacgcgatccgtgaaaattccgtgatgtgacggaaatcgaaaggaggtatttttcgcaatccgtgagttttcgtaacttcttcaaaagctaaaaaagagtaaatacataatccgtaaggactcgtaaccttgcggaaggaaaataagtatcgttacgaaattcataaattttcgtaacgttacagaaaaagaattaccaaaaaaggtagagggggtgcatttagaaacagggggtacaaatagcaatcaggcccactt

SEQ ID NO: 25263 - DNA, 205 bp, Glycine max
catggtgtgaagtcatcatatgtccatggtcatagctaatctttatgtgacacttaatcgagtgtttcaatttacacaaaaaatcttaataaactcagttgcatgttacgtggaaattggctgaaacattgaacatgtgatgatccaagaccatgcaataattttttccttacatgacttgggagaaaatattttttaaattttg

SEQ ID NO: 25264 - DNA, 277 bp, Glycine max
gactgaaagaaacatatgaggagacaaagagaaaaaaacgtagtgtcccaaatcacccaatattcagagtgcaagaaggttcttcttcctttttttcttcatcgtaagccaacaccgattcgattttctctctctgcgtgaaaattctgaggttgtggaggctccgaaaccatctgggtcgggtgatggaagaagaggtaatttgccaatggatcgtgtttagatctctcttggcaatactttaatggtgggcttttaaatgtaatggcattattat

SEQ ID NO: 25265 - DNA, 62 bp, Glycine max
gagacctcaggtcaggcggggctacccgctgagtttaagcggagtcagtaaaaaaaaaggga

SEQ ID NO: 25266 - DNA, 505 bp, Glycine max
  modified_base (89)..(90): a, c, g, t, unknown, or other
  modified_base (132)..(133): a, c, g, t, unknown, or other
  modified_base (151)..(152): a, c, g, t, unknown, or other
  modified_base (165)..(165): a, c, g, t, unknown, or other
  modified_base (173)..(173): a, c, g, t, unknown, or other
  modified_base (175)..(176): a, c, g, t, unknown, or other
  modified_base (189)..(190): a, c, g, t, unknown, or other
  modified_base (198)..(199): a, c, g, t, unknown, or other
  modified_base (207)..(208): a, c, g, t, unknown, or other
  modified_base (245)..(246): a, c, g, t, unknown, or other
  modified_base (268)..(269): a, c, g, t, unknown, or other
  modified_base (276)..(276): a, c, g, t, unknown, or other
  modified_base (284)..(285): a, c, g, t, unknown, or other
  modified_base (295)..(296): a, c, g, t, unknown, or other
  modified_base (314)..(315): a, c, g, t, unknown, or other
  modified_base (429)..(429): a, c, g, t, unknown, or other
  modified_base (451)..(451): a, c, g, t, unknown, or other
ggtccgtgaattcctcgggtcgactccacgtcgtctcgtaccggcttgcgtgaccgactagaagggggggattttcaatttgacctgannattgcattaacccatttcccctgcgttgttcgtgttttcttnnctggtcattgggttgatnnatgtgcatttgcnccattgcncnnacccattgaaatnngtgaatcnnattcaatnncccaggccatttagcccattagcacctttagtgagtnngccactttagtttgcttaattnncctcccnttttccannatacttaatnnctcatgccaagcataatnncaaatcaaatcaaaaagtgaaaagggttctgattcttcgtgccctgttgttgcccattataacacactttttcctgcacaaggaaagcatttcgcgtttacccttttcctcatnaatacgtaaaaggcttctattnagaaattgatttttttttttaaaatcttctaaattcaacaatcttattaaatca

SEQ ID NO: 25267 - DNA, 286 bp, Glycine max
ggttgttacttttgctttaacacattacactcacactctttgtgaaaaaggggagtttcttattctttctagacgcttccattgatcggcgatttcttagacatggcggagcatcacgaacacgaggaagtgaagggtgagtccttgttggagaagatttctgggaagatccacgaccacgattcgtcatcttcgtcggatttcgacaacgagaaaaccagcgcttctgactccttgaagtcaaaggttttcaggcttttcggcagagaaaagcccattcaccatg

SEQ ID NO: 25268 - DNA, 203 bp, Glycine max
tatgggtatcgttagactatgacaacagacggggacaattggaagactacgcctgaatgctacgggtacgataagacaacagttggagagacctaatgtctgtcgcgtctacccgctgagtttaagcatatcaatagcgcccgttataaaagatccaagcttacatactcatgactgctacatctataactattatatattac

SEQ ID NO: 25269 - DNA, 343 bp, Glycine max
gcaaaaatcacttctattcatcgtctgtccagttttaacaaatatcaaacgcacgccaggagaggaaaacaacacaaaataacagtgtttggactttggtagctcatgtctctgctgaatttctgactagtcattatctgaattcaaataattttgtactcatactgcgcaaacgcttgagcacatttcatatattttccaccaaaaaatacgaggaaaagtgcaccgtggaacacacatgttctctatttggtatccttgttatccctagcaatagacacgttgaaacatgtcaagtattccatactttcattaagaaacaaaatgccatcaaattactaat

SEQ ID NO: 25270 - DNA, 57 bp, Glycine max; identical to SEQ ID NO: 410

SEQ ID NO: 25271 - DNA, 193 bp, Glycine max
ggaacgtccaccaacctcaatttcaatctcatccacatctcaaaatcttaaatcaaaaatcgaatattcgaatttcaccgcttcgaaaccctatctttatcgccagaaaattttcaaaccctaaaatccgaatttcgctgatgatcttttctaatcgtcatcataccaaacaaattttcttcatatctgtctt

SEQ ID NO: 25272 - DNA, 358 bp, Glycine max
ggcaccgcttgagcagacttaacaacagcacaaagcgggttactgtctgttcaagctaccatctctctctctctttcttagtgcctccttgccagaagttaaaatggcccaagaaactttcctattcacatctgaatcagtgaacgaggggcaccctgacaagctctgtgaccagatctccgatgctgtgctcgatgcatgcttggagcaggaccctgacagcaaggttgcctgtgaaacctgcaccaagaccaacatggtgatggttttcggagagatcacaaccaaggccaacgtggactatgagaagattgtgcgtgacacatgcaggaacattggttttgtctctgatgatgtt

SEQ ID NO: 25273 - DNA, 349 bp, Glycine max
agaagaacaaggacgagacgttgagaaaccgcagtgggccggctaaaatgccttacactttgctctatccttctagtgaggagggattgactttcagaggaattcccaacagtatctccatctaggggctctatggttgttgcagtactttccctggttttcaataaaagtgaatagaaggaatatgattccttcatctacctatgtatggttaagttatgtatttggggtgattgaatgttctcgtgtttgctgttaagtgttaatgaagaaattctgtttgtataaattgctgttaagtgttctcgcgcatgtttcaacaatgatagctggcatggcaaagtgcaaa

SEQ ID NO: 25274 - DNA, 359 bp, Glycine max
gaatgtcaacctcttccataaacgggtggtgcctctcttccatctccccagccaaaacctctctcaggaaggccacattacgcccttccgtcttcgcaacccttaacactccttcttctccttcctcttcatcttccttcccctctctcattcaagacaggcctgtttttgctgcccctgcccccatcatcaccccaactgtgagagaggatatggcaaaggaatacgagaaagctattgaagaacttcagaaattgttgagggagaagagtgaactcaaagcgacagctgctgaaaaagtggagcagataacagcttctctagggacatcatcatctgatggcatcccatcatcagaa

SEQ ID NO: 25275 - DNA, 433 bp, Glycine max
caacggagcacaagtgagtctgatgatcgagataactagaatcagtgtgatgaacatgaacgtgcttgacttcttcgttgctacaattttggtagcatgtcaatgccatgcgtacgatatgttccctctgcgaatgaacactggctatggtgcccgtactccggacgtgaaatgcgcatgttggaggcttgctgtggaagcacacaacatctttggctttgagaccattcctgaagagtgcgttgaagcatcaaaggaatacatacatggcgaacaatatagatcagactctcaaacagttaaccaacatgcttacttttatgccagagacctcgaagtccatcccaaggacacatttgtgctcaatataaatagcaccgtactctgttatattccatactacaaaaacatggatattgggtggagaaattta

SEQ ID NO: 25276 - DNA, 391 bp, Glycine max
ccacgcgtccgatgagagaagacgacagaggggtgcatatgtgggggcatggatcataatttaggaaaggaccagactcactcaaaggaacacaaccagctgcaatgttaaggttaccatgctattgctgtgctcaaggatgcaagaacaacatcaatcatccaagggccaagccattgaaggacttcagaaccctccaaacccattacaaaagaaaacatgggacaaagccattcatgtgcagaaaatgtgggaaaacatttgcagtcaaaggggattggaggactcatgagaagaactgtggcaagttgtggtattgcacttgtggctcagacttcaagcacaagagatccctataggatcatattaagtcttttgaaagggacataac

SEQ ID NO: 25277 - DNA, 307 bp, Glycine max
caacagaacggcattgcaaattacaaacatttccccaaccttctatacgaatgccagttcatcacaccttcaccgaagcataacaatgctcaattcctctttcctatcactttctgaacacaccttttcccacacacaccatcatttcccaacaaggtctgcttctcaaaaccccaaccttcatccaaagtttcaatctttagcctctgtaaaccgtggatgaagtgaatttccatctcggtcttgctccaataccctcagaataaaaggagtgttgcatgtgcagtcaaagtcaacgcttggagta

SEQ ID NO: 25278 - DNA, 432 bp, Glycine max
ccacgcgtccgagcaagaagacgacagacgggcagtggaaaaattacgccaatccattgagatatggtgtgctacaagtgaatattttcgacaagaaatgaatcctaattttaggatgaccgacccctttaatccagtccatataatgtccttttcgggagctagaggaaatgcgtctcaagtacaccaattagtgggtatgagaggattaatgtcggatccacaaggacaaatgattgatttacctattcaaagcaatttgcgcgaagggctttctttaacagaatatataatttcttgctacggagctcgtaaaggggttgtagatactgttgtacgaacatcagatgctggatatcttacacgcagacttgttgaagtggttcaacacattgtttgacgtcgaacggattgtggtaccattcaaggaat

SEQ ID NO: 25279 - DNA, 225 bp, Glycine max
  modified_base (87)..(87): a, c, g, t, unknown, or other
gaatactacatattggactaacgatttataatagcgatttataagttatagaatcttgcggtttcaatcacgagggtggtcattatnttattttctaataatgaaatgattattctgatttcatatctctattcttctgttaagacaaccatctttaacaaactctatcttttataattcttcaccacttttcccaccatctcattttatcttttatactttttt

SEQ ID NO: 25280 - DNA, 253 bp, Glycine max
ccgtgggcgatttcgcaaaggttttccaccgttcttcatcgctcttcgttcgttcttcgtcgttctccggtcttcaaccggtaagttccttgaaataaaacttttcaattcattctatgtacccttagaggtccccatttttttcgcatgcttttatattatattattaattttacgtacccccttttgatgtgctttagtcatttaattaagtcgttttctcgtttaattaaaaataaaataaattttcacc

SEQ ID NO: 25281 - DNA, 262 bp, Glycine max
tgcatctgcgcttatacgacaaaaaggtgcgtggtgtaataaaacaacgtaagggttcttctgtaaaaaaactaaattacgcatgtgtgcaacgtcataaagtttctataccgatacttatatatattttaatgggcttcgttgatcatacgtttttaaaccgaaactttcgttaaataaaactttcaattcttacaaattacctctattggtccacatttttttataattgtttttatttttatttcattttattttcaaa

SEQ ID NO: 25282 - DNA, 326 bp, Glycine max
gtataatactaatggattcgggtccacaacgatgggttcaaatgtacgagatcttgtagcacttaccaacgaggccctatcgattagtattatacaaaaaaaatccatcatagacactaatataattagatctgttcttcatagacaaacttgggatttccgatctcaggtaagatcggttcaggatcatgggatccttttctatcagataggaagggctgtttcacaaaatgtacttctaagtaattgctccatagatcctatatctatctatatgaagaagaaatcatgtgacgggggggattcttatttgtacaaatggtact

SEQ ID NO: 25283 - DNA, 109 bp, Glycine max
gaaggtgcaagagtttgttgtgagctataagctagtttatcgtgaggagaatatgaagttgtttgttttctttggtgctgcaagagttttggtagcatgggcatgccat

SEQ ID NO: 25284 - DNA, 69 bp, Glycine max
gagacctcaggtcaggcggggctacccgctgagtttaagcatatcaataagcggagaaaaaaaaacaaa

SEQ ID NO: 25285 - DNA, 303 bp, Glycine max
  modified_base (246)..(246): a, c, g, t, unknown, or other
ggagccaaagagagagaaagagaagaagaagaagaagaagaagaagctctggattccacctcttcccgtccttcgagacggttgttgtgctgcttgctcttcagacaaatctgacatggatttactaagatttgtccatgttcttgcgttctaggttgacctgggattgaatctaaagaatcttgatttacattttgagatatggagggagtttgtttctggacaaattgctaccagtatcggttntttgcattccaagaagtgcttgattggcgagttttcatccttggagattttcttcgg

SEQ ID NO: 25286 - DNA, 215 bp, Glycine max
ggtggccttaaggatgaggacaggatatttactaacctatatgggctgcatgatccttttctcaaaggtgccatgaaacgaggggattggcatcgaacgaaagatttggtacttaagggtactgattggattgtgagtgaaatgaagaagtctggcctccgtgggcctgggcgtgcttgttttcctttcggccttaaatgggtatttattgccaa

SEQ ID NO: 25287 - DNA, 275 bp, Glycine max
gatgcttatacatgttagtcgaattttatcactggattaataattagcacatagttttttggaagagttgtgaaaatgggacttgtggagctttttggagtggcatctatgcccgtgatcaaagtactaataatcactgcagttggcttgcttcttgcactggataacgtaaatttgttgggaaaagatgcaaggatacaagtgaatcatcttgtgcattatgtgttcaatcctgcactggtgggtggcaatttggcggacacgattacttttga

SEQ ID NO: 25288 - DNA, 315 bp, Glycine max
ggtggccttaatgatgaggacaggatatttactaacctatatgggctgcatgatccttttatcaaaggtgccatgaaacgaggggattggcatcgaacgaaagatttggtacttaagggtactgattggattgtgagtgaaatgaaaaagtctggcctccgtgggcgtcgcagtgctggtttcccttcgggccttaaatggtcattcatgccaagagtatacgatggccgttcttcatatcttgctagtaatgctgatgaacgtgaacctggaacttgcatagacagggaaattatgcggcatgacccacataaa

SEQ ID NO: 25289 - DNA, 309 bp, Glycine max
caacaaagaaagaaaaaaagctttctccaagaaagcgttctatcacgccagggtccggggtatgcttcttcattgagattgggttggtgttcactgagaatgcatttcccgcgtgattaattatttcgagaaaaaatcattcggtttgcggccgctctaaacgatccaagcttacatacgcgtgcatagcgacgtgataagtgatttatagtgtcacctaacatcaattaacctgccgatcatttacagccctatgactgcgacaaccctgtcgtgacccaacttaatgctgttgcagaacatacccct

SEQ ID NO: 25290 - DNA, 390 bp, Glycine max
  modified_base (285)..(285): a, c, g, t, unknown, or other
gatccgaagtgggaaggcacacgcttgtttacgcaacgcgggcgattgttagttgtattcgatggactacgatttcagaagcaggtcgggcccacaacctccgatgtaccgtccgccaccgccaccgtcaccgatgtaccgtccatcaccgtatcaacagaatcctactccttcttcaggacttggcgttagggttggtataaagccggaatataggatcgcaccgccgcctcatttatcatcacttgctggagataatccacggagcaacttccaatttgattntggattggagagaaaaattttagctgaagcagagaaggataacccaaattggagcaaatttggatcagaaaatattccaactaaagtttctgattcatcaacagc

SEQ ID NO: 25291 - DNA, 355 bp, Glycine max
aacataccctctaacacaatatttctttaaatatattcttttaatcaattaaaatctattgaaaattatgacatctaataaaaaaaaatcattaaacatgacatgtgatttataaaattgttattttcaattaatttcaacaaatattgtatttttcaataataaatatttatagaaaaatgattaacttttataatcactattttaaaaattaaatttttatgatattacataaaataaatttaatttaatttacttattactactttctagttactaattaatgaattagattattcctaaccctgtttacctacacaggaaggagcaggccctgcctaactcctgatgcatg

SEQ ID NO: 25292 - DNA, 169 bp, Glycine max
gcgacaggtactgaggagaccttacgtcatgcggggctacccgctgagtttaagcaaaaaaaaaaaaaagcggacgatctaaaaggcggccgctttagaagatccaagtttacctacgcatgcatgcgatggcataactttaatataatgtaacctaaattcaattaaa

SEQ ID NO: 25293 - DNA, 319 bp, Glycine max
gcaaggtgcaacaactaatcctgatatttattcggttaaagaagcaatatcagactgcggcatcttttctgggatgggaacagaccacctcttggatgccgtggtctccaaagtcaaatctgttgtgaaacaggattctgatgacatgtcttgcaggacaacattgacaaggaatagtacttcctctggtccttctcctgcacggaggacggtagtgtctggtcatttccaagggggattatttgatttgcctaagaatgatggtaaaacaggtgccacagaaactagttttcttatgtctggatgtaacaaggatgat

SEQ ID NO: 25294 - DNA, 383 bp, Glycine max
accggcccggaattccaggctcgaccgacgcgtgcggaagaccacagacaggggagaaaggatagggtttacggttggcaaaggaaggaagggatggaagcagctgtggtggacgtcagctctaatcttctcaaagcggactctgcgattgctgacccgactcccgggatgatgatgtccactctcatgaaacagttgctcgatgatggatcaaagactgatagttcactggctgacaatgtcaccgatgatcccgtcatgcgaggatttattagagattgggatgccattgaagatttgttgcaccatgttttgtatactggcctcggatgggaaattggcaatgaaggacaaatactatttactgatccactttgtacccc

SEQ ID NO: 25295 - DNA, 382 bp, Glycine max
aacattcatcaggtaagagtttacttttctaaattagttaaggtgactgtagatttagctcatatcacattttaagtcaatttgggatggttcaattctgcacgatttaagccacgcgtaaccatgcacggggtttcttatgacttttggcgtcaattttgtcttcaagcgtgcaaaatttcagacttctagcatggaaacaatttaatgcagtaatttgtgatgaagcaagacaagaaaatagtgtttttatgtgataattttatgatgataataatcatcataaaattatcaactcaaattgattaacataagtgataatactttaaatttcttattcagattattcaaatttaaaatcgggatacatattaaattagta

SEQ ID NO: 25296 - DNA, 366 bp, Glycine max
gcctctggtttattctgaggcctgtgctgtgctctgaggggccatagtttgggaccctttgaaccctaatctccacccaaacccattttcccgggaaattgccttggaaaagaaagagcgaagaggaaaatgcagaatcacaggctgaagcagcagcagcagcagcaacaacaagctcttatgcagcaagctcttctccaacaacagtctctctaccaccctggcctccttgctcctcctcagattgaaccatatccaagtggaaatttgcctcctggttttgatccaagtacttgccgcagtgtgtatgttgggaacatccatacacaggtaactgagccgcttttgcaagaagttttctcgggt

SEQ ID NO: 25297 - DNA, 313 bp, Glycine max
  modified_base (304)..(304): a, c, g, t, unknown, or other
ccctgaatacgtaattcattgacaaatgtgtccctgaaaaatgaaaatataaaatttagtccccgaatgtgtaaaaagtgcgacaaatatatccgactgttagctttcgtccttcaccattaataaaatagctaagattcaaagaagtgaaatatggaatatacttatttttttatttatagtagattatgactaattattataatttgaaaaaatttgtaatgattggtacactagtacaatgtttattttggataatttttgttgtgacagacaaattatggttgataattaatattatcgntattattat

SEQ ID NO: 25298 - DNA, 238 bp, Glycine max
caattattctctaaaacaaaacacaaaccaatctgagggggagaaaaaatacaaagcggagagcattatgtcatggatcattcacaaaaattgctagacccttcatgtcatatggcacacaaaggacgaatagcataacggttagcaccatgcttgagaatacaaatgggagctccattgtgaacacaattatttatgcaaaggatatcatcatggctaacacaaagcttgagaatac

SEQ ID NO: 25299 - DNA, 263 bp, Glycine max
gagagagagatggtgtagaattgaatgggtggaaagtgaaagagtaagacaccacaaagtgtaacttgagcgattagatctgatgagtgcagaaagaaggaaggattgttggtgatcgatcatcgatcatcgatcatcgatggcgtctgctagccttggaagtggtggggtgggcagttccaggtctgttaatggtggcttcaggggttcttccagttccgtcgattggcttggcagaaagatgcttgagatgtctttgagag

SEQ ID NO: 25300 - DNA, 335 bp, Glycine max
aacgcagtcctttttctatttgtatgtttgtatgagactgagaaagatagagagatagtgtgtgcagaagatgtggctattcggcagaaaaggggcttctgggttttcatcatcatccactgcagagcaagtcactgaaggaattgatggaactggtttcactgccattgtcacaggggcatccagtggtattggcactgagactacgcgtgttcttgctttgcgtggtgtccatgtgattatgggtgtgagaaatatgcttgctgctaaagatgtcaaagaaacaatactcaaggagattccctccgcttaaagtgatgccatggagttagatc

SEQ ID NO: 25301 - DNA, 253 bp, Glycine max
gagacctcaggtcaggcggggctacccgctgagtttaagcatatcaataagcggaaaaaaaaaaaaaaaaaaaaaaaagcggccggtgtacaggatacaagattacagactccggcctgcgacatgctacgtcttatatagtgtatcctgaaaccaaaatacaggccactggtcgacaacgtacaaactgggaaatgggtaaaccttgccaacttaaaagtttagcagcttataccacattcccctgttggcg

SEQ ID NO: 25302 - DNA, 203 bp, Glycine max
  modified_base (197)..(197): a, c, g, t, unknown, or other
ggacaatggcaatgcctgtttgattcttctcagcacataatcgatcgcgctctgttgattcgattgaaatcgaagaagaaggaagcaagcttcaaccctagcgtttccacaatcgattctgatgatatatttgcgttggtgtttgcctgaagatttggggcgtttccgggtgatacataacttgacttgattgtggntgatac

SEQ ID NO: 25303 - DNA, 359 bp, Glycine max
  modified_base (73)..(74): a, c, g, t, unknown, or other
  modified_base (96)..(97): a, c, g, t, unknown, or other
  modified_base (104)..(105): a, c, g, t, unknown, or other
  modified_base (142)..(142): a, c, g, t, unknown, or other
  modified_base (153)..(154): a, c, g, t, unknown, or other
  modified_base (174)..(175): a, c, g, t, unknown, or other
  modified_base (216)..(216): a, c, g, t, unknown, or other
  modified_base (218)..(219): a, c, g, t, unknown, or other
  modified_base (227)..(227): a, c, g, t, unknown, or other
  modified_base (229)..(230): a, c, g, t, unknown, or other
  modified_base (242)..(243): a, c, g, t, unknown, or other
  modified_base (250)..(251): a, c, g, t, unknown, or other
  modified_base (260)..(260): a, c, g, t, unknown, or other
  modified_base (268)..(268): a, c, g, t, unknown, or other
  modified_base (270)..(271): a, c, g, t, unknown, or other
  modified_base (279)..(279): a, c, g, t, unknown, or other
  modified_base (281)..(282): a, c, g, t, unknown, or other
  modified_base (289)..(291): a, c, g, t, unknown, or other
  modified_base (297)..(298): a, c, g, t, unknown, or other
  modified_base (306)..(308): a, c, g, t, unknown, or other
  modified_base (316)..(316): a, c, g, t, unknown, or other
  modified_base (318)..(319): a, c, g, t, unknown, or other
  modified_base (326)..(327): a, c, g, t, unknown, or other
  modified_base (351)..(351): a, c, g, t, unknown, or other
ccggaattcctcgggtcgacccacgccgtcccgtagatcgacccagaaggggagggaaatttggtggctttannggtcagggaggggccattagtnnctgtgtnnttgagccttctggtggtgtattttctctttacctgcnagttttcttcnnatttcttctattttccagcnnatctctcgtttttcgtttcggttggagaacctttaattttntnnccttgtangnnaggagaatttcnnctccttnncagttccanttcttatntnnttcagtantnnttatgtnnncattcnnttatcaannnaatctatncnnatgaatnntaaaaaaaattttattggataatngggatttt

SEQ ID NO: 25304 - DNA, 368 bp, Glycine max
gaaagctagagcaatgcattgctgccatatgggattgaacacaccgaaaaaaaaaaaaaggaacaaaaaaaaagcgggcgctctataggagacccacttacatacacgcgcatgcgacacgatagatcttttatatagtgacctcaaaatacaacacagtgggcggcgttacaaagccttgactggggaaaaactgtggtgacaccaatcaaaagcctctggaaacatatccctttttccacatgtggcgttatcgaaaagaggcccacagatagcgcttttcaaaacatgcgcacactcaaaagggaatgtgacacgcgctgtgaaggggcatataacgcgccgcgtgtgttgggacacgcacagtg

SEQ ID NO: 25305 - DNA, 410 bp, Glycine max
ggtgcagcagcgaaaatgtcagggaaaggacctggtttcttctctgagatcggcaagagaggcagagatatcctcacgaaggattacaattccgatcaaagattcaccatctcctcctccaccaactccggtctcgacctgaagtcaacactggtgaagagtagaggactttcctctggtgatgtggctgcagaatttaagtataagaacaaggcggttaatgtcaaagttgatactgaatcaaatgtgttgacgacattcactgtctctgatgttgtgccatccgcgaaaaccattgcttctattcgtctgcctgattacagttctggcaaggttgaggttcagtatcttcatgagcatgttgcttttactcttggtgttggtttagaccgctcccctggtattgattt

SEQ ID NO: 25306 - DNA, 226 bp, Glycine max
tgctgcgagtagacaacacaacggcaagatacgtacacaatacaactacattgactatcgactaggctattacaacagctagggagcctaacacttatatcacagatcatattctttcagtgatgacatagaatacagccgttcttgagcatccaaacttacgtacgcgtacatgccacatctttactgatgtataaaacctcctataatcaattcactaaccgaa

SEQ ID NO: 25307 - DNA, 366 bp, Glycine max
ccacgcgtcagaacagctgagagaggacatctgatggggactctatgactattcatgatgccatacgtgtatcggttacatactggatccatgctaaaggagtgttatggcaaaacttcgatcgatacgacgcgtaataaaacaacttgcgactagatagacttgaatagaatatctgtggattctgacatactgcatttgttctactttatagagcatgaacatgactcttgactcgacatgcgcatggactcgagcactagaacttattagtctgtggaccggaaaccagcctatgatgtaggaggatgatgtaaactatgacactgatgcagatagagatgatcatttgtcaggggcaattat

SEQ ID NO: 25308 - DNA, 479 bp, Glycine max
  modified_base (11)..(12): a, c, g, t, unknown, or other
  modified_base (41)..(42): a, c, g, t, unknown, or other
  modified_base (75)..(75): a, c, g, t, unknown, or other
  modified_base (77)..(78): a, c, g, t, unknown, or other
  modified_base (87)..(87): a, c, g, t, unknown, or other
  modified_base (136)..(137): a, c, g, t, unknown, or other
  modified_base (146)..(146): a, c, g, t, unknown, or other
  modified_base (202)..(203): a, c, g, t, unknown, or other
  modified_base (209)..(211): a, c, g, t, unknown, or other
  modified_base (232)..(233): a, c, g, t, unknown, or other
  modified_base (278)..(278): a, c, g, t, unknown, or other
  modified_base (306)..(307): a, c, g, t, unknown, or other
  modified_base (336)..(337): a, c, g, t, unknown, or other
  modified_base (430)..(431): a, c, g, t, unknown, or other
  modified_base (473)..(474): a, c, g, t, unknown, or other
accggtccggnnaattcccgggtcgaccccacgcccgtccnnggcgagaagaaacgacagaagggggggcgcacncnnactctctanctttgttcatttctacggtatcaagtgtgctcgtctttttgacggtgcnngtgctgtancagcattgacccctcagctttgagcccagtaaaaccatgcatcagcacctacctanncggtannncatggcttgtgcatgcaatcnntttcgtttcggtcccacccacgatgtctcacttgtccccatacgnagaacctccctttacccggagtcttcannagccccaatccccgctttcgcctccttcnngtcccggcgtcgcccattcggcgaacttcgtacctcgaccctctccagaaatatacttccgcatggtctacttcgacgggtcgctctcctcannaaaacatccgatgcttttcttccacgccctaatactaaatannagttt

SEQ ID NO: 25309 - DNA, 375 bp, Glycine max
ccggaattcccgggtcgacgaattccggaacgagatagatcttgtagtcgggccccggcgcgatgtcgccttcgaaggcgatcgacgaatcggtgatcgtcagcttgccgttcgcccagtgcagcgcatcgctgcccggcaggttgcgttcgaagcggccggtatggcgcgtgttttcagcggcgacttgcagcgcgaccgcgcttgcgccttccgatgccgtcaggatcggcagcacgtagatgccggcggcgaatgcaacgagcgccgtcgcgagatgcgacgcgatcagtatccagattctggttttcatatcggaccctttgaacgagaacggaaggtggcgccttgccacccatctgtagtcgcgcgagc

SEQ ID NO: 25310 - DNA, 154 bp, Glycine max
  modified_base (151)..(152): a, c, g, t, unknown, or other
cggaatgatgacaagaaatactagtttctgctttgtaattcataatattggtggtctaggtctcttttggatgattctattatgtagctgtcaagtgtgtgtgattgtatgaataattggagtgtgaatggttatggaagtaatttatgcnnaa

SEQ ID NO: 25311 - DNA, 541 bp, Glycine max
  modified_base (13)..(13): a, c, g, t, unknown, or other
  modified_base (22)..(23): a, c, g, t, unknown, or other
  modified_base (90)..(90): a, c, g, t, unknown, or other
  modified_base (138)..(139): a, c, g, t, unknown, or other
  modified_base (175)..(177): a, c, g, t, unknown, or other
  modified_base (187)..(188): a, c, g, t, unknown, or other
  modified_base (259)..(260): a, c, g, t, unknown, or other
  modified_base (280)..(280): a, c, g, t, unknown, or other
  modified_base (291)..(291): a, c, g, t, unknown, or other
accggtccggaanttcccgggnntcgacccacgccgtccccgacgccgagaagaccgactagaaggggggaagggtgccaatgagttttngttgtgagcctataagactgagtttatgcggtgaggagaaaatatgannagttgtttggttttctttcgttggcttcgcagtagnnntttggtagcnnatggcctatgcacatggcgctaggctttaccaaaggttcctctcttaccgaatgaaaactggcttatggtnngagcgttcttcggaggtaanaatgcgcaagnttttaggctttgctgtggaagcacacaacatccgagcctttaaaaccattcctgaagagtgcgttgaaccaacaaaggactacattaatggcgaacaatttagatcagactctaaaacagttaaccaacaagctttcttttatgctagtgaacgcgaagtccatcacaacgacatatttatattcggcatagataacaccgtactctctaatatcccatactatgaaaaacatggatatggggtggagga

SEQ ID NO: 25312 - DNA, 357 bp, Glycine max
gggccacccactcacatttgttatttccctctttacccccaaatgtcttccagcttctcaccccttgccatcttcctcctcctccttctggtccggtacacgtgcgaggcacgtgagccgttcgcgtgcgacccaaaaaatggcggcacgaagaagatggcgttttgcaaggtttcgctggcgatagcggagagggtgaaggatctgattggaaggttgacgctggaagagaaggtaaggcttctattgaacaatgccgcggcagttccgaggcttgggatgaaagggtacgagtggtggtctgaggcactccatggtgtttcaaatctgggtcccgccgttaagtttaacgcacag

SEQ ID NO: 25313 - DNA, 300 bp, Glycine max
tctgaaactggctctcaagctggctcaagggacacaaaaaacccctaaccaagtggcttttttttcatgaatttgaaagattggagcttgccattaatatattataggattattaattatacctttagtattgtaggttgcaaatatattatacctttagtattcctcaagatacaatttcacatagaaacttcttagagcaacttaagcttagctcatttgcagcatatataagtcttaaatattgtcatagcgcaccgaatcttgcaatatatttatggagggcatataattcatctg

SEQ ID NO: 25314 - DNA, 401 bp, Glycine max
gatagttagaagtttaaacattcaacctcaatttgcagagttctaatattacattgcagagaaaatgtctttgattccaagtttctttggtggcagaaggagcaatgttttggatcctttctccctcgatgtgtgggacccttttaaggattttccttttcccacttctctttctgctgaaaattcagcgtttgtgagcacacgagtggattggaaggagacaccagaagcacacgtgttcaaggctgatattccagggctgaagaaggaggaagtgaagctggagattcaagatgacagaattcttcagataagtggagagaggaacgttgagaaggaagacaagaacgacacgtggcaccgcgtggagcgaagcagtggtaagttcatgaggagtttca

SEQ ID NO: 25315 - DNA, 320 bp, Glycine max
aaggatcgaccacgcgtccgcccacgcatccgcccacgcgtacgtccacgtttgcattccgatacaagaagacgactgaccgtgacggctgaaagaagacgacgcaaccatacaactgaaagaaaacgactgtagggtaccgctgaaaaaagacgactgaatgtgtcaaacggatctacccactgagtgcaagcatttcaataacctaactatgtaaaatactataagaacatttttactggccccttttgatgatacaagattacgtacgcttgactgataaatttaatcttttcactaaaagcacctatttcttgttc

SEQ ID NO: 25316 - DNA, 291 bp, Glycine max
gaaaagacgacagaaaggggcacatgtgactttcatgatcgatataactcgaaacggtgtggtgaaaatgaaggtgcttgtaaactaccatgctacaattttggtagcatggcaatctcatgcgtacaatatgttatctattcaaatcaacactacctatcttatccttacttcgcaagtgaaatgctcaactaactatcttactgtcttaacacacaacatttttaacttttagaccattcctcactacaacaagcaagctacaatggaatacatccactttttacaata

SEQ ID NO: 25317 - DNA, 181 bp, Glycine max
tcctgatgacaaattgcggaatacgggggcgccaagggacacacccttgtcttccacaaaaaaaaaaaaaaaaaaaaatcgggcgatgtggacgatctaaaggatccaaccttaccttcccatgcatgcgacgttatatcttttctattaagttaactaaaatcaacttacttgcccaacg

SEQ ID NO: 25318 - DNA, 281 bp, Glycine max
aaggagaaaacctttttccttggccgagcctcctgaggatttgaagccagatgagcctgtttaccaaattcgatttacaaaagaaatctttcaagattatcatgattatttgaagcgattgaatctataccgccagagggtttggatgtgtaaagtcactggaaaaactggcttgacatatgaagaagctttggtgtctgaacaacttgctaccgagaaagttcaacagtttcctaaagaattaatgactattgctttaaagattattcaatacagtatgc

SEQ ID NO: 25319 - DNA, 463 bp, Glycine max
ccacgcgtccgaacatgagagaagacgacctacggggacttgattattttgtgagtctatgtctaaataatggctgaacgcttgcgatctgcaattatctgaagctgcgaagcccaactctctcatattatatccatacgcgtgctgaaatcggtagctggaacctatgtcatgcccggctagatttggtggatctttaaccctttgcacaaatgaaaagcactatggaagttacattctttcagttgaatgataagggaccataacttcagatggtgttgcctataaggaaagatgaaactgacgcctaggaaaggatggaaatctattgtaccacttcggttgaaaggaaaatcagcaacccatgtcttgttatttcgcaaagttaactctgctggctgaggacctggcaaaacaccaacttatctgaatgtgtttgacatgacacccatgattggatatg

SEQ ID NO: 25320 - DNA, 379 bp, Glycine max
aataatgtctatgtgaaaaacttatcagagtcaaccacggatgaagagttgatgaaattttttggaaaatatggtaccattactagtgctgtaataatgagggacgcagacggtaaatcaaggtgttttggctttgtcaattttgaaaacccagatgatgctgccaaagctgttgaaggacttaatgggaagaaagtgatgataaggagtggtatgttggaaaagcccagaaaaaatctgagcgtgaacaagaactgaaaggacggtttgagcagagtataaaggaatctgctgacaaatatcaaggtgtgaacctgtatctcaagaacttggatgatactatcagtgatgaaaaacttaaggaaatgtttgctgaata

SEQ ID NO: 25321 - DNA, 351 bp, Glycine max
gacacaaaattgcttcgaactaaaaccgaactcataatattcatcactagaagtgttggatgcatttctatttctaactaattattgtgcttattattattgttgagaaagaaaagaatggcaaagttaataaaattctttgagttgaacacaggggccaagattccttctgttgggttaggcacttggcaagctgagcctggtgttgtagccaaagctgtcaccacagccattctggttggatacaggcatattgagtgtgctcaagcgtataacaatcaagcagagattggttctgctcttaagaagctttttgatgatggtgtggtgaaacgtatggacttaatggat

SEQ ID NO: 25322 - DNA, 239 bp, Glycine max
tgggacacataatagcttccaactgaaaccgaactcataatattcatcactagaagtgttggatccatgtctatatctaactaatcatgggccttattattattgttgacaaagaaaagaacggcaaatttaataaaattctgtgagttgaacacatgggccaagaatccttctgtcgagttaggcacttggcaagcttgacctcatgttgcatccaaaattttcaccacaaccattct

SEQ ID NO: 25323 - DNA, 231 bp, Glycine max
tgggagaacatatcacccccatgtttacctagagctcctgtaactttgaggtgcattttattaccaacctctgcaactttgcttctcaacatgaaatactatcttcttccctctattacttaactcaatatagcactgaaggtaacacattctgctttactcttgctaaaaaactggaagtttttgcttcctactacgccatcgccaaaagccatcactgattttctttac

SEQ ID NO: 25324 - DNA, 426 bp, Glycine max
gacacaatattttccttttccctctctcgttccggacttccaaatcgcaattcctcttttctttctccgagtctcagcaatatccatcatccttctctctccgccgcacgcggcggcgactgttgataccctgcttcttatacagatccgccgatccttcttcctgccaacgccgcctcctggttccctctcttccccaacccctaaccacatcttttcacccaattttttctttaattattattattaatttgttaccgttttcactttcattatctaatatttttatttttttaattgcatgctgcaaccctttagttgcggacccggtttatgatgattccttggcaaacaacaaacggatactgaagaaatttgtggtttcgcaattttaccccctcaaaatcaaaagtagctagagtctac

SEQ ID NO: 25325 - DNA, 302 bp, Glycine max
  modified_base (267)..(267): a, c, g, t, unknown, or other
acgggcatgagatcaaatctctcatcatatatttaagagacatgattatttgtcaatcatattacaccatattgatatttgtcatgatttgtgaataagagtcacttgaacacacttaacatttgaatttgaaactgattcaaaagttgggcagcgtgatttccaaacttggtcattggcaaattgttacatgcttcaacaattggaaacataatcttatttatcaggtctaaagggaatgttcttacacgatactcagataatggncaatggaaacaccatttgatttccattttccaaca

SEQ ID NO: 25326 - DNA, 287 bp, Glycine max
gaaggactcaaaattgataattttcaatgagtgaatgcagcagcagagtatccacagaagtatcatcatattaatgcttataaattaagcatatagttatccaaatacaagtttaaatgagttgtccaaaaaggaaaagaaaggatgagaagaacaggttcatgaaacatatatagaagtgtttcccccattggaaaaagtttttcataatcttggcaaggcgcgggggatagtgcgtggttggtcccaatcagtgacaatgtgatcacgagtgatatccttgaatg

SEQ ID NO: 25327 - DNA, 426 bp, Glycine max
  modified_base (348)..(348): a, c, g, t, unknown, or other
  modified_base (352)..(352): a, c, g, t, unknown, or other
actcaacatcaaattagtttgattatgattcacttgaagaggtgaagagacaatgtttatggtaaagggattaatacaattgatatcacattttgtgagattgtgagagtcagaatgaaaagataaaaatagtatatgataggatcataataatgatatcctttctaaccatcaccataaccaagaaacacacatattgttgaatgagaggacaaccatataatttttgaaatgaagacaaacctgaagtaacagaagatggaattttgttaataacatggacaacagtgaggacttcttccccaaaactcactaggaacataggtccacaataaaagagaataagtngttntagcaatgtggcaatgtttcctttcaacaactccattttgttcaggagtgtcaatataagaagtttgatgaaag

SEQ ID NO: 25328 - DNA, 417 bp, Glycine max
ccacgcgtccgcccacgcgtgcgtggccgataagacgaataagggggcgagagaagttatgagggtttttgagtgcggcggtccaaacactcttctctgcagcttttgcctacaactcccttcaccatggctgaacaaaccgagaaagcttttctgaagcaaccaaaagtgtttctcagcacaaataagactgggaagggaaagagacctggaaaaggtgggaaccgctttcggaagaccattgggcttggatttaagactcccagggaagccatctaaggaacctatattgacaagaagtgccccttcactggcaatgtttccatccgtggccgcatcttggctggaacatgtcacagtgctaagatgaacaggactattattgttagaaggaattatctccattttatcaagaag

SEQ ID NO: 25329 - DNA, 361 bp, Glycine max
atccacaggagtgtaagagagtttaaggggacttaacttacgcaccatgtgtttgctcaatcaattgagttagacctccttaactatagagcagtagttcatctatgcatctccacaaaatatgatcatgggcaaaagaagtaacttcactgtaaaatattgatttcaaaatcatcctactagtgttaattgaaaacctggtgtactaaaatttattatttggatattttatttaaaatcattcaaagtttagaaaaatttagtgagaattatcgattagctaaaaatgaagaattcgatattccaacaaaaaggataattcggacattttattctccctgaactctcacacatcttcctc

SEQ ID NO: 25330 - DNA, 209 bp, Glycine max
ggacgttcacattcaggaatcgttttcttcagaaatttgccatcgttgagagaagcgtgagagccttagtcgttcaagatgagagctaagtggaagaagaagcgcatgaggaggctgaagaggaagcgccgaaagatgagacaaagatctaagtaggtgcttgagcaggagttgagatgagctttccatctgctaccagcctcatgaca

SEQ ID NO: 25331 - DNA, 456 bp, Glycine max
ttaagcgagacgaagccttttttcgctcgaaggccaaatggaattgcggttggcatatatgtagcgcttgtgggaagggatcgcattatatgtgctatacttgtacctattctttgtgcaagagatgcacaaaaaaatgccgattttgtctctatcagagaaaataaaggtttatgtggaatatgcaagaggactataatgctgatagagaattgtgcccagggtgataaggcggagtgtgaggtggattttgatgacaagagcagctgggagtatcttttcaaggtgtactggatgtatttgaaagagaagctatctttgacatttgatgagatccttcaagctaaaaatccgtgcaaaggtactgcttccataagttttgaggttcaaacttgctcatgacctgtgagccaactgtgaatatatgtataataaagaactaaatttaccctaatg

SEQ ID NO: 25332 - DNA, 447 bp, Glycine max
taaataaacccatatcctagaacttgatgcatgattaatagtacttgaattcattgatcttgatattgtgagccatgcatgattattaatctaatagggaaacacgaaacataaatgaccgtttctgggtccacatgatcaacacaatgaaatgggatacttgaaagcttgtctactttgagagagaaaaaaagacggcaggtacgtctgtgtggactgatgcataaagtccgaaaagtgaggagcgtgtcggtgcattcttgcctttgcaaaaaatgaaatgaaatggtctcataatatacgataatggaatacaaacatgacgcttgataagatggatcatattatagtttcacttcaagatgaacattacaacaacatgtctcattattgaacaatatcagattgtcttgcatgcatgtaacattgattcaaaacaacttcaat

SEQ ID NO: 25333 - DNA, 51 bp, Glycine max
  modified_base (5)..(6): a, c, g, t, unknown, or other
ccggnnctgaaaaaccgggtcgagacacacgcgtgcgcccacgcgttcgta

SEQ ID NO: 25334 - DNA, 345 bp, Glycine max
accggagggggaggtcctctaaccaaattgtagtctttttccttatttgtatgtaattaattgggtaaattactctcctctaaaagatgctttgattacactactcccttccccatgttacactttagtgtatattaagttgaatgagcctccttggaatgttctctctctttaagatagaagggtaaaaaagggtattttctcggaagaagatgatagtgaaaatagctaagaattgttatagtaattagttaattagtaagatggttaagttcgatacataaacatgatgatgtgaggggaaagacaacattcaagttaggtttttgtgaaatggaaataatc

SEQ ID NO: 25335 - DNA, 121 bp, Glycine max
  modified_base (5)..(5): a, c, g, t, unknown, or other
  modified_base (87)..(87): a, c, g, t, unknown, or other
ccggnccgaattcccgggtcgacccacgccgtcctaccggttcgggaggacaacagaggggaacacattactcattctattcatctntagcattgtggattgaagataattgcgaatgtgc

SEQ ID NO: 25336 - DNA, 387 bp, Glycine max
  modified_base (4)..(4): a, c, g, t, unknown, or other
cggnccggaattcccgggtcgacccaagccttcctaccggttgcaaaaggacaacagagggggactggaatccttttttttttttccctctcgctctttcttcaattccaggctttattctcatgtctttcaaaagcctcaaccggcccaatgccccatcaagcatgggtgttgctgatcacagcaagaacaccttcatggaattgaagcagaagaaggttcaccgttatctgatctttaaagttgatgagaagaaaagggaagttgtggttgagaagactggtgacccggctgagagctatgaggatttcgctgcatctttgcctgagaatgattgcagatatgctgtctttgactatgatttcgtcacttttgagaactgtcaaa

SEQ ID NO: 25337 - DNA, 383 bp, Glycine max
  modified_base (256)..(256): a, c, g, t, unknown, or other
gacccaagccaggatttagaaaggcctggtttttgttcccaaaaagtgacaaacctccaaatcaccatacaagatttgatgaagaaaggagagataaatggggagagccccaaagggaaaagtgttgagtttggtgaggtgaaagggcagctttgagcagctcaagagaacatcacaaagttgtttgacgcccaccgcaagttgatgaagaatgtggaagaaggtaccgtgtcttctgttgggaaggatgcagcanagttaggtgaaattggaagtgtcagcaagaaggagagtttcagaacaggcacggggagaatcagaaaaatagggacattgcatttggagggcaaggactgcagttttactgcttaactaggtgaggg

SEQ ID NO: 25338 - DNA, 447 bp, Glycine max
  modified_base (6)..(6): a, c, g, t, unknown, or other
cccggnccggaattcccgggtcgacccacgcctccctaccggttgcaaaaaccgccaaaggggggttggaaccagccaaaggtgaacctcagcctcaggatggagaagcaaaccctccaacccttcccaacacgggggaatgattcccgctgcttttggtcttgggttgcaagcttttgaaataatggcaatagccgcagtggggaacaatctgataacctacgtgacgagtgagatgcacttccctttgtccaaggctgccaacctagtcactaactttgttgggaccatctttctcctcgccctcctcggcggctatctttccgactcttacctcggcagcttctggaccatgctcatctttggtttcgttgaactttccggtttcatattgctttctgtccaagctcatgttcctcagttgaagccacccccatgcaatatcaa

SEQ ID NO: 25339 - DNA, 291 bp, Glycine max
gagggcacaaccaacgtgaggcatggccttatcctctccctccctcttttcagctgttaacgccacatattcagtaccccatttccatgcactgccacttacactttcttcttcttactttccaattaatgttagaccctccacccatcatgttcttgtctctgatcataatcacaaatggagaacaaaagtttcatttttcacttccttcttgaagcataaagggtaagatgccaagatcatctacgaagaactccttgaggccatggctccacttgatcgaggggctgc

SEQ ID NO: 25340 - DNA, 321 bp, Glycine max
  modified_base (64)..(65): a, c, g, t, unknown, or other
  modified_base (147)..(147): a, c, g, t, unknown, or other
ttcccggggtcgaccccacgccgtccgtcccggctgcgaagaacgaaacagaagggggttctanngtgtgtgattggtttgttggttgtaacctcgttgctgtcttcttttggttgttctgtggtttgtgtttgttttttctctcancctgaaaaatgtcttgctgcggtggtaacctgttggttgcggaaagctccttgcaagtgcggcaaccggctgcggaggctgcaagatgtacccagacttgagctacactgagtcaaccaccaccgagaccttggtcatgggagtggcacctgttaaagctcaatttgagggtgc

SEQ ID NO: 25341 - DNA, 57 bp, Glycine max; identical to SEQ ID NO: 410

SEQ ID NO: 25342 - DNA, 428 bp, Glycine max
  modified_base (99)..(99): a, c, g, t, unknown, or other
ccgtccgaccggttgcaaaaggacaccagagggggattccgatttatatttagtgcaaaagacatagctattaacagttcgctttcactctctgtaganttggttttgtgtgatagcttcatagttatttcactctccagatcatgccttcaggtgctaggaagagaaaagctgccaaaaaaaataaggcaaagaaaaacagcatcaacccatcaaccaacaagcccaaaggaaatggtgatttgaagtcgcgggatgagaaaggaagtgatggtggtgagggtaattctcctgcatttcgtgaacatggtgaccatcgtaatccattcaatgatgggagtgaagatctggaagagagagggccatcagctgctcaaccacatgctcctgatgtcgtcgggtccctgaaagaagttgttagtgatgtc

SEQ ID NO: 25343 - DNA, 426 bp, Glycine max
ggaattcccgggtcggcccaacccttccgaccggttgcaagaggacgacagaggggggagaaccaaggttctattttttctgcatccaattcatcacactttcaatttccgttacctttttttgatttggttttttttttttttttgcatttgttttcgttgaccaccgattcattggggttacattaggtaatcactgcaggggtactatcagcgatcagcgatgttgtgtctcagaaacttaccgggatacagaaaattcaactcaaacgacttcttttcaaagtgatttttggagccgcttatcttggaccctttggacacttttttcatttaatactggataaaattttcaaaggaaagagagattcaaaaactgtggctaagaaggttctgattgaacagttaacatccaatccttggaac

SEQ ID NO: 25344 - DNA, 341 bp, Glycine max
ggaccgaccttttccattttttatttatttgtttgagataaagttgtgccacgtgggagggtgtgagtggacccagagggtgatgttaggagggtgagttcttcgaacacttgaatcggagggactgcagaagtcgcaacccaaccaaccatggcagcttctgatcccgacaagttgatggtcaaagctgataaactaacaagactcagtctcacgaagtggagtgcggattggaaaagtgctactgttctttatgagcaggcagctaatgggtttagagttgccaaggactatgagaatgctaaaatagcatatgagaaagcttcgaaagggacagaaat

SEQ ID NO: 25345 - DNA, 223 bp, Glycine max
ggagtaagcaggcggcatggcattctcagcggtctggcgactagcgaatcttgggcgacacttggatttgagtgaatcagtgaacaaggctgcgccagttgggtcaatcaagttgaaggtagcttcagaggtttctgaagcattatcactgggtcgtgctgttgttgctcttgaatctaccattatttcgcatgggatgccatatccccaaaatttggaaact

SEQ ID NO: 25346 - DNA, 391 bp, Glycine max
gcaaataacaatccatggtcactgcgtaaactccaaaatatgaaccttaagaaacaaggttgtcattaagagataacgaaacaaactcaacctgaaatctgtatcaaagccagtgcagaaaataacaatccatcatcactaagtaaactccaaaatataaaccttaagaaacaaggttgtcattaagagataaggaagccagctgatcagcagtaccgccagcctgctgctgagcaacattccttaggacgtccattgcctcagccacctttgctttcagggcttctggcgactcaagcaaatgcagaacttcagtctggtccatctcaagaagcatgcctgtcactttggcagcattatcaggctctaactgttccacaagggggtagag

SEQ ID NO: 25347 - DNA, 343 bp, Glycine max
ctacacgatgggttctgagttcaactcatcgtgtggaaaaaaaaggaagaaaatttaaatactatttttgtaatttgtatgtgataaagtgcccatcttgatgtatgtacttcttcacttctttgtatgtgtccctagtttgagtgcaaactaaaacattttgaagtgtttaaggtgtcgcatgatgtgactattattgtgttggattaaggaaacatggtttcatggatgtattgttgtctttgtgatctgtgatattagatcatgtgtgtatgtacaaagcatttatccacctaggatgatggtttttgaccatacccatttgaaaatggcatgggttaaa

SEQ ID NO: 25348 - DNA, 382 bp, Glycine max
acgcgtgagaatacgaccgaacgctctagaggaaccaaacttacgtacacatgccatgaaaagcataacaatctgggcaaataccctataactacactagttgaccaatcattatacaacaatccatactctgacaaaccctagaccttacacaacatacatgtctaacatcacattcatctttcctctgctgacgtaataactaacaagccctaacagattccacttcactacagaccctcacacccaatttccaaaaggacttcctctggtccgttatcatgagacatacaaatatcttaatatcacctagatttacccggtaaattatccaactcttatcgcccatagcgtacgcactatatcatttgcttttgtcaca

SEQ ID NO: 25349 - DNA, 468 bp, Glycine max
cggaacgaccgcatcgtccgaaccgttcgtcgaatacgacagaacgacattatggggctcaaatgaatttggtgatcgagagtgcttggaacagtttgatgaaaaggaaagtactagctctcttcgttgcttcaattttggtagcatgtcaatgccatgcctacgatatgttccctctacgaatgaacactggctatggtgcccgtactcacgacgtgaaatgcgcaagtcggatgcttgctgtggaagcacactacatctttggctttgagaccattcctgaagaatgccttgaatcaacaaaggaatacatccatggcaaacaatatagatcagactacaaaacagttaaccaactaacttacttttatgccacaaaccttgagatccataccaaggacacatttttgctcagtatacatggcaccgtactctctaatatatcatactacctaaaacatggatatg

SEQ ID NO: 25350 - DNA, 144 bp, Glycine max
gctcgcctagccatgctcttcaattgctaagaacttgctcagcacattgtgtcgcgcttagcgactttattccagaccatgtctttcttatccagattgctcgttctcgttaagcctaatgcgaggcttagcgagttagtacct

SEQ ID NO: 25351 - DNA, 289 bp, Glycine max
gaacgagaatatgcaagtgtgagtgggacgatggggtgagaaacaggagtacgcaacatccaatccaacgatccaaacaaaactgcaaaacaatatacaattgaatagcagtggcgtttcgacgcgcacgaagcttcttctacttcttccactgcgccacattcattcattcaattttattgtttttaccctaattactatcgccaaccccctttttttttttcttcttcttccttttttcaatttcgattgcatggaccatttcccattctaacacctacaatttttc

SEQ ID NO: 25352 - DNA, 280 bp, Glycine max
gatccaattgaaaacgaaattgacacaaactcaacagatcgaaaatccataatgttgttgcgtaagcaacaataaaaatctcccatttgtgttttcttctcttcacgcacaccaacaaaacctctctctcatcggaatctccaaaaagaatggacaacaaaacgcagcagtccgagagtaagcaaaacgacaacgacgaggaagttgcgccaaaacgacaagaccctaacccgtcgtctggcgggtggggcttttcaccgctctcgtttctctccgatct

SEQ ID NO: 25353 - DNA, 348 bp, Glycine max
agcgagaaactactaagtaaattgcttgtccgaagcagtgggacccgcggatcatgatacagttcgaatcgacaatctcattcgagcacagtatgatgtacagagacgtataccatgtcatggtagttcataatcacgcactggatttcattacgagaatgctccttcacattgccagacgcctgctctgagatgtggtcatgccgctgttcctgaatataaatctgctgaatggcagattctccaaccatcaactgcatctacctgcctcaagaagctatgttactgctcctagcatagcacctgtccaagcaactaccattaccagacctcagcatgtggacaatg

SEQ ID NO: 25354 - DNA, 373 bp, Glycine max
ctgtggcactagaagcattattagttgatgttgtccttgacccgtgtctttcagctttggtttcctgaaaatcaaaattaaaaaaattagaatcacataggtgaaagcgccaaattaatacaatattattagctttaaacaaaactaattaactctctctcgatctctttcttttcctgaataaaatccactaatctaattccttgcaactaaactttgaaaatctaatatttccttggttcatgtaaattttcttaattatatacaagtctaagccattagagagtaaacggatcaagaaaatgaaaattatgaagcatcaagttcccaaacaaaactatgtaaagccttgattagtgactagaactagaaa

SEQ ID NO: 25355 - DNA, 421 bp, Glycine max
ctgtggcactagaagcattattagttgatgttgtccttgacccgtgtctttcagctttggtttcctgaaaatcaaaattaaaaaaattagaatcacatacgtgaaagcgccaaattaatacaatattattagctttaaacaaaactaattaactctctctcgatctctttcttttcctgaataaaatccactaatctaattccttgcaactaaactttgaaaatctaatatttccttggttcatgtaaatattcttaattatatacaagtctaagccattagagagtaaacggatcaagaaaatgaaaattatgaagcatcaagttcccaaacaaaactatgtaaagccttgattagtgactagaactagaaatacatctaaatcaatttgcaaaaccaagccttctaagaaatactccaa

SEQ ID NO: 25356 - DNA, 470 bp, Glycine max
agaagacgacagaagggtgcccttttcccctcagttcttggcgggacttgtgccattcgtggtgcttttggttgtggtaaaacagtcattagtcaggctctttctaagtattccaattctgatgctgttgtatatgtcggctgtggggaacgtggaaacgaaatggcagaggttctaatggactttccccaacttacaatgacattacctgatggtcgtgaagaatctgtcatgaagcgcacaacactagtggctaacacttcaaacatgccagtggctgctcgtgaagcttcaatttatacaggaatcacattagctgagtattttagagatatgggttataatgtcagtatgatggcagattctacatctagatgggcagaagcattgcgtgaaatctctggacggctggcagaaatgcctgcagatagtggatatcctgcataccttgctgcacgtttagcctcttt

SEQ ID NO: 25357 - DNA, 378 bp, Glycine max
aagaatacgaccgaatggtactctactaccctcagttcttaacggtactagaggcattagtgaagcttttcaccgtggcagaccagtcattattgcatgcatctttctaagtattgcaattttcgcatctatcctatatgcactctgaagtgaacacagaaacgcaccgatccatgatctaactgactctccataaattacaatgacattagacacatattcgccagataacattgtcatgaatctcatatcaatgtttggtaacactataaacatgccaatgcctgctactacaaacttaaatggatacactattcacattctctgtatattttagagatatgcatgataatgccagtttgatgacatataatacat

SEQ ID NO: 25358 - DNA, 469 bp, Glycine max
tccgaccacgcgtgcgacgactcctacaagacgacacaaaggacaggcgttaccggaacaattgtaccacaaattaaaggctggccttgacgtgaggcactagcttgcactacttcgggcaaacgtgcctattgatgacatgccccaaggtcaagtcactgaaattggcgactaccaggggacaggcttcatagccactcttgaccattactgtaagcccacattgctacctgtctcttgattgactcattcattgtgacgctacaacgctagcttatatatctgtctagtgcctttgttctaccttgtgacatgtaactacaagtgcagaatcttgcaatacatacaatggaacacattatgaagaacatgaaccaatcttgagaatgacccatttagagtatgcaactatttaaaagcttaaaaatgacacacttagcacatcagaagtaacattatcaggaggaca

SEQ ID NO: 25359 - DNA, 474 bp, Glycine max
ccgctcctgaattcccgggtcgacgccacgcgtccgagacgacagaagggggaaaattcatcaaatcccccttcaagtggtttactgccgagaattcattgactagctctcaaatttgaaattggtcttggatatggaaacaacacttactagagaatatattaccctccatggtagcctgcccactaacgtttttcatgtctttacatatatgtctataaattcttcttgtaacaagtgcgacaatgacaagaatcaacaaccaatgtgcttcaggactgtgtcttttctcatcaagtgtggcaacacttgaagcttgacctacacattgcgttttatattgcaaagttaattaattcaagggtatagtaaaatcatgtttgcaactacttgctggacgttctgaaaagctaggaacacaactatctttcaagatagcatttgagacatgttgcatgtgggtagaggtgacaa

SEQ ID NO: 25360 - DNA, 364 bp, Glycine max
  modified_base (349)..(349): a, c, g, t, unknown, or other
gttttaagaaagttaggccattttgatctatgcgcattccttaccatgacttctcttttgtttgtttacctttatttctcttacgttcttgtatataactctttgatgcttttagtgtgtttttaaatgtatgcatgagatagatatttattcatttgatgcacatgaacaccaacacttcttgcatacacggtgagttgaaaaagggccctatacccgggtccgtgggaacataagaaatggaggtgaatctgtgatcatgttaagtctccgacatgcttgatgacagtgaaacctcatctagagtttttctcttcgatgatatattgtcgctggtagtccctaccgncacaatgttgatatc

SEQ ID NO: 25361 - DNA, 327 bp, Glycine max
gggggtgatgactgggatataggtgcatgccacgaaatcatatatatgcatgcacataagatgaaggttcctatatattttggcattccctcctcatttaacgtccatccacattttctgaatccttttctctctctctattccttggtgattttcaaggaactcatttgtattggtgatgagagaagaaaacaagctaattaagaagcaacgatgagcagcgatttgtaccgattcgcagtatcatcccacttcaataggtttccaaaatcggtctccctccgaaagaaagttccatggtggtaccagatcctggacccgcggtcc

SEQ ID NO: 25362 - DNA, 309 bp, Glycine max
tactggtgcaagtagacgagggaaggggtattggtgtctaggtttcagtagcatatagaacaaatttaaaatttggaacttcaaatgaggatcttttatgatgcaattaggcttcagtaaagcaaatattaaatggaaagttgatcttaattcttaaatatggagcttgagtctctgatatgccctaaattcagtttaatgttggatggaattgacttaaaatttgcttttgatcttaacttgaacatgaaatgtttgttctttatttcctctctacccggtcttgttttttcataaatttattaccta

SEQ ID NO: 25363 - DNA, 54 bp, Glycine max
tgttgctatagaactactaaagggtactcttttcacaacacaacacacttacac

SEQ ID NO: 25364 - DNA, 83 bp, Glycine max
tgctgctgctacgagacgacaacagacggctacggatccgggaacactacagaactgggcggctcgcacaagacgacacaacg

SEQ ID NO: 25365 - DNA, 332 bp, Glycine max
gaaggaaaggggaacccaaaccgaaaccctaaccctaacggagagatggcggagcacttggcatcgatattcgggacggagaaggacagggtgaactgtccgttctacttcaagatcggcgcgtgcaggcacggcgaccggtgctcccggcttcacaccaagccgacaattagcccaacattggttctgtcgaacatgtaccagaggcccgacatgaacatgagcattatcaccaaccccgatcagccacaaccccaatcccttgaccccgacaaggtgcaggatcacttcgacgacttctacgaagatctcttcgaggagctcagcaagta

SEQ ID NO: 25366 - DNA, 392 bp, Glycine max
ctctgtccttaattcccgggtcgagccactcttccatacttctgataaaacaccacagaagggttacaataccaatacaaaataccacataactgggcaagcgaaccttgcacatgctggaggatgattctaaacatggcaacacattcatcctctactaacatatataactcttcccttagtctcatatcaatgcacttaacatactaacattcaaaatacatcaacttaccttatttcgtactataacaaaaattctacttaaatacacttctacataccttcaatccattcaaactacatactattcaacatatatattacataaatcaaatcttactaactaatagcaataatgacttcatataatatatcacattaatgaattttta

SEQ ID NO: 25367 - DNA, 194 bp, Glycine max
atgaataccttaagacatactatactactacaggtgatatgagcatttcactgggcgaaaccataaatgtactatattataaaataatattatcttattcataaaccttgcatttaacactttactgcaactatataattaaactattatatcaattactattaatcaactaaatatccgttttaaccttatat

SEQ ID NO: 25368 - DNA, 329 bp, Glycine max
aggagcatgttgattatatagaaagtaaagggcaacaatcatttttgtttaccatgggtaaggacaccatcgctgacataataacctatataagaaatgctgacatgaataaaaaaggaatggttcaaataccatttactaacataacataaaacattgtaaaaatacttttacgcgagggttttgttgaaaacgttcagataacatagagaaaactactaatattttttagttttaactctactgtatggaagaaatagaaaaggatcatataaaagttttttaaatttataactgatcagtacacccggtctactaatatattctaa

SEQ ID NO: 25369 - DNA, 301 bp, Glycine max
ttacaggatatgcattttatttacaacagcgatggcttctgtgcctcaaccaaaaatctcccttctaaccttattcttcttctcgtccttcaccatcattgcgcatgcaattgttcctcaaaacgaaaccttcaaatttgagaactcatgtgaacttggaccctacatcgttgagtacggtgcagattacataatgataagcatcttcaactctccattccaagttggtttctacaacaccaccccaaatgccttcactctagctttgcgtgtatggcttcaacgctcggatctactattt

SEQ ID NO: 25370 - DNA, 101 bp, Glycine max
gcacctaccggtccggaattcccggggctatccacgcgtccagactgcttgcacaagactacaaagtggtacctcttctatagtgccacctaaattcaatt

SEQ ID NO: 25371 - DNA, 56 bp, Glycine max
taccgctgcgaggataccacagaaaggtaccgttgctagatgacggcagatgggtt

SEQ ID NO: 25372 - DNA, 344 bp, Glycine max
atgcgagaaaacaccacaaaatggctccatttagctaatccaaacctaaaggggccttccgttaaaaccggggactctacttttctttacccatctaagcaataatatttcctatatatataccgaaaccattgctcacgccaaacctataattttacctattcaaaatctaaactacctttgatacatcattatctttctaacaccagcacccatattatatcaattttttaataataataccacccacagtttcctattactttctcactataatgcactcttcaattgaaatcctatgatattctatacttacataaacactggtgaaattcttcttatca

SEQ ID NO: 25373 - DNA, 431 bp, Glycine max
ggcacaagtgagtttgttgatcgagataactagaaacagtgtgatgaaaatgaaggtccttgttttcttcgttgctacaattttggtagcatggcaatgccatgcgtacgatatgttccctcttcgaatgaacactggctatggtgcccgtactccggaggtgaaatgcgcaagttggaggcttgctgtggaagcacacaacatctttggctttgagaccattcctgaagagtgcgttgaagcaacaaaggaatacatccatggcgaacaatatagatcagactccaaaacagttaaccaacaagcttacttttatgccagagacctcgaagtccatcccaaggacacatttgtgttcagtatagatggcaccgcactctctaatattccatactacaaaaaacatggatatggggtggagaaatttaact

SEQ ID NO: 25374 - DNA, 256 bp, Glycine max
actcgtccaaacacctcagattataccacataatgctctatcattttaaaagggcctttcatatatacaaggctgtctcttattccttatactacaattgaaaatacccaccttctaatctttcaaaacaaactcaaactctctttcacaaacattaactacttctattcattaactccttattataaatctacctaatatcaaattattactttaatttaaaaaattttttttataaaaaaaaataaaaactttt

SEQ ID NO: 25375 - DNA, 51 bp, Glycine max
  modified_base (24)..(24): a, c, g, t, unknown, or other
gcctgcacgtacccggtccggaanttcgccgggtcgagcccacgcccgtcc

SEQ ID NO: 25376 - DNA, 430 bp, Glycine max
gaagcaaaaacgaaatcacaacgtcggaagctcccctctctaagtggcggcgacggcgggcgtgcacggcggtggttcaccttctacactcctctcatctcgtaagtctttgggatctatcgaacgcatagagaaactcttctcctcactcttcatcgtgcttcgcttcgctttatcgcatattaggaaactctccaggacatgtgaaacttgtcaaaatcaggatgagcaatgacatatttgatagacagttgttagcagagaagttgttgaaactcaacaattcacaacaaagcattgaatcactttcccattggtgtatttctcaccggaagagagcaaaagaaatagttgaaacttgggataaattgttcaatgcttcccaaaaagagcagcgtgtctcttttctatacttggctaatgacatatt

SEQ ID NO: 25377 - DNA, 68 bp, Glycine max
tggtgggagttctgttcgaaatgaagagaaaactcgcagattacttgctggaggtgaagggttggatc

SEQ ID NO: 25378 - DNA, 418 bp, Glycine max
ggaatcctgtttgggaggagcatatactaaattctcaactaggggaccacaaactcacttgtctctctaacaaatgaacggctagacatgacttttgacagaataatatattatatgaataaaagatggtaacttctggtgatgttctttacagtgtttagtgtggtcacagaaaatgccatcaagtttgagcatttcaatgcatggtttagtactttattcaagacaatttttatctaggaaactagtggttcccaattgatgtcagatttactggctctagactagattatctgattttgtgctttgttttgttgcagctcatctcagctcctggaatccttgccactttcaaatgtgagaattttatatctttaatcaaaatgagattgacttaattgcttatctatgctactat

SEQ ID NO: 25379 - DNA, 402 bp, Glycine max
atgtgtatcgattttatcctggaaaatcattagtgacccaaattaaatactctttaaaaatactaattaaaatgggtaaaggattaaaatatttatttagaattttgagatactattcaatatgttaaagaaaaatctaaattagattaaataatttttttcagatatcggattgcatccaaaactgttatagagcaagcttcttttcttatctaaatagtactctctttttcttgccaaacttaaaaagattattttaacataaagaaatctcgtaggatgttaatttgtctcattctaccgacactttacattggcaaaacgctgcaatgttacacctcaccacaactgcattgcatttgcagcaccactttgaaatttgtgcaaggagacaaacacgta

SEQ ID NO: 25380 - DNA, 114 bp, Glycine max
ccggtccggaattcccgggtcgaccgacgcgtacgctcatgcgtgagaacacctacgagtaagactgctgattgtttcattacatcatgtaacaccggggggagcaatgaaact

SEQ ID NO: 25381 - DNA, 312 bp, Glycine max
cacggagggtggtggctgtgggatagagagagagagatagaggtggagattgctaatactgggccaagcttcacctgatgctactaataaagttatatcctgttatcttgatgatttaattcctccacctgagtgacccatcttcttctacacttccaagcgatagttatgcaattcccatttttattctcattctgaatttttaggtttgtcctctgattctttgcaaatcactgtttcagtaattagatcatcttctgtaattttctccgcaaacctttctctggatgtctattattgctctatatttaa

SEQ ID NO: 25382 - DNA, 411 bp, Glycine max
acagcaacggcaatgtcaccaatataagcatatcgtcgattactagctcctaggattcgaatacacatcagttcgcgtgctccgctattatcagctacattcaaatgagtttgaggttgaatcatatcatttttttattctttcagtcaaaaaatggaagtaaaaatattttgtgttcaaaaaaaggaacctacatttgcattttttgttttcatcttaaagacctctttcctttggttctaatttattaccctgaaataatgaattgagttcgtataggcattttggatgatgctattgaaatagcctttcttgctatattttctggtaccccacccatttcataaagtattttcccaggtttaacgacagctacccaatattcgggagaacctttttctgaacccatac

SEQ ID NO: 25383 - DNA, 379 bp, Glycine max
tccgataagacaacacaacggaacgatactgatacgcctgatggaaacagaaagagtatgggcaccatacaaggcgaggtgcaactctaatggcaagtgcctgaatcattgatataacccatactgctcgcaatgaacatggaattcattcttgtatactatttcaacatactcaaacacaaagcgactcttaataccaatggttgcactcttagacaatgttccaattaagtgaaaatgacagataaattctttaagagcggacacataaatcagacttgactcgctgcatttaatccatttcaagtgaagcatgcacattgggagttgtaatgattataacacacactctttattgtcatgcatacatacaatgttt

SEQ ID NO: 25384 - DNA, 113 bp, Glycine max
ttcacaatgtgtctcacttttctttcttatcgggtatatcttcaaacacagttgctatctacacttcacttacttccttctttcctactttctttcttctttcaaactctttc

SEQ ID NO: 25385 - DNA, 477 bp, Glycine max
gaattcccggctcgaccgcacgcgcccgtacagatacgacgacgacgacggagctggagaccgctcccaaatcctttaccaccggtcctggtcagaccatctcacccttcgcatgtcgcttctcagtccgttccatcgctgactcttctcctttcaacaaaatccgcattcacagggatgatactgcatttgatgcataatgtcgctcgaaaaaacaacgctcctggaatcgttgtgcttcaagagtgctggggtgtcgacttcgaaactaaaaatcatgctgtgatgatttctcaacttggtcgtggatttaaagctctcattccagatctgtacacaggaaaggttggtctatatgttgcccaagcccaacatttgttcgatggtcttgattgtccaggtgctcgtaaagatatcaatgcttcacttaactggcttaatgcaaatgtgttataaaaagctggtgttactggattt

SEQ ID NO: 25386 - DNA, 413 bp, Glycine max
gtcttaatgatgatcctacacgtatttcgtgtgtatctcacaggcggttttaaaaaacctcgcgaattaacttgggttacgggtgtagttttggctgtattgactgcatcttttggtgtaaccggttattccttaccttgggatcaaattggttattgggcagtcaaaattgtaacaggcgtacccgacgctattcctgtaataggatcgtctttggtagagttattacgcggaagttccagtgtgggacaatctaccttaactcgtttttatagtttgcatacttttgtattacctcttcttactgctgtatttatgttaatgcacttttcaatgatacgtaagcaaggcatttctggtcctttatagtgaatatggatcatagatatttgtaatcacaatcatttttattt

SEQ ID NO: 25387 - DNA, 434 bp, Glycine max
ccacgcgtccgaattcgaccggccgctttaccttttgtcattcttttctactttttcatgggcatcacctcaactgtcggatgagtaaaattcttacatgaactctgcatgctttcaaaaaataataccatggtatgcaatcaatcagtcctatgtaattaatgtccaaacaaacctacgggggaggaatattaccaatgaagaaattggaaaatagctaaaccttccacaccaagaaaattccacttaatagacaatgataataatatccacataactttgtttctcgcatttgcatatcatcttatgttttccaaacaacatcatccaagcttgttgaaagtttcttgcacaacttatggaactccaatgtatctccttttgccttccgtacctctaccatgtgaagagaaagtgccacttgaaatatctct

SEQ ID NO: 25388 - DNA, 381 bp, Glycine max
ccagacgtccgcacacttcagatcagatatatgatgtgttcagatcactaaacggtataggggctcctaaggatctggctcttgttttattagatcctctttacttttgctcttcaaacttcactctacttcatttgcactgtcctattaccattataatattgatacatcggttttcgctcatcatctctaacggtatatatgatattatgcttcattgacagctattgatgttcatcttatatcaataccatagtcatttaataatttatattatatcttgcataataaatattgtaagttatctttaattattatattctatcttatttatttctcattataaatatcttatttcattgaaatttaagcatgtattat

SEQ ID NO: 25389 - DNA, 400 bp, Glycine max
tactcggacttgaattcccggctcgaccgacgcgtacgtccacgcatactcccacacgttctacggctgctaatgaccacatacgggttaaaatgtatggcaatttacaagaaatcaaggtcaaactagtgtgtcaactttagcgtaacctctatctccccactctactcccctattcccactttacgtacttcttcacctcttctttctttacaaaatacaatatcttacccttcacacactcaccccttttgttcatatctcctcaatctttcatctggcaacttctcaattctcaccaccatcatcctttcactagaatctacctgtgctcttagctgttctatgttcatacgatatagaaactttaattttatctgtgtacaaatttcaccctgat

SEQ ID NO: 25390 - DNA, 209 bp, Glycine max
gaatcacgcactatcagtacaacaactcactcacgaagctggacaatttcatgaagcctgccatggcttcctcgtgtgctttctcttccattgcagcttttgccatctacacaccaatttcccataagaatggatcactcttgtgaagcacaaaagcttcttttcttagtgggaggaaactgaatgtgaacaattttaccttaccaatt

SEQ ID NO: 25391 - DNA, 242 bp, Glycine max
tcggtcctgaattcccggtcgatgacgcgtacgtacactcgttctatgacaacacaactgattgttacgcttatatcgttacttcagggattacggccaaaaatctgatcacgggagggcccaaacttatttctagtcttaagcactctatattcttaacatatccaaatacttgacaacttgactattacatattctttacattccatttttctataaaactgaaaaattcgcaaattcta

SEQ ID NO: 25392 - DNA, 400 bp, Glycine max
  modified_base (90)..(90): a, c, g, t, unknown, or other
ccggaccggaattcccgggtcggcccacgcgtccaaaaagaggtaacaatgggtggatgtaagggacctatcaccacatttattgtgaancccttcggtccgttcaaaaaagaggactatctcaatattgtctcacaaagacttctgtgcagtattaacttctccgagtgtggacgaattgaaatcgaagagaattgggataatgttaaaaccatatttatccccacacgagtgtccctcacttcagaaacatgctccgagctggtggcaacccttcctttgtagatcaaaagagaaatccacgagtttatcaaggcaatttataccctattccaagatctcgactgtactttcttggaaatgaatccttttgcgcttgttgatgaaaaaccctatcctt

SEQ ID NO: 25393 - DNA, 324 bp, Glycine max
aattcccgggtcgacccactcgttcgcccacgcgtccggaagactacagatggggatggtgcaagagtttgttgttagctgtgggctattttatcgtgaggagaatatgacgttgtttgttttctttgatgctgcagtttttttgatagcttgggcatgccatggttcatgctatcaaaggtatccctcttttcatgaaaactggctatttcgagcatgcttaggaggataaatgctcaagtcttatgcttgctctgtaatcacacaatcatcccatcctttaaaaccattccttaagagtgcgttgaaccaacaaaggactac

SEQ ID NO: 25394 - DNA, 490 bp, Glycine max
  modified_base (373)..(373): a, c, g, t, unknown, or other
ccggaccggaattcccgggtcggcccacgcgtacaaacaaggatgggaaaaatgtaatcttcaatggctcctattctttttgctgcctttgttgctcgcctttttctaactctggcgcgcactaccaatgctaattatatctacgcttctcctcctccacctaagaaggtatattacccgcctccagtataccattctcctccaccacccaagaaatcatactatccacctccagtgtatcactctccaccaccacccaagaaggtttactatccaccaccagtttactctccaccaccaccaaagaaagtgtattacccacctcctgtctacaagtctcctccgccacccaagaaagtttattacccacctnccgtctacaaatatccttcgccacctaagaaggtgtattacccacctcccgtctacaagtctcccccgcctcccaagaaagtgtactacccacctgccgtctacaagtatcccccac

SEQ ID NO: 25395 - DNA, 452 bp, Glycine max
cggaattcccgggtcgggcgacgcgtacggcgtctcaaaggagggtgttaagaaccgtgaggataaaattaagaaggatcctgaaagtgggggagtatctaaagaaggtgccgataaagtaaagaaggacgatggtttaggagaggaagggaggaataagggagacaaagtaaaggggaagccggtggataattcagtttcaaaggatgggtctaagagtagtgggaagggagaaagtacagtatcttcagcctcgaaaagaaatgatggctcttccggtgaggattgtgattcatcaaataaatgcactgatgaggcaaagaagttggttgcttgcttgcgagttccacgaaatgattctcctcaacttttgttgctaatccagaacaaaggaaaaggtcctcttactgcgaaaatttctgccccagattttgttcatctggagaagagtg

SEQ ID NO: 25396 - DNA, 357 bp, Glycine max
accggtccggaattccctctcgaccaccctacgtccaaccgttgccacaacactacatacggcttaccggattactacttagtcattatattgtggataataccactcaggtgggacctataatcatcatatgaactattaaacccataaaatcactattatcatttatcaaaggccaatctccagtagaatataccgttccctataaacactgatttatatttcatactaccaagtatcatctatctattgcaaactatttatacaacttcgatattattatgaccgaaaattataacgatccttcttaatgactccctgatattgtaacttattcttataatagatgcttgaatc

SEQ ID NO: 25397 - DNA, 482 bp, Glycine max
  modified_base (134)..(134): a, c, g, t, unknown, or other
ccggaccggaattcccgggtcggccgacgcgtacggactcttgtaacatcacctttgctggtgttgttagggattgctggtaaaaatagcaaggctcgatttcaagctacagttggaaccactaaatatcctanagagattccacctttgccttggtaccgtgggacgattccacagatggcaatggcaggatttctgcctttcagtgccatatatattgagttatactacatatttgccagtgtgtggggccacaagatttacaccatatacagcatcttgtttattgtgttcatcattctccttatagttacggcattcattactgtggcattaacatacttccaacttgctgccgaggaccatgaatggtggtggagatcttttctttgtggtggttcaactggcttatttatctacgcttactgtttgtactactactacgctcgctcagatatgtctgggtttatgcaaacatcatt

SEQ ID NO: 25398 - DNA, 369 bp, Glycine max
taattctaaagaattttcattttaaagttctctaattattactagccatgccgatccgtaggattgcaattggaaggcccgaagaggctactcatccagatgctttgaaggctggattggctgagtttatctccaccttgatttttgtttttgctggccaaggttccggcatagcctttaataagctcaccaatgacggcgctgccactccagctggtctcatctccgcctccatcgcccatgcctttgctcttttcgttgccgtctccgttggcgctaacatctccggtggccatgttaaccccgctgttacctttggtgccttcgttggcgggaacatcacccttctacggggtatcatctactgga

SEQ ID NO: 25399 - DNA, 334 bp, Glycine max
gattcaaagctttgatgaaagacacacccatagggggttgagtttcctttgatggaccaaaaccttttttttttttcggacatttttcatttgggggaagaaaatatcaacctttaatcttaaaaaacaagatcttagtgagtgagcgatcattttttgtggtgcgattatcttcgactttattccagcgggtcccgccggccgggcgcaccgcgtgaccgccgacatcctgtggccgaatttgatgaagcggttctcgaagtcgctgctggacgatgatttcgaggcaaggttcaaagaattcgaggatgactcggaaatcgaggatgttcta

SEQ ID NO: 25400 - DNA, 418 bp, Glycine max
gactcagcctaattaataaaaggggaagtttttggatagtgttgagttttgtcgcagcattccatacgaggccgaagggaagagtttttgttgggtttgggaggctaagtagggtttgcgttgagaaagagagagatgggaagagaaaaggagacaacaaaggtagcttacacagtggagcagcttgtagccttcaatccatacaatcccgatattcttccagatctcgaaaactatgtcaacgaccaggtttcgtcgcaaacttacagcctggacgcgaatctctgccttcttcgcctctaccagtttgaaccagagaaaatgagttcccagattgtggcccgcatattggtcaaggctctcatggcaatgccggcgccagatttcagcctttgtctctttttgattccagaacgcg

SEQ ID NO: 25401 - DNA, 385 bp, Glycine max
atcagtgtatccatattctcgaaatcattcgcttttctataacccctgttgacgtgctcaagtcgtatagtgcagtgattcgtcgcttaatgaaaaaataaaatatatttccaccgatcgccagaatcggtcatacagtgatttttgttaaaatgaatatccgaccgttcggtcaggccggaaccacgttgctcataaaatactgaggttgaatatttatcttgtaaccaaaaaaatatctatttagtaaacgaaagcggaaaatcaatcggacgttttctatctgagagtatctgattcttaattgaactgactaaaaaactaacgcgaaactaaagctgatatcaacttggctagtcaagctcgaacacaaaaatacggtttt

SEQ ID NO: 25402 - DNA, 220 bp, Glycine max
gaaggccactccttttagcaagataacaacactggggtcctggttccattatctagttctcaattctcttcaccctttgcctctgaaagaaatgggttgtcttgaagcggaaagaacaacagtaggattggcagcaagagacccttcagggattctctgcccatacacctacaatctaagaaacacaggccctgatgatgtttacattaaagatcactac

SEQ ID NO: 25403 - DNA, 323 bp, Glycine max
ggtggcagagagcgaacccaaaactagagctacggtcccttcaaaccttccactcttctctccttttccaatcaagggaataatatttcttagagatattccgaaaccatggctcacgccaatcctatgatttttgttgttggaattctaggtaaccttgtctcctttctgtgcttctagcaccagacccaacattctatcgagtttgaaaaagaaaaccacggaaggtttccaatcacttccttacgtggctgcactcttcacttcaatgctttggatattttatgcttacataaagacgggcgaaatacttctcatcacca

SEQ ID NO: 25404 - DNA, 411 bp, Glycine max
gaggagacacaaacaaccacaagtgttcttcctgggtacacaaactctattcctagttcagagtaccgcccttttaccttgcgtacacatcaaagaagaaaaaaaatggaaggagttgggtattgtgggagtttctttcagaggtgcaagccttacatagccatggtttctctgcaattcggatttgcgggtatgaacataatcactaaggtttccctcaaccgtgggatgagccactatgtgcttgtggtttatagacacgcctttgctactgcagctattgctccttttgctattggtctagagaggaaagtgagggccaagatgacattttttatgttcatgcaaatatttgtgttgggtctacttgggcctgtgattgatcaaaacttatactatgccgggcttaaa

SEQ ID NO: 25405 - DNA, 209 bp, Glycine max
tttggattttcccaaaccaacccaacactagggctcgcgttcctttaacccagtcactattctcttcttttctactcaacgaaaaactatttctaaaaacaattcacaaaccattgctcttccctctccaatgatattaattgctacctatcctataaaccatacatctcctgttattattacaccaaaccacattattatactcttaa

SEQ ID NO: 25406 - DNA, 259 bp, Glycine max
tgaattcagagaaggtcctgctctaccggttcggggtgaaatgattaaagatgagaagaaccatggaagctatgacttcatctttgttgatgcggacaaggacaactacctcaactaccacaagaggttgatagagcttgtaaaagttgggggcgtgatcgggtacgacaacaccctatggaacggatctgtggtggcaccccctgatgctcctcttaagaaggatgttaggtactacacggactttttgctggagctc

SEQ ID NO: 25407 - DNA, 203 bp, Glycine max
ggctatttcaattgagcagatccctaattccgagggacgacgcttcgctttctttgttcagctctcgcggtttctctttttctatcagcaattgtccagtggtgagaagcaaattacaattctgagagcatttggctgaaacaggagtctgtgaatttgttaaaagattggtggtcgagtgaatctcggcgattaaaaaagag

SEQ ID NO: 25408 - DNA, 335 bp, Glycine max
ccacgcgtgcgaatacgacattacgaccctttggttcctctccaaaaagacggcggttgggggctgctttcacaagacgacacattcacccaactgctatattacgacttaaaggtacatccactacatgacgccagacctggactccattacctagacattgctcttatctacatacgccatatctccttatatactcttgatacatatctgcctgcatatccactatgttgaatacaccgtaagattccacctggcctttaacgatctgttcaagcatcatataaaccacaccttaactttacttcctacctgcatctaggaaacggacaaca

SEQ ID NO: 25409 - DNA, 413 bp, Glycine max
agaagatttgaatgggggacattgaaagttttaatcaaagctaaaagatatttctgctaatctacaagcgaaagaagatcaaaatttgaaaaaaggtggtggtcaaaaaatcagccgtggacagaagggaaagcttaagaagataaaggagaagtatgctgaccaggacgaggaagaaaggagcatccgaatggcattgttagcttcttctggaaaatcaatcaagaaggaagagacatcatctgaaaatgatacattggaccaagggaaaaaacctggcagtggtccttctgacgctccaaaagtaccttctgatgctccaaaaatatgttacaagtgtaagaaggcaggtcacttatctcgggattgtaaggagcaaccagatggtcttttgcataagaatgcaattggtg

SEQ ID NO: 25410 - DNA, 288 bp, Glycine max
ctagtggaatttcacgaggggtcctttggaacacatgccaatggacatgccatggcctggaagattatgagggcagggtattactggctcaccatggaaaacaattgttgtatccatgtgagaaagtgccataagtgccaggcattcaccgacaatgtcaatgctctgcccgtgcctttgaacattttggcagcaccttgtccattctctatgtggggaatagatgtgattggggttattgagcccaaagcttcgaatgggcattgctttattttggtcggcattgac

SEQ ID NO: 25411 - DNA, 412 bp, Glycine max
ggcagcgcttgatttgaggccaggcaagccccactgaaccaccacacctctcctcgttcacgctacccctttctgctcttcttctacctttcaagttttaaaagtataaagatggcagagacattcctatttaccttaaagtcggtgaacgagggacacccttacaaggtctgcgaccaaatcttcgaagctgtgcttgacgcttggctctagccggagccacacacggaaaatggcctgcgaaacatgcaccaaaaccaacttggtcatggtcttcggagaaatcacgaccaaggccaacgttgactacaagaagatagtgcgtgacacctgcaggaacatcggcttcgtctcaaatgatgtgggactggatgccgacaactgcaaagtcctcgtcaacattgagcagcag

SEQ ID NO: 25412 - DNA, 389 bp, Glycine max
gtttttaaggggtggattgaagaaaatggaactggtccagtgaaacctggcacaggacttacggttgctgtaaaaaccctaaaccatgatgggctccagggtcataaagaatggctggctgaagtgaattttcttggtgacctagttcatccaaaccttgttaaacttgtaggttactgcattgaagaggatcaaaggttgctagtgtatgagttcatgcctcggggtagcctggaaaaccacttatttaggagatccattcctctttcatggtccattagaatgaaaattgcactatgagctgctaagggtcttgcttttctttatgaagaaactgaacgaacagtaatatataaggattttaaaacttcaaacatattactggatgc

SEQ ID NO: 25413 - DNA, 282 bp, Glycine max
gagtgaagaggcaagatttaatagaggaattaatcaccatatgtatgaaaaagttttttcaaaaacttagtatcatatggatttttctcacaacctgtttaccaaataatttttactctctggtaatccattactagattattgtaatcgattaccaatatcaaaatggtttttgaaaagctttcaactcaaattacaacatttcaattgtattcaaaaagctgcaatccatttctatgttttgtttataaattaccagtgtgtttgaccgatgaaattcaa

SEQ ID NO: 25414 - DNA, 408 bp, Glycine max
  modified_base (248)..(248): a, c, g, t, unknown, or other
catacttagtggcatggaaagaaagaaagaaagagtaacctaaaaaccctgtgcaggctttcccagaaaagccaagtgagaaaaccaaaccctctattaccacttactacttacttcatgtaactgactatagccaccactatcactatttaggattttctgtaaaaagcctgatactcttttaccataaaacccgggagagccctcataataaaattgagagagagaataagagaattgtgtgtcgngtttgtttttgtttggtttgttgtaaggttagctagtgagtattctacacaagggtggtggtagggcaaaaaggataagacagtgaatgtgtgtgtgtgtgtgtgtgtgtgtgttgttgacaagcaaaagctatggagggtggtagtagtagctctaatg

SEQ ID NO: 25415 - DNA, 258 bp, Glycine max
gtaggtggtgcttggtggttgggatatattgttggttagtatttattgtatgtaggcactgatatagtgctgtagccttattgatgaaaaatttggtggtggagatagtcatactaaatagtagattaatgatttgtggttagttatgcaacatacatccaccctggtgacaaaatcaccgctatagatgttgatgagcacaactgctgatttatttctgtaagacttgcgtagatgctgcttatagtgtttatgtta

SEQ ID NO: 25416 - DNA, 161 bp, Glycine max
ttggggttttagagcataggatgggaaggtgcgcttggggtgagaaagcacacacaaacaaaggtgcatggaccaaagaagaagatcatcgcctcatttcttacattagagctcacggtgaaggctgctggcgctcttctccccaaagacgccggcctttt

SEQ ID NO: 25417 - DNA, 422 bp, Glycine max
  modified_base (352)..(352): a, c, g, t, unknown, or other
gctcacttccagatttcattgaaggcgtcttcataaacgcgtttcttggccgtttccgtttcctcgttcgaattcgctttttgatctgcgaaaatgagagagtgcatctcgatccacattggtcaggctggtatccaggtcggaaatgcttgctgggagctctactgcctcgagcacggtatcgggcccgatgggcaaatgccaagtgacaagacagttggcggtggtgatgatgctttcaatactttcttcagcgagactggtgctggaaagcacgtgccacgtgcagtgtttgtagatcttgagcccactgttattgatgaggtgagaaccggaacttaccgccagcttnttcacccagagcagctcattagcggcaaagaagatgccgccaacaactttgcccgtggccattataccat

SEQ ID NO: 25418 - DNA, 321 bp, Glycine max
acccacgcgtccggcacgcgtgagaagacgcctgaacggggtgaagacgatcgaacgcttatcttgaactaggggccgtgcggatctttcaccaatcagaccttgttcaatgaacgcaataaaaataatggctgatatttcttacccacactttacgccaaacctatgactatataaggaggagtccttcgaacacttgtttacatctggagcattctctcgcccattccatcattctatcgaatttgtatgaatgaataccatgaaggtttgcaaatactaccttccgtgatctcactgttgaccgtaatgctttggaca

SEQ ID NO: 25419 - DNA, 325 bp, Glycine max
ggtcacaagaaaaaaaaaaaacatgactgagtgggctttctgaaacaagaagaatgagttatctagtaacctcttctctatcttcttccacttctgtttctccattttttctcaccctttatacttctcctacttcatcttcttctccccttacctcctcaggatcctgtctttcctctcccctttgttcatcaccacaactcttctccttgtggcccttctcactttcactcccaacaatcttgatcaggaaaagggtggttctgagctttctgagtccaaatggggcaatttgctttctggtttgcaaatcttttctaagcat

SEQ ID NO: 25420 - DNA, 169 bp, Glycine max
aagaatattaattcttatgatcccaaggggagatgggaggctcatgactttaacaccatccctcttatataattaaatattaaattataggttgattattttttaacgcaaactataggagtccataataaagcgagtgttccctagaaatatacgatgtttatggact

SEQ ID NO: 25421 - DNA, 385 bp, Glycine max
gacaccaacacatccattcattgtctgaatgttggcaatgtcttcctctttctccatccatttcttcctcctcctctcaatagcccttttctcagtttgttgcttagcagcatctcaagctcccaccaccaaatcacacccctatatccttcccattaagaaagaccccgcaacaaatttgtactacacttcaactggcattggaactcctaagcacaactttgatttagtcattgatctttctggtgaaaacttattgtacgattgtgacactcattacaacttatcatcctacaaacctatagcttgtggctcaaaacaatgccccgaaattggatgtggtggttgccatggccccttcaaaccaagttgcacaaacaataca

SEQ ID NO: 25422 - DNA, 447 bp, Glycine max
  modified_base (62)..(63): a, c, g, t, unknown, or other
  modified_base (86)..(87): a, c, g, t, unknown, or other
  modified_base (116)..(116): a, c, g, t, unknown, or other
  modified_base (172)..(172): a, c, g, t, unknown, or other
  modified_base (211)..(211): a, c, g, t, unknown, or other
gggcagtctcaagaaaaggaaagatccgtcacccatctttgtgtggtagcgcgaaacacatnnctgaaagttctcagtgtattgtnncgtggcaagccgtattgtgtgatgaatcnaacctcactgtgtgagaatcgaagagtaaaaccacctcacttcacgcgcgctatcnatcggccaacgacgggaaagcgtttgggcttcagagcanccaacttccctcagttcaaaacctgaggaaataactgccatcaataatgactttaatgagcctggatcacttgctccaactggattgtatatcggtggcaccaaatacatggtcatccagggtgagcctggtgctgtcattcgagggaagaagggtcctgttggtgttactgtgaagaagaccggtgcgggcttgatcattggcatttatgatgaaccaatgactccaggtcaatg

SEQ ID NO: 25423 - DNA, 435 bp, Glycine max
agaagactacagaaggggatcattcaaaagtttttgaaatgttgtgaccccttcttctatttctatgcctaactcttcctttgtttttgttgtccttcttcaaataccgtaaaaccttcaagaatccaccacttccaccaggtcctagaggccttcccataatagggaatcttcatcaactagatagtccttctcttcatgagcagctatggcatctctcaaagaaatatggtcctttattttcccttcaatttggattaaggccagccatagttgtttcctctccaaaattggccaaagaggtaatgaaagacaatgaccttgagtgctgtggacgacctaaattactatgccaacagaaactaacctataatgggttagacatgggattttcctcatacgatagttattggagagaaatcagaaaaatttgtg

SEQ ID NO: 25424 - DNA, 417 bp, Glycine max
gaatggcggcatatgtagctgtaatgcaacgggcgagcaaatctaacagatcgggttatgaatcccttttgaaagtatataaggaagctgacctaagtcaggagaaaacgcgtattctgggctctctggcatcttcacgtgatccagatctaattcttgaagctctaaacttcatgttgtcatctgaggttcgtagtcaggatgctgtttttggacttgctgttacccgggaaggacgagatgtagcttgggcatggcttaaggaaaattgggaacacctcataaaaacatatggttcaggatttttgataactcggtttgtcggtgcagttgtctcaccgtttgcttcctttgagaaggccaaggaggtagaagaattctttgctacccacgctatgccatccattgctagaacgt

SEQ ID NO: 25425 - DNA, 387 bp, Glycine max
ccatagaaacctataatcgtacttcttgggagatgtctggtatatagttgtttaagagtatagagtagttagaaaagttatgagaagtagttaggatgcttagtgtgaaaccttaagagaatgtaaagtcgttagtagggcgttgctttgctgaacataaaggggttcaagagtgaatgttcttgtgaaaggtagatcacctaaagaattagtgatgatagttgtatgattagtgaggtagatattagttctctctaccttaattcgagcaaagtctgagggtgcttcgaggaatactttaatacctatcgtgacctctgcgtgtacttggtcatgtcttaacatgatggatgcccctgtgtgttcggtggatgcatggacaggatc

SEQ ID NO: 25426 - DNA, 413 bp, Glycine max
  modified_base (255)..(255): a, c, g, t, unknown, or other
tcaccttattagtccaggcggaaacaaatttttccttgtgtggtattatccaggtttccttgacatagtcaacaaatattggccaaggtgcacaagctacttcgaacttcttcaggcattcatcaaactgttgttctgaaggacaatcagtcagagatccccaacaatccatgacataattccaagcatttttttgcgcattagtgatttatatttagccttcacattcttgtttatgtgaaagatgcacaacanatttgtgcattcagggaatacatctttcactgcattcatcaatgcttggtctctgtcagtgacaataactccagggagggcatcacgctttaaaaaaaggcctcgaaagcgttgtaaagcccataccaaattattaacgcgttcaccctccacatatg

SEQ ID NO: 25427 - DNA, 405 bp, Glycine max
cagtctctaaaacagataaccaacaagctttctggtatgctggtgaacgcgaagtccatcacaacgacatatttatattcggcatagataacaccgcactctctaatatcccatactatgaaaaacatggatatggggtggaggaatttaatgaaaccttatatgatgaatgggttaacaagggcgacgcaccggcattgccagagactcttaaaaattacaacacgctgttgtctcttggcttcaagattgtattcttgtcacgaagatatcttgacaaaatggccggaacaaaaacaaacctaaagaaagctggcttccacacatgggagcagttaattctcaaggatacacatcttatcacttcaaatgcactttcatacaaaatagcaatgagagagaatc

SEQ ID NO: 25428 - DNA, 398 bp, Glycine max
ggttgcatcccaaatggaatgggttcagacatgtccatagcgttgaacaaaactaacagcagcaaaatgagcacacccttgttccatgaattcaaaaagcaagcttctttcttcttcaaggagaaaattaagactgctagattagctctaacagatgtcacccctgcagaactgatgacagaagaggcaacaagtggaaatccatgggccccagatgccagaactctcagatcaatttcaagggatgcttttgagctagaccattattggaggattgtggagattctgcataaaaagtttcttaaatttgaaaagaagaattggaagatctcttacaattccctgatcgtgcttgagcacttgttgactcatggaccagagagtgttgcggaggaatt

SEQ ID NO: 25429 - DNA, 321 bp, Glycine max
gatatcatttacaagggcaagggctctctctctctggctctctctctctagacttagattttgtgaatggctgaagtggaagagggacaggtcatctgcgtccacaccgttgatgagtggaagctgcaactccagaatgcaaaagactccaaaaaactgattgtggtggattgtactgcttcctggcgtggtccatgccgttttatggccccagttcttgcagagattgcaaaaaaaactcctgaattgatcttcctcaaaatggatgtggatgaagtgaggcctgttgctgaagaatatttcattgaggccatgccaacc

SEQ ID NO: 25430 - DNA, 228 bp, Glycine max
ttgggctttcctcaaatttcattttgttcctggcccaggcaccaaccccgttgtccggagccaccattttgcgctccggcaatgttcttcccggtggccatcgtaccttaaacccaccacacttcaaagtcatgggtattccatgggacgacgtcgttgtgatccagcaagggaaggatcacaatgagccctgcatcgtcaccgtcaattgccccgacaaggctggtc

SEQ ID NO: 25431 - DNA, 389 bp, Glycine max
gagtatactggaaaaaataacactatcaatatcaatattatgtaagttatactccaattttattccacattttcatgattgttttgttattaggaatatagaggtcatttaactaagcatttattgaataaatacttatcctacaagtatttataggttgtttctataatagaagagaaaacgagactaaatagttttcatataagttgcaagctattttttacgagttataatcatgagtttattattaaaaattaattgaaagcaatttatgaacctatcataacttatttttatgagttcgctcaaataattatataaatacttactttatgaaataaaattaaataaactgtaaataaattctttaaaaagcaccaatgatacca

SEQ ID NO: 25432 - DNA, 424 bp, Glycine max
gattatcaaaaccaaaaatctcacatactttgggcgccaatatcctgccatcacaaagtctctctctctctctcctctttaggctatagctaccccactgtgatattttgctggtgaaaccacatatctaccagaagcagcctctccttttataggagaaaaaggctagagaactatccttttctttttttccttctctctcttctttttctctttctcttgaaaccctaatacttgatccttttcacaatctgtagtggtaatccaaaacccaggacaaagaaagaggcaagagacatagcaaagacttctctcaccctctcaagtcccaaacagagtaacttgtattcacaacctctctctgcaccaagtatattaaatgcatgatcatccgtggtctgtttattcccttgtttacgtaaca

SEQ ID NO: 25433 - DNA, 272 bp, Glycine max
gaggagacacaaacaaccacaagtgttcttcctctgtacacaaactctattcctagttcagagtaccgtccttttaccttgcgtacacatgaaagaagaaaaaaaatggaaggagttgggtattgtgggagtttctttcagaggtgcaagccttacatagccatggtttctctgcaattcggatttgcgggtatgaacataatcactaaggttttcctcaaccaggggatgagccactatgtgcttgtggtttatagacacgcctttgctac

SEQ ID NO: 25434 - DNA, 332 bp, Glycine max
gaacaaaaataacgtgacactgctaagagagtgagagaaattggcggcggcggtggcggcggcataaagtggaagtcgtaaggatcaatggcagtttcagggaggcgcaacggcatgaacgacgacgaagaggaattagacgacaacgcccttttcgaagaacaaggtgccgtcgaagactacgccgatacccctgctcaccttcgcgacctctccgtcgccgctcagctaagcgacgtccacgccctccgtatcgctcttgataacttgactggtagtattgatgaaccagtggaggatggggatactgctcttcatttgacatgtctata

SEQ ID NO: 25435 - DNA, 104 bp, Glycine max
agtctacatttatggggagtgagtactgacaatggactttgaagggttaccaaaaggttgcattcctaaaatactctctcgcactacgccacagacctttgtaa

SEQ ID NO: 25436 - DNA, 416 bp, Glycine max
ggggaacgagttgcgtacacctcacatgctcctgctcctcctcctctacctctgcataagcgccctcgcatcacattctttgcagactcaacaagcattcatttcatttcactcactcactcttcgtttcgtttctctttctcactctagatctgtgtttctctctccaaccttcgtttcaccacacttccatcacttgtcgagtgtagaaatggctccaccaattgagaccccaaccaaggtttccagctatcagcactccccaaaccctcgtcttaacgagaggattctttcatccatttccaggaaacatgttgctgctcacccgtggcatgatcttgagataggacctgaagctccaaagatcttcaactgtgtggttgaaattgggaaaggaagtaaggtgaaatatgaac

SEQ ID NO: 25437 - DNA, 355 bp, Glycine max
  modified_base (333)..(333): a, c, g, t, unknown, or other
tgtgacatacatacatcatcaaaaaacacacgcgacacgctcctatacacacacgttgtctcgcacacattccttcattccgcaacagcaaacatctttaccttaaacgacaacaatggccgatgccgaggatattcaacccctcgtttgcgataatggaaccggaatggtcaacgctggttttgccggacatgatgcgcctagggcggtgttccccagcattgtggagcgtccacgtcacacgggagtgatggttgggatggggcacaaagattcttatgttggggacgaggctcaatccaagaagggtattttgactctcaaatacccaanttaacatggaattgtgagtaat

SEQ ID NO: 25438 - DNA, 230 bp, Glycine max
cttcagatgatgtgccatcttggaaagacgtgcaagctaattctgagaggcctcgcagctcttctcgtaatggcagttcttcaaaaaagcctgtcttgtctagcagccggccaagctcttctggtgagcctagtgaaagccgttctagccgactggtcttaagcagtggccgactatcaacaactcagagacttcaacctggttttgaatccaaacatctttatcacggg

SEQ ID NO: 25439 - DNA, 272 bp, Glycine max
aaccccacagaccttcctattttttcactgactacattttcgaatcaaaaatattctgtttccataagctactactctccttcaatatatacccttaattacataaagaactaagatcttattcaatactatctctatcaaaaccccactcttgatctattatagtctcacccatataacaaatttgactgtacaatatctcctcttcccgcataaaatactttttgccataaaatatcttaatcaatcaatcacacatacaaccttaaatt

SEQ ID NO: 25440 - DNA, 410 bp, Glycine max
gactctctctctgtctctcgaaaagggtcagtttgcagataaaatctgaatcatgtcgtggcaagcgtatgtcgacgatcaccttctgtgtgacatcgaaggtaaccacctcactcacgctgctatcatcggccaagacggcagcgtttgggctcagagtaccgacttccctcagttcaaacctgaggagataactgccatcatgaatgactttaatgagcctggatcacttgctccaactggattgtatctcggtggcaccaaatatatggtcatccagggtgaacccggtgctgtcattcgagggaagaagggtcctggtggtgttactgtgaagaagaccggtgcggccttgatcattggcatttatgatgaaccaatgactccaggtcaatgcaacatggtagttg

SEQ ID NO: 25441 - DNA, 369 bp, Glycine max
ggcttctggtcaagttcagtccagtgcccgcacggcatcgcaaatttttctttttcttctcccctttagatgagtaacgccacagactccgccggcaaaatcccaccggagacgaggcccgccgagagcgacagtggtggtgatagtgggccccggcccacgatcaagatcaatgttatgcacggatcctctcaacacgagttccacctcccggcccaatcaacttttggggatgttaagaaactccttgtcaataaaactggtttagagcctgtagagcaacgacttctcttcagagggatagaaaagggtgataacctacatttgcacctttgaagtgtaaaggataagtcaaagcttttgcttttg

SEQ ID NO: 25442 - DNA, 361 bp, Glycine max
  modified_base (109)..(109): a, c, g, t, unknown, or other
gaccccttttattgaaatcctgagcttgcattgtgctcactcatctcttacaacgaaaccctcttcatcttgttctatctgtgacgagcatcatggcctcaagagcagngttattgttggctatgtgtgtgcttccggcgatggttgtggccattcgcccagcaaagaaccctttttgcgtgaagggtcgtgtctactgtgacccttgccgtgctggttttgagacctcagctaccacctacattgctggtgctgagattatttttccatgcaagaaccaggttagcaacgaggttgtgtacacgaaaaaagggttcaccggctcaacccgagcctacacaatggacctggattaagatca

SEQ ID NO: 25443 - DNA, 412 bp, Glycine max
ggttctagtgtgtgattgtttgttgttgtaactcgttcttcttcttttgttgttctgtgtttgtgtttgttttttctctcacctgaaaatgtcttgctgcggtggtaactgtggttgcggaagctcctgcaagtgcggcaacggctgcggaggctgcaagatgtacccagacttgagctacactgagtcaaccaccaccgagaccttggtcatgggagtggcacctgttaaggctcaatttgagggtgctgaaatgggtgtgcccgctgagaacgatggctgcaaatgtggaccaaactgctcctgcaacccctgcacttgcaagtgaagtgttgggagagcaagcttcaagcagagatagcccttaattaggaataatgataaactattaatgtgtagctaaaaacttatg

SEQ ID NO: 25444 - DNA, 384 bp, Glycine max
gaagttaggtaaggcacgcgaactaatgcaacaggagtagagagtaaagtcaaagtggtgcttttcccaaacttgaagagtccaaattttgttaatagtaagcgatgatgggaaagctaaaggtgtatgcggatcgaatgtcccagccttctcgagcagttctcatattctgcaggtttaacggaattgactttgaggagattaaagtagacatttccaaacgccaccacctttctgctgaatttagagaagtaaaccctctgcagaaagttccggctatagttcatggaagcttcaatctctccgagagccacgcaatccttgtctatcttgcttctgctttccctggaattgctgaccattggtatccaagtgatctttaca

SEQ ID NO: 25445 - DNA, 369 bp, Glycine max
  modified_base (95)..(95): a, c, g, t, unknown, or other
ggctacaacaaatgcctcagcaacctatgctatggtgtgaggtgtttgatgtctggggtatagatttcatgggtccttttcctatctcttttggntatgtttacattctccttgcagttgactatgtttcaaaatggttggaagccaagcccactagaactaatgatgctaaagttgtcgcatactttgtcaggtctaatctgttttgcaggtttggagtacctaaagcaattgctagtgatcaaggaacccattttttgcacaagacaatgcatttccttgttaaaaagtacggggtggttcacaaggtattcacaccataccacccccataccaatgggtaagcaaaaatttctaaccgagaaatca

SEQ ID NO: 25446 - DNA, 407 bp, Glycine max
gacttaaagaagtgaaggcatcgttagcagttgtgtagattcaacctcaatttgcagagttacgttctaatatatttacacaagactgataagagaaaatgtctctgattccaagtttcttcggtggccgaaggagcagtgttttcgaccctttctccctcgatgtgtgggaccccttcaaggattttccatttcccagttctctttctgctgaaaattcagcgtttgtgagcacacgagtggattggaaggagacaccagaagcacacgtgttcaaggctgatattccagggctgaagaaggaagaagtgaagctggagattcaagatggcagagttcttcagataagcggagagaggaatgttgaaaaagaagacaagaatgatacgtggcatcgcgtggagcga

SEQ ID NO: 25447 - DNA, 316 bp, Glycine max
cttcatgcaacctttggacaatgctatttttaaattgttttatgctccctccactactgagtctgttgttaaattgtgccaaaaaaacaaatcaaacagtggtctcaatatctctttgtgctctgatgcatttcattgaagttggttgacaccaattcaatgaaagttactgttacacacttcttaaaaacataatagatgcttcttatactacacaacctctataactgcttaatgtgttaagttttgaaaacctgaggaaccatcgaaacattattattgatatttaatgcaactcatgtgacagcggaaccac

SEQ ID NO: 25448 - DNA, 298 bp, Glycine max
  modified_base (225)..(225): a, c, g, t, unknown, or other
accacatctgaatcaatgccttcagatttgaattgatcatcagaaaagaggtcttcaggctctggaagaaggatttcatcaaatgctttctgcaccagctcaattgcatccttattttcctcatccatatcctgatctgtatcacaatcatcacgacaagagttgttcacttcattagttgcaaagaaatcttgctctcttttttctttgtccttccatcaaatngctgcttattttcacctgtgttactcaatacagcatgcttatacatcaactgccacattttgacaaattttta

SEQ ID NO: 25449 - DNA, 424 bp, Glycine max
gaacacaaccaagagcttgtttttgagaagtctggtactattacacaagaatgaagagctccctctttcaccttctattcgtgattcttttaggactctcccattttgcatgccttaaagcagtcccagttacaagaactgaaagccttatgcaagaacccaaagttcttcatcatgcactggataatatccacaaccacaaggttatcactgggataaaatggcagcaggaggagccaatttttgctgagaggatggacttggaactccatgactacccaccatctgctgctaatggtcgtcacactccaaaaccaccatatccataatatgtgtacaaatgcttcgtgtttattgttattaccctatgaagcataatataatattataatgtggacgcagttatattagtaattaacatatt

SEQ ID NO: 25450 - DNA, 408 bp, Glycine max
caatggtgaagatgttgcaatcgaaaatctcggagaggcctgaaaatgatccagtaaaggctcaattgatggaacaacagttccagcaggaggtcacaatgttggccacactaaagcattctaacatagttcgtttcattggtgcatgccgcaagccaatggtatggtgcattgtaactgagtatgccaaaggtggttcagttcgacaatttttaatgaagcgtcaaaaccgctcagttcccctcaaattggctgtcaaacaagctttggatgttgcaagggggatggcttatgttcatggccttggatatatccacagggacttgaaatctgataatcttttgatttttggtgacaagtcaattaaaattgctgacttttgagttgcccgtattgaggtgcaaactg

SEQ ID NO: 25451 - DNA, 217 bp, Glycine max
  modified_base (41)..(44): a, c, g, t, unknown, or other
aactggagcgaccacacaaggggggtcctttttgatatgtnnnnttaatattttattctaaggcttagtgtgccatgcgcaagaatgatgataagaacaatattgttccaaccaacgcgtaacactaaactaaagagggttgtacaaaacaataaacttgtcaacaaatagtcacacgatggttatccaaaatttgccattgatgaagtaagtgaat

SEQ ID NO: 25452 - DNA, 419 bp, Glycine max
gcacgcacttagcaatcaatcaaaacattcccagtaacaataatatacacatcttcaattaagctccttctcctatagccatggctctttctaagcttataattgcttcccttcttgcgtcgcttctccttcttcatttcgttgatgctgatcaatcggcacatgcacaaacgcaggggtctcttcttcagcagatagattgtaacggagcatgtgctgcgaggtgccgtttatcatctcgtccacgcctctgccaaagagcttgtggaacttgttgtagacgctgtaactgcgtgccacctggcactgctggaaaccaagaagtgtgtccctgctatgcaagtttgactactcatggtggcaaacgcaagtgcccttagacttaattggaccactatcctatgcatgcctttgattta

SEQ ID NO: 25453 - DNA, 394 bp, Glycine max
  modified_base (183)..(183): a, c, g, t, unknown, or other
ggagcaacaaaaaaggtaaatgcttatcatttacagaatatggagtcccagacttccacacgagagaaggagtctctcaatctcagggaagtcccagaagcagataaaaccttgggcttggacatggccaagggcagcgcattctgcaagatgggtgaaggctggacatgcatcataactaanactgaggggcctgatgctggcaaagttttcgttaaatgtggtgaaaattgcacctgtaccattgagggcgaaacagtgtcccaagaattgaatttgccacctgatgttgtgagcaacagtggcagtggaacattctgcaagtgtggtgaaaggtggagttgtgtcattttcaagactgaaggccctgatgcatgctctggcatgggctttg

SEQ ID NO: 25454 - DNA, 411 bp, Glycine max
ggctcaagtgtttttgttgatcgagataactagggacagtgtgatgaaaatgaaggtccttgttttcttctttgctacaatttaggtagcatggcaatgccatgcgtacgatatgttccctctccgaatgaacactggctatggtgcccgtactccggaggtgaaatgcacaagttggaggcttgctgtggaagcacacaacatctttggctttgagaccattcctgaagagtgcgttgaagcaacaaaggaatacattcatggcgaacaatatagatcagactccaaaacagttaaccaacaagcttacttttatgccatagacctcgaaatccatcccaaagacacatttgtgttcagtatagatggcaccgtactctttaatattccatactacaaaaaacatggata

SEQ ID NO: 25455 - DNA, 325 bp, Glycine max
  modified_base (15)..(15): a, c, g, t, unknown, or other
  modified_base (18)..(18): a, c, g, t, unknown, or other
cggttaaaccatatnaantatatgcatgctgtcgtgtggagaaaagaacaaatcggcgtctttgatatttcactaaaataatactttagtaagtcagcaaaaataagttgatgcatgtgttgagtccatcctgttctttttcttttgtacaagtaggaatcgtgcttttccctgtgtacaatatgcaatagattccttgaaaagtggttgaataataattaaatcatgtatacccctctattactttgttattgctttatacagtgacaattctattatatatcaactattgcttttacaataaaaaattttaaatgaaatattg

SEQ ID NO: 25456 - DNA, 392 bp, Glycine max
tacgggggcgagatgacgacataatgggacggctaaaatctaaatatcatcaaagtactcaaattagcatggctgtcatggttgcattcttgaatttgatcatcatcttttcagtagtctctacaacaggcaagtcactgagcttatactactattcaaaaacatgccctaatgtggagttcattgttgccaatgcagtaaaagatgccactgctagggacaaaactgttccagcagcaattctgcgaatgcacttccatgattgtttcgttcgggggtgtgatgcctctgtgctgctaaattcaaaaggaaacaacaaatcagaaaaagacgggccaccatatgtttctttgcatgcattctatgtcattgatgcagcaaagaatgcacta

SEQ ID NO: 25457 - DNA, 409 bp, Glycine max
ggcacaagtgagtttgttgatcgagataactagggacagtgtgatgaaaatgaaggtccttgttttcttcgttgctacaattttggtagcatggcaatgccatgcgtacgatatgttccctctccgaatgaacactggctatggtgcccgtactccggaggtgaaatgcgcaagttggaggcttgctgtggaagcacacaacatctttggctttgagaccattcctgaagagtgcgttgaagcaacaaaagaatacatccatggcgaacaatatagatcagactccaaaacagttaaccaacaagcttacttttatgccagagacctcgaagtccatcccaaggacacatttgtgttcagtatagatggcaccgtactctctaatattccatactacaaaaaacatgga

SEQ ID NO: 25458 - DNA, 72 bp, Glycine max
gagacctcaggtcaagcggggctacccgctgagtttaagcataataataagcggggaaaaaaaaataaaaat

SEQ ID NO: 25459 - DNA, 341 bp, Glycine max
gtagcgggtatagtttagtggtaaaagtgcgattcgttccatggacccctaaatagttaagggatcccccgtttgattcatattccgatcaaaaactttatttcttacttaaagggaatcctttataccctcaatgaatgatttgcggtataatatacattatcgtaatttgtatacaagaagaatcaattctaaattgacaacttgagttctaaaattatgaaacataagtttttggaattggatctataatccgaatttttttgagtatgacgaaaggatctatggagagatatatagaaagtttctttctaatcgtaactaaaattttcatttttttg

SEQ ID NO: 25460 - DNA, 223 bp, Glycine max
aacacttgtaagaacagcagaaatatgactttctatgggatcaactctatctgggacttagcgctaattattatgagacctgtgtattttccactatataaatcataacctaaaaaaaaaacacctccacttttacacaatccaaactcacattcactcactatcgaattgataattataaattattataacccaaaaccaatgcactgtccttgtttattca

SEQ ID NO: 25461 - DNA, 337 bp, Glycine max
tcgccaaaacactacaacaggtggcacaagagactttatggatcgagatcactagagccagtgtgaggaaaatgaaggaccttatactttttttttctacaactataataccacagaaatgccatgcgtacaaaatactacctattcgaatgaacactatctatggaccccggactccggaggtgaaatacgcaagatggatgcttgctgtagaagaacacaacatgtttcgctttgaaaccattcccgaaaagtgcgttgaagcaacagacgactacatgcatgaccaacaatatagatcagactccaaaacagtttaccaacatgcttactttta

SEQ ID NO: 25462 - DNA, 298 bp, Glycine max
gatgtgacgggttttcctttgaagttttaactcgtctcgagttgtgcacatatatataaatacaacacaagctctcctggttccaacaatttatttctttgctttgggaaatggagaaggagaaagagaaagaatctaagctgaagaacaagatcttcaaaatactgccaaaagcagctgctgcagcagtgagcatgacattccaaaacccttccttcagcccaagcatggatcacaagttcaaacaccattgcggcaaaaggttcttctctggccctatgattcccgttgaagccat

SEQ ID NO: 25463 - DNA, 379 bp, Glycine max
ccaaccggccgtttttttttttttttttttttggggggggggggtaaataaaaacctttggctaataataaaataaacctcttttttccattttaataattgaattcaaatgattttctttattaaaattaacattcattatttttaattaattttaaaaatgaaaaatcattaaagttttataaaaattacgtttttaaattataaacatatcttctcttttgtctaaattaaaatattaaagttactaatactttatgtaacgatgtgtgaagatattatgtcaatatctgaagcatggatcatgcacttgatatgtcaatatcgacattctctattaaaccagtcttacttttttcatacgtacagttcttaaaac

SEQ ID NO: 25464 - DNA, 376 bp, Glycine max
ggcccacggctaaaagctaaaaataatcgaagtactcaaattagcatggctgtcacggttgcattcttgaatttgatcatcatgttttcagtagtctctacaagcaagtcactgagcttaaactactattcaaaaacatgccctgatgtggaatgcattgttgccaaggcagtgaaggatgccactgctagggacaaaactgttccagctgcacttctgcgaatgcacttccatgactgtttcgttcgggggtgtgatgcctctgtgctgctaaattcaaaaggaagcaacaaagcagaaaaagatgggccaccaaatgtttctttgcatgcattctatgtcattgatgcaacgaagaaagcactagaagcttcat

SEQ ID NO: 25465 - DNA, 289 bp, Glycine max
acgagttgttacagagaacgttgagagagagtatcttgaatacgatgatcctaaaacggtatttagaggagaggcttgtgatgatcttggaggaactttttgtgagaccgagtatcagaagggtgtctactagagaaaaaagaaaacccttttttattaccatggctactgcgtttttaatgtctaccagtaatgattgtagtggtgaatgtacataggtataagctatggatctcagtttatattgagtttcattttcgctataaactttacaataattatattcccc

SEQ ID NO: 25466 - DNA, 414 bp, Glycine max
aggggagagtgaaccaggatctatttcaagcaaagagggaggctcctctggtggtagctaaattcttactcggattcgttctcacaatccagtttgtaccatcaaaatccgattttcaagtgcttatctataccaagataacatcgaaatggagtgtgcaataaaacaagatgttactgaactaattggaaacactccaatggtgtatctgaacaaagttgtggaaggttgtgtggcccgcattgctgccaagttggaatcaatggaaccctgctcaagtgtcaaagacaggttagcattaagtatgatcaaggatgctgaggacaagggactgattacaccaggaaagactgtgcttgttgagactactagtggaaacactggcattggattggcattcattgcagcacttaa

SEQ ID NO: 25467 - DNA, 275 bp, Glycine max
  modified_base (56)..(56): a, c, g, t, unknown, or other
aggagttgaaaaagcgtgaaaagaaggatcttttagcagcacatgttgctgagcangcaaagaaggaggctctcaaggatgatcacgatgctttcactgtggtcattggaagccgggcttcggtgcttgatggaggagatgctgatgctaatgtcaaagatataacagtagaaaatttctccgtgtctgcacggggtaaagaacttctgaaaaatgcaacggtgaagatatctcatggaaagaggtattgtttggttgggcccaacggaaagggc

SEQ ID NO: 25468 - DNA, 392 bp, Glycine max
gggttggctgaccctcagaaaattcaccctgtgcacgaggatgttgaggcacaaaaccacccttcagcaccattggtgccaaggagcatgtccaaatctgatgcaggtgatccacaacgagtagtagtacaacaacaacaacaaaacattcctctgaagcaaaccaagccaccaccgaagaaaagaagaagctgctgctgcaggttcttctgttggctaataagcatattgctgattctgatagtggcaattggcatcactgttggaatactctaccttgtcttcaggccaaagcttccaaagtactcggtggacgaacttagagtcacacactttgatcttgcagacaacaacagcttatcagtgacattcaacttgacaataaccgccag

SEQ ID NO: 25469 - DNA, 485 bp, Glycine max
tgaattcccggggcggcccaagccgtccgaccggttgcaaaaagagccagaagggttcctttcaaaaattaaccatcaccccgaccatcaccggagcccattaagaatatcagtaagaagagcgtatgttctagaaaattcatataaccagcttcgcatgagatcaactcaagatttgaagggaaggttgactgttcatttccaaggggaagaaggtatcgatgctggtgggcttacaagggaatggtaccaactgttgtctagagttatttttgacaaaggagcgctacttttcactacagtaggcaatgaatcaacatttcagccaaaccctaactctgtttaccaaacagaacacctatcttatttcaaatttgttggtagagtggttggaaaagctttatttgatggtcagctcttggatgtccattttactcggtcattctacaagcacatcctatgggccaaagttacatatcatgata

SEQ ID NO: 25470 - DNA, 313 bp, Glycine max
ttgcaagttcttcatcggtgttgccattcaggttctacacgtagaagagtgggaaacgaatttaatatcacccctcttcttggtgatacaaggtacatctatagttacaaggagagtaatgctgcaagcaataactcatcttggtgatacaaggtacattttctagttacaaggagagtaatgctgtacgtaaaaaagaaagttgtacggtgtgtaaattatatgcgtgaaagaataattaaatgtcagtactacagaaaatgaattagaaataatgttgtagaattttcattggagaaatcatggatatgat

SEQ ID NO: 25471 - DNA, 255 bp, Glycine max
attttcgatttgatctgatggttttggacttctaattagtctaagatggacaaggttacgaagttggcaacagaaaagggtgtggtggttttcaccaagagctcttgttgcctctgctatgcagtcaacattctgttccaagagcttggagtgatccctgtggttcatgaaattgacaaagaccctgagggcaaggaaatagagaaagctataacaaggttggggtgtcctacacctgttcctgcagtcttcatc

SEQ ID NO: 25472 - DNA, 312 bp, Glycine max
catttggggtcccttctctctttctctggctcgatattttccaaccaaaataattattaaaaccaaacgtagctaggcaccactgctaggaatggcaagtgagatatttcttgcccttctgatcacaacctttgtggttgcagcctctgctggtaacttcaaccaagactttgagataacatggggtgatggtcgtgccaaaatcctcaatagtggggaacttctcaccttgtccctagacaagaccttctgctcttggatttcgttctaggaatgagtacttgtttggaaaaattgacatgcaactaaaac

SEQ ID NO: 25473 - DNA, 399 bp, Glycine max
gtccgaccggctgcaagaagccgccagagggggttacctattccattaaagggctggacctttaaaatgggattattatttctggggacccttaataatccagggtttaaaagttcccttggactttgtttagatatcataatatttctagtcaatcaaatatggcttgtggaaggaaaccaaccacagtctagtttcaaggcctcctatgaaacagaaaatagattccctacttttctctgacattgcatgagtgaaccttggtgcaacggtaaggttgctgccttgtgacctagtgctcatggattcaaatcctacagacagcctctcagcttacgagggtggagctgagtatatctaccctcctgagacctcactagtagtgagcctcgtgttggg

SEQ ID NO: 25474 - DNA, 110 bp, Glycine max
cctttcctcccgctcccactaaaatcccgaacccatttccagaaccttaacaccaacactgcgttcatcatcgcaaaagttgttgtgtagttagttttgaggggttaaaa

SEQ ID NO: 25475 - DNA, 389 bp, Glycine max
cccacgcgtccgaagacgcgtgggcgagaatacaacacagggggtgctatcactattcagggctgagacacaaccacacaggtggaagaatattaatggtctaaaatttcttctcttcaacctgactcatctactgttctctctctctctctggaactcaccaatttttgggaaaagaactaatctgaaccgtccatctctctcatttctgatatcacacggcagatgttcgaccagacctttacatctttttatgatgctttttcacacgagccaaggcatcataatgatagtattcatttttatcgtcctgctgccgcatgtagagtacaatgttggtccatcgtatgaatcattgctactgaacaaattcaaatgccacactcaca

SEQ ID NO: 25476 - DNA, 203 bp, Glycine max
  modified_base (10)..(10): a, c, g, t, unknown, or other
atctgagtcnaatgctccttaagtttaaggggtaagtcctcaacgaaaagccataactcttaaccgttcggatcccatatacgcatgggctacttcactcctttctttatttcacgttttctcgggaaaattagttgcaaatagatttttgcccataaacggaccattaaattgatcaactcgcttaaaccccgtatttttta

SEQ ID NO: 25477 - DNA, 438 bp, Glycine max
aaaaaacaacaaaaggtgcttctactttaagaccacacaaggttcattcggagaaggactattgtaacttgtccacatgtataaatgcatattatctaatatgaaaatagacacagaacacccattatttctaactaattagttcaaaacacataagccaacactattacttataactcttaagcataatgcaaatttctattctcatatcatttataatgaacgagatctatatactccgattaatccatattactgcatctttaccatatatacacttgttccaaactattgagctacagattattaaaattatatgcatcatcttctttaggatgtgggcttaaaacaatatataatgaggattattttatatctacgtaaactcaatattatcatattaccttcattttattgagtacgatacacctttgtttt

SEQ ID NO: 25478 - DNA, 310 bp, Glycine max
gatcgctcgagagacatgcgagttccactatagatcggtccatgcatgttcagcactccttgtccatgatggaactgacgatggcagttccgatcacctacgagatgctagaacgttgatgcattttactgcagtcaaagatattggggtagggatacgcgtaccggaccgcgccttaataggttgtttgagattctctaaggcactacttcttgcatcaatagggcaaagatactgaaaggatacccacgcttcaatcactttttatgtaagaaatcatttactggacggaaaaaaggatacaagctta

SEQ ID NO: 25479 - DNA, 340 bp, Glycine max
cgacggcaacgaaagacgacagattttggtattacccccgtgccttctcaatggggacatgatctttgtgttcctgtctcttccatcatctactttctattcgccgcacccctaaaccattatctgaaaaagagagggtccttctattgtaatcaatctccttaccacctactcttgcgtccctgagtggcaacataaccgcttttaaaacattttcaacgaccaactgatcacaaccactccgccttctttcgtattaactaacacccaccttcttatcttttgattcttccaacaaataaaaaagtcatgaacaccatcaacaacatcttttattcca

SEQ ID NO: 25480 - DNA, 308 bp, Glycine max
gagagacgtgcgttttggattctatttgtgcggtggattgagatttagatgcaaataaatatataccctgtcttgtgccgcgtcccctttaagccaattgcaatcaaacaaagtttcggttattggcgttcatttttcttcctccatctttctctaaaacattaattgaactctgcattccttaaattttaccaacgagctatttcctacacagacaaagctatggcaaagactgagttacaagtgactgttgagagcaagaacaaagaactaaagcacctgtgatttgtgaggattgctgctattca

SEQ ID NO: 25481 - DNA, 411 bp, Glycine max
ggaatcacagtggtgccttatcgctgtggttatgatcttcttcttcctctttcttagatctcttctttctctacgccgcacgccgaaaccatggccggaaaaggagagggtcctgctatcggaatcgatctcggaaccacctactcttgcgtcggtgtgtggcaacatgaccgcgttgaaatcatcgccaacgaccaagggaacagaaccacgccgtcttacgtcggattcactgacaccgagcgtctcatcggtgatgcggccaagaatcaagtcgccatgaaccccatcaacaccgtcttcgatgccaagaggttgattggtcgtagattcagtgattcctctgttcagagtgatatcaaattgtggcctttcaaggtcattcctggtgctgctgacaagccaatgatc

SEQ ID NO: 25482 - DNA, 401 bp, Glycine max
gaaaaaaggggttccccgacttggatagggaacgatgcgagtgacctacctaatcttattgtagaaattttcaggatcaatgattagaccatgcaaactagaaatgctttttcttgtataaaggaagggattactcgatccatttccatatcgatcatgatatatataataattcgagcacccatttcaaacgcatatccaatttttgcacagcagggttatgaaaatccccgagaagcaaccggtcgtattgtctgtgccaattgccatttagctaataagcccgtggatattgaggttccacaagcggtacttcctgatactgtatttgaagcagttgttcgaattccttatgatatgcaagtgaaacaagttcttgctaatggtaaaaagggagcttt

SEQ ID NO: 25483 - DNA, 171 bp, Glycine max
gaatatcgcagtgatgaggatgaggatgacaagtgtgcttgttctgagcaggatagggattacaagattttgggaaaagctaaagaaaaaacagtgaaagtgttggaggaagaggatgaagttcccaaatcaggattgctttctttgccttttatgaggcgtggattggag

SEQ ID NO: 25484 - DNA, 376 bp, Glycine max
attcaaagtggagcgcagactgtcttatttgggggagatctttcttatgctgatgggtaccagtacaatgatgttggtttacggtgggatacatggggacgatttgttgaaaggagtacagcatatcatccatggttatggtctgctggaaatcacgaaatagactatatgccttacatgggagaagttgttcctttcaaaaactatctttaccgatatactactccctacttggcctccaatagctccagtcccctctggtatgcagttaggcgtgcgtctgctcatataattgtgctatccagctattcaccatttgtgaaatacactcctcaatacatgtggcttaaagaagagctgaagcgagttgagaggg

SEQ ID NO: 25485 - DNA, 176 bp, Glycine max
caggcattagtccagctcgacaacatcaacatactgagaataatctttgatatgttcgcagatagggtttgctatacaataagtattgcagctgcaacgttttcaacgctgtcactggtaacaacaccgctcctttttatgatgcaggttttgctgcttatgatttctagggcatt

SEQ ID NO: 25486 - DNA, 410 bp, Glycine max
atctcatgcatctaaatttgtcatactctcagatcaggggtgacattccctccacaatctctcacttgtccaaattacggtcacttcatctcggtgactaccagagcatgatgagagttgatccatacacatggacaaaactcattcaaaacgcaactaatttaagagagctttctttagatggcttggacatgtcttctatcggagagagctctttgtcattgctaaccaatctgtcttcctctctcatctctcttactctctcattcaccgaattgcaagggaatctatcgagtgacatcctctctttacccaatcttcaacaactagatttgagttttaataaagacctgggaggtgaacttccaaagtccaactggagtactccactaacctactttgatctcgct

SEQ ID NO: 25487 - DNA, 392 bp, Glycine max
  modified_base (352)..(352): a, c, g, t, unknown, or other
ttagaatgggtttttggctggtggacaatcggaagttttagcaacactaaatcttaatgcaatgaaccaaagtcccaacccatggcatgtttctttctcatatgcacgggctcttcagaacaccgtgctaaagacatggcaaggacaccctgagaatgtggaagctgctcaaaagtcccttttggtgcgtgctaaagcaaactccttggctcaacttggaagatactctgctgagggtgagagtgaagaggccaagaagggaatgtttgtcaagggctatacctactaaaactttaggagtcttttggttcaattttgttttagctatttatcatcattccttcttagcagngaaatccaaagggacttagatgttgatttttatatttttt

SEQ ID NO: 25488 - DNA, 412 bp, Glycine max
gaagagtgaaactgccaaaaagtgaggccgccccaaaagcaaagtgagattataggaaacaaaaatttctttgcttaatactagttcctcctttctcctagcctggtagtcttttgaaaattctttatcttgatcacataattttcattttgaacttgaagaaagttttagtgtattttttttccttaaagaaacagaacatatcctgttctttctttctctgtttgcatttttgttcacttctttctttctttcttattatctagttaagcatgacaacatttatggacatgtacaacactactagtagcatcatgacaccggatttcttagaccagtgtagtgatcaagagctgatgaaagcacttgagccttttatgaaaagtgattcatctaacactactttctcatc

SEQ ID NO: 25489 - DNA, 356 bp, Glycine max
agataagttgtttgtgtttggtgtaggtggaaatttggaatcggtttgtggggatgagaaggatttgctgtgaaacttggtaatcgtgacaacagagttaatgacaatacaaaatttcaacattgcatgaggtcctgtgactgtgttgcaagcttgcagttggttgggagtgttgtctgttatttaatttatctattttaatgttgtttgcttgggtgcagttgcaaatgaaaggttaagaagtttaatctccgattaattaaccgccttttacattgacctactgacgacaaataggttcacagcttaaattgtggattgaatcgttgaacgaagcttttccagacgcctaattt

SEQ ID NO: 25490 - DNA, 103 bp, Glycine max
gggtggcgagtgagcgagcgatggaagaagaagattttgatttcgagaagaaggtttcgataaaggaatcgatgtcgatgtcgatgtcgacagagcttgatcc

SEQ ID NO: 25491 - DNA, 409 bp, Glycine max
ggtgtgagttcattaacatatacaaggtctctgtgttgtgttgagtgcttgtgttaattgtgttggtgttgtaggaaatttaagtgaagagagaatgatgatgaagtctgctatgtgtgcattggtgcttgtggcactggttgtggatgaagaggggcccatggctgaggctgaggggactcgcaacccaacacagttgactgcttgtgttccggcaattaattcaagttctgcaccttcgagtgcttgttgacagaagctgaaggagcaaaagccatgcttgtgtggctacctcaaaaaccctagcttgaagcagtatgttaactatcctaatgccaaaaaaaaccgtagttcttgtggtattgactatccaacttgttaagcacctcttatatatatatataaaatg

SEQ ID NO: 25492 - DNA, 405 bp, Glycine max
cattagatgctggggaatgggtttgggcctagggtttagagttgtttctctttctcctggtttcagaaaattgtctgttgatcacattgtttcagcttacaaaagaaccggtagaagagccatatttcttgattatgatggtactatcgtaccaaaatcttccataaataagacccccagccctgaagtcatatccgtgctaaatgatatgtgtaatgatcctaaaaatactgtgttcattgtgagtggaaggggaagagattctttaagtaagtggtttacttcatgcaaaatgattggacttgcagccgaacatggatactttctaaggtggagtaaagattctgaatgggaaaccagtcccttgtctcctgatcttgattggaagaagattgtggaacctgt

SEQ ID NO: 25493 - DNA, 437 bp, Glycine max
ctgcgaagacgacagaagggtatatataccagcaaaaatcagaacaattgaacgtggaggcacaaagaagagaattgtcaagttggaggttctaaagcacgatgacatattcccgttagaaaccccattcatcaaaagtgacatcttttcctatgagaaaatcacgtcgaatgagtcttagagggaaaactggattttgtctcagtaatttcccaattcctgtaaagaaacataaacaaacagtatccatgtttgatatggcgctacaatgaagcctagctttatttggaagtgacaaatttagagtctaagatttgcacaaatgtaacaaaagtcacacaccatattggaattatattccttctcaagtgactctatgtgcttatcctcatccgtcccttaaggaagaaaaatgtcgagtgtgatataatatatga

SEQ ID NO: 25494 - DNA, 400 bp, Glycine max
gatctggtgttgttgtggactcatcattttcgggttccagtactcaaaagagtggatcttctagttcttcattaacatctagtgatgctttcgaaacaactgaaatcacttcacaacagtctaaggtgtccagtgattcatcagttttgagttcattaccaagtttatctgctgcatctaccatgaagcctacatcagcttccttgttacttcctgcatctgctgtgagtgaagattccatttcagttctgcctaataatgaaggcggaaagaaggaatctcttagtaggtcaaattctttgaaggataaccagaagaaaatacagaagaaaggccaatcacagcatcaggttgctgtgcaatctccttctgtggttaatgtgcctttccaagctgttga

SEQ ID NO: 25495 - DNA, 397 bp, Glycine max
  modified_base (339)..(339): a, c, g, t, unknown, or other
  modified_base (372)..(372): a, c, g, t, unknown, or other
ctttcatttaatccttacaaaatggaggtgttgaatggagtgctcatagagaaagtgaagaaagctggcatcatcactggggtgattgatgactttgatatgacattttcatggcattttgataaccggtgtaatgatggaattcactatggaagggctcctgcaaagatgaagtggcgagatggcaaaattggtcatcagtattttgtggatctcatgttagctcatgttctgctcaatgcactatgtgcaagatgaccttggagcttcagttggaagagaggaaacaatcagaaaagaaaaaacttgtctgcaaagtggatagggttggaaatgtangcattccctgtagaataatgcataccatagcangtgtttggataaaaaaaactatgga

SEQ ID NO: 25496 - DNA, 61 bp, Glycine max
  modified_base (5)..(7): a, c, g, t, unknown, or other
  modified_base (9)..(9): a, c, g, t, unknown, or other
  modified_base (13)..(13): a, c, g, t, unknown, or other
ggaannncngggncgaccgcacgccgtccgcccacgccgtccgcccacgcccgtccggaag

SEQ ID NO: 25497 - DNA, 438 bp, Glycine max
  modified_base (8)..(9): a, c, g, t, unknown, or other
  modified_base (17)..(17): a, c, g, t, unknown, or other
  modified_base (62)..(62): a, c, g, t, unknown, or other
  modified_base (94)..(94): a, c, g, t, unknown, or other
gggggcgnncaggcgtncgaccactcctccggaagattacagattggcaaggggctgattcnagacgaagataggaaagcgcaagagagattgncacaacaagtctcttcatctgaatcatcagaagcctcacaacaacagtatataactattaggcaacaagtgcaagaaaatccaatgaagaagcctaagttggttattctttctagaagtggttcaagagctataactaatgagaatttgcttgtgaagatggcaaaggaaattgggtttttggtgcaagttttgaagcccgacagaacaacagaaatggcaaagatttatatgactctcaatgcaagtgatgtcatgattggtgttcatggagcggctatgacacattttctgttcctgagacctggttctgagtttattcaagtggttccttcttgtaccaca

SEQ ID NO: 25498 - DNA, 394 bp, Glycine max
cataggatttagggatgaggcacgtcgtctagttcggacagagaggcttagaaccaaagatataacacagagagtgaaaatgaagaactactggcagggaggagtctgcttggcgtttgctgatgaggtattatgctggctgtatggaacagtcaaagaaggtgaagattatattttgcagtttgctccacctttcaaccgtttagagcttctgcaagcccagtcttgcccagatgtaattactagtcatctggagcttttctgaaaatttggagaccttaacagttattattatttaaacaattcaatatacgaaggggaatcaaccctggatttttcccctccgctttgatcagtccacgaattgtagtatagggcaacctctgtgagtgct

SEQ ID NO: 25499 - DNA, 300 bp, Glycine max
gaaagcacgccttgtgcctctatctctcccattgggtcgggtctcaataccctatggatttgcgaaaagaaagcaaacatgcttgatcaggtccaacaccctacaatcatggacaaggatgctggccagctccatctccgttctggtgtttctggtattatgagtcattaaggagcctactgccaccccacaatgtaccaaataccctctttagggaattactcgtatgctgcattgcatgatcctgtgatgccctcattcaaagctactatggatatgtctgctgctgcaacaactacc

SEQ ID NO: 25500 - DNA, 56 bp, Glycine max
cgttggggctgggacaatacgacaggggggtggggctgctataagacaacacaagg

SEQ ID NO: 25501 - DNA, 269 bp, Glycine max
gaacaaagaaatatggtttacaccatctcgggaattcgatttccggtttttccttcgctgcacaacttgagctttcgtggcgatcgcagaactgcgtctcttcccgtttttctccgaaacaactccttctctcggaaaacccttgctgtaaaatcttcccatgattctgatttcttgtcttctgcgattgccgaatctgataaagtacttatttcctaagatcaagataaccttgcattcttgacagatcaacttgaaacttctgatat

SEQ ID NO: 25502 - DNA, 370 bp, Glycine max
tccagcatcttgggatgttggcagcctttgatgacagctttccaggttctgctatccagtgatttgaggaaggccaccatccttgctttccagtattcatagttggttccatccagaattggtggtctgttcactggtcctccttctttctccatgttcatcagaatttatctccctagatctcactcagtgatttcgagtgcctgctctgataccaattgaaattctgataccaatgacagatgtcgtaccggatgtcacgacatcacgcttcagaacatgcagattatatttgacagtatgaacagattaaacaagtaaataacacaagagaattgttaacccagttcggtgcaacgtcacctacatc

SEQ ID NO: 25503 - DNA, 242 bp, Glycine max
gattcaacatttcacacaactactacaagtactgccttacgatcaataccaacagcaactattccaagttatcaaaagcactaccatgatcagggtcgcaaggttgactagtatttctacgttgagaagcaaaccgactaatactgcaaccctgttcatgctgctagtgtcacctatttaaccaccataacttcttctttttgtttacagcgattacatttataatcaacattataccacca

SEQ ID NO: 25504 - DNA, 380 bp, Glycine max
gttattttgatttaagtgtatttgtggtgaaaatggtaaagattgatatgggttttacgcttttatactactacaattcaaatttattttcttaattaatcttttttccctttgacacccaaacacagccgtagaccgtagtccgtggataccaagattttattaacaagaattgctaactccaataacacaaactggtccgatatttgacttatatttttttcgcttaaaaaaaatccaaaccaaactagatctataataatgtatatcaacttgagtttttctgattcgggtagaatcctatataactcggctgtgaacaattgtttatcatccctaacaaatgcgtaattaatgaaatgaatcttaaacaatttgaa

SEQ ID NO: 25505 - DNA, 323 bp, Glycine max
gtcgatggttgcagtccgatctacgacaccaaggactggtctccaaccggtgatgtctacgctggcggtacgactggcttggctatctgggctgtgactctacttggtcttcttgctggtggtgcacttcttgtctacaacacaagtgctttggcgcaataaactttgcaaatcgatgttttaagctcaaacttagtccatgtaactatctaaaaatgaagaattattcatgaagtactttgtggatacgtgttccttctgttctataaatgtgtggatgtgaaaaatcttgtgttgttaatcatgcttcttcatcagagtct

SEQ ID NO: 25506 - DNA, 385 bp, Glycine max
  modified_base (27)..(27): a, c, g, t, unknown, or other
  modified_base (39)..(39): a, c, g, t, unknown, or other
cgtgcgccacgcgtccgtccactcgtncgaacacttcanaatttacgacacctgggaaactcttgatcattgtggattttaacaagcaactataccaacaccgccaataactaaacatggcatacatatacctaccatatttaaaagaaaagctaaaccattgaccgaaaattttacccacttgttctcttcaattacattcactcagaaacaaaaaacatcccaaaataatattttacccttcattctaaaaaacccaagcttacttacacttacatgctatcaaatatctaatttctcgacacacctaaattcactacactgaccgtcaaataacaacgtctttactaacaaaacccttgcataacccaactaaacctccctg

SEQ ID NO: 25507 - DNA, 335 bp, Glycine max
gaccgcacgcgtccgaacggacaaaaaaacacctcagagaggactttacattatagcgtattatttttttaatggacacagcgaaattttaaaatcgattagcttaaaacaaacaattaaaataattaattttaaactataaactattaatatgaaaaaaattcactttcttcacctttttagcagtattacgactttttcttaacactaaaatatattcattaatttaaatctacatgaacattatttttcttattgtttaatctttttaaataaccattaaatccatactatgaaatatactaaatactattttaacttttaatgatatattt

SEQ ID NO: 25508 - DNA, 376 bp, Glycine max
ggtactctgatggcaaggcaagcgcttctcctcgttgtggtgtggctatgcttgttggcaagagttaaatcggacgaggattgcgtgtacacggtgtacgttcggacgggttcgatcatcaagggaggcaccgattcagtaattggtctgaagctatacgacaagtccggctacggcatatacatcaccaacctcgaggcatggggcgggttaatggatccgggtcacaactactacgagcggggcaacctcgacatattcagtggtagaggcccttgcttggaagcacccgtttgcgaggccaacctaacttctgacgggtcggggccccatcacggctggtacgttaattacgtcgaggtcaccaccacttggg

SEQ ID NO: 25509 - DNA, 409 bp, Glycine max
  modified_base (332)..(332): a, c, g, t, unknown, or other
gtcggcaccagcgaaacgctcttcgttatctggtctcagactccgcggcgtagatccgaggagttcgggaaatcctaactcatcatctcaactcaagtcatggctggacttgcacctgagggatcacagttcgatgctcgtcaatatgattctaaaatgagtgacttactttcatctgatggacaggacttcttcacatcctatgacgaggtttatgatagttttgacgctatgggtttgcaggaaaatcttctcaggggaatttacgcatatggttttgagaagccatctgccattcagcaagggggatagttcccttctgcaagggactngatgttattcagcaggctcagtctggaactgggaagacggctactttctgctctggtattctgcagcaacttgacta

SEQ ID NO: 25510 - DNA, 387 bp, Glycine max
gaccattagagaaagtgccatcctgcgctttggggcctctagaaaaccaaattcattattataaccctaactcaaaaggccctttacccatagtttacatttcccgtgcacctaacaacgtaagaaatccatcattactacccccacctcttcctttccattcctctctccagaagtcctagccctacaatctcaaagacaaacccatcattcaaagtcataaccgatacctaaaatcctcattccaatcaaaaccaaccccaccatgcccacaaaattaagtcatcaaattaaagcaccgatgatcctcaatttgatccttgtgcttatatgtgtcactactccaatcaaaggtgagaaatcaaggaagcttgatgaggtcacaaa

SEQ ID NO: 25511 - DNA, 398 bp, Glycine max
ctgttgctttattattcaccctggaatttggttgattttattatgttttgaaaaataaggaaagagatttatttgttagcttaattgttttaattggcgaatatgtttttcttttcccttttttgcacagagtgaagctttgttcttagggtaatggattcccttttttgtgatgctagtggatgatttgactgattagtgtttagtggaatgaagaaccagaactagtagtaggtagagggaatcacttttggttttggatgtaaacttagaaatgtgcagcactgcacagaattgatatttgatcgtgggtcaaattgtcaaaatgtgcaaagaatacaaaggcacaggtgatatcattccattttacgttttttaacgaagctgttagtttcaat

SEQ ID NO: 25512 - DNA, 402 bp, Glycine max
gacttcaacacatccattcattgtcttaatgttggcaatgggttcctgtttctcgatccatttcttcctcctcctctcaatagcccttttctcagtttgttgcttagcagcatctcaagctcccaccaccaaatcacacccctatatccttcccattaagaaagaccccgcaacaaatttgtactacacttcagttggcattggaactcctaggcacaactttgatttagtcattgatctttctggtgaaaacttatggtacgattgcgacactcattacaactcatcatcctacagacctatagcttgtggctcaaagcaatgccccgaaattggatgtgttggttgcaatggccccttcaaaccaggttgcacaaacaatacatgccctgctaatgtaat

SEQ ID NO: 25513 - DNA, 254 bp, Glycine max
gattgcatttaccggactatctcgttatcaagagaacggtaaattttgcggcgggacagtgccaactgactcacatcattccctctctctacagatctcacagccgacgctcacgacggtgccgccgttgcactcgccgctgatctctctataatctccccctcgccgatactgacaatgtaaagtccttaacgatggtcgaaatctctggtagtaagacttgtggcacttaagctctttctggaggttgatga

SEQ ID NO: 25514 - DNA, 374 bp, Glycine max
ggactctttctggtctttcgaacaagcaccgcctccactaatggctatgagatcgtgggtgagtcgaggatccgtgactcgtttgatggactcagcaaatcgaggggctttcagtcgcttcttcagcgacaagggtcgcgttctcagcgaggaggaacaggccaaagaaaacgtctacatccagaaatgggagagggagaggttggagaaacagaagcaacaggctgagaagaccaaggcagacaagggcaaagatgctgctgctgataagaaacctgaaggttctcaaaagggctgagtttatccttcacacaaccccgcaaggtcactttgtgggaaataagcatgatggagaataaaacacattgaccctt

SEQ ID NO: 25515 - DNA, 445 bp, Glycine max
gaccacgcgtccgcacaggcgtgcgagaacacatacgggcgatttatgattaacgaaaacgggaaattattgggtattggggacagatagtcttggttttttctcatctaataaaggtttgatgacttttagtaaaaaatagattatagaactttctaaacaaaattacaaaaaaaaacattaatcattccgaaggcttaccattcttcacatacatttataaatcatctctatatataaaaaacattattgtattgaattgaatgagcgtctttaagagctatttttttaacaaaattaaaacctttttagtaatttttctttcacgaaaacattttcataaatttatctaaccttttatctctttgaatctatcctttccatattggatttttaaattgaatctcaataattctaaaataaattttcgatagttaaaaaaata

SEQ ID NO: 25516 - DNA, 381 bp, Glycine max
ggcattgtgaaatcaacagagaaacatttcactaatggagagagataagcataatattgagaaataatggagggttgtacttattgtgtgaagttgctatgccttgttgggtttgtggtgcttgtgagtactattgcaggggtggagagtgctggtgaatgtgggaaatctaccaccccagataatgaggcttataagcttgcaccatgtgcctcagcagcacaagatgagaatgctagtgtttctcagagttgctgtgctcacgtgaagaaaattgggcagaacccaagctgcctctgtgcagttctgctctccaacacagccaaaatggctggtgtcaaccctcaagttgctgtcaccatacccaagcgttgcaacctg

SEQ ID NO: 25517 - DNA, 371 bp, Glycine max
atttcctaacctctctgagctcactcttgatcagtgtgagtatctaactcaagggccctggagcatttgtggaataaagtcactacaaaacttgagtgtcaccaactgccaccatttgagtcaactacctgttgaatttggcaaactaagatcactagagatcctccgtttatatgcttgtccagatctagaaacacttcctcctatcatgtgtgacatgaagagattgaagtatattgatatttctcaatgtgttaacctttcatgcttccctgaagagattggtagattagtatgcttagagaagattgacatgagggaatgccccatgattaagtatttaccaaagtctgcaatggcattgcaatctt

SEQ ID NO: 25518 - DNA, 256 bp, Glycine max
gtttcttgtttttgctcatctcaataactatggccacgtgtatttatatgaagggccttgacttattcattgctacaattttctttacatgtcaattccatccgttcgatatcttccctttccgaatgatcactgactttggagtcctttctcccgagttgaaatgcgcatgtttgatgctatctattgaaacacacaacatttttgtcttttagaccatttctgaagagagcgtttaaatctacaaatgaataca

SEQ ID NO: 25519 - DNA, 143 bp, Glycine max
gatagcagcatcatacaaagcattgaattcaaaaacttaagttcattccttgtgttttgctttcttcctcaaaaccaaacatgtctaacacatgcggcaactgcgactgcgcttacaagactagctgcaccaagggaaacagc

SEQ ID NO: 25520 - DNA, 370 bp, Glycine max
  modified_base (6)..(6): a, c, g, t, unknown, or other
accggnatggaatacccgggccgacgcacgcgtccgaccgcttgcaaaaaaccaccaaattgagttttgaggattacatccaatattatgagcccgtgttttctttacggtgcttatagcctctaccttaccatggatcctcatctatccaacaaaagctcccaaacacttcttacgcctaatattgccactattttctacacgaaatcaactacacttacctataatcataatccctactctatgcaaatacaattgatgacctttatgacacttcattgtacgctatcaacatccaatgacttatgctacactttctattgccgtatggagcctgttatatatgaacttacgtctacatcataataaa

SEQ ID NO: 25521 - DNA, 363 bp, Glycine max
ttgggtgatctctgtgacatcaactccaagggaggtcgacaaagctgttgatgcatgcaagaatgttcttagaggcctgcatagcaataaaattactgagagggaattggacagggctaaacggacccttcttatgagacatgaagctgaaattaagtcaaatgcctactggttaggattattagctcatttacaagcttcttctgttccaaggaaggacatatcatgtatcaaggatctaacatttctatatgaagttgccactattgaggatatataccgtgcatatgaacagttgaaagtggatgaaaattctttatatttatgcatttgaattgctggtgctcatgctgcacaagaaat

SEQ ID NO: 25522 - DNA, 414 bp, Glycine max
gatatttctcgcattccaattccagtttgttcatgcaccggggcaacgcaacagtgttataaatggggatctggtggttggcagtctgcatgttgcacaacaggcatgtcggtatatcctttgcctatgagtaccaagcggcgtggtgctaggattgctggaaggaaaatgagtataggagcatttaagaaagtgttagagaaactcgccgccgagggttataacttttctaatccgattgatttggggacttattgggcaaaacatggcaccaacaagtttgtcaccatcaggtagatctagtctgtggccatctggcctgttatgtcttttagcctgtttgtgatgtatatacatgcgtatttggccagagacagactttttagctggtttgtagtacagcaattttcaaat

SEQ ID NO: 25523 - DNA, 315 bp, Glycine max
gatataaaagtgattaaagctaactgttaacttgctacagtagtaaactaaactgagttactcatatacactcttacaaaatggatgaagtcaagtaacctgcttatttggtctgtcttgtggtacatgcaaatgatgtttttggttcaatctttcattctgtttcctatctctggtttataggcggtgttacattcgttttattagaaaggtaaatgacaagaagggcatggagggtcaagaagagacaagaaaagcttttgattttatgcttaactatgttggtaagttgttttctgttgtcttgtttgcatt

SEQ ID NO: 25524 - DNA, 392 bp, Glycine max
atagtccttgaagatctcttgaacagtggagggtttggaaggcatttagccaaaggctacagatcaaagagtgtagagaaactatgcatcagtttttaatgaataattaaaattggtcaacattatttatcacacaatattcataattaattatttgttttgataataaatagtaacattaaatattatattactatttattataataaccgttgataggatgtaattaaatttaatgaataattaaattgctcaacattatttagtacacaatattgatatttaaatattagttttataataaacaatagcattaaatattatattaatactttcgttcttttttataaaaaataaattatagtgtattttatattataaataagaataga

SEQ ID NO: 25525 - DNA, 413 bp, Glycine max
ggtgtgagttcattaacatatacaaattctctgtgttgtgttgtgtacttgtgttaattgtgttgttgttgtaggaaatttaagtgaagagagaatgatgatgaagtctgctatgtgtgcattggtgcttgtggcactggttgtggttgaagtggggcccatggctgaggctgcggtgactcgcaacccaacacagttgactccttgtcttccggcaattaattcaggttctgcaccttcgagtgcttgttgccagaagctgaaggagcaaaagccatgcttctgtggctacctcaaaaaccctagcttgaagcagtatgttaactctcctaatgccaaaaaaaccgttagttcttgtggtattgcctatccaacttgttaagcacctcttatatatatatataaaatgtgtg

SEQ ID NO: 25526 - DNA, 398 bp, Glycine max
gatagttgtgaggcgctattatccggagttgggtctctgatcgacagtcgtcgatacattggtcaaccaactgtgtgcatatgattttgcaaagagaaaatggaatttcagttgggatagatgaatactgataagagaaataacggtaaacaacagacatggatactggtggcaattctttaccatctgcacctgatggggtgaagagaaaggtgtgctatttttatgatccgtaagttgagaattactatcatgggcaaggtcacccaatgaaaccacatcgtatacggatgacacatgctcttctagcccattatggattgctacaacacatgcaggtccataagccattttctgctagagacaaggacctttgtcgatttcatgctgatgattat

SEQ ID NO: 25527 - DNA, 415 bp, Glycine max
tgggctctatcgttaacgatcatatttcatctaccgtctccagtaacagcccataagtatcgtgtgcagaacttgtatgagggtcctcttgacgatcaatatgcttctgctatcagaaattgtgatcctgaaggtcctctgatgctctatgtctgcaagatgattccagcatctgataaggggagattttttgcctttggccgcatattctatggcaaggtttaaactcgcttgaacgtgacgattatcgcacctaattatgtccctcgggagaaaaaggatttgtatgttaaaagtgtgcaacgaactgtcatttggatggtaaagatgcaagaaactgcacatgatgtcccttgtcgtaatacactggctatggttggccttgaccagttcatcacaaaaaatgcaacattga

SEQ ID NO: 25528 - DNA, 294 bp, Glycine max
attcctaaaaccatacaaaatataagtagttggctaagagtacataagacatcaaataattgtggaagcaatgtcttccaaggttattttgatgatgccaaagaatcaagagttaagcgcaaagattcaagaatcaagtttcaagtttcaagattcaagattaatcaagatcaagattcaagactcaaagattcaagaatcaagagaagacttaatcaagataagtattaaaaagtttttcaaaatattgagtagcacaagaagttttcacaaaatcatttaccaaagagtttt

SEQ ID NO: 25529 - DNA, 382 bp, Glycine max
ggtctccgtgcatgccaagtgcgtgtcgaaagggagacgggtcccttcacattcccgccaaccgcacttataaaagacaacacattctctctactcttttgcgttccgttaacgacctctgcgatcgcaacacacagcgcaaaaccctaaaccgtcgagcgatggcgcgtactcctaaacctaaaggcggcccctccgctgcggactccgccgccactgccttcttcaaacccggtactgccgtcgaagtcagttccgaggacgacggattccggcgatcctggttcaccggcaccgtcatccgccgactcgcctacgagaggttcctagtcgaatacgacaacctcttggggacgacaaaaccacaaaaattgagagaagt

SEQ ID NO: 25530 - DNA, 278 bp, Glycine max
cttgcaaaaaaacaacatatcgcatttcttacaacttataattacctgggaaaacgctccttttacatgggatactgcctcactcctaatcacccaaacaaatttttatcaatctacaacaccaataactacctccgtaatttcaaccatccaaatgaacattttcaaacacacactctatcaacttctccaatcattactcaaaacttcactaatcactacaactcctaatcttcaatatattaaaaaaatttttcccctattaacatttcacaaaa

SEQ ID NO: 25531 - DNA, 264 bp, Glycine max
cttgcaaaaaaacaacaaattgcagttctagaaactgataatttctcatggaaacgcgtattttttatggggtagtgcccttactcagataaccttatcaatcacctaactaatacttacaacaaaccccactgtctttaatggaagctactacaagatcaaaaaccaacacagactctgccagatgctcccataattcatcaacacttattcaatcaccacctacaccttcctcatacgaatcacaccaattaatgcccaatc

SEQ ID NO: 25532 - DNA, 342 bp, Glycine max
gatgatactcattttgttggggctaggttcattagctcagaataaggttaatttatagaatattctattgagtttgcagatcagaattcaattccatggtagatcataccaccatatataggacttgcttttcaaactggggtttcaatttctgagtgggtgtccagtggtttgcttaatctataagattttaatatgaattcagctcatttgatcccttatctaatctgcacaaacatgttgtcccacttttagctatagttttgttagctaagcaagaatagttctgctatgttcataaaaaaaaaaaaaaagaatagttcctgtggttgctcttgttta

SEQ ID NO: 25533 - DNA, 360 bp, Glycine max
tgttgagagaaaaaaaagcaaagcggacaaagttcacgttcacattctgttctgctctcattcacactttcacgagcctatcacctactctcttcacctgcaactgcaacttccaacttcaacttcaaccactgcatgcttatctctgaaagaaaagaaaagaaaaagaaaatatctccatttggtttgcttggagaaagttgaaaccttttcacgagctcaagtttgttgttacttttttaacttgacggtctctttttttctacatcgactctcgtttttgtttgcaaagatactatctccgtcttaggatatttcaatgtgaaacgttatgttttttttgttgcatatttattattg

SEQ ID NO: 25534 - DNA, 446 bp, Glycine max
  modified_base (18)..(18): a, c, g, t, unknown, or other
cgcgtccgcccaggcgtncgtacacctccgaaaggacctcagattggggcccttcattgaattcatggtattaggggctagcgtaatggagctgagaataaattttgcaatcactgccacgggacataaaagaatcgcccaaaaacgcctacatctacacatgagcattacgcccttatctttcttagagagagctgcttctggccaccccaccataaactccctaattcacggatcttcgtcttacacgtggcaacatacttaccaccgttgtcgtcgattcacctccgctctttctaataattccattggtcttggaaaacactgtagcatttattgtacccaacattacagctacttatgaagcttacttttggataccaattgtaggggctgtgttaaacccttgttattttaaggttaattgcattcacggttgctttttt

SEQ ID NO: 25535 - DNA, 411 bp, Glycine max
gattgcattgggaaatcaacagagaaacatttgactaattgagaggcataagcctaatattgagaaataatggagggttgtacttattgtgtgaagttgctatgccttgttgggtttgtggggcttgtgagtactattgcaggggtggagagtgctggtgaatgtgggaaatctaccaccccagataatgaggcttataagcttgcaccatgtgcctcagcagcacaagatgagaatgctagtgtttctcatagttgctgtgctcaggtgaagaaaattgggcagaacccaagctgcctctgtgcagttctgctctccaacacagccaaaatggctggtgtcaaccctcaagttgctgtcaccatccccaagcgttgcagcctggctaatcgccctgttggttacaagtgt

SEQ ID NO: 25536 - DNA, 274 bp, Glycine max
ggacaagcagagctctaatattcgcgacaattgcaaaccctaatcagctcacagacctctctttctcgcgtctttggagttatggaggagcaattcatacttagagttccacctaatgtggcagagcggatagagcgtcttctgaatgaaaacaatgcttcttcatctgaagacaagtcactagatttgtcatttatagaggatggaagaagtggtacgtttatgattgggaatgaacaattcccagcttctctattggatcttccttgcgttg

SEQ ID NO: 25537 - DNA, 173 bp, Glycine max
cgggccgaccgacgcgtccgaccggttgcaaaaaaacaccaaatgggcctttcgctattgaacaaaaatacaggcatttgtctatttaagataggatgccggcctatctacatatgctctctggatccatctaactgctgcacttaaaatggccttctctgtcactgccgctc

SEQ ID NO: 25538 - DNA, 424 bp, Glycine max
  modified_base (39)..(39): a, c, g, t, unknown, or other
  modified_base (400)..(401): a, c, g, t, unknown, or other
  modified_base (403)..(403): a, c, g, t, unknown, or other
aagattgattactacgagattgatgtggctaacagtcanaggaaaaaggaagaggagaaggcgctaaaggagttgaaagccaaggcgcaacagaagggaagctttggaggttctgggctcaagaaaagtggaaagaaataagggctctttatcatgattgtatgcattcaatattgagccctgtaattacagttgctaccatgataacttctcttattattgtggcctactttattgctaatgtgtactgaactgaggtatgtcgtgatgtaagctgcaataagttaattgtctgtagctttattgtatccccttcatggggttctgataattacatccttttagtagtgttgtggatttggcatagacttgttcaagtaaataatggcatgggttacannanaaaaaatttttatattatatt

SEQ ID NO: 25539 - DNA, 415 bp, Glycine max
gggaaaaacaaaggaagtctaaagcaaattccaaatatgtgactgactgcaaagtatatggaattaaattcttaggccaactagcttgactaattttgtgaactttcaaatgattgactgtttttgagacttgattgagttcagagtgttaaaatcaccataatatgttgattttgtaattcagacacaccgtgtaagggctacaatacaaaacatagaagagggaaatcagaaactctgcgtgttcaatacataaatacaaaggaactgagggtaacaattggcacatggaatgttgctggaagagctccaagtaaggatcttgacattgaggactggctttgtaccaatgagccagcagatatttacattattggtttccaagaggttgtccccctgagtgctggaaatgttc

SEQ ID NO: 25540 - DNA, 406 bp, Glycine max
  modified_base (71)..(71): a, c, g, t, unknown, or other
gactcgatcttttaacttaactcagtgaatcctggcttctgatttcctaggaatgccctaagccaccgcancatcggttcctccacccaccgcgatggcgcacgtgccggcgagcgaagcgacggcgttctggacggacgagaagcacgtgcacttcctaaactccatggaagcctccttcgtccgcacaatgctccaaaacgaaggcaactcaaactcctccaccacgcgctactctctgcgcctcgaccgttatctccccgacacatccgaatccaccttggatttgaaaccaaactctcgctgccaccgcaccgtaaagcaccatgcaccctcagattcaatgggtccaacaaccagaagaacaaggatcaggacgagatcatctcagccctgcaattcggca

SEQ ID NO: 25541 - DNA, 166 bp, Glycine max
ggctaaagcaactgccttaaaatgcatactccggataagttactggcggatctgggtaactaataaacttcttataacaactagctacacttatttactcaactgttaaattattgaatgttcttgatactgagctcgaatttagaatgtataactcaccataata

SEQ ID NO: 25542 - DNA, 355 bp, Glycine max
ggataaagtttctttttcaataaaaaatcactgtggatgggttatgtgtcaatgggcttttcttatctcattaagaaaaaaaccattttagattcaaatcttaacgaataattcataaatgaatagttaacggctgcgaattgtctcgatatttttttttttttcaatagaaaaaaaaggggtattctcatatacttcatatatttatatatctatatctatttggcggcatggccgagtggtaaggcgggggactgcaaatcctttttccccagttcaaatccgggtgtcgcctaagcaataatacatttgaaatgaaatatttgtttacgtttttttataaaaacttttttcc

SEQ ID NO: 25543 - DNA, 409 bp, Glycine max
gacgcacttagcaatcaatcaaaacattcccagggacaataatatacacatcttcaattaagctccttctcctatagccatggctctttctaagcttataattgcttcccttcttgcgtcgcttctccttcttcatttcgttgatgctgatcaatcggcacatgcacaaacgcaggggtctcttcttcagcagatagattgtaacggagcatgtgctgcgaggtgccgtttatcatctcgtccacgcctctgccaaagagcttgtggaacttgttgtagacgctgtaactgcgtgccacctgtcactgctggaaaccaagaagtgtgtccctgctatgcaagtttgactactcatggtggcaaacgcaagtgcccttagacttaattggaccactatcctatgcatgcc

SEQ ID NO: 25544 - DNA, 459 bp, Glycine max
cggaattcccgggtcgaccgcacgcgtccgacgacagaagggatctctatgtatgatgttaactatgtagaagagattatattggtaggggcacatgatcacaaaccatgtaataatttctcactgtgtaggccttttcattttacacctcaaacgtaacttgtgcaaataatgtacaaaacaagagagctgcagtttgataagtctctagttagattctcgcttacttttagtttctcattttagccgggattgtgtaacatatatatatcgcttttgaacatattgtagaaaagatttctgctcaagttggctagctagtataatctctggattgcgtaatatatatgaaattcttctcattgttctaataattaaatgcaaccgcatactttgataaggaatgctatagtaataacttttctaacacactctcttcaatactccttacaattagtt

SEQ ID NO: 25545 - DNA, 218 bp, Glycine max
ataaactctatcttggaattgtctcttatcattatgagagttgcgtatttcccacaaaaaaaaactatttaaaaatataaaaagcgcgccgctctatagtgatccaaacttacatacgcgttcattctacatgataattctttttttgtgccacctaaaattcaattcactgtcctttgttttacaactatcttgaatgagaaaacccttattgttac

SEQ ID NO: 25546 - DNA, 388 bp, Glycine max
gtttttgaattacattatgagactgcgcaaagagttaaagaaactttacaacgttacaaagaacttcaagacattatatctatccttggcttggacgaattatccgaagaagatcgcttaaccgtagcaagagcacgaaaaattgagcgtttcttatcacaaccttttttcgtagcagaagtttttaccggttcgccggggaaatatgttagtctagcagaaacaattatagggtttaaattgattctttctggagaattagaatggtctcccgaacaagccttttattttttatgttatatcgatgaagctactgcgaaagctacgaacttagaaatggaaaagcaatttaagaaatgactttaaatttttttgacttacccccaat

SEQ ID NO: 25547 - DNA, 431 bp, Glycine max
aattacatgataatttatgattacagataattgggaaccttggttctcgctagttttgaaattctttcaaagtttatacatttgatttacttcatgagatttttaatgtaattattgaattagtaaaattaaatatctataataaaatataaaagatatattattttactaaatttgttatcttttatattttgaaaagacttaagtatgctattacatctattccattaaataatgagatgccataaccaggttatgcaacagaaaaaaatgatttatttgtgacattatttcttaccggaaaaatatattaatagaaattaaaaaaatgtaatgtttgagtaaaattaaggattaaatgaaaaaaaattatactgaaaaaagtatttttgtcaagacgaaaattaaaattatctaatattttatgaatt

SEQ ID NO: 25548 - DNA, 400 bp, Glycine max
  modified_base (8)..(8): a, c, g, t, unknown, or other
  modified_base (56)..(56): a, c, g, t, unknown, or other
  modified_base (155)..(155): a, c, g, t, unknown, or other
cggagacnacaaaaggttaaattaacaatttaatacatacatggcaaacacgctanttcgtacttttaaacaggtaaccggcacactaacttttatgccataaacctctaagtccatcccaaggacacatttgggttcaatataaatggcaccgnactctctaatattccatactacaaaaaacatcgatattgggtggagaaatttaactcgaccttgtatgatgaatgtgttaacaatggcaattcacctgcactgcccgaaacttttaataattacaacaagctcgtttctattggctttaatataatattttttttttgaagaacacttgacaaacatgccgttacataaacaaacttaaataatgtttgtttccacacattgaaaaaataatttt

SEQ ID NO: 25549 - DNA, 430 bp, Glycine max
gattccttcgcgaagcagccatggcctcatttgcgcgtggtgccgcatctctaacccgcattggtctctcctcttccaagacgccccttcaactcatccaccgccgtggcctcgccaatcaccatggccctcccaaagttgcctgctggaaagacccaatgagcccgtctaaatggaaggaagagcattttgtgattgtctctttaactggctgggggctactcatctatgggggattcaagttggccacaggaggcaagggcaagaaagaagaggttttggcaaaagcatcaactgaggcgtagataatatttacaattcaaagtgttcttggtaataatgcgagctcccagacttttccgagattttcagactcggtcttgtttcatggcaaacaaatcttttggctagttatccattaacatttgcg

SEQ ID NO: 25550 - DNA, 428 bp, Glycine max
agctttacctaatgatcttgtaaagagaggaggggctgttagggacccatctgctccccatggagttcgtcttttgattgaggactatccttatgcttctgatgggctagagatatgggatgccatcaagtcctgggtgcaagaatatgtctcattctactacaagtcagatgaggaactccaaaaagaccctgaactccaagcttggtggaaagaacttgtagaggtgggtcatggtgatttgaaagataagccatggtggcaaaagatgcaaactcgtgaagagttggttgaagcttccgctatcctcatatggattgcttcagcccttcatgctgctgttaactttggacagtatccatatggaggtttaatcctaaacaggccaactattagcaggagattcatgcctgaaaaggggtcttctg

SEQ ID NO: 25551 - DNA, 406 bp, Glycine max
aagacgacagaaggggtgtatctccattgtctatcgaatgtacgatgatcttggccagcatgggcttgtcgagggtttatcaccaagaatgggccttcaatgacagggttattggcacaactcttttttgtgcacgatgaatgcaaacaatgtgcatgcgagttttgaagtttataatgcccaaactgatctgatgaagtgtgtgttccaatgcaatataattctaaataactctggaggctttttttttgattagtttgatagctactgggataagagattgtcatggaatattccaaaaacaccatctttttaaaagttttatatgcttatcttatgctaagaataattaaataataaagaattattataatttccctttatttaatcacaattaatttacttt

SEQ ID NO: 25552 - DNA, 176 bp, Glycine max
cttcacctttcttcatacaacacaatatggatgaccaaattggtattaataagttattccaatggcttctcaaggttaatccttacctcaccttattgttccttcatttaaactactcatagttttttatcatcactataatttctttcaatcatttcataattcatttcatactt

SEQ ID NO: 25553 - DNA, 354 bp, Glycine max
  modified_base (28)..(28): a, c, g, t, unknown, or other
  modified_base (31)..(31): a, c, g, t, unknown, or other
  modified_base (62)..(62): a, c, g, t, unknown, or other
tgctatattgttttcagagattgagtantanaaggctatttgtgcaatttttcctacactantgctcatatcaaagtatgtagtgtattttgcatttgttcaccaatctctataccttaggaatcataaaagctaatgtcagaatcactaattttttggcctctacttggtctcctgatcttgctatgtattatgtacagaggaaatttatcaattatttataaaatagggcgttattttgacataaaaaaaaataaatataaaaaatattttgcggccgctctataggatccaagcttacttacgcttgcattctacttcataactcttctatagttgcacctaaattcaatt

SEQ ID NO: 25554 - DNA, 288 bp, Glycine max
taaaatcccaagcatttaaatggggagaaagatgagcgaggggataagctccatgagtttcaagctcaaggagttcttccagcctgggcccaatcatgccgacaagcttgtggaggacactacttccgaagccctggacgagccctaatgggccctcaatcttaatctctgcaacctcatcaacaccgacaagctcaactgcgtcgaactcttccgtggaatcaaaaaacggatcattctcaaaagccctaagtttcattacccttcccttttcctacttcaaaccct

SEQ ID NO: 25555 - DNA, 366 bp, Glycine max
ggtgttttgggatttctggagtctcaggaaaatggtcctttgacaagacatggcattgttcctgatattgtcataaatccacatgcatttccctcacgacaaactcctgggcaactcctagaagctgctttaggaaaggggattgcttgtggtggcatactgagacaagctacgcctttctccacaccttcttgtgatgccattactgaacagcttcacagagctgggttttcaagatggggaaatgagaaggtatacaatggaaggactggtgagatggttcgatcactcatttttatgggaccaacattttaccaacgtctgcaccatatgtctgaagacaaaatgaaattccggaacactggt

SEQ ID NO: 25556 - DNA, 425 bp, Glycine max
  modified_base (406)..(406): a, c, g, t, unknown, or other
gaattccaaaaagtaaaaagaaaaatattatgaggcgctactgaactggaaaaaaaattaataataacaatactaatattccatctaaatattgtgcccattttcaaaaatatatctcctgtgaagcaacaaaattaaatttttttattggaaaatgttctcactttctaatgtatgtttaacgtgacactaatcagcaatactcattacattattattcattttcattttctagaagaagccaaaaaaagggaaatttatttctgttcattttattttaatttattttcattgttctgatacccgtgatactggtgttgtctttatgtcagcttcaccattcggaaaaattcaatggagtgccatatgggctgtttttgggacccaaggtcagttgcattttcgnttctgtaatcttgtattat

SEQ ID NO: 25557 - DNA, 428 bp, Glycine max
ggttctagtgtgtgattgtttgttgttgtaactcgttcttgttcttttgttgttctgtgtttgtgtttgttttttctctcacctgaaaatgtcttgctgcggtggtaactgtggttgcggaagctcctgcaagtgcggcaacggctgcggaggctgcaagatgtacccagacttgagctacactgagtcaaccaccaccgagaccttggtcatgggagtggcacctgttaaggctcaatttgagggtgctgaaatgggtgtgcccgctgagaacgatggctgcaaatgtggaccaaactgctcctgcaacccctgcacttgcaagtgaggtgttgggagagcaagcttcaagcagagatagcccttaattaggaataatgataaactattaatgtgtaactaaaaacttatgtattatgtctgtgatg

SEQ ID NO: 25558 - DNA, 429 bp, Glycine max
  modified_base (64)..(64): a, c, g, t, unknown, or other
  modified_base (400)..(400): a, c, g, t, unknown, or other
ttcataaggttacacagctattcctcttaaagtggcttcgtagtttccacactgcataccttangtcttccgaattcgaagttaatttgcaagatggctaaggaaaaggctcagatcaacattgtggtggttggtcatgtggaccctgaggaggcaaccaccattaacgagctgaagaagcctgttgtggagaaagaagctccacggcatgccatatgagggcatgcacgtacggcctctgaggggaaccagaaaattatgttaacaaaataatctggaaccctaatgtatcagtgtcatcatcagtgtgtagtttaagctaactttgctatggttacgttctttgagatgagagtcttgatgaacagtaccattctgatgtattgctttccttgaaagntaatgcatgcttcttatcctctgtctaaa

SEQ ID NO: 25559 - DNA, 348 bp, Glycine max
ggcccgaaaaaccgggtcgaaccaacccgtccgaccggttgcaaaaaaacaacaaagggggattttgcgttagaactttaaacacccaaaggtgattctgtcttcgaagggcttcaccggattgcaaccatatctgggggaaaggtgagagagccaaaggaggaaaacgcgactctgtgcccacatgttatagatggtgaacacgtttttggagtcgctcgcatatatggctcaccaaatgacaccttcattcatgtgactgatatgtctgagagggaaacacttgtcctcctcactagcgggatgaagagttaagctgccagatatgaataatcatcatattctgct

SEQ ID NO: 25560 - DNA, 182 bp, Glycine max
aacttacatacatcttttttccaaaattcccaacttacatctattccaaattatcaagtgattttattcttctacaataacaatccaatcattttgtaaacaatcccttctctgtattctacatctttactcatttaaaacttatattaatcttttatccacaaatcctatttttctctttt

SEQ ID NO: 25561 - DNA, 391 bp, Glycine max
  modified_base (64)..(64): a, c, g, t, unknown, or other
atatatcttattccgtttcattcgcgataacttctatctatataccttctactctttctctctnctcatcccactcgttacccatttccatttggtttgtttgttctcacgctcaagaagcgattctttgcctaagtcctcgatttttttatcggaatggtagatttgaggtgaaaaggttccatatttgttacgccttggatcttcttcatcaatggagtattttgcatcttgaagatcatggaagcggaatggagaacgaagaaagattattggagatgtcacttcaagaaaaaaatttgtcaaaaagaagttcactaccataggaagccatggataagagcttgaactttgtatcaatggagattcttgaaaaccgaacgtggatgta

SEQ ID NO: 25562 - DNA, 335 bp, Glycine max
cgaccacgcgtgctacggatacaacaaaaaacagtttgggattttgcttctccttgaaaagcagcgatttttgttgaatttaaatgtgcacagggatcttctaatatataagagcagctaatttgctgataaactttctgaacaatctagtttgtcatgtctccaagttgatgactgagaggatgttgaaatatatgttgagactgttgggcttatttactgcaaagaaatgaaacatcatctaatgaaacaaagtgtttctcacattcttctaatactcaatgtaatagaattccttggcttcaactaatgtattcaatcatgtatggagtact

SEQ ID NO: 25563 - DNA, 282 bp, Glycine max
tgtcagtcctaacgttattgcgcagctacccgctcaggttaatccgactcattttaaacaatgacaagaccatcccatcctctctaaaggatccaagcttactttcgcgcgctttcgacgatccaactttactatctcgtcccttaaattcaatttactttccatagtgtcacaacaattcaatctactaaaaccctttctacacccaacttaatcgcataaccctacatccacctttctcaagctgccttaataacaaacacgcccttacagatcgccctt

SEQ ID NO: 25564 - DNA, 401 bp, Glycine max
caaatttaaaccatagacccttcctaagagttaatgatgactttgaatgacccaccccaacccaatattctatatcctcacctcatacaatatttttatacatctaaaaaatgaaaaaaagttcaagaaaatgatctctaatgaataacacccgacaatttcgattcatccacacttactacaccaattgatgaagaaaatgtttatatccttgaacatcaaacctctaataaatctaacctctattaaattaacactgttctctgaaccaaacgaaaccaatcctagtctaccttactttaattgaaacatatcactccatttttccatgttcatctttccaaaaaagacacacttacattcacattcttttataataccaccacaaaattttcataaat

SEQ ID NO: 25565 - DNA, 293 bp, Glycine max
  modified_base (79)..(79): a, c, g, t, unknown, or other
  modified_base (86)..(86): a, c, g, t, unknown, or other
acggctgcaaaacaacaaaaatttataattgacaaaaaaaaaaacaaaaaccgaaaaatgtgaaattttaaaacacaanccccccncaaaaactaaatacaagacacaaaatgccgtttatacgcctttcaactttattgaataaactttcatcaaatgaaaccctttcttctatctataatgcaaccattgacgcattttaccctctttcaaacaatgctctaatgtatataacataaatagccatacctctaaccttacccaaatccatacacaaatatcttataaaaatt

SEQ ID NO: 25566 - DNA, 369 bp, Glycine max
  modified_base (73)..(73): a, c, g, t, unknown, or other
ggggttctttctcacgttcatattctacgcgtccctcgtctatgtcttaaacggcgatggcgatggcatttcnggtgcgaagccctgacctccgctctctctttcttctctctctcttgtccatcgcttccgccaatgtcttcttcgaagagcgtttcgatgacgggtgggaaaatcgatgggttaaatcagattgtaaaaaagatgataacgtggctggggagtggaaccacacctctggtcaatggaatggagacgctaatgacaaaggtattcaaaccagtgaggattacagattctatgctatttcagctgaataccctgaattcagcaacaagggtaagacactagtctttcaattttctgtta

SEQ ID NO: 25567 - DNA, 237 bp, Glycine max
  modified_base (29)..(29): a, c, g, t, unknown, or other
  modified_base (80)..(80): a, c, g, t, unknown, or other
  modified_base (127)..(127): a, c, g, t, unknown, or other
  modified_base (130)..(130): a, c, g, t, unknown, or other
  modified_base (144)..(144): a, c, g, t, unknown, or other
  modified_base (194)..(194): a, c, g, t, unknown, or other
  modified_base (221)..(221): a, c, g, t, unknown, or other
cagaaggtacatttattagatttagttgnttcctgtgagacacgtaccattgccctttttgtttcataaccattcttccncatgtttgatccatttccttggttttcaagaattgctctaagggaanggnttgaagaaccaggnaatggcaaagttggcggaatatgaattttattattgttaaatgaacggcntgaagaaactccattatatggtgttgncttttttttttttttt

SEQ ID NO: 25568 - DNA, 370 bp, Glycine max
gacctttctcctaaaacatctcaatgggttcttcttctattacaacatcgcccgcaaccatgaccatggctgcgatcgtgctcctgttcacggtctttgccgtttcctccgccctagacatgtcgataatctcgtacgacagcgcccacgcggacaaggccgccacgttgcgcaccgaggaggagctgatgtccatgtacgagcagtggctcgtgaagcacgggaaggtgtacaacgcgctcggcgagaaggagaagcgcttccagatcttcaaggacaacctgcgattcatcgacgaccacaactccgcggaggaccgaacctacaagctcggactgaaaccgctcgctgatctcaccaacgaggaata

SEQ ID NO: 25569 - DNA, 314 bp, Glycine max
cagggatggacgtttattcgtgattcgataactgaatcaagatcggaccgatcgcgccttctctctcttgtgtttatgccaaggctgacagtgtataagaggcaaggcaagaaacgcgagggagagcgtcattgtgaaggtataaagccaccgaatgtaacattaccttacatgaacccacaacctccttattttgaaaactactcactaactcaaagttatctcagtgtgcaccacattgcgttctgctgagttctcttactaacaagtatgaccgcgccaacacgtactatcatacatagtggcatgctgag

SEQ ID NO: 25570 - DNA, 227 bp, Glycine max
ccaatgatgtttctggctattttaaatgcttctccaaagcggcctgcatgcagcggttctttaccgtggatgctacgtccacctcattttcaacagtgctatgatcaacaacaccaccatcaacatcctcagtctttgggaactcctcggcggtctgagtatgatccgtcatccaagcccatcaaaggggtttttggcccacgctcatccgatgttgctatggatct

SEQ ID NO: 25571 - DNA, 454 bp, Glycine max
gagtgtgtgagttcattaacatatacaaattctctgtgttgtgttgtgtacttgtgttaattgtgttgttgttgtaggaaatttaagtgaagagagaatgatgatgaagtctgctatgtgtgcattggtgcttgtggcactggttgtggttgaagtggggcccatggctgaggctgcggtgacttgcaacccaacacagttgactccttgtcttccggcaattaattcaggttctgcaccttcgagtgcttgttgccagaagctgaaggagcaaaagccatgcttctgtggctacctcaaaaaccctagcttgaagcagtatgttaactctcctaatgccaaaaaaaccgttagttcttgtggtattgcctatccaacttgttaagcacctcttatatatatatataaaatgtgtgaacaatatatatatattgattaaaaaatatagtttaat

SEQ ID NO: 25572 - DNA, 426 bp, Glycine max
gaaattgttgccggctccagcaacctctgccaatctttaatgggtgtgattgatttctacaacactggtgctttgtgctgggttaagtccaacgccaatctgaagcagcaagtgggtttggcaccaagacccatttgttcatttgaggggaataatcagaggaagtttgtggcaatggcttctaccgttcctgtggagcaagtcaacaatggccccctgcaggtgacaggtgactccttcatcagagagcatctgaggaagttggctccttatcagcccattttgccctttgaggttttatcagctcgccttggacgtaagcctgaggatatcgtgaagttagatgctaatgaaaatccttatggtccccctccagaggtcatggaagccctatgatcaatgcaattcccatatgtctatcctgac

SEQ ID NO: 25573 - DNA, 309 bp, Glycine max
gtcgggagaaaactaacgacggaacgttttcattatagatggaaatcgattggtatatgggggtgttttcggatgtatacctccaatcaagcctaccgacatccaataacctttatcagacatagaaggactcaaagttgttcaaaaggaaaattgagggctaggccaataggtacaacacaattgggctaatgattttttcgctgtgaatgagatttagatgcaatttgttgagtctatgcgcaagcatatcacacatgaacttgaactacattaacaaccacaacgcccttatgaagatgtaagtta

SEQ ID NO: 25574 - DNA, 453 bp, Glycine max
gaagacgacttaatgttgatcttagtaaagggtgctttggatgcgcgtggttctaagttaatgccagataaaaaagattttggttatagttttccttgcgatggcccgggacgaggcggtacttgcgatatttcggcttgggacgcattttatttggcagttttctggatgttaaataccattgggtgggttactttttattggcattggaaacacattacactatggcagggtaatgtttcacagtttaatgaatcttctacctatttgatgggatggctaagagattatctatggttgaactcttcacaacttatcaacggatataacccttttggtatgaatagtttatcagtctgggcatggatgttcttgttgggacatcctgttagggctactggaaatatgttcttaatatcctggcgcggatattgacaggaattgattgaaact

SEQ ID NO: 25575 - DNA, 53 bp, Glycine max; identical to SEQ ID NO: 1282

SEQ ID NO: 25576 - DNA, 433 bp, Glycine max
ggacgcgtgggcggacgcgtgggagtttactttagggggtgcgtcggagctgtctgtgcaaaggtgcgttgttcttcgcggcacacctcactcactgaacggtaagtatggcggacaaggctgttacaatccgaacccgaaagttcatgaccaacaggcttctttccaggaagcaatttgtcgatgatgtccttcatccagggagggcaaacgttttcaaggctgaacttaaggagaagctggctaagatgtatgaagtgaaagaccctaatactgtatttgtcttcaaattcctaacacattttggaggtggcaaattcactggatttggtttgatttatgatacagtggagaatgccaagaagtatgagcccaaatacatgcttatcacgaacggacttgacaccaaggttgaaaagtctacgaagcccat

SEQ ID NO: 25577 - DNA, 386 bp, Glycine max
ggtcaatttcaaagctctctacataacggaaggggacaggggagtggggtttgattgcttttgtttgtgtgaggcaattacagagtgagaatcgatgggggagaaagggtgtgtgagcttagaaggaaagaaggtgatattggtcccttacatggaggcccacgtgcccaaatatcacgaatggatgaaggacccttctctccttcaagccactggctcagagcctctcaccctccaacaggagtacaccatgcaactctcctggtcccaagaccctaacaaagagacctttattgtattggacaggacttggttgtggcgatttctctcacgggaaccccccctgaagccatggtggagatgtaatatttcataatgattggatg

SEQ ID NO: 25578 - DNA, 336 bp, Glycine max
tgacagagcaagaatgaatatgacaaatgccttgactaaaaaattcaaggatctcatgacagagttccagactcttagacaaagaatacaagacgaatatcgtgaggttgtggagagaagagttattacagttacgggaactaggccagatgatgagacaattgatcgcctgatagaaactggaaacagtgagcaaatcttccagagagcaattctagaagcaggccgaggacaggtagtaaacacagtagaagaaattaggagagacatgatgctgtaaaagaaattgagaaaaaacttcttgatttacaccagatttaccttgacatggcagtc

SEQ ID NO: 25579 - DNA, 318 bp, Glycine max
tggggcgctagttttcatagctttttatattcccttcaccaaacaggacacgcacggggagacaaacagatcatagaagcattgatatcgtattatcggtactaatccaaccgctcgtgggaaacaggacaaagacgaacattattcacagcatacagaccctctaattcgaaagaaaggaaccattcgcatgtatagatggacccggagcagacataaatacgcgtgcagaagaagatttcgcacatgctgactcacaaaggcacaggcgctctggagcacccatacctattaaacgccctcaccaagtgcaggatt

SEQ ID NO: 25580 - DNA, 116 bp, Glycine max
gaacattgggggggatataagcaatttacactcttttaaccaaattattcaccatgcttacatgcccttcagccagcagtgtttgaacattgtttgtttgttttctaatgacgaag

SEQ ID NO: 25581 - DNA, 429 bp, Glycine max
  modified_base (352)..(352): a, c, g, t, unknown, or other
ggttctgtcctcttttctctgggactccctttctctctggctctctctcgctcttcttctcattcagcaccgagtcacagactcaccgatcttccgagtccctttcgtgtcggtttatgagctcgaaggagagacccactcttggtggcacgcggattaagacccgcaaacggaatattgctgcgccgctggaccctgcagcattctcggatgcagaggtccagatttatctggataatgctggtgatctggaactcattgctaagagcattggatcttcagaccttaactcttcaagatacggcgataccttttttgaggatgctttcactgggggtcgtacacaacctgnaactaccaagcctgatgagggggaccgccatccatactctataatagagcgtgagcctaagcgggcagtcattttac

SEQ ID NO: 25582 - DNA, 439 bp, Glycine max
ctctagatgtctttgtcacacacccttctttgcagtaaatgacattttgatcctttagtgagtgtgaaagggattttcctagtcctactctcctctaagtagtgggagtttggttcagccttgacaggtcatttttctttaaacaaatcattgttaaacacctagagactttggttcagctttgacaaatcattgtgctttaaagaaattttatttgtagagattttgtgaagctgtaatttacccaaataaataagtattgagttaatttgttataggtgaatgatgttgataacctgcatgtttaagggaatacttgagaaatataaaaaaagttggaatcatgggtgataatgtttcctatcatattttttctctccatgtttctttgctattggagttggtatccaatattcctttaattggaagggccctcttg

SEQ ID NO: 25583 - DNA, 361 bp, Glycine max
ggagccttgtactgattaacgagaatggacaaggaagtggagcttggttcccttgaaggtgaaatggccacccagcacatttcacaaccacagaagcgcaagggtggtcttgttaccatgccttccatcattgcaaatgaggcacttgcgagggtggcaagtttgggccttttgcccaacatgatactgtatttgatggggacctacaggcttcaccttgcccaagcaacccagatacttctctggtcccatgctaccagcaatttcacacctgtggtgggtgctttcattgctgattcttatctgggtcgattcctcgctgttgggttgggttcggccatcactttttgggaatgacact

SEQ ID NO: 25584 - DNA, 361 bp, Glycine max
ttatatttttttgcccaactcactatttagtggacggggttgttttgcttctgtaaactgtccaataacagaacctctaatgagtccacgctacagaaggacaaactgtgttgatatctaccaatcttattgatcaggttttagcccacaaggaaatgccaaatatgatcggcgggctaccagcaaattgtaagaccaccatactctgcaagcttatacttggagagatcgctaccacaaattccaccattgaggttaatgagaagacttgtgtgaaacaacaacattagcttcactgtatgcgaaggtcaaggccatgacaatattcgaaccttgtggaagaactacttttaaaaaacac

SEQ ID NO: 25585 - DNA, 321 bp, Glycine max
  modified_base (50)..(50): a, c, g, t, unknown, or other
  modified_base (114)..(114): a, c, g, t, unknown, or other
  modified_base (121)..(121): a, c, g, t, unknown, or other
tatggggaaatggtttttggtaaaactttgcaaactatatccttattgangtatttgcgcgagttccgaggaatcaaaggtcctcatatggtggttgctccaaaatctactctnggaaatnggatgaatgagattcggcgcttttgtcctgttcttcgtgcaatcaagtttcttggcaaccccgatgaaaggagacatatcagagatgaattgctggttgccgggaagtttgatgtttgtgtcacaagttttgaaatggcaatcaatgagaagtctgctttgcgtcgatttagttggggctacataattattgatgaaact

SEQ ID NO: 25586 - DNA, 446 bp, Glycine max
gattgttaagcattcttcgcctttctctctcttctttttactctctctctgtctctctctacgctttctcgttcgagatccctcaagggatccactaactgaaggagaaatggggttgacattcaccaagcttttcagccggcttttcgccaagaaggaaatgcgaattctgatggtgggtctcgatgcagctggtaagaccaccatcctgtacaagctcaaacttggagagatcgttaccacaattcccaccattgggttcaatgtggagactgtggaatacaagaacattagtttcactgtctgggatgttggtggccaggacaagattcgtcccttgtggaggcactacttccaaaacacacagggtctcatttttgtggttgacagcaacgacagggacagagttgttgaggccagagatgagttgcacaggatgttgaatg

SEQ ID NO: 25587 - DNA, 248 bp, Glycine max
tgttggggtaataaaaatagcagataattaggtgccctctgctggtacttcttcttcttctccattggtttcttcaatccttcattcctttcaatggcgctaaaggttcatttcaattagaggcaccgcacgctccaaaccgaaccatgaatcttttggtggcagctccttcgtcttttcgcgggaatcttctcgttcccctgtcgcgctgcacctcttgcttggaacttgatcttcgtattcaacac

SEQ ID NO: 25588 - DNA, 422 bp, Glycine max
gaccagttccctggttgaaacgaagcgaaatttccacctgcatcatcttcaaacctgcgcttcttttgaaccgatttgtgctgttttgttagtgaagcacatcgagtgcaaactgtcgaacaggcatggcaagtctgttgacaacatcagccatcacctattctcctctcaacaatggttccaaggatttcagaaagtcagggaattcttctaaaggaaggtgttgcataaaagcaatggggatagagaaatccttggaggaattgtacaatgtgaaggtggaaagaaaagtgtctcctgagaaactagctgagcttggagtttcaaaatggtcggtgtggaagactgggaaaagcaagttgccctgggactggcaggtagaccaactggtgtacattgaaaaaggggaagtgagagttgtg

SEQ ID NO: 25589 - DNA, 303 bp, Glycine max
cgttcgcttattttgggaacaaattacagaccagggctttgattcaaggctccagaccttctttgacatggtggacaaaaatgccgacggaagaatcaccctagaggaagttcaagagattatggccttaagcgcttccgctgataagctgtctaattagataacaactacttaaacttttgcggcggatctagaggatccaatgttacgctcgcgtgcttgcgacgaactagatcttctatattgccaactaaatacaatttactggccggcgttctacaacgacttgactgagaaaacctt

SEQ ID NO: 25590 - DNA, 444 bp, Glycine max
gactttgttctgctttcaattttgatcatcacacaacaaattctttagtgctcggtacaagattcgtgaggggccagcaatgaccacatctcttctactcccatctccttcttgtgctgctatactgagcaaagggactaatagaatttgcactcgtgcttcatttcactcacttaaatcccatgtgaagaagggattcagagtgagagctcttaaagaaaaaacagaggaaattgaaagtccttcacagccatcttcacctgaggaagttacaaagaagtatggccttgaagctggtctttggcagattttcagctcaaaagaggaaggaaaggataattctcaacagaaatcaaagggtgatcgagccaaagaattgctagcaaaatatggtggagcatacttagccacctccattactctgtcattaatctctttcgcact

SEQ ID NO: 25591 - DNA, 272 bp, Glycine max
acgcggacgcgtgggctgacgcgtgggcttttaagtttaccaaaggggggtggtctgtggtggcggttggtttttctttcacctgaaaatggcttggtggggggggaactgtggttgcggaagctcctgcaagggcggcaacggattcggaggctgcgagaggttcccagacttgagctacactgtggtaaccaccacctatacctttgtcatgggagtggcacctgttaaaggtcaacttgagggtgctgtaatgggtgtgcccccttaga

SEQ ID NO: 25592 - DNA, 177 bp, Glycine max
aaccctttggcactcaactttttgggcagggtaaaaaggaagctgctcccaaagctagtgatggtgcatcatccaaatccaagggttcagcttccaaatctgctaccaagaaagttccagtacagaagccccaagaatccaagaaaaagggaaaaggaggcttaccaaaaaaaataa

SEQ ID NO: 25593 - DNA, 190 bp, Glycine max
  modified_base (23)..(23): a, c, g, t, unknown, or other
  modified_base (26)..(26): a, c, g, t, unknown, or other
  modified_base (31)..(31): a, c, g, t, unknown, or other
agaaaacaacccaaaggggagangcnatagncaaagagtttaaacggggacgaaagcagggacagacccgaacgcggggggctcaaggagaaagccaacggaaccgccaataacaccgtgccaaggcccacacgaagcctgcaagagccgcccctaacagccacaatgtggaacacagggaggcaaagag

SEQ ID NO: 25594 - DNA, 382 bp, Glycine max
gggtggaaagtgaaagagtaagacaccacatagtgtaacttgagtgattagatctgatgagtgcagaaagaaggaaggattgttggtgatcgatcatcgatcatcgatcatcgatggcgtctgctagccttggaagtggtggggtgggcagttccaggtctgttaatggtggcttcaggggttcttacagttccgtcgattggcttggcagagagatgcttgagatgtctttgagagaccacgaggacgatagagatagtgagcctgacatcattgatggtttgggtgctgagactggtcacgtgataagaaccagcgttggtggccgaaatggtcaatctaagcagaatgttagttatatttctgagcatgttgtgggaac

SEQ ID NO: 25595 - DNA, 331 bp, Glycine max
cagaattgatgttagaagggttttcccacaaggtgctacagtggtatttatgcagaatggagggctggtttgctacagatgctgataccatatcactgaaatgttgggatcaggaagtattactacctggtggtcatggtcttatggtcaggggttaccagcctgttataaataccctagccaagggtcttgatattcgcctgggacataaggtaacaaaaatagttaggcaatataatgaagtaaaggtgacagtggaaaatggaaaacatttgttgcagaacccgctattgttgctgtacctcttggggtgctgaaagcaaagagcata

SEQ ID NO: 25596 - DNA, 337 bp, Glycine max
gaagaagacgtacggacccacaaacattttcattgtttcataactaatgttctaagctatgaagcacacggatatcggatgcgaatatctggatacgaatatgtggacatctgtcaaatacatcaaactcaattcggacacgaacgtcgatatcatgatattgtgtcggataccggatagagattggggtgtccgtgctttataggtctaagttaagtaaatcctactactttgctacaaagatcagggtgcacaaggtgagtttcaattttttttctttctctttcccactttacccctgcacactcgtctctctcaccagtcaccactgtgaaca

SEQ ID NO: 25597 - DNA, 444 bp, Glycine max
gaacacagaacagagcataagctacttccattgctcccaacaccatcatcttcatcattattttctttctcttcactcatgtcactgtgattatggctcttgtacccactcgcccattcttcgattcatttcattcttctcccaacttccactctctccgcttctgcaactccctcttccgccactccctcacaccctctcccaattccactttcctccgtcgcaaaccactcttcatctttcgttgcaaccctgccaagagtttctccaccgacaaacactggttgaagcgttggaacgaccccacaaacaaccacgcccgtccgaagccgccatgtgctgttttggactattctgaaaatgggcacgcgtcaaaatccggtcttgcgagctctgacgaggagggtggtgatggaaataccggtggaaagcaccatgatagga

SEQ ID NO: 25598 - DNA, 416 bp, Glycine max
  modified_base (4)..(4): a, c, g, t, unknown, or other
  modified_base (21)..(21): a, c, g, t, unknown, or other
  modified_base (24)..(25): a, c, g, t, unknown, or other
  modified_base (77)..(77): a, c, g, t, unknown, or other
  modified_base (87)..(87): a, c, g, t, unknown, or other
  modified_base (105)..(105): a, c, g, t, unknown, or other
ggtncttttgataatatatgnaannacaaaagatgttatcataggtccattacatgccctaatatgaaatttatcantgcacatatnctagtctacacatggganctttgcatgtctaatgttggaacataagtttaatttttcagtaagaactccctcatcattgtttgaatgggtaaatgttttacttttttcccagttttgttaattaactgaatgtcttaaaaaaatagttaaaaccaaaattaattaaattctaattgattaaacacctaagccaattaagttttgataaaatgtttaatatacacaatcaaccactgcaaaaatataaaccattttcattgaaccaggaagggaaaaattactttcttgtcatcttgttaaaaaatttcaatggcaatgcaaactttttc

SEQ ID NO: 25599 - DNA, 402 bp, Glycine max
tttatattcctacaaaaatgtagaaatgtattgtatatgtaacccaattataactttcatttttagtcttacttttattctattatttttttaattttttttaaaaatattactaggaatattataatttaactgaactcatttttttaatgtactcaagaataatttttttttagttatagtattcccgagaatgtcattgctaaaaacgtagtcttataccttgaaataaagttaacttgtagtttaatgaaatttcaaggttaggctaactttcttttaaagtactcttgttttcaattttttaaaccagctttgaaacgaaaaagtagtttgatctattacgcctaacaatcaattctaaacaattgttaaagggaagatccgaaacgcatttcaatg

SEQ ID NO: 25600 - DNA, 458 bp, Glycine max
cccacgcgtccgcgacagaagggggaggcattttcgtctttgtaattgttgatattgatatttgattgatgcgcatgcggtggttcctccgaagcccaatcatcaaaacctcgctgctgaatctgagcccttcaatctcattaagacctcactgggcgaggagaaccttcacttcttcttcgagatcgtcaatggcggccatccacaaccacagcaatagcaacagcaacagcgaaaccggactggcgagacgcttttggatcaagttcacgcgcgaatccatcttcgccatgtacactcccttcgtcatcgccttggcctccggtaacttgcacattgatcctttcaccgttacatcgcccaagacgttcatttcctacgtgcctttgctcaagcgtatgaagtggctgaagagtgtgctgatgacgacgatgcgaaactttgaatctgtgaattga

SEQ ID NO: 25601 - DNA, 428 bp, Glycine max
gacccacaaactccacaagtgtcacaagtcattactcgttagagagagtttgtgtgtgtttttgtgtgtcaccttggtgcatacaacacaagatggaggaccaaaatggtagtggtaagttgggccaagggcttcgcaaggtgaagccttaccttgctatattgtcccttcagtttggctactcagggatgtatatcatcactatggtttctttcaagcatggcatgagtcattggatactctcagtgtaccgtcatgtagttgctgctattataatagtcccttttgcacttgtccttgaaagaaaaataagaccaaagatgactcttcccatcttcctgaggatagtggcacttggtttccttgagccagtgctagatcagaacttgtacaacatggggatgaagatgacctcaacaacgtttgca

SEQ ID NO: 25602 - DNA, 177 bp, Glycine max
gggggtgacatacaaaaggaatgtaccctgctcttggtttagaggcttcttggtggactgcagatcttgggaaaaactatgacgggaaaaacgatgccctcataagatgggaggtctcataccattgatcacgggacggcgatgatacaacacatagacgggattccaccagaccag

SEQ ID NO: 25603 - DNA, 433 bp, Glycine max
ggcatataataaacttaacagtgtgacagaacataatagcagaagggaacaagatggacttactggagttatgggcaattttcggccccggcgtcgccggcgccgtcttcggcgccggatggtggatctggcttgacgccgtcgtctgcagtaccgtcaccgttcccttccttcattaccttcccggaattttcgcatctcttgcggctttgatgttcaattgcgttagaaaagaagacatcgattattctccctacgacgaaggcgagtggagactgaagctgtggctcttcattgcatatgttgtatcctttgtttctttagctggatcagcaggcctgctgatccaagattcacttgataaatccgccccttcagtttggactggagttgcaggtgttttgcagtgtgtttttgtcttgatctgtggact

SEQ ID NO: 25604 - DNA, 278 bp, Glycine max
agggagggcacttgttcaatcttttcaactttcgtgtagtgcactgttttgctatagtaacccattaattaaaccgacctacgtagtagccatgaagagaggcagagaagagagctagttagacatggctaattgcttgatgctattgacgaaagttggagagagtgaaaccaattacccaatatcaaagggtagtgatattggtgatttcaagtgcaagacttgcaatagaaggttctcttcttttcaagcccttggtggccatagagcaagccaca

SEQ ID NO: 25605 - DNA, 368 bp, Glycine max
  modified_base (35)..(35): a, c, g, t, unknown, or other
  modified_base (46)..(46): a, c, g, t, unknown, or other
ggagaagacgttttattttacgacatttttgcaanctttttaactngcgaggaatgcgggggtttgctatggaaacctattaattaaaccgacctacttagtatccatgaacagaggcagagaatagagtaagttagacatggctaattgctagaagctattgacaaaagttggagagagtgaaaccaattacccaatatcaaagggtagagatattggtgatttgaagtgctacacttgcactagagcgttctgctattttacaaacccttggtggacattaaacaaaccacataaaaaccaaaactcataggtacagatctttcgtgccatcaagagttaccgaacccaaccatgaaacaacaacc

SEQ ID NO: 25606 - DNA, 458 bp, Glycine max
tacggctgttttaagacgacagaagggatttgctaatccttgtgtttaatcctaaaaaaatagaaatacatatccttttttccgtggacttgctttaccggtcttgccttttcgaattctatttatattaatatttcactcctataattctttatccgttcggacaagaacacaggggaaggactaattgaaaggtgaagaattcacatactgattcgccctctttcttctcttttttagtccaatgacccccccttttttttaagataatttttctcaagtgttaaaacttgagagattttgcaatggatataagaactggtatctaattcgaataagtatcattcttttagggaatcttccaattgattgaccaatccaaataatatatggatatatatatatagatagatctatctatatatatatctaactaatataggaaatttagaaagata

SEQ ID NO: 25607 - DNA, 422 bp, Glycine max
gacctttaaactccacaagtgtcacaagtcataactcgttagagagagtttgtgtgtgtttttgtgtgtcaccttggtgcatacaacacaagatggaggaccaaaatggtagtggtaagttgagccaagggcttcgcaaggtgaagccttaccttgctatattgtcccttcagtttggctactcagggatgtatatcatcactatggtttctttcaagcatggcatgagtcattggatactctcagtgtaccgtcatgtagttgctgctattataatagtcccttttgcacttgtccttgaaagaaaaataagaccaaagatgactcttcccatcttcctgaggatagtggcacttggtttccttgagccagtgctagatcagaacttgtacaacatggggatgaagatgacctcaacaacg

SEQ ID NO: 25608 - DNA, 445 bp, Glycine max
tgtgtattacggtgaaatccgaacccctccatcaaagtgaagaaaagagaagtaggctctacggttttcgcgagtaagtgtgggtcagaattcaaaatccgaatcagcaactccaattcaaaaccggttatccgaatcgaaatttataaaagtaccaaatcctctgtgactgctagttaatcagagagagtagtgagccaaagctgggaagttaaacttggttgcatgcgaagagcaagaaatatgagaccaaacatcgtttctgaggccgggttgcctactaagatgagtcaatggtgggaaagcattccgtttctcacttctgcagtggtggttgtctgtggaatcatttacttggtttgtcttttggttggatatgattccttcaacgaggtttgcttcttgccgtctgcggttggttcgcgggttcaagtttaccggattt

SEQ ID NO: 25609 - DNA, 445 bp, Glycine max
tgtacatgtgctagccatcaatgagatttttgagaagagtcctaccaagattaagaattatggaatttggctgcgttatcagagccgcactggttatcacaatatgtacaaggaataccgagatacaactctgaatggtgcagttgagcatatgtacactgaaatggcatctcgtcatagggtgaggcatccatgcatccagataattaagactgccaccatcccagctaagctgtgcaaaagggagagcaccaagcagtttcacaattctaaaatcaagttcccattggtgttcaagaagattaggcctccaactaggaagctgaagacaacatacaaggcatccaggccaaacctatttatgtgattcagttaatggaatttccctgctttttgattcattaagtataaaaaggaagagcttagaggtgatccatgtagtgac

SEQ ID NO: 25610 - DNA, 401 bp, Glycine max
tgggcacacttttttctgaactcactcactggaagccttggggtgagtaagggaaaggctttctgctctgagcaccaaattgaaacctcatgaatctttgcttagaattccacagaatatggagactgttcttttcaatgactccccacctttggagttcaagggtatgagcaaggaggaggaagactcattgctagggcaagttgaaatatggaggtacatgacatgctttacggactccgtggccttgaaatccgtcatagagctgcgcatagccgacataatagaccgttatgggaaaccactattcttgtcacaattgttgagaacatagatgatgcacccttcccagatgccttttttttacaaaaagtgattagagtgaatgtacgtaaaaagat

SEQ ID NO: 25611 - DNA, 396 bp, Glycine max
taaccacttttatgcctggttaggttcaatactgctatactgaacaggagagctctactttagagcattgtggaagtatagttgattcgagattttgggtttgtgaagttagggtatttttttgtttgaaaagagtaaaaggtaaaaaatataattagaatgattcccaagagaatagtattttagacatgctctcctttatggagggaatggtcattcttcatttgatggaatgcacattctcattttaaaggtgctaccaatcattctatcctgtcatttttttagttcatttgtattacatacatttaatctccaagtaatttgcataatcacttttcttgaattggtatgtactacatacatactaaagtatgaagatctgtcttgttgact

SEQ ID NO: 25612 - DNA, 196 bp, Glycine max
acagcgctactttttagcactgaggaccttcactgctttgtgattcagcatttgctacgtacggggatgaatgtgttcaacaagacgtgcttggacaaagaacatagtcacatgatgttccaagagaatgggtcttgaacgaccatcttctttacggagggaacggtgattctagatcagcaggactgcacaactc

SEQ ID NO: 25613 - DNA, 441 bp, Glycine max
gaagggtttgcatttcaagctcgggaaaatttaactgcggagaggctagttaaattacacagaaggagtgggacgacactttctggaacccttctcaactatttcacaccatcaaggtatggagatggcaaagattctcaaatttattggaatgcaagtggaggttagcaagcacacggaggggtccaaggagaagacgctacgtccaaatggattgcccgaatccttgattcgatatgatgcacggcagaaagagaaggctacaagttcagtaactgagttgctgcaggccatgaagcgcccccgagcattaagtgaatccgcaagccgtccctccatcaaaaaatcaggatctagatcttcagacgaagaaaaattagaacaagaacaagaagatgacaaagagaaagcacaaaaaacattaagaagaatttctgagag

SEQ ID NO: 25614 - DNA, 450 bp, Glycine max
gatacaattcacatcatacaccgtttctttcacttcacaaaaatgaaaaacatgaaattgtgttcggtgatgctatgcttatcactagcgttccttcttggggccacagcagaacaatgtggcacacaagctggtggagcgttatgcccaaatagattatgttgcagcaaatttgggtggtgtggtgacacagattcctactgtggagaaggttgccagagccaatgcaaatctgcaacaccctcaacaccaactccaacaacacctagtagtggtggagatattagcagactcattagctcttctctctttgatcaaatgcttaaataccgaaacgatggccgctgttctggccatggattctacagatatgatgctttcattgccgctgctggctctttcaatggctttggcacaaccggtgatgacaacactcgcaagaaagagatt

SEQ ID NO: 25615 - DNA, 391 bp, Glycine max
  modified_base (209)..(209): a, c, g, t, unknown, or other
ttctgttgaacctgtagctggagaggatgttatgttggaagctggtgatgcattttctagtcctcgaatccctcttgttcatcagcaggtttcagttgaatctattggaaattacatagtttcctgtcctttagatgttgagctgagttgcaagtccaacacaatggtggatggtgatgttgtttcagaagataatgccattacaaacnaagaggaacctcgtctctctatggattctatcacagaaaattcaatccaggagcagttgaaggtagatgtgcacaacactaaaatgatgaaggaaaacgtgacctctgacgatctaaataataagagtcttggggagctgaagaggatgctgaggcagttaacgctaaatgaaaaccaaaat

SEQ ID NO: 25616 - DNA, 113 bp, Glycine max
  modified_base (68)..(68): a, c, g, t, unknown, or other
cacgccgtctcgtacggtctgctggaagaacgactataaggggtgactttttcttggcaccttatgangaaatcaaagagctttgggttctcggggggtagtatcggtcgcac

SEQ ID NO: 25617 - DNA, 180 bp, Glycine max
gaatttacaagacaaggaaggcagcctcggatgttgtggttgtcgtcgtcgtgttcttaaggtttggtctgagacccaatttttcattcttctaatgggccaatcctttggtcagaccgagatcaactgggacaagctagataaaactagattctatgtcgtaggagctggactctttac

SEQ ID NO: 25618 - DNA, 227 bp, Glycine max
  modified_base (6)..(6): a, c, g, t, unknown, or other
  modified_base (25)..(25): a, c, g, t, unknown, or other
cacttnaattttatcaaattttttnattctctttgcgcagaggcctacctctgggttcaagatgcagatcttcgtcaagaccctcaccggaaagaccatcacccttgaggtggaaagctctgacaccatcgacaacgtcaaggccaagatccaagacaaggaaggaattcccccggatcagcaacgtctcatcttcgccggaaagcagctcgaggacggtcgtaccc

SEQ ID NO: 25619 - DNA, 423 bp, Glycine max
ggtgttcatttgggttctgcacataaaggtcctatgtatggggtaggtgctgcttcgagaaaggggcatgagaagccacgcatgaatcgtcgttgaaattcaagcaactgctattggtgatgaaatggaaagctgggattcttgttgggggaggactgagaagtaacgaaaaaccccatatatttattttgaataacaccggtaggttctttattatttcaaaatgtgaaattcgttgaagctcttattggactgaaaaaccattggtcactggtggatggatatattttacctggctgtgatggattgagataaacgcattaccatgcctttgttgggttggatcacattattgagattggaaatgaaagctttagcgtgaagcaactaaacaagggttgtttctaacttacaaatgttagt

SEQ ID NO: 25620 - DNA, 155 bp, Glycine max
gagacttcaggtcaggcggggctacccgctgagtttaagcgaaaaaaaaaaaaaaaaaaaaaaaaaaaaaggcggccgttttaaaggatcaaagttaacttacccttgcttgcaacgtaatagttttttaatagggtaacctaaattaaattaat

SEQ ID NO: 25621 - DNA, 123 bp, Glycine max
gagatttgattgactttttttcttcttctattctcacacatacccatctactccttccctcatggctgaacaatcttccaactccatttacgattcactgtcaggacatcagggaaagagtga

SEQ ID NO: 25622 - DNA, 467 bp, Glycine max
gaagacgacagaagggggagcttcagaatcttcaggccaagccaggtaagcaagcacaacacaaccccgaaatggcttctgcttctgttcccatggctttctcgctgagctctgttatcaacaacaacaagccttcatccgaagccttcttcaggccactacccctacggcaaccaaagaggaccctcttcaccacaaaggcagtgtcaaactccaaggctcaaatcaatgcatctttgaaggagaaggcagttgcaggactcacagcagcttctgtgacagcatctatggtggttccggaggtggctcatgctgctggatatgagttctccccttccctcaagaactttctgctaagcatctttgctggtgggtttgttctagtagccatatttggagccgttattggggtttccaactttgatccggttaagagaacttaaagcccgcatgctccaatgcttttt

SEQ ID NO: 25623 - DNA, 433 bp, Glycine max
gcgagagcacgacagaagggggcgttagtttcgctaaaccctaaacctcacagctgagagagtttcgctttcggttagtttctccgccgtcgcagtagcactcacagcttcgctaggttaaatggcaatgcctgttaatgatgatacactggttgaggctgaaactgaagatcagcgagaagaaatgtcatcatctgaatcagagcacgatgaagatgtgaaactaactgaaccatctaaaaatgcactgtttaacagagatgctctactagataaacttggagacatcagctggtcagagaatgtggaatggatacacaaactctgtgttgatgtttatcaagagcaataagcacatgtcaatgatgacttgtcacgagaacttgcgttttacacacaggcattggagggaactaaagatgcctttgagaaa

SEQ ID NO: 25624 - DNA, 258 bp, Glycine max
ggttctagtgtatgtgattgttgtgactcgttcttcttcgtcgttatcttcttcttttgttgtttgtgtgtttgttttttctctcacctgaaaatgtcttgctgcggtggtaactgtggttgcggaagcgcctgcaagtgcggcaacggctgcggaggctgcaagatgtacccagacttgagctacaccgagtcaaccaccaccgagaccttggtcatgggagtggcaccagttaaagctcaattcgagagtgctgaa

SEQ ID NO: 25625 - DNA, 183 bp, Glycine max
gatagtttcattatacaaagcgttgaattcaaaaactaggttcattaaatgtgctttgctttgttcctccaaacccaacatgttttacacatgccgcaactgtgacttctctgaccaaactaactcgcccaaagggaacaccttttgggttataccttaaactgggaaaagcttcatggatac

SEQ ID NO: 25626 - DNA, 451 bp, Glycine max
  modified_base (23)..(23): a, c, g, t, unknown, or other
acgaccacgccggacgggcggcnagctttaagacgacagatttgggagagggggaaaaaaacggcaactttgcaggtgctgaaaaccctaactggtccgaaccattggagccaccgtgcaatagttactcctatcactctctccctaaacacaccagtgatttcggtttcagctctattcggaagagggttgaaacgctgacgcgaaatttttctgaagacagagatgcaggcttgtacaacgatgagttctttgcagcaacaacctatctggaccaaagggttaaatttccatgcaaaagggtatggcaacaataacgggtttctaccctcagtgagggtctggaatattaagccatcccaagcttctcaatgtgaagcaagtttagtcactgggaagccggcatctgtgcctttctctgtgcctgaaattggaggcgaccgaagtagct

SEQ ID NO: 25627 - DNA, 268 bp, Glycine max
gcggacgcgtgggttataacgtttctctatttctttttattatactattttgtcaatgaaatcaatcatgtatttctttgtatctctctcaatgcataaatactcaaaagatgtccacgaatcatttttgaatgtgatatacctaggttagttcatccaacggtatgatacgacttagtctataacatgtcattgaacaaagtcctaaatgatgtcatctaatcatctactctctctaatacgaaatccatattttttattccataat

SEQ ID NO: 25628 - DNA, 379 bp, Glycine max
  modified_base (21)..(21): a, c, g, t, unknown, or other
  modified_base (303)..(303): a, c, g, t, unknown, or other
catttttcagtctgggggagnacagaaagaaaagagcgatccatacaccgggagagatggcacctgcaaatttgacaaaaccaaagttgcggctactgtatctaattacagtgtggtttcccttgatgaagaacaaattgctgcaaacctagtaaagaatggccctcttgcagttgctatcaatgcagtttttatgcagacatatgtatggggcgtctcatgcccatacatctgtgggaagcatttggatcatggggttcttctaggtggctatggtgaaggtgcatatgctcccattcgttntaagaacaaaccttactggatcattaagaattcatggggcgagagctggggaaaaaatggatattacaagatctgc

SEQ ID NO: 25629 - DNA, 296 bp, Glycine max
ggggggatagttttattttgtcagacaacccattccaactcgcgcgggctacagtaacttgggcactattgtgaacaaacaccattcgtaggcagagatgagaaggctcacacatgatgatcggaatttggttgaattctatgtttgggatgagcgcgagcgacaagatgatgatgcacaaggttgtcaggaacaaaggacaggcggtagaacacgcaccacgggcccacggattatgtttcgagctcacaatcgatctgatgctcaaattttgtccaacgactcccatattgatc

SEQ ID NO: 25630 - DNA, 424 bp, Glycine max
ggcctattatatatatatgtatctatattctatatatagatatattggttaggttatcaagtattaatctgaaataaataagaattgctgcttctaatacttataataattactacaaattctaataattactacaaaagggatatatgttagataaaatagattaattaatctatttcacaaaaaaataatgtatccatagcacagtttcgtcttataatacctcgggtgctaatgaaactattttagtgaaatttaactgtctcaattcccgggcgattgcacaaaagattcgagttccttttggatttccttcttgatcaatgacaactgcagcattatcatcatactgaattattataccgttgctacgtttgagttctttacaagtacgtacaaatacagctctgatcacttctgatct

SEQ ID NO: 25631 - DNA, 429 bp, Glycine max
gagatgtgttgagatccactgctgcagaatccaatttgtgacactaaatctaagttactatgactgcgcagacccaagaggagcttcttgcgcaacacctcgaacagcaaaagatccatgatgatgaacctgtcgtcgaggatgatgatgacgaggaagtggatgatgatgatgacgatgaggatgatgaccatgacgaaggactagaaggtgatgcatctggtaggtcgaagcagaccagaagtgaaaagaagagtcgcaaggcaatgcttaaacttggaatgaaacctgtcacaggtgtcagtcgagtgacagtcaagaagagcaagaatatcctgtttcgaatctcaaaaccagacgttttcaagagtccaacatctgacacgtacattatatttggggaagccaagattgaagacttgagctcac

SEQ ID NO: 25632 - DNA, 311 bp, Glycine max
gtatagtcttaattatatcatatgtatttcagtaaacttaatagtatgacagcgcattcatttcctatgcattgattcgatttctgatactatcggagtgaaaaaagtagatctaaagaaaaacgcgggttggattatattagtaacaagtaaattctttgtacgtaaaaagttccaagattttgttggacagaataacaattgcaaagtttgagatcacccagaaagcattatcaattttaaaagcctactcgggtattgagcgtttatcaaagtttacttaataaaaaactaatttttttttttttttt

SEQ ID NO: 25633 - DNA, 54 bp, Glycine max; identical to SEQ ID NO: 3720

SEQ ID NO: 25634 - DNA, 468 bp, Glycine max
gtgaatccatcggcagaagttcaaagcgatttgaaagggcatcatacgtataaagtgtctaaaaacatggtccaagacgccatgaggagatatgatggcattcaacctgctactgaatcactgaggaaccagaatatcaggtcatccgtgtagtgagacacagcatttctcaatggctattttattgcagcaagcatcacagagtcacggatcactaatttgtagggataaatttgcgaaagtcaatctttttgctcgttggttcagcttgcagtgcaggagagttgtttactttaaagcattagcaaaattattatttagagaagaaggctattttctacaaaattgtccatattgaggctgagtcatcagcgtgtggattcggatgcaatatataggttaaagagttttactgaggtgtggcttaaaggaagaaatatgatgcaggcttagagttctcttgatgtg

SEQ ID NO: 25635 - DNA, 466 bp, Glycine max
cactgtttgggagaattctcctgcagaagttcaaagcgagttgaaaggggggcatacttataaagtgtctaaaaacatggtccaagacgccatgaggagatatgatggcattcaacctgctactgaatcactgaggaaccagaatatcaggtcatccgtgtagtgagacacaacatttctcaatggctattttattgcagcaagcattacagagtcacggatcactaatttgcagggataaatttgcgaaagtcaatctttttgctcgttggttcagcttgcagcgcaagagagttgtttactttaaagcattagcaaaattattatttagagaagaaggctattttctacaaaattgtccatattgaggctgagtcatcagcgtgtggattcggatgcaatatataggttaaagagttttactgaggcgtggcttataggaagaaatatgatgcatgcttatagt

SEQ ID NO: 25636 - DNA, 377 bp, Glycine max
  modified_base (64)..(64): a, c, g, t, unknown, or other
  modified_base (270)..(270): a, c, g, t, unknown, or other
tattgggagaagctttctacagacgcgcaaagcgaggggaaagggcggcacacgtataaagagnctaaaaacatggtccaagacgccatgaggagatatgacggcatgcaacccgctaccgaaccactgaggaaccagaatatcaggtcatccgtgtagtgagacacaacatgactcagcggctatacaatagcaccaagcacaacatagtcaccgagcactaaaaacgagggataaatctgcgaacgacaacccagaggcccgacgggncagccagcagggcaagagagaaagccactttaaagcatcagcaaagaaattattcacagaacaaagctcatctgcacaaaaatggccacattgaggctgagtcatca

SEQ ID NO: 25637 - DNA, 300 bp, Glycine max
aggcgtgcgaacaggtgcgagaggacaacggataggggagtattcaggccggataagacgagcgacactttctacacataccgctggctcagggacgtactacgacctccttcatgattaattatgacgcagccattcaccgatcgcattcaaactcaacacagagcgagatgcttctctgttgatacgtaccaagctacaaactttgagatattatatctcagagtcgctcgcttagcatactgagtctggctcctagctacacgcccatctcatatgcgtgattgtgtcgtatcacga

SEQ ID NO: 25638 - DNA, 439 bp, Glycine max
ggcctgctagtgcgatacacatttcactcaagcttaggtgttgtgctccactctcgtcaccacagagaagaacttgaagttgaacttgctctgagctccgagaaaatgtgcatcggagtccgttgcttaacagtgctgggcgagttcaagccatttggcctcattgccgaagctctcgacggcaagccccccgacaccgtcaccgacaagtacgattactttctcttcgatcccgaaatcgctcgtgaccgtgacgccgatgacgattgcgacgacatcgcttctgcgccgagcaatcgtggggatcacgagctgttcatgcgaggcaatcggattatatggtcgacgggtgcgagagtatttaagagatttaccgtgtcatctgacatcgttaaaggttgagtttttgagttttcatgctttgaatatgaaataaatg

SEQ ID NO: 25639 - DNA, 405 bp, Glycine max
gacccacaaactccacaagtgtcacaagtcataactcgttagagagagtttgtgtgtgtttttgtgtgtcaccttggtgcatacaacacaagatggaggaccaaaatggtagtggtaagttgagccaagggcttcgcaaggtgaagccttaccttgctatattgtcccttcagtttggctactcagggatgtatatcatcactatggtttctttcaagcatggcatgagtcattggatactctcagtgtaccgtcatgtagttgctgctattataatagtcccttttgcacttgtccttgaaagaaaaataagaccaaagatgactcttcccatcttcctgaggatagtggcacttggtttccttgagccagtgctagatcagaacttgtacaacatggggatga

SEQ ID NO: 25640 - DNA, 362 bp, Glycine max
tcgctgagctgcagcacttcagggcctgggtgttcttcaagctcaatctcacttcacttatcgccagggtttaatctgaatatctctcgcgcagtcactgagggagttatatttcttccaaaatggcgacgcttatgcttaaaatcaaagatatctaagatgctatggctaacacccaaaaaaacaactctactgctcatcatctgggcttgctgaactctaaactagccaagattgcgggggtactccttacaccttcataaaaaggagctggtggtgctggtgaaagctttgatcttactacatgtggagattcaagaagtggacttgggggcttcccttcagttggcaaatctactcta

SEQ ID NO: 25641 - DNA, 339 bp, Glycine max
tgccttaacttacggggcggcttcctttctgaactctgaaaaaatccttgagctcaacttaagcctaccctctgtatacattaccatgggataacaccactaaaaactcctcctaatgtgtagccctttgggctcagtgtcaagactttcagggacagacccccgcacacctataccaaaaagaacggttaatttcttttatataccaaaaacgatcatctccgaaaaccctctcaacaattggactaactaatttttgtcccaagccattggctggaataccatcagattcttccctagtatcaaattttatcgacgcccggtgcggaacaatttaaa

SEQ ID NO: 25642 - DNA, 435 bp, Glycine max
agaaggggacattctactttaaacccatttccataatcacttttggctactttcttctccatccatcccttgactaattaattatccctcacaactaccaatggccgaagagaaacaccacaagcaccgcctcttccaccaccacaaggacgaggataataagccagtagaaaccgatactggttacgacaacacatcatattccaagccttctgatgactatgactctggtttcaacaagccatcgtatgagtcttctggcggtggctatgaaggtggctacaacaaaacatcttattctagtgatgagccagcttctggtggcggctatgaaggagggtacaagaaaacaggttattctggtggcattgatgagacttctggtggctatggcgctggtggcggtggatactctgacgtcactgatggtggcta

SEQ ID NO: 25643 - DNA, 490 bp, Glycine max
ggatatgtgcagaatcccagcacactggcggcctttactagtggatctcttccgtcgcgacctcggcggggaagtcggggcctatcatgaagtggcgcgccgccttgccctgttcccggatggcgacgcctccgacttgctctacctcgagacacaccgcaggaagcgggggaagtaaacttcggttcgcgcagcacggaattgaaggggctcgccaccagcgtgcccctatcctatccgccttccatgcacttccaacgcccttcccgaacgatttccgattgctagttcgcccccgccgcgccataagcgcgcccatgatactgcccatcatcgtcaccttgaagaacggattgctcgatccgcatggcaaggccattcacaacgcgctcggaggacttgttttcgatggcgattaggatatccgcgccgtcaggatcttagagctggacgttgatgattcaaccagcgacgcctgcatcgacgagat

SEQ ID NO: 25644 - DNA, 445 bp, Glycine max
gatagtatcaacttcaactactgatatcatatcacaaaacagtgaaggattattagggaagttttattagtttgaaaccgcaccaatttattatataacatgtgtcgtggaacttttgtggttgcaaccactgttggagtggtggaggcgttgaaggatcaagggtattgcaaaatgaacaacacaatgatgaagtcggtggctcaacaagccaagagccacttatggtcagcaactcgggccaagaagctggcttctccttctccttcttcttcttcagcaacttcaaataatgagaagagaaggatggcagaggagtctctcaaaacagttatgtatttgagcacctggggtcccaattcttaaagttagaaaacattaaattaatgataaatattagtataattcagcaaggcacaaaaatatgatgccagtgatgatcagc

SEQ ID NO: 25645 - DNA, 345 bp, Glycine max
gaggcattttataagaaagatcttgcaaaaagactgttgttgggaaagagtgcttctattgatgcagagaaatctatgatctccaagttgaagaccgagtgtggcagccagttcacaaacaaactagaagggatgtttaaggacattgaattatcaaaagaaataaacgagtccttcaaacagtcattccaggctaggacaaaactcccatccgggattgaaatgagtgttcatgttttgacaactgagtactggccgacgtatccacccatggatgttagactatctcatgaattgaatgtttaccaggatattttcaaagagttctatctaagtaaatatagt

SEQ ID NO: 25646 - DNA, 355 bp, Glycine max
gaagactacaaaagtttttccaacaaactccttatgagtcacaagccataggacggtcgagggagaatttgtgtgttattgagtgtcacctcgctgcatacaacacaagaaggacgaccaaaatcagcactggtttataaacctattgactgccacggagagaccttaccttagccatatgagacccacaagttcgatactcagggattgatatcatcacaatagctcctttcaagcatggcattgagtgataatatactgtcaacgtgaccgccatgtagcggatgcaattataaaagtcagactagcacatgtccttgatagaaaactaaaaccaaacataacgctctatatc

SEQ ID NO: 25647 - DNA, 416 bp, Glycine max
ggaagagtgaagagaatggctcccaagggtttaacctttctggctgtgttaatatgcgtttcagcactgtcactgagtccttctgttgcgggggaagggcaaaataatggccttgttatgaacttctacaaggaatcatgccctcaggctgaagacatcatcacagaacaagtcaagcttctctacaagcgccacaagaacactgctttctcctggctcaggaacatcttccatgactgtgctgttcagagttgtgatgcttcactgttgctggactccacaagaaggagcttgtctgagaaggaaacagatagaagctttgggttgagaaatttcaagtacattgagaccatcaaagaagctttggaaagagaatgccctggagttgtttcatgtgctgatatcctcgttctctc

SEQ ID NO: 25648 - DNA, 442 bp, Glycine max
gatagttttaactttaactactgatatcatatcacaaagcggtgagggattattagggaagttttattagttcgaaaccgcaccaatttattatataacatgtgtcgtggaacttttgtggttgcaaccactgttggagtggtggaggcgttgaacgatcaagggtattgcaaaatgaacaacacaatgatgaagtcggcggctcaacaagccaagagccacttatggtcagcaacttgggccaagaagctggcttctccttctccttcttcttcttcagcaactttaaataatgagaagagaaggatggcagaagagtctctcataacagttatgtatttgagcacctggggtcccaattcttagagttagaaaacattagattaatgataaatattagtataattcagcaaggcacacaaatatgatgccagtgatgatc

SEQ ID NO: 25649 - DNA, 316 bp, Glycine max
  modified_base (255)..(255): a, c, g, t, unknown, or other
ggcgccaaagaaaaaaaaatcctaattttctgagcagccaaacactctctctctgtctctcgaaaattctcagtttgcagagaaaatctgaatcatgtcgtggcaagcgtatgtcgacgatcaccttctgtgtgacatcgaaagtaaccacctcactcacgctgctatcatcggccaagacggcagcgtttgggctcagagtaccgacttccctcagttcaaacctgaggagataactgccatcatgaatgactntaatgagcctggatcacttgctccaactggattgtatctcggtggcaccaaatatatggtc

SEQ ID NO: 25650 - DNA, 487 bp, Glycine max
  modified_base (66)..(66): a, c, g, t, unknown, or other
ggaccacccacgcgtgcggccacgctgtccgcgcgagagttaccacattttggatgatcacccganacccaaacagaaaaggcgagagaaaaattcttaaatcataatttaattgattccatgatcttattgatctattccacatcataatgctctacatacattataataacttatctactcgagccgtacccatataaaacttcttatacctttctagacggcgggtgcattaattatctatctctatccccaagaacctattatcgaatccctgcaatccacgttagatctccaacacagacaatagatccttcgaaagtgcttctttatgatccaataaagatatcaacctatttaaatattccagttatactatatttactacaacgacgcgctcatcctacaggaacagctcaggacattacataaaaggcttgtgttttatggaacttatcctttatcaacacactaaattccttttatt

SEQ ID NO: 25651 - DNA, 452 bp, Glycine max
gttactttattctcgcttggttgcagcttcagcagcagcggcaagcaactccatccgcaatgggaatcgatttgaaggcaggaggtaagtccaagaagaccaaacgtacagcccccaaatccaatgatatttacctcaagctcctcgtcaagctgtaccgttttcttgttcggaggactggtagtaacttcaatgccgtcatcctcaaacgccttttcatgagcaaggtcaacaagcccccgctatccctctctagattgattcgttacaccaagggaaaggaggataagatagctgtggtagtcggggccgtgaccgatgacattagggtgtatgaagtccctgctctgaaggtaactgccctgaggttcactgaaactgccagagctagaattgaaaaggctggtggcgaatgcctcacctttgatcaactggctcttagagctccactc

SEQ ID NO: 25652 - DNA, 487 bp, Glycine max
  modified_base (428)..(428): a, c, g, t, unknown, or other
gagacgacagaaggggactccttgtgtagcattctgatgccaattgttctaaaaaatttgctgaccctggcgacctcaactatccatccttctcggttgttttcggaagcaacaaggttgttcgatacacgcgcacgttgaccaacgtgggggaaccgggatccgcgtatgacgtggcggtgagcgcgccatccaccgtggacataacggtgaatccaaataagcttgagtttggagaagtaggggaaaggcaaacgtacacggtgacatttgtgtcgaataggagtgttaatgattccgctacgtctggttttggtagcattatgtggagcaatgaacaacaccaagttaggagcccggttgcatttacatggacctatttttgaggtaatgctagagtgaaatgaaaaagaaaagctgcatgactntagtctctagtcacattgccgttgccatcagtcgagattgtaaaagcaacattgacagt

SEQ ID NO: 25653 - DNA, 466 bp, Glycine max
gaacccggttagtacattgggtccagcaatagctgcaaacaactacaagggcatatgggtctatctcatagctcccatacttggaactctatgtggggcaggtgcctacactgtggtcaagctgcctgaagaagaggcaacaaagacaccttcttctgctcctaatgggagcttcagaaggtgatgatatatatatgattaatcattttcatgcatccccagcaattcttcatcacatgatgcaccttagaaaaacatacctcgatcagaatcagccatatgggatatgagatatttgtgcatgcatgatgatatagatattgccggaagaagcaagcaaaattgagcacttgttggtgcatgcacgtacgtatactagctatattagatatcgatctgtgtacttcagatgcatcgatgtgtactggtaaatatcccaggacgacaaaatgatcagtgattttgt

SEQ ID NO: 25654 - DNA, 398 bp, Glycine max
cgttggtctcccctttctgcttatcctcaccactcagaggttccaagcagggctaaatcaagtgctctcaagtctatggagaacgagcctaaagctgctcagctgacgaccttttatgctgcgcatgttgctgtgtttgatgatacccctgctgaaaaattggaggagataacgacatcagccggcaagggaatatcccaatgccaaaacacctctgctcatgctcacactcataaccagcaagcgaataatccctcctttggacctaatatctgccatgaagcaccgatcacaccactcgtatgtgatctgccaattgctaggaaagctgcacttcatcggcttctttctaagagaaaagaatagattgctgccatagcaccctatcaaataaacaa

SEQ ID NO: 25655 - DNA, 452 bp, Glycine max
ttgttggaaagcaactggaacagacaagatcatgaccactgaaggtagaaaagttggcataaaaaaagcacttgttttctacattggcaaagcacccaaaggctccaaaaccaattggatcatgcacgagtatcgccttctcgattcttcccgcaaacacaacctcggaaccgcaaagcttgatgattgggttctatgtcgtatctataagaagaactcaagttcacaaaaggttgaggctaattttttggctatggaatgcagcaatgggtcatcaccttcttcatcgtcccacgtggatgacatgctgggatcgttgccggagataaatgaccggtgcttcaccctgccacgagtgaactcactcagaacaatgcaccagcaggatgagaaattcgggtctccgaacatgggatccgggtttttctcggattgggttaactcgaccgatc

SEQ ID NO: 25656 - DNA, 456 bp, Glycine max
gacggctaaaagctataaatcatcgaagtactcaaattagcatggctgtcacggctgcattcttgaatttgatcatcatgttttcagtagtctctacaagcaagtcactgagcttaaactactattcaaaaacatgccctgatgtggaatgcattgttgccaaggcagtgaaggatgccactgctagggacaaaactgttccagctgcacttctgcgaatgcacttccatgactgtttcgttcgggggtgtgatgcctctgtgctgctaaattcaaaaggaagcaacaaagcagaaaaagatgggccaccaaatgtttctttgcatgcattctatgtcattgatgcagcgaagaaagcactagaagcttcatgcccaggtgtggtctcttgtgctgacatccttgctctagcagcaagggatgcagtttttctgtcaggaggacctacatgggatg

SEQ ID NO: 25657 - DNA, 463 bp, Glycine max
gtcacagaagttgcagcttattctgttccagccaagtgttcaccggagaaaagtcacaagaaagaggaatacaattactctgatgtcaacagtgaccaggaccattcatctgatgaaaaataccatgcaaaaattgacaagcattcaccatcaagatattcagttgcgcaaaaggatctggcatcaactggaggttcatatcagcaggaagattggcacactgatttactcgcttgttgttctgaaccttctctttgtatgaagacattcttctatccttgtggaacattttcaaagattgcttctgttgcaagaaacaggcccatatcatctggagaagcatgtaatgacttgatggcatattcgttaattttgtcttgttggtgctatactcgctgcgtaaggaggaagcttccgaagatgttgaacatcacagggggctttattgatgatttcctctctc

SEQ ID NO: 25658 - DNA, 471 bp, Glycine max
cggatgtctattctgtccccttctatttcaccaaatctcacacctatccttctacttattaaataataatccactttacacactaggtttttttttagcattattattattactataatataacgtttgaaattgaggtcattcatttctattctctcttgttgattagatctcattttctaattccatgtcggttctgtcgtgattttgtttgttgaccatgccattaattaaaggttctatatagaatttagatattagattagattctcttccaccacttcagtgagctgtttctggtacggactttggaggccaagatactagtattttactattttaagcattatgatgtatgcatcttaccctccactagttaactattttcccacttatattatattttaagtatagttatagttaaagtagttaataacatgcattttagttaccttaaaaaaaacatacatt

SEQ ID NO: 25659 - DNA, 312 bp, Glycine max
gtatctattgtgtgatagtgtgcagacgcaactggctctgcttatattgtcgtcctgtgtggagtctagttttgtctctcacctgaaaacaaaatgcttcggtggtaacaaaactcccggaagctactcgcaatccttcaccagcagcggtggctgtgcgacaaaacgaaacttgacctactctaagtcaacattcaccagaaaccttgcccaagtgattagcaccttaccaggctaaacccaactcttctgaaataaacttgctcttatcgaacggaaccatttcaaaaaatcgctactgttccaagaacc

SEQ ID NO: 25660 - DNA, 248 bp, Glycine max
ccacgcgtccgcccacgcgttcgtactgtttctttatgacacataagggcagaacaagtgtggcagggggtttattaactaagatctgtggccagagagatggttagattgatagaaacagccactgttacaatatttgctgaagatgtcgatggccacgtaaatgtttggaatgcacaggtttcagaattaacaggtctgcaaattaatgtggctattgggaatgttttgattcactatcatgactt

SEQ ID NO: 25661 - DNA, 449 bp, Glycine max
ttgggcaaggtccgcatgatgcttccgaggagcattcgatgcaacacttgcggcaattacatctacaaaggaaccaagttcaattccagaaaggaagatgttattggcgagacatatctgggaattcaaatattcaggttctactttaaatgcaccaagtgctcagccgaggttaccatgaagactgatccgaataattcggattatattgttgaatctggtgcgaccagaaattttgaaccttggcgtgcataagatgaagaaactgataaaatgaaggagaagagggaagctgaagagatgggagatgctatgaaatcattggaaaatagaaccctggattctaagagggagatggacatccttgctgcattggatgagatgaagtcaatgaagtctatgcatgcaactgtcagtgttgatgaaatgctggatgctctgcagcgcac

SEQ ID NO: 25662 - DNA, 456 bp, Glycine max
attctagtttctcataagatgacatttgatagaaattgttagaacttgcctatcatagaaccagtctagtaaaatgattacctctggtctttcatttaacctatcatcttcattcttcacagttaagaaggatctttattaacacaaatgactttttatttgaatttcagattcctataaatgctgctggtttgattgagtataggtgccaccccttttggtcgcaaaagtattgtccatctcatgagtatgataatacagctcgctgctgtagttgtgaaagattggaggtattaatttaagcactccagactatttaatgattcgtattttcagaacaggtatttatctgaatcttttttgctactggtgtgtttcgcttgaagcctctgaacataaaatactatagactataagatggacggagtttgtgtttagagtgcatggaatctgcta

SEQ ID NO: 25663 - DNA, 78 bp, Glycine max
gagcgtattttaaatggaaagatatgaaagctactatcctggagtcaatgcctagacgaaatatacatacgttcacga

SEQ ID NO: 25664 - DNA, 239 bp, Glycine max
tacgggtactcactcagcctcttctcccttcatctacggagaatgtctgatcaacaaaaccatgacttcaagctggggcaccattctctgggagagaagaagggaaaaaggaggaaaaagaagaaaatactacccagttatacatcattactacttcatgtcaggaagctagggcgtgtactaaggggctaccatctttgaatctacaattatataggtaattcacatgctatctttct

SEQ ID NO: 25665 - DNA, 423 bp, Glycine max
gggatgatcacacgtgaaagaagaagaagaagaagaagaagaagaaaagggttttgtgtgtgtcgaagtggataattccttccttcaattaatctccgatccgaaaccgtatggggattctatacgcactggtaggtcgcggatcggtggtgctggcggagttcatcggcaccaccaccaactccagcgcaatcgcgcgtcaaattctcgagaaaacccccggcaacaacgacatgcacgtttcttactctcaagatcgctacatcttccacgtcaaacgcaccgatggactcaccgttctctgcatggccgacgataccgccggcaggagaattccttttgcttttctcgaggacattcatcagaagttcgtgcggacttacggacgcgccgttcactccgctcagccttatggaatgaacg

SEQ ID NO: 25666 - DNA, 387 bp, Glycine max
ggcagcgttaactgtcgatccgaagaatacccttttcatctctctctacaataatcatcctcttcctcttcagtaaattattgtacctgacgatcttctcggtttgatcttatatcaatggaaaatttttagacagaactcggattcacagggaaatctaattgcataggaacagtaaagacaacacctttttatctctacacaagtgattatggcggttgctgagaatgttggggccaaaatcggttcttccagtcaaaatttagaaaacagtgtagtatcatcggactcgggcgaggttgagaaatcaaaacccagaagtgggtccatcaacgacgatcagaagctgaacaacggtgtcttcaaccaccaaaatagagttcctgg

SEQ ID NO: 25667 - DNA, 314 bp, Glycine max
tcggaaagggcagatgtcggatgttattatcattcacaccacagagcgaaactacaaactcaggacgagaatgttcttttgagaatgcaacccgagctctacccatccacttttgcagatggggatttttcacgtaactggaggggtcatatacatagtttggagaacaggactatctgtgtgccacgcccaggaaagacaaaccatggtaagtagcacagttcaccactgtcttgatgtaatggaggttgacaatagtatataactcacactatgctctgtgttaacggtcagtgcaagaacacataaagcgt

SEQ ID NO: 25668 - DNA, 209 bp, Glycine max
ttcctcttcagtaaattattgtacctgacgatcttctcggtttgatcttatatcaatggaaaaattttagacagaactcggattcacagggaaatctaattgcataggaaccgtaaagacaacacccttttatctctacacaagtgattattgcgggtgctgaaaatggttgggccaaaatcggttcttccaatcaaaatttataaaac

SEQ ID NO: 25669 - DNA, 438 bp, Glycine max
agctacaacacagactagtgaggctcgtacacaattacactagcaatgaatggttattataaatactagtctaagtctttcggaatttactattccgcttatgaacatcatagtaagggttgggcagcttctattatcgaaaacccagacataagtgttctactttctaattaactccatagtcatgagcacttgcaacacactgcaagaatgcagccctgcaaagaggttaaaaatatattaatgatagttttatctaaattttaataaagagtgttagtatatgtcatcaattattatatataataattattatatgttaatatatatggaaggattactatcttcacacataagttatattatttaaatttataaaaatatattttatatccacacatgcttttatttgatattaatcttttaagaaaaataaaa

SEQ ID NO: 25670 - DNA, 265 bp, Glycine max
cgctcgagttggccgccagtgtgacggatatgtgcagactgccagcacactgccggccgttgctagtggatttttgacgtgcgtgctcatcgacagcgtcttggcgggcggccccagcgcgccggcgacggaccgcggacggccgtacttggcctggcactcgtccacaatctgccgcacgagcttgtctctcttcatgctgatctcgcgggccaaacgctcggcgccgtcatcagcctggctgctccggatggcgtagaaggtg

SEQ ID NO: 25671 - DNA, 462 bp, Glycine max
gaactgttgtcagtgtgcttgtcaaatttataccactcgatggaatgcagaaccgaaaggtctgtgttctttgcaacctaaagccagtaaccatgaggggcattaaatctcaagcaatggttcttgctgcttccgatggtgatcacaccaaggttgagttggttgagcctcccagttctgctcaaccaggagaaagaattacattccctgggtatgaaggtaatcctgatgaactcttaaacccaaagaagaaagtttgggaaacattgcaagtcgatttgcacacaaatgaggaactggtggcatgctacaaaaatgttccactcaccacatcagctggcgtttgcaaggtttcatccataagctgtggatccataaggtagacaacgagttcaaaaagagagaaaaaaaagggaattaaaaaaagaaagaatttgcttttttatcttgtgcctttttttt

SEQ ID NO: 25672 - DNA, 469 bp, Glycine max
ggttatgattgggaaggagatgaatctgagtctaagagaaggaaactggaatcatatgcagagtggagtggagctactagagccattcgcgagcctagagttgttgtacagactaccagcgaagtagatatcctcgatgatggctatcggcggcggaaatatgggcaaaaagttgtcaaaggaaatcccaacccaaggagttactacaagtgcacgaatgcatggtgcacggccaggaagcatgtggagagagcatcacatgaccttaaatctgtgatcacgacatacgagggaaaacataaccatgatgttcctgctgctcgtgccagcagtcacgtcaacgctaatgcttccaatgccgttactggccaagcttctcttcagactcatgttcatagacccgaaccatctcaagttcacaatggcattggaaggcttgagaggccttctcttggctcattcaacctac

SEQ ID NO: 25673 - DNA, 354 bp, Glycine max
tgtgggaatagttttcgaaaagtaattagcttctctctctgacttggtcacaagacaacagaggaacactcccaaacaaaccatggacgtgggtcagacgcagagacagtgtatcgactacaccaaatccatatatcttgagggcttgctggatggccagtgtaatgctactccagcagcttcaggatgagaacaaccctgactgtgtggtacaagttcactatctcttctttgacgattctgaaaggcttctgaaagagctcacctgagccctagatcagaatggcgacgtattcaaaaaagcagatgcacatgtgcaccacttaaagggccgcaattcaagcatacgttcac

SEQ ID NO: 25674 - DNA, 353 bp, Glycine max
caccgattgggacgaagtttaggatcgaaatggaaatagacgggaatagaggggtaatcctaggaggtggcgttgcgggatccgtcgtcgctaaatctcttcaattccatgcccatgtcacactcgttgatccgtaatcaaaacattctctgcaattttttttttttatgtttgattattgaagcagtaatttttttgtttgaatttagctaattacccattttctgtatttaatccataaggttaatgggttgaagtttatgcactgtgttttttggttaatgcatagtgcgcattttatacccttgctaatttttggaacccttatcgcactcaatttttgaaatctttaa

SEQ ID NO: 25675 - DNA, 370 bp, Glycine max
tattggggttctagtgtgtgatcgtttggtgttgcgactggttcttcttcttttggtgttctgtgtttgtgtttgacttttctctcacctgaaaatgtcttgctgcggaggtaactgtggttgctgaagctcctgcaagtgcggcaaccgctgcggaggctgcaagatgtacccatacttgagctacactgggtcaaccaccaccgagaccttggtcataggagtggcacctgttaaggctcaatttgagggtgctgaaatgggtgtgcccgctgagaacgatagctgcaaatgtggaccaaactgctcctgcgacccctgcacttgcaagtgaggtgttgggagagcaagcttcaagcagagatagccc

SEQ ID NO: 25676 - DNA, 445 bp, Glycine max
tcttcttttcattttatatgccactttcgaatttgggttgggctgaatgctacattcacaaaggattgaagctcaactgaacgtaataacaattcaaacccgttgccttgtatctgcttggaaggtgggtcatggagagaaaggaaacgaggataatttttttagattatatattatgtttataaaaacaaacaaaaagttaggacattaaattcatgcctggccggagcataacacatacctttgtatactgctccaaaacctattggtgtctgtgagattatgttagatattattcctgatattgtatttattattagaatattctatttcctattaattaggaatggattgatctttgaatcaatattgcatttcttttccatattataaatagcatgaggtgtggtctacattgacacacaacattacacacgtaaacact

SEQ ID NO: 25677 - DNA, 416 bp, Glycine max
tatgggggcccaatattttttatagcattttcagaggaacaatggcgggtagggtttcgacgtgcttcttcttcgtgtttgctctttctctccttcttcctttttagatctccgctgaggaatcatcggagaaagagttcgtactcacattggatcactctaactttcacgacactgtcagcaagcacgatttcatcgtcgtcgagttctacgctccatggtgtggccactgtaagaagcttgctcccgagtatgagaaagctgcttctatcttgagtagtcatgatcctccggttgttttggctaaaattgatgccaatgaggagaagaacaaagaccttgcatctcaatatgatgttaggggatacccaacaattaagattctgagaaatgggggaaagaatgttcaggaatac

SEQ ID NO: 25678 - DNA, 390 bp, Glycine max
tacgggttttcattatatcacaccacacaaaaaagcagaggagagggtacaactgttactcacacacgccatgggtaaatgaatggttttcgagcaacagcatttaaaatagaaaagggattcatcgaagatgacatcggttggtgtggcaccaactattggtttgagagaagccattgtgcatggaacagacactgctgatagattgctagaggagatgaacgatctgaaaattagtgatgatcgagaaatggagtccgcaatcttttgtggctactgaacggacacaggacatatcattgtgactactattgggggttgaaatggtcagctcaagctgactataaactgcattgcacatcgtgttgtaatgcatggatcatttggagt

SEQ ID NO: 25679 - DNA, 251 bp, Glycine max
gggacgggttaaggtgattgttcttcacaactctgtacgctgatctcctttagtcctttgtcaccgctccgtcggcaaccctacctttggatctgcgtttgcccttcatgttttgaagtccgaaggacgaacaagaagagattcctgacagcgtaatcatgttttgtgtcctacggcgaatggttgcttctagcagcccgtctccttggttgctaagacagtctgctcataaaattccgtcttgcccatca

SEQ ID NO: 25680 - DNA, 442 bp, Glycine max
ttttagttgggggaaggagtgaggtagcaacagcgctgccactgccactaccaatagcagaatgggaaccttgggcagagctttctacgccgtcggattttggatccgcgagaccggccaagccattgatcgcctcggctctcgtctccaaggcaactacctctttcaagaacagctatctaggcatcgacctctgatgaatctgttcgacaaagctccctcggttcacagggatgcatttgtggcccccagtgcctcccttctcggcgatgtccacgttggcccagcttcctccatttggtatggatgcgttctcagaggtgatgttaacagcattactattggatctggaactaatatacaagacaattctcttgttcatgttgccaagtctaatttaagtggaaaagtcttgccaactatcattggagataatgtcact

SEQ ID NO: 25681 - DNA, 493 bp, Glycine max
cgcgcgagcagccgccagggcgaccgacacgtgcatactgccgccacactaccacacattgctaaagaatttctctcacaaagtagacgtttgggttataaggcgaatgtgccaaaacagatcgccgaccatagcatgtgcttattgaagctccactgagcgctgaatctacttggtctgcttgagagatcgatcgtgttaacacacatgtaactgcagtaaatcaagtggaataatgatatcacacatgctcagaatataaacctgaccagatttataaattttttagttcacacacactctaatatatccgaccttgagcctttctcctgatcttgatgtgcgaatatacaaaaagctgctaacaactcagtctaatattatggctctgaaagatgaggctaagtatagggtgcctgactctataggaccggtatcatgaatatcaggagcgcagaacccataaatgtagtttacaatagcatggcctata

SEQ ID NO: 25682 - DNA, 449 bp, Glycine max
agacgacagaaggggagaccaagaattggtttgtagttttcatcattactccgatgaaataaagttgcgtcatataccattagactggtcaaagctcgtgagtcacttgtctttgtttcttgttgagtaacaactcaacctgtgacagtttcaaatgagtgaagcaacggcaagattcgaacggcgggtcctggtggcggtggacgaaggcgaggagagcatgtacgctctttcttggagcctcaggaacgtaattttccaaaattccagagatacccttatccttctttacgtcaagccccctcatgccgtttattcccccttagattccactggcaggatagatgatcctgaaactccagttttggtgaattaaagcggtggtgttaggatggttaatttcaagatatttgttttcgccggacataaatgcggccatcgagaagtac

SEQ ID NO: 25683 - DNA, 466 bp, Glycine max
gagcaaattaggggtgacaatggggaacttcgattctggtggcaatactgggtcattgtagcacttttcacagtactggagaattttaccgatgcagttattggatggtggtttcccttatacggagagttgaagcttgcactctttatctacttgtggtatcccaaaactaaggggacgggatatgtatataatactgtgctgcggccttatgtatcaagccatgaaaatgacattgagaaaaagttccgagagtggcgagctagggcatgggatttggccattttttactggaaaaactgcacagagttggggcaagctacaacttttcagattctcgactattaggctgcacagtctaaaaaattctgcagcaaatcttactctgagaaaaaagacaagctgtgtccaactccaagtgccccaccattatcttcacttcgagaaactctctttgagaacaacc

SEQ ID NO: 25684 - DNA, 451 bp, Glycine max
ttgggatcttcaacttatattctccataaacacatcaaactattagcaatttagcaccttctactactttgtaatcgttcaagagttgtgaactgtgaagaatgagttcaacaagccgtgcttggacttggagcgtggcagcaagtgttggagtggtggaggccttgaaggaccagggtatatgcaggtggaacagtgtgatgagatcagcacaacaacatgctaaacataatatgaggtctttgtctcaaaccaagaagttttcttttcaatcatctgcgatggcttctgccaaattgaaagatgagaaagctaagcagtcagaggagtctttgagaacagttatgtacttgagttgctggggtcccaactaaacaaagatgctaagacttcatgcaattttggatttccctttttttttcgctcggaatatgatgaggaatgaaagagc

SEQ ID NO: 25685 - DNA, 466 bp, Glycine max
attgtaatgctgttgtatctttctctctcagagtttaaaaaggacagatgttaaatcactgctcagacagagtgtcattgctctttcgtccgaagttgatgaggtggtagaccctgtttttgcggcatatcatttgcaatccaagctaaaaagtaaatcacaatcattgaatgatacagcgactgcatctgacaatgtaatgcaagttccttgtaaaaagctaaagatctcctcatcttcaacttcagccaggtttcttgaacgaactactaatgtcaatccccaatgcagtaggaagactactgatgatgttcagttcctactagagaaggatagtgtggaggttgcagagatggtgacgaaatattccaatgatctatctagaacactagggtatatggaagaacaacttgagttgcttctagatactataatgttgaaatgcaagcccatgacccttgctgag

SEQ ID NO: 25686 - DNA, 411 bp, Glycine max
ccagtggtttcatttttcggaccatctagcaactgcgggtgagatttttgttgtgcttgggcaggtatcaacagattacatggagtggttctttcggatatctcatcccttcatcacacccacacaggcaggtgataagcctagacattcacctgccccacagcatgaggaatacatcgagctaggtatcccggaggttcaagtgggagaaggacgtggaccgtcaaaggcatctgatccccctagacacgttgtggtaagattagttgctttaatgttttataaaatgttatttattttaaaagttgtaataaatgtatatttatgaatgtcataagatgcttatgaaggttgtgaagcgatcggagaaatattggagcgggtgctcaacctaatgatggtcactgaaag

SEQ ID NO: 25687 - DNA, 476 bp, Glycine max
acagaagggggcaaaaatccgatcagaaaatttcatctaacccgtcgtagcagaaaaacttgtcaccatggtttcttccgacaaggatccacgagaggatgtccttcaagcctggtacatggatgatagtgatgaagatcaaagactcccccaccacaaagaacccaaggagtttgtctcgttggaccaacttgctgaacttggagtccttagctggaaactagatgctgataaccatgaaaatgatccagagctgaagaagattcgtgaagagcgtggttacacctacatggatgtttgtgaggtctgcccagaaaagttgccaaattatgaacagaaaatcaaaagcttctttgaagagcatcttcacactgatgaggagatccgcttttgtgctgctggaagtggctattttgatgttagggatcgcaatgaagcttggattcgtgtgtgggtcaagaaaagaggaatgatca

SEQ ID NO: 25688 - DNA, 445 bp, Glycine max
ttttactttgagatatgtcgcgggggtcaggagagcttggggacgtcaggtggggtgctattgcccaaaaccaagcttgaccaatctcgacccaacccggtcatagtcagtcagtgagaacctgtgatgtacctaaacaggcgagctcctggcagtcattcaataaaagaacaaagaccacaaagcaaggaggcttgtgtggtggttggccagctatggatcttgagtgatatctggaatttggcctctggtaatcgattatcaagggtgtgtaatcgattacaaggcttaaaaatggagacaggaagttaagatggcctctggtaatcgattaccaagaggtgtaatcgattacaaggcttaaaaatggagacagaatgttgatgtggcctttggtaatcgattaccaatgctgtgtaatcgattacacagagtaacagggcac

SEQ ID NO: 25689 - DNA, 476 bp, Glycine max
tatggggtttctccttatcatattgaggttgcagcgaagacggagagggaatgaaatgagcatatcctaatccagttatccataatttcataagcataaacgagaaattgagagagaatgtctcgtatctctacactctatcttctcgcttacaactcctttcaggccattggatggacgatttccttaactaagattttgtacaatcttctcgtcactgcatccatcaaaggaacctatgcttccgccgccagcttaatctgttttctgcaatgcgctgcattcttggaagttatacacggagccattggcattgtgcccagcggggttttgcttcctcttatgcaatggggaggaaggacgcactttgtgcttgccattgttaggaaacttgatgagcttcaagaattaccttcagttcttatcaacttttcttgcatggagcatggcggaggtcattagatattcacattatt

SEQ ID NO: 25690 - DNA, 430 bp, Glycine max
tctgagtttagttttaccattccaaattccaattccacagatcactattaaacggtaaaagcagggctgagaagcaccccactttgataggatgcttatttctcactgctttgatcaaatttcttttttccccctcatggatacactgtataaaactataacattaaacataacctatcctatttattttaaagagagaaaaaacacaaaccccataattatttttttttcaataaaagaaattaagaaaggatcatctaactctgacctggggttgtatgagcaagggaggtggtggctcatatggtccaggtccaggtggagttaactgaaccaaaagatctgtgaatccattggtattgccataaagcgcttcaagtggcagaaatttgatgtcttgttcgtactcatcctttttaactcctgaagt

SEQ ID NO: 25691 - DNA, 410 bp, Glycine max
gggtcgcacccacgcgtccgcccacgcgtccgcttacgcgttcgcactgttgctttatgacgacagaagggaataactgtgaatggagcagaacagttgggaaatattcaagtacctaaaagagccagttatatccgagtaataatgttggagttaagtcgtatagcttctcacctactatggctaggaccttatatggcagatattgatgcacaaaccctcttattatatattttcagagaaagagaattaatatatgatctatttgaagctgctacaggtatgagaatgatgcataatttttttcgtatcggcggggtagcgactgatctaccttatggttgggtagataaatgctatgatttctgcgattatttcttaacaagaattgttgaatatcaaaaacttat

SEQ ID NO: 25692 - DNA, 308 bp, Glycine max
tgtgggaaggtgcttgagtttgttgggagctataagctagtttatcgcgaggagaatatgaaggtgtttggtttctttgttgctgcagtagtcttggtagcatggccatgccatggcgcaagctaccaaaggttccctgtacgaatgaaaactggatatggtgagcgttcttcggaggtaaaatgcgcaagttttaggcttgctggggaagcacacaacatccgagcctttaaaaccatgtcttgagagtgcgttgaaccaacaaaggactacattaatggcgaacaatttatatcagactctaaaac

SEQ ID NO: 25693 - DNA, 435 bp, Glycine max
ggcatagcagcatcatacaaagcattgaattcaaaaacttaagttcattccttgtgttttgctttcttcctcaaaaccaaacatgtcgaacacatgcggcaactgcgactgcgctgacaagactagctgcaccaagggaaacagctatggtgttattgtagagactgagaagagttacatcgagactgttgtcatggatgttccagcagctgagcatgatgggaagtgcaagtgtggcactaactgcacttgcacggactgcacctgtggccattaaggaatatgtatgaaaatgtaattgccatgtgtttggcaatacaaatatccaaataatgtaatcttcgtatgaataaatgtgtgtgctgttatcctacttcaggtctgtgtagtcatgcagtctgaatcatttcaagttcctgtcttagttaatataac

SEQ ID NO: 25694 - DNA, 252 bp, Glycine max
  modified_base (54)..(54): a, c, g, t, unknown, or other
  modified_base (70)..(70): a, c, g, t, unknown, or other
gaaggtgcagaatccagccactggcggcctttactagaggatttgcgacaacancacaggcgggagccancagagaacgctaaacgcgaacaacaacgccggcaacaacaccaaaccaaatgcccgcgcgccaggcaggggcaccacgaccaaacaccgcaaagcataaaaagcgccgacccgacctagaacgaacccggcccctctacgaacagctaaccgacgacacagtcactgacaaacatagccaaa

SEQ ID NO: 25695 - DNA, 127 bp, Glycine max
ggtcaggaatgtgcaaaaaccatcacactgcggcctttactaatggaatgttaccacaccacacgcaagaggcatacacgatcacttttcactaatattactcccccaacacgactaaaccaaattc

SEQ ID NO: 25696 - DNA, 245 bp, Glycine max
  modified_base (20)..(20): a, c, g, t, unknown, or other
  modified_base (32)..(33): a, c, g, t, unknown, or other
cgagttcttggagaggaganaggcgggcccanngagagagatggacccgaagccacaatgactggcataagcaaagaggcaatacacctcattacagccgctgcttaagggcaacaacaccttcatttatagtattttcacggtgagactgaagtgaacgctgatctctaatttccttctccatcccaggaatttggaaaaatagctagagtatatgtgtataaaaccaagccatcccaaaaaga

SEQ ID NO: 25697 - DNA, 380 bp, Glycine max
tgttggggtttgcgtctggtgagttgagttcatggtcaacatgtcgatgctgctgaggaaggtgtgggaaagggtgttatggagatctgattcttcaacgtcagcatcagcatcagcatcatcttcatcatcatcatcaccaccagaagtggcatgttctgacatgggtgagttggagctgctacccagtgacatcttgatgcacattctgagacttttgggtccaaaagaggctgcaaagtttagtgtggtttgcaaggctttgagatcccttgtgtctgataacagactttgtattcactttcttcagacccatcatgctgagccctctgcggatattgtcttcttttcttagaccaccttgagctatggcttccctc

SEQ ID NO: 25698 - DNA, 429 bp, Glycine max
  modified_base (23)..(23): a, c, g, t, unknown, or other
tctaaggtttcttattctttctncaaattacctttcattgagctcagtgtcatgagttcacctaatgaataaataatgtaacctattacatatgcggaaaatgacatccataccatatcgaataaatgactaaaaataatttctccataaagtataacgactaaattaaataatatacagctatcagatacattttaacatttcatgtaaatatacagactaaaaatacatatttgactttcaattaatttacaatacttaagattctctttatgaaaattaaactcatagtcaattaaccacaatttatcatgtacaataaatttattaactcttccaataattattttaaaaattatataaataattatttgttatctgatgaaattatatgatgatgttactacataggcattaaacatatgattt

SEQ ID NO: 25699 - DNA, 426 bp, Glycine max
tttgggtttttctctagggttttgactaacgtgggagctccgggaacgtacaaagcttcggtgatgtcgttgggggattcgaatgtgaagactgtggtggaaccgaatacgttgagtttcacggaattgtacgagaagaaagactatactgtgtcgtttacatacacttcgatgccgtctgggacgaccagcttctcacgtttggaatggacggatgggaagcataaggttggtagtccaattgcgttcagctggacatgatgggctgtggaaaatgtatgacccaaataaaagggcccactcaagtgttgtaggctcttcgtggtttgcttttgggcccggcccgatacagcttgtttttattatgtatctcacttattcactttgctgtttttattccgtaagctgaagttcacgagaaaactt

SEQ ID NO: 25700 - DNA, 353 bp, Glycine max
  modified_base (60)..(60): a, c, g, t, unknown, or other
cgcgtccgcccacgcgttcggctgcgagtttctacagaaggtttttcaagagtttgttgngagctataagctagggtatcgttaggagaatatgaaggtgtttgttttctttgttgctgcagtagttttggtagcatggccatgccatggcgcaggctaccaaaggttccctctccgaatgaaaactggctatggtgagcgttcttcggaggtaaaatgcgcaagttttaggcttgctgtggaagcacacaacatccgagcctttaaaaccattcctgaagagtgcgttgaaccaacaaaggactacattaatggcgaacaatttagatcagactctaaaacagttaaccaac

SEQ ID NO: 25701 - DNA, 412 bp, Glycine max
ggccacctacctcattatttcaattttcccctctcttacggattcttttctctcttcccttattcatcactcttccaaaataaaattaaaaaaaaaacccacctttttagttttctctcatagtctcatctcatcacgacaaacaacaatctaatctatgcaaccccaaagaaacccaattcaatagaaaaagaaaacaaaaaatcagatgagccagtggatacacgtggcggtggcagcatccgccgtgggatgcgtctcgacccttttgttggtctttctctggcgttggtgccataaaagaaatcatcgcagaaatttcgttgagccggctagtttgaccagagtggagagtgtccagggagggatttctgttttcaggcttcatcaacaacaacgaccttttcaattg

SEQ ID NO: 25702 - DNA, 465 bp, Glycine max
ggttctagtttatgttattgttgtgactcgttcttcttcggcgttatcttcttcttttgttgtttgtgtgtttgttttttctctcacctgaaaatgtcttgctgcggtggtaactgtggttgcggaagcgcctgcaagtgccgcaaccgctgcggaggctgcaagatgtacccagacttgagctacaccgagtcaaccaccaccgagaccttggtcatgggagtggcaccagttaaggctcaattcgagagtgctgaaatgggtgttcccgctgagaacgatagctgcaaatgtggagctaactgtacctgtaacccctgcacttgcaagtgaggtgttggagagctaaagcttcaagcagaaatggccccttaaaataatgataaaaactatatttagtttcaaaacttaaaaatatgtagtatgtattatgttgcactctggtgttttgtgtctaaacaaaca

SEQ ID NO: 25703 - DNA, 469 bp, Glycine max
gtttaagcaagctctctcgtgttgctgatgtatttgcgaaacgacttcaagagcctcagcgtctggcagatgaggtatgctctgctttacatcggggaataaagccggcaggtgttgctatcacacttcaatgtacacatatccactttccagacatagaaccagtctttcttgactcaaaccatcaagggtgggtgaagatacttgtttcctcaggttctggggtttttgagaacaaaaatgcagatgtatgggatgatttctttggtcttcttaaatttagaggcatcaatatggataaaattcatttgagaggatcatctgatccatgctggtgtccttctcagtcttctctatctgccaaagtttcctcgaaaataagaccagtcaatcctgtaatggttactgcagtagcttcaattattgaatctttgggagaagatcctttgaggaaagagcttatagggac

SEQ ID NO: 25704 - DNA, 254 bp, Glycine max
ccagaaaatgtctggttgtggccctaaccgggtttgctgaagcccctgcatgagcggaaacttctgtctaggctgaaaaattaccccacacttgccctacactgattcaccccccaccgatccctgggacaggggaggggccccagttaaggctcaatctgagggggccaaaaggggtgtccccgctgaaacacaatggctacaaatgtggaccaaactgctcctgcaacccctgcacttcaaagtgaggtttt

SEQ ID NO: 25705 - DNA, 453 bp, Glycine max
atgtttgtcatgtattgcttgtctgtgttgttcgaatggtgcgttctgcggttgatagtgcaagacaagaggatactcctgggatagtgaaccttgtgttgcggtgctgtgtaaatgcattgctgacagcagttgattttcttaacaagtttaccataaactttgctgcaataactggtgaagcctactgctcttctgcaaggatgacatatgaacttctaagacgcaatcttctctctgctgtttttgtggagaccatctcatctcgcatcctggctggaattgtctttgttttttctgcatcatacacaatagtggcctgtgttatcttaaaagctggtaccaatcttgggtctgactcatattttgtggctgcgatggcatgggtgctactgatggtagtgctgggttacctcgtgcatgtgctagacaacgtaattgacacaatttacg

SEQ ID NO: 25706 - DNA, 442 bp, Glycine max
gatagcagcatcatacaaagcattgaattcaaaaacttaagttcattccttgtgttttgctttcttcctcaaaaccaaacatgtcgaacacatgcggcaactgcgactgcgctgacaagactagctgcaccaagggaaacagctatggtgttattgtagagactgagaagagttacatcgagactgttgtcatggatgttccagcagctgagcatgatgggaagtgcaagtgtggcactaactgcacttgcacggactgcacctgtggccattaaggaatatgtatgaaaatgtaattgccatgtgtttggcaatgcaaatatccaaataatgtaatcttcgtatgaataaatgtgtgtgctgttatcctacttcaggtctgtgtagtcatgcagtctgaatcatttcaagttcctgtcttagttaatataacagccatggt

SEQ ID NO: 25707 - DNA, 355 bp, Glycine max
cacactaccacacattgctgttctagtttgtgactgtttgatgccgaaactcgcccttgggcttttgttgccctgtgtttgcgtttgtttcttctctcacctgacaatgtcttgctgcggtggtaactgtggttgcggaagctcctgcaagtgcggcaacggctgcgtaggctgcatgatgtacccagacttgatctacactgagtcaaccaccaccgataccttggtcatgggagtggcacctgttaaggctcaatttgagggtgctgcaatggctgtgcccgctgagaacgatggctgcaaatgttgaccaaactgctcctgcaacccctgcacttgcaagtgaggtgttgga

SEQ ID NO: 25708 - DNA, 182 bp, Glycine max
ggttccaaaaaaccaccaaagggttcattttcgagatgacaacacaaggggacctggggtacctctaattcgatatccaaaaaaaaaaaaaaagcgggcgctctagaggacccaagcttacgtacccgtacgttccacggcatacccatgctataccggcaccaaccatcaatccagagaca

SEQ ID NO: 25709 - DNA, 75 bp, Glycine max
  modified_base (27)..(27): a, c, g, t, unknown, or other
gacttcagaagggtatgtactcctcanaaaaaaaaaaaaaaaaaaaaggaaggttataaaaaaaaaagagggccc

SEQ ID NO: 25710 - DNA, 260 bp, Glycine max
gaaaacccggcccggaccaacccgtccgaccgcttgcaaaaaacttacaaaagggaatatatattactcatcaacatacgatctactgaggatatacaaccatgcacaatattgaataccatagtctctaccaacaactactatggcccaaaaaaaaggaaaaacatgaacaaaacaaagcggccgctctagaagatccaagcttacaaacgcttgcatgcgacatcataactcttctatagtgacacctaaatacaata

SEQ ID NO: 25711 - DNA, 456 bp, Glycine max
cgcgtacgcccactcgtccgtactgtttctagaaacgttttaagggggttctagtgtgtgattgtttgtggttgtttctcaatcttcttcgtttgttgttctgtgtttgtgtttgttttttctctcacctgaaaatgtcttgctgcggtggtaactgtggttgcggaagctcctgcaagtgcggcaacggctgcggaggctgcaagatgtacccagacttgagctacactgagtcaaccaccaccgagaccttggtcatgggagtggcacctgttaaggctcaatttgagggtgctgaaatgggtgtgcccgctgagaacgatggctgcaaatgtggaccaaactgctcctgcaacccctgcacttgcaagtgaggtgttgggagagcaagcttcaagcagagatagcccttaattaggaataatgataaactattaatgtgtaacttaaaactta

SEQ ID NO: 25712 - DNA, 195 bp, Glycine max
tttttcttatcagttccatagctagctgtgtggagacgacaactgccacccattccaacatacagagaggctatttactaattactgttcctcgtgtgaacaaacatataaaccacctcggattttgcttcctctgctgtgttttaacgacaacgcgtttctttgcttatacactaagatttcaaacggcgattc

SEQ ID NO: 25713 - DNA, 434 bp, Glycine max
  modified_base (314)..(314): a, c, g, t, unknown, or other
cactgcttgcacgtacgggaataaaatagcttactaatgaatattaatataattttgttaataacttacatgaatacatgattgggaatatatttcttgatactattttgtaacacttgaaataattgcatgttaagatgaatataattcttttagcatagaataacattagtaggctataatataagttaaattttagtaaaataaagcaaaaaactaaaaattcttcaaacatgtcggtaaattaggctacatattgtttgttatgatgagcattttaaaccaatggtcattactcaataacaatgtatcanggaattaactaataaatttttcaactttctcccaagaaaaaatattcatctctcacatgtaatattttatgtatagggtctattttaataaatttactttgatattttatatcaatattt

SEQ ID NO: 25714 - DNA, 444 bp, Glycine max
gctgcgagagactacagatggggttttggaattgcgatcccagtgttagtgtgtgtttcctcggttctcactccgggatcgatattttcaagaacagatcgaaaagccgttcatcgatttgttggatctgtgagtgagaagatggttactaagacagaggagactcaattgaacaggctcgaaaaccaggtcgataacggcggcggcggcgcgtgggagtacctctgcctcgtgcggaagctcaaagttcggcggtcggagaaagttctgaagcacggtctctccatcttgaacgacctcaaacaacgatcctctctcggctccgatgaatggaccttgtatgagcaggttgctgttgctgctatggactgccaatgtctcgacgttgccaaggactgtacaaaggttcttcggaagagattcctataaagtaaaagaatttgt

SEQ ID NO: 25715 - DNA, 323 bp, Glycine max
gcagggaaaagagtgtcgtgtggtctgtagcatcaaaaccgtgctgtcaattcgaatttggtagacacactaatacttgttttctttcgatgctcatgatggcagaccaagctcaagtattgttctctttggagtctacagatcacgcgcctgtgaagcgcgttggcacgcacaacggaagctttcactgttacgaggtccatgactgcttcatgattagtgtcacgaacatatatagcagcgacgaaattggtggtttccgaaaccctgaagtggaggaggatcatgatgctgctcacgatgttgggggagtgtatgaccct

SEQ ID NO: 25716 - DNA, 384 bp, Glycine max
cataggatttagggatgatgcaggtcgtctagttcggacagagaggcttagaaccaaagatataacacagagagtgaaaatgaagaactactggcagggaggagtctgcttggcgtttgctgatgaggtattatgctggctgtatggaacagtcaaagaaggtgaagattatattttgcagtttgctccacctttcaaccgtttagagcttctgcaagcccagtcttgcccagatgtaattactagtcatctggagcttttctgaaaatttggagaccttaacagttattattatttaaacaattcaatatacgaaggggaatcaaccctggatttttcccctccgctttgatcagtccacgaatttttagtataagggcaccc

SEQ ID NO: 25717 - DNA, 430 bp, Glycine max
gagtgtgtttaaggtgttcttagattgactaaatctgactgccgagagccagtaaatattggaagcgatgagatggttagcatgaatgagatggctgagattattcttggctttgagaacaagaatattcctattcaccacattcctggccctgagggtgttcgaggtcgtaattcagacaatacactgataaaagaaaaacttggttgggctccaactatgaggttgaaggatgggttgagaatcacatacttctggattaaggagcagatcgagaaggagaaggctcaaggtattgatatatctgtgtatgggtcttccaaagtggtgcagactcaagccccagttcaactaggctcacttcgagctgcagatggcaaaagaatgaggtggtcaacatatggctgtagtaggattcaccttaatgttt

SEQ ID NO: 25718 - DNA, 397 bp, Glycine max
ggttctagtgtgtgattgtttgttgttgtaactcgttcttcttcttttgttgttctgtgtttgtgtttgttttttctctcacctgaaaatgtcttgctgcggtggtaactgtggttgcggaagctcctgcaagtgcggcaacggctgcggaggctgcaagatgtacccagacttgagctacactgagtcaaccaccaccgagaccttggtcatgggagtggcacctgttaaggctcaatttgagggtgctgaaatgggtgtgcccgctgagaacgatggctgcaaatgtggaccaaactgctcctgcaacccctgcacttgcaagtgaggtgttgggagagcaagcttcaagcaaagatagcccttaattaagaataatgataaactattaatgtgt

SEQ ID NO: 25719 - DNA, 347 bp, Glycine max
gaaggcttagaagcgggtgtagtggaggaggaaggcggtgcagttgtagtagtagaggaggacgaggaggaaggtgacgagcgcgatgaggacgacgaagaccacggcgttgaggacggcgccctcgagcttctgggcggtggtgtcggaggggttctcggcgtagacgaggttggcggcggtggcgatagtggtggtggtggacggcgaggagagagaatacactaacaggaccacaaggaacatgcagatcgagactgggctcatcacgccgattatctccatgcccagacattccagaacgctcgattccattttcactattttttttcttttttttaagtttt

SEQ ID NO: 25720 - DNA, 436 bp, Glycine max
ttaggggacaatccctaattccccaaaattttctctgaagaagaagcaacaatgtctggtcgcggaaagggaggcaagggtttgggaaagggtggagcgaagaggcatcgcaaggtgctccgcgacaacatccagggaatcacgaaacccgcgattcggaggctagccagaagaggcggcgtgaaaagaatcagcggcttgatctacgaggaaaccaggggtgtgctcaagatcttcctcgagaacgtcattcgcgacgccgtcacctacaccgagcacgctaggagaaagaccgtcacggccatggacgtcgtttacgcgctcaagaggcagggaagaaccctctacggtttcggaagctgagggcttgggctttttctgggcctggatttgttcttcgctgggctttaaaatgttgttgggaatttgtgttttg

SEQ ID NO: 25721 - DNA, 247 bp, Glycine max
tacacttctattcttcttaagcttgctactgagtttcgacactgcgtaccttaagtcttccgaattcgaagttaatttgcaagatggctaaaggaaaggctcaaaatcaccattgggggggtgggcaatttgacccttgaggggccaccaacatttaacaacctaaaaaaccttttttggaaaaaggaacttctaggcattccattatgagggcattcacttacggcctcggaggggaacaagaaaa

SEQ ID NO: 25722 - DNA, 340 bp, Glycine max
atatgtacgatggaatttcccatatggagagcaccagttcatccaatattataaaaaaggacagaaatcaatggtttgaagaccaaaatgagtgattcaagtggctcaactagagatgaaattaaagttgagccagtaataattaaatatatattttaatattatataattaacataaaaatatattacatgtttaaaaataatataaaatttcataatgcatagttgaataataacagttggtttgtacatctcatatataccagcttttatttatttatttataaagaaagagagaaattattcttttttttaaaattggttcacactggtttggtac

SEQ ID NO: 25723 - DNA, 378 bp, Glycine max
tacgaaggttcatggtacgaaggtcgtaggcaaggttatggcatgtatatgtttcgaaatggtgatggaagatgtggtgaatgggatgctggcaacctcaaactctctctaccaccacaaaatgatgctatcattcgcacagttcaggctgctaggaaaacagctgaaaatgctataaatcttccccggaaggatgaccacgtgaacaaggcagtaattgctgcaaacagggctgccactgctgctagagttgctgcagtgaaagctgttcagaaccaaatgggtggaaaattttgcgatattgatgtctgagtttaggtgttagctagcttttggttgaaaattggaaatttttactaatagtaccagttttaagta

SEQ ID NO: 25724 - DNA, 397 bp, Glycine max
  modified_base (347)..(347): a, c, g, t, unknown, or other
ggtggctgacttctctctcgactcagctcacgtttggtttggcagtgctcttacctccaacttttgtattcttcttttccttttctattctttctctctccattcttcctccttccactctttgcgtactagtaatcccccttcaataccatccatcagcattcatattttcacaatttttctttcaattcccaaaagcataaacaaaaaaaaaattgaaaatcaaagcaataagaacacgcattctttacttccaattcccaattcttcttctgccctagattttaccccctttattattgcactccaccaccactgtgcatcgatcgatcgttggttcttgaatntccctttgtgttaaggtttctcgatggagtcggaggatgatatgcccgac

SEQ ID NO: 25725 - DNA, 361 bp, Glycine max
gatagcagcatcatacaaagcattgaattcaaaaacttaagttcattccttgtgttttgctttcttcctcaaaaccaaacatgtcgaacacatgcggcaactgcgactgcgctgacaagactagctgcaccaagggaaacagctatggtgttattgtagagactgagaagagttacatcgagactgttgtcatggatgttccagcagctgagcatgatgggaagtgcaagtgtggcactaactgcacttgcacggactgcacctgtggccattaaagaatatgtatgaaaatgtaattgccatgtgtttggcaatacaaatatccaaataatgtaatcttcgtatgaataaatgtgtgtgc

SEQ ID NO: 25726 - DNA, 277 bp, Glycine max
gagaccattgaagcatcaagaccattcgacgaagagaacgtgctgagcagaacaaggcatggattagtgttcaaggcctgctacaacgatggaatggtcctttccattcgcaggctgcaagatggatcattggatgagaacatgtttagaaaagaagccgagtcacttggcaaagtcaagaaccgaaatttagcagttctcagaagttactatgcagggccacctgacatgagactcctagtctacgattacatgcccaatggaaaccttgcaaccc

SEQ ID NO: 25727 - DNA, 434 bp, Glycine max
gatatataaagtgttcagcccaccctatctctatttttggtggattggtgacatgcaagccgaaacaagttaaataagttggtctagtatgtttcttcatccttaatactaataacatcctaatgcaaaagctcaatttaaatttttaactctctgttcgtctcttttaatcacatatgatttaagaatactcactaatttttactccaaatgtaaaaacttgagttttaacttacttttaaagggtacaccattttatctctctgttcacataagaactttcattttaacttaaaaatatttttttgacagttaaataaccttggtttttagttatttatataaacaatgtctaacagaatttactgatttgctccaatgatctttttaaatttcttaattttaagaagtaacttaagcaacttcaatggagt

SEQ ID NO: 25728 - DNA, 347 bp, Glycine max
gggcatgcccattgttttcaattccacaagtggaaacatgttcatgtcagcaccactgcatggcatttcttcatatgaatctagaccacaggagcaaaatttacttagacaatctccatggatgccagttttcaccttgtgatgctattttgcaaatgcaattgatgcgacatcggtgatctatacaagtggtgcagggattagagttttgaagttagatggaaggtttgtgtgagctagcatccgatgttcatcttcctatataggcagccaggaattatctgcagatcgccctgaggaagaggagctatctcttgcctttttaaaagatgcttcaaataaatata

SEQ ID NO: 25729 - DNA, 405 bp, Glycine max
ggacacgcaactatgtctgactacgttttgctctacgcctctccctctctctcaaaaatcgttctcttcgattttagggttttgttttgctgctgcctccgttccccccttctcataaacaacgcgttttctcttctgcttcgtatctattctttgcttttggttttggttgattcaaggccttcacagcattcgttgcggcattttaatcgatttatccaagcaggactgaatgaactaatggagtctaaaggtgggaaaaagaagtctagtagtagtagtaaatcattgttctacgaagctcccctcggatacagcattgaagacgttagaccaaacggtggaatcaaaaaattcagatctgctgcttactccaactgcgctcgcaaacctttctgatatcca

SEQ ID NO: 25730 - DNA, 315 bp, Glycine max
  modified_base (40)..(40): a, c, g, t, unknown, or other
  modified_base (77)..(77): a, c, g, t, unknown, or other
  modified_base (95)..(95): a, c, g, t, unknown, or other
  modified_base (123)..(123): a, c, g, t, unknown, or other
  modified_base (144)..(144): a, c, g, t, unknown, or other
tacgacagattggttttagcaaatttcttttatccctatnttttcttccggagtagtgggcatttactgcttctctntctctgcagcaactatgncctaacctctaagggtcttctttgacanttaccatctggcggtcaatcntgctggccgcatctgtgatggagcctctactgccgacgttcactccctcgcactcgtcgagtaacttcctgcgctgctttgcatccgtctatgaagggcgtagcggcggagcggctaagctcctttcactacaatgggctttgtcctttccaccgtgttgatcccgagttt

SEQ ID NO: 25731 - DNA, 337 bp, Glycine max
ggtagatacaagagttgctggcacagggttctggccacaccagatgggaacagaagatcaattgcctccttctataacccttcattcaaagccaccatatgtcctgcaccacaacttgtggagaaagaagaccaacaagtgaatcaaacttatcctaagtctgtttttggtgactacatgtctgtctatgctgagcagaagttccttcccaaggaaccaaggttccaagctgttagggccatgtgagaaaagcaacttgctttcttgtagaaaatgcttttgctcttcccccccccccacactttttttatttttgaaaaaaaataacttcatcttt

SEQ ID NO: 25732 - DNA, 367 bp, Glycine max
agacgacagaagggggatcttgatctggtggctatcgacggtttttcgtggtctcggtgtgttgtgggtgttgttgtttgtgattggcgcgggcgccgactatgccaaacgcgacgacgacagggctcccaagtcggaatcctgcaataaccccttccaactggtgaaagtggagaacttggtggatggtgaggaagggcatatttataatggcgttagtgcttgatttgggtctgtgttgcccgaaaaaccttacaacagtgtgaaaacttcagcaatattcgctgatgccttagactgctgtttcaattcaacttcaaagttatttggctcaagtgctctctttgtgcgtgggggttgtgacttt

SEQ ID NO: 25733 - DNA, 152 bp, Glycine max
  modified_base (150)..(150): a, c, g, t, unknown, or other
tgagggcgtagttagcgacgttatgcttcggggagttgaaaataagcgtagagccggggattcccgatataggtcaacctttcgaactgctgctgaatccacgggcaggcaagagacaacctggtgaactgaaacatcttagtagcctgngg

SEQ ID NO: 25734 - DNA, 351 bp, Glycine max
gacagcttttcctcttaagcttgctactgagtttccacactgcataccttaggtcttccgaattcgaagttaatttgcaagatggctaaggaaaaggctcagatcaacattgtggtggttggtcatgtggaccctgaggaggcaaccaccattaacgagctgaagaagcctgttgtggagaaagaagctccagggcatgccatatgagggcatgcacgtacggcctcggaggggaaccagaaaattatgttaacaaaataatctggaaccctaatgtatcagtgtcatcatcagtgtgtagtttaagctagctttgctatggttacgttctttgagatgagagtcttgatt

SEQ ID NO: 25735 - DNA, 377 bp, Glycine max
ttgggaatttatttgaaggaattgttgtaactgtttgattcctaaattctctaaaattcgaaattctaatttcgttaggggaaagagattgtttgtgtgtgagtgagtatggctggaaaaggcgagggtcctgctatcggaatcgatttgggaacgacgtactcttgcgtcggcgtgtggcaacacgatcgtgttgaaatcatagccaacgatcagggtaacagaactaccccatcctacgtggctttcaccgacacagaacggttgatcggcgatgcggcgaagaaccaggtcgctatgaacccaaccaacaccgtttttgatgctaagcgtttgattggaaggcgtttttccgatgcatcagtacaaggtgacat

SEQ ID NO: 25736 - DNA, 433 bp, Glycine max
tagatttgaagcttttgaagggtttggctaaggcgcaacccgcgtggctcaaagccatggaacagtttatcccctaatttctgggcaccatctgcaacgtttcctcgatctgcagggaaaattccgaccatcactcttcctgaggatgtttatgtgaagaagttttataagaaatatccggaatctaaatcccatgacgccataaagtttcatgcttttaaccccctccgtctcgtgtatttggcttgagggttcttgaattgaaggagcagggcgttagtgaggagcaagcaatggctattgctgatatggagtatctcacagagaagaaggcaaagaagaaagatatacccgtttgaaagaaattgcacgtcttcaagaaagcgacttcctcaaaacccatattctagtgccatcaaggagatacaagctt

SEQ ID NO: 25737 - DNA, 409 bp, Glycine max
ccagtctttaggtgcctttgatattcttttctagttaaattaaagttttattttaataatcaacataataaaagttcattatcaaagtaaaactctagtttgcattcaagacaaacatacgttatcaaagttttgcattccgtttctacttagatgcatcatgtttgcaccaagttatgagaaattctctttcacgtattttaatactttttccattgaaatttgttttctatttctgaataaggagaggaactaactccgtataacttctttgccttttataatgtttccttcctcattttaattttaataaaatttcctcgtttctcttgtaggcttccattcattctatgcaccaaaatcatggtaacaaaattaaataaaaccaaagatcaatttatagatatga

SEQ ID NO: 25738 - DNA, 438 bp, Glycine max
ttatggggacagctgttgtttatattcacttcttcaaccctcatttctggttaaatcagtactcactctctacccgtttcctgataatccctaatttgatccaaatgactcacttgtaatttcttataaaaaaaaattcaattctaatcacttcaatcaaccccaatatcttgaacacgaatgtcagacatggatccgtccaaaaaagtggccgatagatatctgaagcgtgaagtccttggtgaaggtacctatggagttgtgtacaaagctattgatacccatacaaggcagacggttgcaattaagaaaattcggcttggcaaacagaaagaaggggttaattttacagctcttagagaaattaagctgctaaaagagctcaaagatccaaacattgttgaattgattgatgcattcccaccataaagggaattt

SEQ ID NO: 25739 - DNA, 129 bp, Glycine max
gacatcaggtgaggcggggctacacgctgagtgttagcgtatcaataagcaaaaaaaaaaaaaaaaaaaagcggacgatgcggacgatctaaaagaaccaagcttaccttcgcatgcatgcgacgttat

SEQ ID NO: 25740 - DNA, 316 bp, Glycine max
accaaggcgtccgccaacgcgtccgcggacgcgtgaagacgacagtttggggaatctttgcattctattcattcaagattcagcaggtgcgttttggaagcagagaccgaaatacttcgagatggcccgtacaaagcaaactgctcgtaagtcaactggaggaaaagctcccaggaagcagcttgcaaccaaggctgcacgtaagtctgcaccaacaactggtggtgtgaagaagcctcatcgttatcgccctggaactgttgctcttcgtgagattaggaaataccagaagagcactgagctcctaatcaggaag

SEQ ID NO: 25741 - DNA, 439 bp, Glycine max
ggtgtattaaatttttaatcaaggattaatttcataatcaatcccgaaactgagttccatagttaaagagtcaaacttgtgaagataacttaagattttacaggagaaccaaataccctaatcacgatgcttaaaagaaaaattaggtataataaattagtaaaattataactttagcctgaagcaacaccaacttatgaaaacgcgttaacaccgcataaaatggatgatgaatttgttaccttaacaccaaacatagtccaattttttaattatattttcttggcaatcgttcttcgtatatatatcacatgtaatatgaggttccagcagtgcagcctccaagacttggtgagtgtcactgctgaagagagaaccacgcagaactgacgcaatgggaagcacaagtttgcttcatctattacttggtgttgttttg

SEQ ID NO: 25742 - DNA, 377 bp, Glycine max
gatgctttctgagcagagactgaaggagctgcaggaagaaaggaaggagcctttaacatatggacaagcaaagaggttgaagacttacttggagagcatgctgctctttatgaggagcactattacatcaagcaatggggtaactgaggcctatctggaatgagtgatcctcactatgaatataagggaaagaatgccctgatgtgagagaaaggaaccttcagaactggcatgaaaatatggcatgtaagttgagacatatcaagaaattcttggagaatgcacgcataagttgtttgaagtaaggtcaaggcgttcaaagccacatttggatgataaggttattgtatcgtggaaaggactggcaatattatctt

SEQ ID NO: 25743 - DNA, 436 bp, Glycine max
  modified_base (46)..(46): a, c, g, t, unknown, or other
cccacgcgtccggaagacgtcagattggaatttttgatcatcttgngcataaaagtcactgtcgggatttcctatttttattttgaaaatgttacgcttaaatgaaatttactggttcctgggttaaatgtttacttattgccatcagttacgtgcattgggtaaaatggtgtggtgataatttagttttagtaggggttataaggttggcttggtggtgaggggggagagattgtgggttcgaatcccccactaacaaaaaactaacaattacttttaagcctgtttgagtaagcccatctatcaattgttgtcggttactttttcctatttttttaatttcttttaaactgctttttttatcttttatgcctgtttgattaagcccaccttttgctctctttttcctattgtatttggagggggaggtcgtggg

SEQ ID NO: 25744 - DNA, 351 bp, Glycine max
gctctctctctgaccattctcttcttcttctttttcttctcctctctctctctcccctccgccatggctgaggataaggagatgtctacctctgtcatcaatgggaatgattccctaactggtcacatcatatctacaactattggaggcaaaaatggggaacccaaacagactattagctacatggcagaacgggttgtaggaactggatcatttggaatcgttttccaggcaaaatgcttggaaactggggaggcagtggcaattaaaaaggttttacaagacagaagatacaagaatcgtgaactgcagttaatgcgtgtgatggatcatccaaaatgtgatctcttt

SEQ ID NO: 25745 - DNA, 461 bp, Glycine max
cccacgcgtgcgcccacgcgtgcggacgacagattggggtgcacagatcaatacagccccacgtgggctgggattaattgcactcactcctattgttctccgctcttcaccttcactctgttcaatatcataatcaatcattgatcataaaagaaacaacattcagctatttctctgaactaaacatgttacaatctatggaagtgcctgattgtgtctatcggcggcaaccactgatcattcctccaagtgctcctaccccaaaacattctctgtatttgtctagcctcgatgaccaacagtttctaagattctccattaagtatttgcacctcttcgagacagcttcgagcttgaatatcatgaagtcttctgtggccagaggtctagtggattattaccccgtaactggaaagatgaggagtgtggatgatcacactcacaaacttgaggtggattgc

SEQ ID NO: 25746 - DNA, 430 bp, Glycine max
aacttgattgggcagacctttactatatgaccacccttccaaaacactctagaatgccccacttatttccacaactccctcttcctttcagagacactctagaggcttactcacaggaaataaaagatctagccatagttattataggccttatgggaaaagctttgaagattcaagaaagggaaataagagaattatttgaagatggaatacaactaatgaggatgaactattaccctccatgccctgaaccagaaaaagttattggcctcactcctcattcaaacggaattggactcgctattcttctacaactcaatgaagttgaaagtcttcaaataaagaaagatggcttgtgggttccggttaaacccttgattaatgctttcattgtcaatgttggtgacatattaaagattataactaatgg

SEQ ID NO: 25747 - DNA, 305 bp, Glycine max
  modified_base (83)..(83): a, c, g, t, unknown, or other
gtccgaatcgagcggccgcttttttttgtatcttgtttttttatttttggcctcttcatttatctgtagattttcagtggganagccccactatattgacacaagtccctttccccttcagagacactctagaggcttactcacacgcaagggtgcttcatgccctggccataagacgccggctggcatacgctccggggataccagcaagggcagatccgttaattgttagtagatgggactcaactaatgaggatgaactattaccctccatgccctgaaccagataaggaccttgtgcctac

SEQ ID NO: 25748 - DNA, 375 bp, Glycine max
  modified_base (345)..(345): a, c, g, t, unknown, or other
ggatcaagagtgcttcatcaaggtaatgcatcaatacactgatgcatggtgttgaccattacaactctcaatgtgtgcttcttgactatgtagacatgtttatcttcacttgtagtcaaaccattgcatcttctaatgattcttaagtcatgtgcagcttccaatatctgccccttgacttaaactacctccaaaatgatacttctagtcatatacaacttctaatatatgcactttgacatagaaaacatgactgcccttcttcttttggtttcttgcttctaaagttggaacaagcttcagggttgggaaaccaagtctgtcggaaaaaagcttaacacctgntctctatgtttcttgataagtcacaatttt

SEQ ID NO: 25749 - DNA, 311 bp, Glycine max
ttgttgaagactacagttatggggttttaaagaaaaaaaaagatataattgagatgggggtgagtaggagaagacttggagttagatgcagtgtggttgcagggtcagtgtgggagagcagaatgaagagtgatgaagttggtggtggagttaaggtcttcactggagaacaaagtgcttaagaaagaggcaatggtggcacctgcagattgaagagaagccaaattgggagtgtggttgccactggaaagagaaaaacttggaaattagaagggttagaaaacaaccatattcaaatagccatatgaaaa

SEQ ID NO: 25750 - DNA, 403 bp, Glycine max
tgatttgtatgtttttgtttggactgcacaaacaattgctccagacagtgaatgtgctattgatggacaccttcgtgaagttggactcacatttcacctcctcaaggatgttcccgggattgtctcaaagaacattgataaggcactttttgaggctttcaacccattgaacatctctgattacaactccatcttttggattgcacaccctggtgggcctgcgattttagaccaagttgagcaaaagttgggtctcaaacctgagaagatgaaggccactagagatgtgcttagtgaatatgggaacatgtcaagtgcttgtgttcttttcatcttggatgagatgaggaggaaatctgctgaaaatggacataaaaccacaagttgaaggacttgaatgggt

SEQ ID NO: 25751 - DNA, 344 bp, Glycine max
gatctgtcagcagaagaacaagtagttgagaactaagaaggagaagcaaatggcttcctcaatgatctcttccccagctgttaccactgtcaaccgtgccggtgccggcatggttgctccattcactggcctcaagtccatggctggcttccccaccaggaagaccaacaatgacattacctccattgctagcaacggtggaagagtgcaatgcatgcaggtgtggccaccagttggcaagaagaagtttgagactctttcctacctgccagaccttgatgatgcacaattggcaaaggaagtagaataccttcttaggaagggatggattccttgcttggaat

SEQ ID NO: 25752 - DNA, 327 bp, Glycine max
ggtggcagagagcgaacccaaaactagagctaccttcccttcaaaccttccactcttctctccttttccaatcaagggaataatatttcttagagatattccgaaaccatggctcacgccaatcctatgatttttgttgttggaattctaggtaaccttgtctccttctgttgctttctagcaccagtaccaacattctatcgagtttgtaagaagaaaaccacggaaggtttccaatcacttccttacgtggctgcactcttcacttcaatgctttggatattttatgcttacataaagacgggcgaaatacttctcatcaccatt

SEQ ID NO: 25753 - DNA, 404 bp, Glycine max
  modified_base (379)..(379): a, c, g, t, unknown, or other
  modified_base (384)..(385): a, c, g, t, unknown, or other
  modified_base (395)..(397): a, c, g, t, unknown, or other
gacttctctcactattggtattatcgtcggaagcggtatccatcaatgtttctttctgataaacttgcaccacacttcaattccacactctttactcatctccacacccaccaggtaccgtcacttcaaattttcagccacatttcacaatcttctctgcattttccttccaaatttatgatctgtttcgttttctgctatctgggtatgtctcaagtttgagttagagtgcttccctcgcttcttccaaaaaagggttggtacccttttcatgccatggtatttccctgaactgaagagcaatacccgtttgtgcctcactttccgtggaagaaggctttgttcaagtttcagcaatgatagtgttagtaatctatcntaatnngtatactatnnntcttatg

SEQ ID NO: 25754 - DNA, 429 bp, Glycine max
gacgcacttagcaatcaagcaacacttgcaattacaatatacacatcttcaattaagccatgactctctctaagcttatagttgcttcccttcttgcctcgcttctccttcttcatcttgttgatgctgatcaatcggcacatgtacaaacgcaggggtctcttctgcagaagatagattgtaatggagcatgtgctgcgaggttgcatttatcatctcggccacgtctgtgcaaaagagcctgcggaacttgttgtagacgctgcaactgcgtgccacctggcactgctggaaaccaagaagtgtgtccctgctatgctagtttgactactcatggtggcaaacgcaagtgcccttagacttaaaagttgtgtttggattgctagctgctgatatattctccgattatgtttaacctcagtttgaagg

SEQ ID NO: 25755 - DNA, 441 bp, Glycine max
  modified_base (326)..(326): a, c, g, t, unknown, or other
tggtgcaactttctggagcttatataacaaaccggaataggggcccaataagaaagaagagtcatcacaaggaaaaaggggaaagaaaagatgccttgcctttacatctccaccaacataaacttagatggagttaacatcgatccaatcttttctcaagccaccactgcagtttccacaatcatcggcaagccagagaaggtatgccactctattctcttttctctctaatcatcttttttccaatcatagcttatgaaatttggtctcaattctcaagacgtgtgaaaaattcgcttttggggtattcttattcttattctttngttggtctattgtaaatttgatgcatatctgttaatggttcaactgtttgatttttatatactcccccaacaactcaatctactgcaaaaaggaatttgaattctatattgtaaa

SEQ ID NO: 25756 - DNA, 259 bp, Glycine max
acgcgtagagggcgacaagattggtccatctttctacttgggaattctgagaatcggattgaagaagagacctctagagattgatagtgttaatgctgctagaaaggcaagagaaggtctaagatctgaaagatcaatgatgggtgcacatgatcagcatattggtgagtcaaaaggtgaagatctagtacctttgaagaattatatggacgctcaatattttggtgagattggaattggcacacccccacagcccttc

SEQ ID NO: 25757 - DNA, 335 bp, Glycine max
gtatctttcggaacactacaatggaatatgccctggtccattttcaagagtattgaaactcgtataagaattctccatttgcgtactagtggcgcatttacaacaccttttcaggtcaaatcctattttttcccgtgaaagttcatgttcaaataaataggccttgctgaaagaggggttttatgattatttttttcttcattaattttgatcctaaacattagaaaaaccatccaaattgagcaaatttttacccgaactctctcaaaattgtgacacaggtagcacaaaccatccaatctctactccctgtgccagaacccaagatgcacgaa

SEQ ID NO: 25758 - DNA, 320 bp, Glycine max
aatataatttagaatattaaaataaaaaaaaaaaaaagaagctatatgagtataaaaataatatatataaggtacaaatagtaaatcgaggtacccattttatgataaactttccttccatttttgatcctctagtaggcctagtatttccggcaattgcaatggcttctttatttctttatgttcaaaaaaacaagattttttagatacagaaaacaaagtaaaattctggggttttttattccccaattataatacctaaattcaaaaaaaggagagtaatgagtataatctttcgctcagacgatgtactgatatat

SEQ ID NO: 25759 - DNA, 256 bp, Glycine max
  modified_base (24)..(24): a, c, g, t, unknown, or other
ggtacttttgtgcttttgtttgcngctgcaactcgacggtcttctggtgctgttctgagtttgcgtttgttttttctctcacctgaaaatgtcttgctgcggtggtaactgtggttgcggaagctcctgcaagtgctgcaacggctgcggaggctgcaagatgtacccagacttgagctacactgagtcaaccaccaccgagaccttggtcatgggagtggcacctgttaaaggctcaatttgagggtgctgaaat

SEQ ID NO: 25760 - DNA, 354 bp, Glycine max
tgaaggttcaagagtttgttgtgagctataagctagtttatcgtgaggagaatatgaagttgtttgttttctttgttgctgcagtagttttggtagcatggccatgccatggcgcaggctaccaaaggttccctctccgaatgaaaactggctatggtgagcgttcttcggaggtaaaatgcgcaagttttacgcttgctgtggaagcacacaacatccgagcctttaaaaccattcctgaagagtgcgttgaaccaacaaaggactacattaatggcgaacaatttagatcagactctaaaacaatttaaccaacaagctctcttttatgctagtgaacgcgaagtccatcac

SEQ ID NO: 25761 - DNA, 432 bp, Glycine max
gaaggttcaagagtttgttgtgagctataagctagtttatcgtgaggagaatatgaagttgtttgttttctttgttgctgcagtagttttggtagcatggccatgccatggcgcaggctaccaaaggttccctctccgaatgaaaactggctatggtgagcgttcttcggaggtaaaatgcgcaagttttaggcttgctgtggaagcacacaacatccgagcctttaaaaccattcctgaagagtgcgttgaaccaacaaaggactacattaatggcgaacaatttagatcagactctaaaacagttaaccaacaagctttcttttatgctagtgaacgcgaagtccatcacaacgacatatttatattcggcatagataacaccgtactctctaatatcccatactatgaaaaacatggatatggggtgga

SEQ ID NO: 25762 - DNA, 319 bp, Glycine max
gtaccttttgaaatattttgaacaaaaaaaacgtttttttttttcagaacatttccatttttatagatgaggcgttatttgatttcgaaagccgattattatattcctaacccgaagtgctccttggtgtattcataaaaagtagtaatttttgttcgaatcttagcaattgatatcctttcgaaacaccatttttttcttcatttgaattgacagtgaattctttcgatttcttattcgatttatgtatgctttgttctaaattaaacaaggcaaggactaactcccgaactgcaagtaaaaaaaatgatagcataga

SEQ ID NO: 25763 - DNA, 439 bp, Glycine max
gacttctctcactattggtattatcgtcggaagcggtatccatcaatgtttctttctgataaacttgcaccacacttcaattccacactctttactcatctccacacccaccaggtaccgtcacttcaaattttcagccacatttcacaatcttctctgcattttccttccaaatttaatgatctgtttcgttttctgctatctgggtatgtctcaagtttgagttagagtgcttccctcgcttctccaagaaaagggttggtacccttttcatgccatggtatttccctgaactgaagagcaatacccgtttgtgcctcactttccgtggaaagaaggctttgttcaagtttcagcaatgatagtgttaagaatccaatcttattggtattactaattctttatgttgaattgattttattgtgtaaattgtttcatg

SEQ ID NO: 25764 - DNA, 224 bp, Glycine max
cccaaacactacacaaggggacttttgtcagtgttggtataacagcaacaggcggggtacgtcggtgaaaaatttctgatgaacttgcaccacacttgaatggccacacgtctatactgaattgcacacagaccaagtaccggcactgcacattatcagcctcattttacaatactcttctgcattaagctttcataaaaatgatctgtttcattttttgctat

SEQ ID NO: 25765 - DNA, 345 bp, Glycine max
ttgtagacctttttttgcttatatttctggtttgagaacttagacaagtctagctagaatgtataaaaatgttcgatttcatgagttacggaatgacaaaatcagattcttggtgttgattattggggaagcattgggaacatttggggtgtgtgatacaaagactaaacatactttaaggattttgagagtattgtggaatgtggacaaagtagaggctcaaagaatggaggaaatatttgtgcaccctgctggaaggatgaccctcattaattctatcccttcttaccacaagtcttttgatcttctttccaagagaataagtgactttacttgatagaagtg

SEQ ID NO: 25766 - DNA, 398 bp, Glycine max
gacacaagttcaccctccaaagtccaatccactatcactcactctctcttctcctaccattatttctctctaccttaaacttccacaatacaactctctcttcctataaacgctgttgtttaacgtgagaacttgggtgatctttttggagttgtaggagcccttacaccttgcagaatcatcgctacattcccaagggctcctactacgcaataactccaagcccgatctcaaattaatatttcatttactcatcttaatcaatattaaataagaaaagatgggagagatgtcaaacttccaattgggtgtgattggtgcactatttctctcttgggcttcttctgtctccattgtcatctgcaacaaagccttgatgagcaatcttggctttcctt

SEQ ID NO: 25767 - DNA, 228 bp, Glycine max
gctgcttatgctggtggtccaccaggtggcccaaggagtgcatggcctgctcaggctccttctggttatggatctatgggctatgggaacactgctgcttggggtgctccaagtggtggtgctggctttggtggcggtggtcctggttcagcaactgcaggtcaatctcctggtggagctgctggatatgggaatcaaggttatcgatatggtggggtatgggggata

SEQ ID NO: 25768 - DNA, 229 bp, Glycine max
  modified_base (4)..(4): a, c, g, t, unknown, or other
  modified_base (11)..(11): a, c, g, t, unknown, or other
  modified_base (35)..(35): a, c, g, t, unknown, or other
cggnccggaangaccgagtcgaccgacccgttgtnagaacagttcttagaggactacttttggggtttgtctatcaggaaccaacgggtgggaatgggcggggcttgtgctgttcggtgtcccagactttaaagctccaaaccttactattcaaatgattcctatccagatacttccttcctggataacagaatgcagcttcacagaaagcatgctgtgatgcttttct

SEQ ID NO: 25769 - DNA, 422 bp, Glycine max
  modified_base (61)..(61): a, c, g, t, unknown, or other
ggtcgaccgacgcgtacgaacagatacggttggactcaaggtttagggccttccatggctnccgcttgtgcttgcgctgcaggtacagctgttgccatctctacgccgagttccgggcagaagaatggatcaggaggttgttttcttagtggaaggaaattgagggtgaaaaaggagagagcagcaattggaggacgatcgatgggcactacagtgtgcgcagttgctgagcctgacagacctctatggttcccaagcagcacccctcctccatggcttgatggcactctacctggagacttcggctttgaccctcttggtcttggatctgacccggagagtctgagatggaattgttaagcagagctagtgcactgcagatgggcaatgttgggtgctgctggcattttcattccagaatt

SEQ ID NO: 25770 - DNA, 442 bp, Glycine max
tacttgattgggcagacctttactatatgaccacccttcgaaaacactctagaatgccccacttatttccacaactccctcttcctttcagagacactctagaggcttactcacaggaaataaaagatctagccatagttattataggccttatgggaaaagctttgaagattcaagaaagggaaataagagaattatttgaagatggaatacaactaatgaggatgaactattaccctccatgccctgaaccagagaaggttattggcctcactcctcattcagacggaattggactcgctattcttctacaactcaatgaagttgaaggtcttcagataaggaaagatggcttgtgggttccggttaaacccttgattaatgctttcattgtcaatgttggtgacatataagagattataactaatggtatataccgaag

SEQ ID NO: 25771 - DNA, 367 bp, Glycine max
ggaaggaggtatctcgtgccagcgatgtgggacccgcagacttcgacatgcaagaccctcgtctgaagactgccacgtggcgaggttgtgtaatggttgtagatattggtcgatgggaacggaagcagggaatggataatagaggtggtgatggatttggttcggacttcggagtgtttctaaattttctatattctgtaagcctgcttttgtcgtttagtgtgacgtgtaagacgtgtaaattctcttttgctaaagactatagaggaagaagaactgggatgttgtataaataataaattatgaaaaacgaggaataagattttaaaaaaaagggatatcatgaatgtgatatatttttattttt

SEQ ID NO: 25772 - DNA, 341 bp, Glycine max
  modified_base (32)..(32): a, c, g, t, unknown, or other
  modified_base (268)..(268): a, c, g, t, unknown, or other
gacgactgatttgtatacatgacatgctttgnctgagaagctgtttcatgggtcgtggtgcaatcatatgatctcagatgtacaagtttttggcaaattaccagctagcgctgaccagtgcagcaacttgatgatttgagattcttttcaatgacagttaatgattgcatgcgtgcacatccacactgacattaaaagcatgatcttctaatcttgttccattgatttgcacaaactaacctgtctaatttatatgttgcagatgatntttcattactctacatctatgttaatttgacaatgctacctatcaactggtggtttaaaagagagttattttt

SEQ ID NO: 25773 - DNA, 206 bp, Glycine max
tagtgacaacaaagacaaaaataacagacaactactttacaaggacattattcacgctatatgctaaaatgctacagaaaatggaaaattgccgcaaaaatttttaagaaattccaaaacaccatagtaaatgtcaaaaaaacattttgattcttgtaattttggtgatttaaagcatgaatagaaatatcaaagtgataatataa

SEQ ID NO: 25774 - DNA, 175 bp, Glycine max
atcactacaaaacgttacttttcacacctggttatcaacgccgaaagcggcgaccaacaaggtcatctttcagataaacttgcaccacacttcaattccacactctttactcatcttcacacccaccatttaccgtcacttcaaattttcagccacatttcacaaacttctctgc

SEQ ID NO: 25775 - DNA, 170 bp, Glycine max
cttttttggggttcctctctgcaacgtagggttgggcagattataagctctctctctctttgcttttcgtcattcaaatccaatccaatatcaaatatgagtcgtcatcccgaggttaagtgggctcagagacttgacaaggtctatatcacggtgcaattggctgattc

SEQ ID NO: 25776 - DNA, 436 bp, Glycine max
gactctttcacatcacaagaagtacaattggtctctttctttttgtgtccaaaatggctcctagttctactcacaatactgggttctatgtgcttatgctagttgggatagtgattagcactatggttgctacctgtgctggtagcttctaccaagactttgatctaacatggggtggtgaccgtgctaagatattcaatggtggccagcttctatctctttcccttgacaaagtctctggctctggcttcaaatcaaagaaagaatacctatttgggaggattgatatgcagctcaagctcgttgctggcaactctgctggcactgtcactgcttactacttgtcatcccaagggccaacacatgatgagattgatttcgagtttttgggaaacctaagtggggacccttatattctccacacaaacatcttcac

SEQ ID NO: 25777 - DNA, 406 bp, Glycine max
gataccaaaaacaaaacacaagccaagtgaaagtgagaaaaaataaaaatcaaagagcataatgtcagggatcattcacaagattggggagacccttcatgtgggagggcacaagaaggaggaggagcataagggtgagcaccatgctggagaatacaaaggggagcaccatggtgaacacagtagtgagtacaaaggagagcatcatggtgaacacaaagctggagagtaccatggtgagcacaagccagagcacaaagaggggttcctagacaaagtcaaggacaagatccatggtgagggcggcgccgccgagggcgagaagaagaagaaggagaagaagaagaaggagcatggccatgaacatggccatgacagcagcagcagcagtgacagtgattaaact

SEQ ID NO: 25778 - DNA, 432 bp, Glycine max
agaaggggagggttagatggatgagcttgcttgtaggactttggaacgtcggggttgccctcatgggcgccttcctcatcttgctcactttccgcctctgtcatgcctccttcttgcttcccttcgtcctggtttccttcgccgctttgcttagggttctgctcatgattcttaccgcttccgcccaacaagccgctgccaccctcatccttcaacactcctcctccgatctccttatacgcctccgccgaaggctttagctttacttcaaagccatggaaactctaccgaatcctatgaagaatccatggaagcaccagagatgaaaattagggaggctgaagctcttcataaatttgctgaagctgcgtacacgggtccattgcttgatgttggacgaaatccatttgtatttccttgtgcatggctgta

SEQ ID NO: 25779 - DNA, 330 bp, Glycine max
tgtgtcatttcaaagcgaagaaagattcgaaaggaagggagaaagttttgtgaagaatggcgcaagagggacaggtgatcggtgtccacagcgtataggagtggaaggaacatctcaagaagggagaagagtccaagaaattgattgtggtggattttactgcttcttggtgcggtccatgccgtttcattgccccaattcttgcagagtttgctaaaaagttgccgaatgtcaccttcctcaaggtggatgtggatgaattggagactgttttcaatgagtggggaaatgaggctatgccaacctttctgttctttgaaagaatgcaag

SEQ ID NO: 25780 - DNA, 367 bp, Glycine max
gatctatgtgatcattgttgtactaaaaaaatgtatcctagatctaccctctattccttcattcattgatggtttcaagagcagcaatagtgttactcataggtcttgtgggaatgttttaccagggcactcaactcccccctccaaacaacagtgattcatcagatgatggtgttccagtttcaccaccaagagtcagactcagagatgggaggtacttggcttatagagaaaagggtgtccccaaggaccaagcaaaacacagcatcatcattgtacatggctttggaagctccaaagatatgaattttctggcaccccaagaactaatagatgaattgggtatatatattctgcaatatgatcg

SEQ ID NO: 25781 - DNA, 346 bp, Glycine max
acgcccacgcgtacgtacaagacgacagaaggggatcttgacaaggatgacaattatagaaaagatgatgaaagtaagacttcaagttcaaagctttctcacgagagcaaggcagatgtaagggctgccaagaccagtggctttgatggtgacaatgacctagatgctgcgaaagttgcagccatgagagctgctgaattggttaataggaacttagttggggctggttgcttgactactgaccaaaagaagaaactgttgtggggtggcaaaaggagtacacctactgaagagtctgggccatcgttggatacagctatgttttctgatcgtgagaggcaagaaa

SEQ ID NO: 25782 - DNA, 315 bp, Glycine max
gacaccaacacatccattcattgtcttaatgttagcaatgtcttcctctttctccatccatttcttcctcctcctctcaatagcccttttctcagtttgttgcttagcagcatctcaagctcccaccaccaaatcacacccctatatccttcccattaagaaagaccccgcaacaaatttgtactacacttcagttggcattggaactcctaggcacaactttgatttagtcattgatctttctggtgaaaacttatggtacgattgtgacactcattacaactcatcatcctacagacctatagcttgtggctc

SEQ ID NO: 25783 - DNA, 383 bp, Glycine max
  modified_base (31)..(31): a, c, g, t, unknown, or other
  modified_base (194)..(196): a, c, g, t, unknown, or other
  modified_base (210)..(211): a, c, g, t, unknown, or other
  modified_base (296)..(298): a, c, g, t, unknown, or other
  modified_base (310)..(311): a, c, g, t, unknown, or other
  modified_base (338)..(339): a, c, g, t, unknown, or other
  modified_base (363)..(364): a, c, g, t, unknown, or other
cggaattcccccgggtcggacccacgccgtnccgtacgggctggcgaaaaagaacaacaagaagggggggttagggtttttttctttagaatttggagtgggagaaagtgccatgcggattaagaaaatttatttcaattaggggtttttggttttacctttcctgggctggtttggagaaacccttaactagnnngtttttagaatgtnntggataattggttttaagaattccggggctttttgttggagggagaaggaaggggaaaaaaagggggaagaatggtaatgaactnnngatgatttaatnnttgtgaaatttgtcaatggtgaagaannatttgtacccgatttgagggctgnngaattgggtttcaagaaag

SEQ ID NO: 25784 - DNA, 429 bp, Glycine max
atgttcatttctcttgcaacaagtaactcgttcagattttggtttttgcttccctatccgccctctcttcttcacttcagtatggcggtggtaccttacaccaccggttctgcacctcttctttctcctccttctacttctagtgttgccacaaagctctactccggattgaaacttcaagctgcgagtcctttcggagctgcaaaacctaacgtaaccgctgagttttatggaaaagttcacaacactcttcactgtcggtatgctaaccacaatacatcaatggcacgtattcgaatgatgccaatagggactcctaaagtcccctataggacacctggtgaaggaacttggcaatgggttgatgtatggaacgccctttatcgagaacgtgttatcttcattggacaagagatagatgaagaattt

SEQ ID NO: 25785 - DNA, 418 bp, Glycine max
  modified_base (8)..(8): a, c, g, t, unknown, or other
agtaacgnatatttttaaaaatggccgggagaacatttatatttatgtataatagaaaaagaatactaattggggctttccgttggtagaaaaaataaggcagtactccccagaattccgatccagagtatacttccatccaccgattaaataaataactatcagaaacgaaataatcctttaatttttggaagtccccttttattttacttacacaaaaaagactaggataagaacgaaaaaaaaagtgatcccccttttcttgtttgtcttatatccatatttatggagatagaattcatgtcataatttaaaaaatgaacatgtataattctttttcgtaatcgaaaatgatgagggagttattgataatttgaaaagagtattttatggaagaattaaattattactcaacaaa

SEQ ID NO: 25786 - DNA, 335 bp, Glycine max
gatagacatttccgtggtgtgggattggccaattcggccactctcctctgagaaagcctccagcctctcctccaaagtcccctgcggttcgttcggttattcttcgaaccgttgtctgaagtttacaactcaaaacttcaccgaacgcatttcattcaccaattcgtccaagtctcgtatcaatcaatcagcctatccgtcttgcggttggagagatcggaggggagagcagccatggcgcatcgagtagaccacgagtatgactcatctgtcaagatcgttctgatcggagactcaggtgtaggcaaatccaacttcttctccgggttcactcg

SEQ ID NO: 25787 - DNA, 387 bp, Glycine max
  modified_base (52)..(53): a, c, g, t, unknown, or other
  modified_base (65)..(65): a, c, g, t, unknown, or other
  modified_base (67)..(68): a, c, g, t, unknown, or other
  modified_base (81)..(83): a, c, g, t, unknown, or other
  modified_base (94)..(95): a, c, g, t, unknown, or other
  modified_base (103)..(104): a, c, g, t, unknown, or other
  modified_base (114)..(115): a, c, g, t, unknown, or other
  modified_base (144)..(145): a, c, g, t, unknown, or other
  modified_base (153)..(154): a, c, g, t, unknown, or other
  modified_base (166)..(166): a, c, g, t, unknown, or other
  modified_base (168)..(169): a, c, g, t, unknown, or other
  modified_base (201)..(202): a, c, g, t, unknown, or other
  modified_base (223)..(224): a, c, g, t, unknown, or other
  modified_base (237)..(239): a, c, g, t, unknown, or other
  modified_base (287)..(288): a, c, g, t, unknown, or other
  modified_base (305)..(305): a, c, g, t, unknown, or other
  modified_base (325)..(325): a, c, g, t, unknown, or other
gggttttcgatcacgagataatttatgtaggttgggaccgggttaatgaaannaactagggtcangnnaattaattgactnnntggatatttgnnatgctttnncaaatgtgtnnttgactgggttgaggtaccgaagaaccannatgaattnncttggatcacangnntctcagttctttacccttccaaacacactttnngcggaaatgaagaacagcagnnaatgaaagcactnnngcttttggtacccagttggacccggcaagctctttgatggatctacannaatagcaaccaccaaanattgggtggcttactttgcnagctaccaagacacaaaagtggctggtggtgcgatctatgcctttgctcaatgtgttgaaac

SEQ ID NO: 25788 - DNA, 131 bp, Glycine max
  modified_base (16)..(16): a, c, g, t, unknown, or other
ttgggttgatgatcgnttatgataaatcaaggattaggtgtttattgagtgattaaaactgcctgaaagcaagttaaatgtttatttgctgtgaattgagtctgaaattacattttacaggtacaaatttt

SEQ ID NO: 25789 - DNA, 305 bp, Glycine max
atgtatcaaaagcacaagggctatagctcagttaggtagagcacctcgtttacacgagcgccaatgtttttttcagaggagtttcatcttgtaatcaaaagagtttatcttatagtaagaaatcgatgtcttactccattttaaggaacaaaacaagagaacaatagcctgacaaagggtttagccataaaatcgaatccatcattgatttgagatttgataaggtgaatactcatttctcgcaatgctaggcataatgcgggtatagggacctaaaaaagattatcttttcttcctatcttatg

SEQ ID NO: 25790 - DNA, 425 bp, Glycine max
tgtgattcaatccaattgaattctccagagagaggaggaaacttaatcgatcatcacttcacttcactaatacatcatggcagacgagacccagaacaagtatgagagctctgaggttgaggtccaggatcgtggtgtttttgactttctcggtaagaaaaaggatgaagaagacaagcctcatcctcaggaggaggtcatcgccaccgagtttcaaaaagtcactgtctcagaccaaggagagaacaagcacagcctcttagaaaagcttcaccgatctgacagcagctctagctcttcaagtgaggaggaaggagaagatggagagaaaaggaagaagaagaaggaaaagaaagggctgaaagagaagatcgaggagaaaatagagggtgatcatcatcatcacaaggatgaggacacaagtg

SEQ ID NO: 25791 - DNA, 419 bp, Glycine max
tgggttcctgttaaggctcaatttgagggtggggaggtgggtgtgcccgctgagaacgatggctgcaaatgtggaccaaactgctcctgcaacccctgcacttgcaagtgaggtgttgggagagcaagcttcaagcagagatagcccttaattaggaataatgataaactattaatgtgtagctaaaaacttatgtattatgtctgtgatggttttcgtgcactctggtgttttgtgttaaacaaacatccttagaataaagtggtcatgtcttgcctttcagcaagttcaagtgttttggacttgtgatgggtgtgttaagctcatggttgcttctttttttttttttttaatgttttgtaattggtcgcttctgtataaagttcggcttatctgaattatgaatctctgcttataat

SEQ ID NO: 25792 - DNA, 52 bp, Glycine max
  modified_base (20)..(20): a, c, g, t, unknown, or other
  modified_base (43)..(43): a, c, g, t, unknown, or other
  modified_base (45)..(45): a, c, g, t, unknown, or other
  modified_base (47)..(47): a, c, g, t, unknown, or other
  modified_base (49)..(49): a, c, g, t, unknown, or other
gagacctcaggtcaggcggngctacccgctgagtttaagcatncnananaaa

SEQ ID NO: 25793 - DNA, 242 bp, Glycine max
aaacctattagttagggcaccatttcgacttttattgtcgatgaaaatatacgcctgcattcctgaaaatttaaagaacatgccacttggcattgacaaaccttgtctaggctagggctagtttgtgctggaccagtctgatgggtgaatggttattgtgttgttgaaagttttctgtgactggtttccttttttgggtggttaagctgattggaccaagctgttgattggtcatgtatata

SEQ ID NO: 25794 - DNA, 430 bp, Glycine max
atctgagacctcccttctgctcttcatttagacctagtcctcactttgagcccagtcaaatgtcaccttgaactaggattttagacctaatgtttcttatctaggcttcagtcttaaatcttgcagattcacaaccaaaatgagcaccaacacgaacatccattcttgtcactatttcaaaattaccactgcattcacatgtgatctttagtaatatttttttaacacttaataaaaatgttgctaaaatcttttggcaccatttaaaactatcgttaaatataaataaatgttattaatatatttttgtgacattttatcaaattgcgaaaacatattagtgacatttgtttatatttgatgtcattttttaaatgttaggttaaattactcatttggttcttatagttttacgattcttacctttttg

SEQ ID NO: 25795 - DNA, 424 bp, Glycine max
gatttatttattcatgagataagccattgcattcgctcaagtgagaaaaaaaaagtaacaaaaataaacaccaaaaacagatcagaacagagcaacaaccatggtgattcacagactcgaattgtgcataaccatggttcgactagccatagagttcgtcgtgagcgtcgcggaaacagtggtcatagttcaacagagaaccgctgagcctcttggaacgttgaatcgcgcaagtacacctcttcctttctatggctacctccgttgagttgaagaatatctcttatttattttcttttcttctgtgaaattccgcaatttgtatagaccctatgttttcttttccttttgggtgcatcaaacgctgattgatgcaaacccagttgttgttgttgtaaagaaaattgatgcccttttttttttt

SEQ ID NO: 25796 - DNA, 430 bp, Glycine max
gtttcttttctcacatattcaaaacttcaagtctaactggtagcgtttagcactattgcaataattcctgagctgcagtgagtcaaaactcaaaagggcttcagtgaatcatgatttagatgaatctccaatttgtaggtatattactactgttttgattactgatttggtaattgcttctctacttaaatcagatgggaacacattagctactgcagcagcacaattgaagatttttaactgttctaatcacaaaaagattcaaaagttctctggtcatcctggatctgttcgatgcatgcttttcactgaagatgggaagtatgtcctctcgtctgctgttggagaaagatatgttgctgtttggaggatagatggtgctaaaaagcagtcagctagttgtgttcttgcgatggagcaccctgctgtc

SEQ ID NO: 25797 - DNA, 142 bp, Glycine max
  modified_base (9)..(9): a, c, g, t, unknown, or other
gatcggcanggtctctcctttctttaaatcccaatattttctgggccgattttggctggaaccggttggtggtattcctaaaaatctaagatttccattcgtttgttgaccgatttttaggggtgataattacgtttttttt

SEQ ID NO: 25798 - DNA, 384 bp, Glycine max
  modified_base (162)..(162): a, c, g, t, unknown, or other
gaaggtagtatttcctgaacaggtagcagcaatctcacaacagagaaagcgatcgagagagaaaaagagagagaaatggagcttcatgaccatgatttcttggaggaattaatgtctctaagaagagaaacatgggatacaaatccatgttcacaagaaaanagcttttctctaatggctggggttttgatggtttgatcaaaactatcatcaagcttttcctccaaactctttctcttgccaacaagttcctcaaagttacaaccacgactacacctacaatgaaatctatagttccttacttcacgaattctctgcaccacaagttatagattcatcatcctataacacccttgatagtactccacataataccccttcttt

SEQ ID NO: 25799 - DNA, 359 bp, Glycine max
  modified_base (26)..(26): a, c, g, t, unknown, or other
  modified_base (51)..(51): a, c, g, t, unknown, or other
  modified_base (65)..(65): a, c, g, t, unknown, or other
  modified_base (71)..(71): a, c, g, t, unknown, or other
gggccgacccacgcgtccttcctccnattttacaacacaactttgaatttncagacacagaaatnaagctngggctagtttttttttttcttttgtcaccttccatctctcccttcacacaagggacgaaaaatcatacacagatatagagatagtgagagaaattccaaaaccatgtcttcccacagtcatctaaatttctcctttggggttctaggtaacatctcctacttcttgttcttactggcaccactaccgacattttatagaattcgtaagaagaaatcaaccgaatggttccaatcaataccatatgtggctgcactcttcactgcaatgctttgtatcttttataccta

SEQ ID NO: 25800 - DNA, 331 bp, Glycine max
tgattgcaccttataacgacgtcgccggagaactctccgccgctccgttctttgaccttccgaattccaatgacttcgatgggttcttgaaagacgctattcagatggtgaagcccgcgaagggtactacaactcttgcttttatatttaaagagggtgttatggtagctgctgattctcgagctagcatgggaggatatatatcgtcgcagtctgtgaagaaaattatcgaaatcaatccgtatatgcttgggacaatggctggtggtgctgctgattgccagttttggcacaggaatctcgggattaagtgtcgtttgcatgagttggc

SEQ ID NO: 25801 - DNA, 408 bp, Glycine max
ttttgactccaaacgagccatttgggagttaggggctggacgctctgcttccagcgagtgttctttcttcgtttcaacaccttaatttgcacacgctgcttcttcagcttgagaaatggcacaagaaacctttctattcacatctgaatctgtaaacgagggtcaccccgacaagctgtgcgaccagatctctgatgcagtgctcgatgcgtgccttgaacaggaccctgacagcaaggttgcctgtgagacatgcaccaagaccaacatggtcatggtctttggagagatcacaaccaaggccaacgtagactatgagaagattgtccgtgacacatgccgcgaaattggattcatctctgatgatgttggtcttgatgctgacaaatgcaaggttgttgtcaacat

SEQ ID NO: 25802 - DNA, 332 bp, Glycine max
ttaaagaaggggtccagccccttaagcacttctctctctttcgaatttgcttggaaaaattgtttccttgaagaaaatctaagccggggcgctttcgaaacgtttccgtaacgttttccgtgaggaatctcgcaatggtttcaaccgttcttctacgttcttcattcgttcttcatcgttcttcgatcttcaacgggtaagtacctttaaccaatcttttcgattttattctatgtacccgtatctgtccacattgtgtttcgtgcatttttattcttgttttgtttactctatataccccctgttgacctgcttaaaccattttacttaat

SEQ ID NO: 25803 - DNA, 125 bp, Glycine max
gcagcatccctgcatcaatgggcgcttctctgccccccaaggaggccaacctcttcaagcttattgtcaaatcatatgaaaccaaacaatataaaaagggtctcaaagccgctgatgccattttg

SEQ ID NO: 25804 - DNA, 395 bp, Glycine max
tcttgttgatgtttgagattcatgtatccgattctcagtgaaatcttcttttccgggtgtatgatcaattccactgttaggcgcaggacccatttagttcaatccttctcagttgctttcctctattggttgtactacgtttcatgatttctaaaccttccttagtctaataatcatctactactagctattattattattattattattatcatcatcatcatatataataaaatctatctgcaatattatttttctgagtttgtgtctagttagtgtctgggtcctggtcctgccaattgtgtcaattaattgtattgaatcataaaagatggcttcctcaagtggaacatcttcagggtcatctctgcttcagaactctggttctgaggagg

SEQ ID NO: 25805 - DNA, 311 bp, Glycine max
gggggaaggggaccaaccgttgctctgcatctatcaacaaccagagtctacgttgggtgtatgaaatctgcacctgtcctttctagactggatgtctgattccacgaacctgagttttggaagtttggagaagaggggatccaatacttacaacatgcatctgggccgatatatgccaactcaatggatctggccacttacattttcattaaactgcccagtccgcataaatatgctgatgaagatgtctcactcgttgcatgactcattggtcttgaagttcgagcatattgatgaccgcaatatgtgtt

SEQ ID NO: 25806 - DNA, 422 bp, Glycine max
gccttaatctatgtttttagccctaagcaggatggggcggtggtctgaaaaattcctttccaagatgaattgggtgcagcctggccatttgttgatccattcatgggagacaaaaaatctgtctaatttgctcgtagcagccccatttggtttgaaccatgtgaattttctccccacactaagtatttcttcaatctctaggtcagctatccattcattgaaatcaatgatattgttggcttccattcccctatgagacacaccctctctttcagattgatgtctgatgctgttaaaatctcccaggaagcaccacaatccatcaagaccatgatgtcttagttgcttgattgattcccataattccctcttattcagattatcacatggggaatatatgtttactatagttgctttttgat

SEQ ID NO: 25807 - DNA, 453 bp, Glycine max
ccaatccttccccaaaattacaccaaagggttccattcttgtgggaccttccaacctgggtgacccaggggagtttaccatgttagagcttgctcaggttgtcaaagaaacaattgattcaagtgctacaatagaatacaaaccaaatactgctgatgatccacacatgaggaagccagatattagcaaagccaaggaactgctgaactgggagccaaaaatccctctgagagaagggttgcctctcatggttaatgatttccgaaatcgaattctgaatgaaaacgaaggaaaagggatgaaataagcataatagcaaaccctgtatgtatatggagatgagcttgtctccttcatttttttgttcttatttgcggtcagcatcaacagaaaaattctggcaacacgtcactttttgtagaagatatacctactgctggccttttacattta

SEQ ID NO: 25808 - DNA, 285 bp, Glycine max
gatgcatagcaattcccggttcgtaattgtttaaacctaattctcatttcttcatcgttcgattcttctcctcctaaagatgcagatcttcgtgaaaactttgaccggtaagaccatcacccttgaggtggagtcctccgacaccatcgataacgtgaaagcttagattcaagacaagggagggatcccacctgaccagccgagacttatctttgccggttaaccgcttgaggatgggcgaacccttggcggctaccacattcaaaagggattcactcttcacct

SEQ ID NO: 25809 - DNA, 96 bp, Glycine max
ggatccatgggcatatgctagggttgtccttcttctcctccacacaccgagagggctggctggtcagaaatgagaatggcttcagcattgtccctg

SEQ ID NO: 25810 - DNA, 418 bp, Glycine max
  modified_base (55)..(55): a, c, g, t, unknown, or other
cgggccgacccacgcgttcgggcttctttatttctacttaagggtatagctgcancacacaaagcattgaattcggggacgtaagttcattccttgtgttttgctttcttcctcaaaaccaaacatgtcgaacacatgcggcaactgcgactgcgctgacaagactagctgcaccaagggaaacagctatggtgttattgtagagactgagaagagttacatcgagactgttgtcatggatgttccagcagctgagcatgatgggaagtgcaagtgtggcactaactgcacttgcacggactgcacctgtggccattaaggaatatgtatgaaaatgtaattgccatgtgtttggcaatacaaatattcaaataatgtaatcttcgtatgaataaatgtgtgtgctgttatccaaatc

SEQ ID NO: 25811 - DNA, 370 bp, Glycine max
gacaacctcaaaccacacaaacacacacacctctgcttccctctctctctctctctctcaaccaatgcaatcattcattcactaaaaaaaaaattaaaacaccatgcaacaagcaattccttataggtcatggcaacctctcatcacacccaccaacgccaacaccactcacttcacaattagcccacacacattagtaaccttttccacagtgtctacaacagaattatctctaaaagacgatattggttcggaaccgaataacaacatccataatagtgataatcctttctttgtttcctccaaaatggtgcccaacatggtcttagagagcgcgattatagtcttcgctaggcgtggttgttgcatg

SEQ ID NO: 25812 - DNA, 418 bp, Glycine max
ttaatgttactctgaatcttaaggaacaaccggataaactattgagattttttgtgctgcttaatttgcaatgataattatacttttctgccttctggagtaatctacttgtttattactggggcctaacccaagaaaagacacttcactttaggcctaggctaaataatagtttttggtgggaactttgacagagactaaattttgcaaaataagcttaacttgaaagtggttacaactatttctacagtttcatgctgcttattttaatcaaatatttcccattagcaggctaattcaattataccaattaccaagcaaagataggttagtatcatgaaattatgaattgtaacaactgctctttcttgtcaattagttgtctgttgtaggattagatgtggaaatgctggttttt

SEQ ID NO: 25813 - DNA, 393 bp, Glycine max
  modified_base (18)..(18): a, c, g, t, unknown, or other
  modified_base (47)..(48): a, c, g, t, unknown, or other
ctttcgtacgataagacnacagaatggcatttatgatcttaagaaannaatcaagcaagtggggccggaaggtatcccccctgtgggagtccactaatcacaaacggtaagacgattgtttttccgccaaccggctcggtttgagtattcagatactgttataaaatatgaaataaatgatcttatcaccaactaataactgttgaatgtgttagttcaatctaactactggaaaaaatatggaccaatataaattctagctttctttactaaatattttgaagactatgtcagtgttactttttttaacaacttgatgtcatgtttaatattttgtttttttttatatttaacctttatatgatactgcgtgttttattctcataataaaat

SEQ ID NO: 25814 - DNA, 426 bp, Glycine max
gttcttcattagacattgaaataaatgacctctttccagggagctctatagtagattgaggccaaccagttgtgaatttatcatcgtctgtaagcacccttttgcatgtttcaggtgttgtcacaattacacttggatttccaaacatcaaggtcttgtacattccagttcttccatatcttcatgatttgttgattgaatcaaaaacgttagtatcatcaactatatgatgcacaaatatgatatacgtatcaaatatttcacatgtttaggatgcataaacatgatagatatgtatataaagtttataaaataataaatatatgaagtaatgcatgtactgatatttttatgataattttgttcactataataataattactttaaaatttaaaattgatgttaacgataatttctgattaatt

SEQ ID NO: 25815 - DNA, 412 bp, Glycine max
gagattcgcctggttgagaaatgtgtccagatgttcatctagattagtggttccattgttctgatctaggttgagtggtttccaacctagggatatgtcagcttccatgatatgatcgacaaagggacgttgataggtagtctgctcttcttggtggtgtatgtgtgacagaatgggatcatcttgggtgttaacagtttgtcaggggtgtgattccccttgagtgcactcatgcattgtgtgggcggaatgctcgttgccctgggggcattgtacatgagcctccaactagtcgtggttagccttcatatttttaagcttctcttcatggtgtcgctccatctctacaatgcgggtttgaacttgttggagaataccaatatatgtcatggttgttgggggcgaaaggggt

SEQ ID NO: 25816 - DNA, 431 bp, Glycine max
gaagctatgaaaggcgcctatgataggcagataaagcaaagaggctacatcatcaagggtgatggtcacttctcttacaggaagatgaaaactcctagtttccttatgtcatctctctgcaaaagcctatataagtctctgatagccagtgtccaatgaacatgcgataagaaaacttaatcttgtggtagtaactaagcctttaatctctacatcaagctcccgaatttctgaactttccttccatgggaagataacttcaattcaggatggtcctaaaaaaatgaatttaataattttaacaataataacaaatacttattgaaatataacttatttaaaaatacaaatacctcttcattatagacaatgactgcaacatgatcaacatagccaatcagaattgacgtgtcatgcggtccgctgggaaa

SEQ ID NO: 25817 - DNA, 418 bp, Glycine max
cagtacaagcataaggcatgtgctgccctgctggatccgtcgtcagcagcaccgcttgtttggccatccccattaaagttcatcagtgagctcaatcaggaagcaaaagccttactggaaaaggccttactagaagctaacagggagggggagaagaccatactaaaggagactgacatgcctccatccccactgcattcagagagtgaagatgataacattgcctctgaggtacaaaattttcctttcttgactgcttcagagtttagatttataagttttactttgatgcatttcaatgtttagtttggttaaagattatatactttggtagaagtcccaagaatgttctttgggacccatgaatgttatacaatactatttcatctgcaatgtagtctttggtaggttagtcact

SEQ ID NO: 25818 - DNA, 409 bp, Glycine max
ggggtggcagaagagcgaacccaaaactagagctaccttcccttcaaaccttccactcttctctccttttccaatcaagggaataatatttcttagagatattccgaaaccatggctcacgccaatcctatgatttttgttgttggaattctaggtaaccttgtctccttctgttgctttctagcaccagtaccaacattctatcgagtttgtaagaagaaaaccacggaaggtttccaatcacttccttacgtggctgcactcttcacttcaatgctttggatattttatgcttacataaagacgggcgaaatacttctcatcaccattaacgcattcggttgtttcatagagacagtttaccttgtcatctatatcacttattgccccaagaaaagctaggtcttta

SEQ ID NO: 25819 - DNA, 420 bp, Glycine max
tgactattttagtgcgagctgaattcaactcaaggatcggggctaatactgttcttgtgcagatgcctctgccatcatttacatctcgtgttacttttgagttagaacctggagcagttggacacaccactgattttaaggaagcaaataaaagactggaatggggtctgaaaaaggttgttggtggatctgaacatactttacgagcaaagctgacattttcacaggagttacatggaaatatcatgaaagaagcagggcctgtcagcatgactttcaccgtacctatgtacaatgcttcaaggcttcaggtgaagtatttgcaaatagcaaagaaatcaaaagcacataatccttatcgctgggttagatatgtaacccaagcaaactcatacgtagcacggttataattggaatctc

SEQ ID NO: 25820 - DNA, 419 bp, Glycine max
gatcaaaccaagacatagcaaacgatccaaactgttttttcatttgcagcatcaaaatgagtggtagcaacgatggtagcggcagctggagctctaggtttttgaaggtggctagtgcagctgccgctacagccgccgttgccggcggtttatatgccattctttcatcctcaacctctgctagctctgagatggaagtgccgtttggcagcgcacggcgtgagagcaaagaacgtgacgatggtggctccgggtctcatcctcgcgagggtgccaccacggtcagtcgttggaagaaacctgagattggttgggtgaagctgaacgtggatggttcacgcgacccatacaaaagttcctccgctggttgtggtggtgttctgagggacgcatcagcaaagtggctccgtggctttgct

SEQ ID NO: 25821 - DNA, 358 bp, Glycine max
gatttcactgagtgtagtaatcaatcatcttttgtttgttcttcagtactttagtgtgtgatttaattccaagattttgagaatgtctagctgtgggtgtggaagtagctgcaactgtggcagcaactgcggttgcaacaagtactcttttgacttgagctatgttgagaagacaaccacagagactcttgttttgggtgttgggtctgtgaaggcccaattggagggtgctgaaatgggtgttgcagctgagaacggtggctgcaactgtggatcaagctgcacctgcgacccatgcaactgcaagtgaggtcaagatttataaccttgaagcagaaataactgtaatatatgtatc

SEQ ID NO: 25822 - DNA, 417 bp, Glycine max
ggctccgcttgagcagacttaacaacagcgcagagcgggttactgtctgttcaagctaccatctctctctctctttcttagtgcctccttgccagaagttaaaatggcccaagaaactttcctattcacatctgaatcagtgaacgaggggcaccctgacaagctctgtgaccagatctccgatgctgtgctcgatgcatgcttggagcaggaccctgacagcaaggttgcctgtgaaacctgcaccaagaccaacatggtgatggttttcggagagatcacaaccaaggccaacgtggactatgagaagattgtgcgtgacacatgcaggaacattggttttgtctctgatgatgttggtcttgatgctgacaactgcaaggtcctcgtcaacattgagcaacagagtcctgatat

SEQ ID NO: 25823 - DNA, 426 bp, Glycine max
tttacgttagaaggggacttattaattgtgtggagagatttaagtgaggagctagagaatgatgatgaagtctgctatgtgtgcagtggtggttgtagcacttcttcttctggcggaggtggggcccatggctgaggctgtgacatgcaccccaacagagttgagtccgtgtcttccagcaatcacttccggtgctaaaccttccaatgcttgttgcacgaagctgaagcagcaaaaaccatgcttatgtggctacctcaaaaacgctagcttgaagcagtatgttaactctcctaatgcccgaaaaaccgttgcttcttgtgggattccctttccaacttgttaattaattaagccttcttataattaaagtgtgggatatatatatatatatagataaacagtttaatttatacacactttgat

SEQ ID NO: 25824 - DNA, 403 bp, Glycine max
aattggaagatggtctgctttgtgatgctggatatgaatttcctcaatctttagaaagtgccagaaacaatcagatggttgaagaagctggcacctcaggatcgtcctcagacagtcaaagagtgagacagatagtatctccatcagtctcctctcagaaatttggatccctctctgcattagatgctaggccaagttccatttcaaaaaggatgacagatgagttagaggaaggggaaattgcagtatctggtgattctcacatggaccatcaacagtctggaagttggattcatgatcgtgatgaaggtgaagatgaacaagttttgcagaaaccgaagattaaacgtaaacgcagtcttcgtgttcgaccttcccatgccactgaaagacctgaagaaaa

SEQ ID NO: 25825 - DNA, 363 bp, Glycine max
atttctgaatgacatatttgaaaccctactcaaagcactttcagattcatctgatgaggttgtgcttctagttcttgatgttcatgcatgcattgcaagagatccccaccacttccggcagcttgttgtttttctagtgcacaatttccgactagataattctcttttggagaagcgtggtgctttgatagtccgtcgcctttgtgttcttttgaatgctgagagagtctaccgtgaactttctacaatattagaaagagaatctgactttgattttgcgtcaattatggttcaagctctgaatttgatcttacttacatcatcagaattatctgagattcgagatcttttgaagcaatcact

SEQ ID NO: 25826 - DNA, 476 bp, Glycine max
ccgggccgaccccacccgtccgcggcctcttggccaaaattacgacagaaggttagatttatgcgagcaagagcctttcacaggttggggccaaaaggcactggagatatgcttatcctcttcctagaggaaagaagtgatggggctcctcctctacttgatagttatagggatgcgaagagtaggattataccttttcttggtaaatggaaaggtcattccatcacaaaacgaagtggtgtgtatggatctacaattgctaatgctgatactgttgtgttgcacgatatggatgacaatggccaacttatgcaggatgttacttcaagttcaacttttgatggggaaaatgttactaccaatgtgcattggactggcacagtatcagactatttggttacatttgatggaggttatcagatgatactattacccggtggcatgtacatggggtgcccttgtgatgtagcaaaaag

SEQ ID NO: 25827 - DNA, 421 bp, Glycine max
gttttagtgtgtgattgtttgttgttgtaactcggtcttcttcttttgttgttctgtgtttgtgtttgttttttctctcacctgaaaatgtcttgctgcggtggtaactgtggttgcggaagctcctgcaagtgcggcaacggctgcggaggctgcaagatgtacccagacttgagctacactgagtcaaccaccaccgagaccttggtcatgggagtggcacctgttaaggctcaatttgagggtgctgaaatgggtgtgcccgctgagaacgatggctgcaaatgtggaccaaactgctcctgcaacccctgcacttgcaagtgaggtgttgggagagcaagcttcaagcagagatagcccttaattaggaataatgataaactattaatgtgtagctaaaaacttatgtattatgtct

SEQ ID NO: 25828 - DNA, 425 bp, Glycine max
  modified_base (407)..(407): a, c, g, t, unknown, or other
tggggttctagtgtgtgattgtttgttgttgggactggttcttcttcttttgttgttctgtgtttgtgtttgttttttctctcacctgaaaatgtcttgctgcggtggtaactgtggttgcggaagctcctgcaagtgcggcaacggctgcggaggctgcaagatgtacccagacttgagctacactgagtcaaccaccaccgagaccttggtcatgggagtggcacctgttaaggctcaatttgagggtgctgaaatgggtgtgcccgctgagaacgatggctgcaaatgtggaccaaactgctcctgcaacccctgcacttgcaagtgaagtgttgggagagcaagcttcaagcagagatagcccttaattaggaataatgataaactattaatgtgtagctaanaacttatgtattatgtct

SEQ ID NO: 25829 - DNA, 420 bp, Glycine max
cgctcttgtgattaaactcgtcgggtccgcttaggggttcccatcgcaatactcgtcacgcattaactcgtcgcccttaaagggtcttatagtcgtgtgattgtgctacaattcatagctcacaactcaatgcacacaacatctcaatgcacatatatattacaagtcaatactgttagaccctaatttcgtccgggaactattattcactgatgttttgattctcactaattgaaaggtgttgttgacaccagtttctacacaaggcgtgagatcgttcgatgttttggtcaaggatgcgaaaaatacctaaggggaggggaaaaatttcattttaggcaattttctggaccctggctcgcctggccccacaaattgcttagggctgaaagaaccaactcacctgggcgagccagtttc

SEQ ID NO: 25830 - DNA, 410 bp, Glycine max
ggggtttcattcatctttctcaggcaagcatgaactctcgatcactctttgccttcctcttcgcaatttgcgcgcactccgtcgccgttgccgacacctcctccgcgtatccttccatccccggcacggaaaccggtgagtgctccctccgcggcgtgggcgtgggcgacggtgttctggttcctccacggcgagaagtatacgaggaggggcgaatcttcgacatcactcacagatatgtccccgagatgccggtgtgggactcgacggaggggctcgggcaacacttcctgtggctcgataagagcatgaagaatggctcgctcgctaacagctctaacatgaagctcggtgttcacacccgcacccatgtcgacgccgcccgtcacttttacgacaattactacgac

SEQ ID NO: 25831 - DNA, 422 bp, Glycine max
  modified_base (380)..(381): a, c, g, t, unknown, or other
gcataacattgttttggccactatttttggtttgtcatattctttatttagttaaaaacaaatttatactatttttatgaatttcccttacctaagtgacaagctttgtacgtatttttctttttcttaagaaacacacagaacaaacatattaagaaatttttttctctcatcctccgtttattctttttacagttggaccacatgtcaaagcacacaaagggcttttgtgaataattgttaattaggaccgtgttgttcaagggagggcttgtcgaaaggacaagattactgctatctatttcaacattagcaatcaatgattttttggacaaatatcaagcaaattgagaacaaaattgttcaataaaagaggactnntaatcctttttagtcttcattatttgtggcactatgcgttg

SEQ ID NO: 25832 - DNA, 406 bp, Glycine max
  modified_base (8)..(9): a, c, g, t, unknown, or other
  modified_base (50)..(50): a, c, g, t, unknown, or other
cacactcnngatttgactcggtgtttatttcagaagacgacagaaggctnttgtgtgctgcaatacattatagactgtggttatctttgagcatgaaacatggtaaccttgttatatatttttgctcttgcataaatattttggggataatttcttgatgttggttggatatgttgtccagtgttatatgttctatttaacattctatgtaactatggaaagaatttgactttaaaaataaattgttttatagaaattgatcggaaattgaatttccttattctttcatttgactcttactttacctttatttgtcattcacattgttatttttttaaccaaatttttattcttgaacaatatttctatacacttattacttacaattaacaaactttttactctt

SEQ ID NO: 25833 - DNA, 426 bp, Glycine max
gccacacacctacccaagtgccaaaatgaaagcccagttgggccttttcttgctcatgattcttgtcaccttcactagcaatgttaacactctctcgattaatcccaaatctaactcttcaattcctcaattgacccaacagaaaaggcctgacaatgagaccatatatagggtgtcaaagcagctatgttggggttgcattgcggagtcactagagtttttgttcaggcacaacttggtgagagcagccaagtgggaacttccactgatgtgggacttccagctggagcaatacgcgaggtggtgggctggtgaaaggaaagcagattgcaagctcgaacattctttcccagaagatggtttcaagcttggagagaacatttattggggtagtggctcagcgtggacgccaagtgatgctgtaag

SEQ ID NO: 25834 - DNA, 361 bp, Glycine max
gagcgattctattttttacacatttctatgaagcgatcggttcgtccataccattggtagagcttgtaaaaccacgactgatccataaaggaatgaatggaaaaagtagcatgtcgtatcgatgaagaattctaaaaatatttcattctcttataggatccggccagaatttttgtttgtgaattcttggctcggaacaaaaaaattcagttgggtttaattaataaagggatagagcttggtgactccaattataatagggaaacaaaaagcaacgagctttcattttttttatttgaatgattaccccatctaattgtacgttaaaaaagatttaatgcttgatatgggaaaagctttt

SEQ ID NO: 25835 - DNA, 421 bp, Glycine max
gaatgtgcatgagtttgttgtgagctataagctagtttatcgtgaggagaatatgaagttgtttgttttctttgttgctgcagtagttttggtagcatggccatgccatggcgcaggctaccaaaggttccctctccgaatgaaaactggctatggtgagcgttcttcggaggtaaaatgcgcaagttttaggcttgctgtggaagcacacaacatccgagcctttaaaaccattcctgaagagtgcgttgaaccaacaaaggactacattaatggcgaacaatttagatcagactctaaaacagttaaccaacaagctttcttttatgctagtgaacgcgaaatccatcacaacgacatatttatattcggcatagattacaccgtactctctaatatcccatactatgaaaaacatgga

SEQ ID NO: 25836 - DNA, 425 bp, Glycine max
tcattaattgttttgtgtactttcactataatttcggttactttcagttttcttttcttccgtttttaacgtgctttagtcatttacttaagtcattttctcgcctaatcaaaaaaataaaataaatttccaccgatcatttgaattgtaacatccattaatttctgttaaaatgaaattcgaccgttcggtcttgccgtaaccacgttggaaaccaaaaagaggtaaaataataatataataatcaaaaatatcttttagtaaaataaatcaaaaaaatcaatcggacgtttttctttgggatttctctttcttaaatcgaatcgactaataaccaaagtgaaactaaggctaaaatcaattcataaaccaaacttttgtcatcgcctaaaaaagccattttcaaaggtccaacgccttgaaat

SEQ ID NO: 25837 - DNA, 414 bp, Glycine max
gtcttattaaattggttagagaagcttggtgtctttcctgagtctggtgtgagtgaaggtgatatgtttttgtctgctaaccaagctgaggcatctttgagggaggatgcacgggtatacatgatcttagctagtatgagtgtcgagactacaaaccctgtgagtgatataccattggtgagagagtttccagaagtgtttgaggaggtgtcaggattaccaccagagaaagaggtcgagttctctatagacctagtgcccgactgggttcaagtgtggtataaactatcagccttcaaccgttgttcctggaggtgaccttgccagggtgcagagggctgtgtgcatgatttctaactccaccagtgtagctgaagtgttctcaaagattgatcataagtttgatctcatgta

SEQ ID NO: 25838 - DNA, 463 bp, Glycine max
gccgtcggaccggttgcaaaagaactcaaatgggggattttattgcaataaggttagaaatgggatagggtttgggaaggttgaaaatgagatgagaaaagttgtgaattggatacgatagtttttgtggtattttaccgagatctaaaagaaagaacgaaaaatgcaggatatataagctgacaaaaaaaaaaccctgtaatgtgaaagtattagaaattcaagaagacaaacaaaatgtagcttactatagtagaattcaatttggagtggtaaaagaaacccttaagttcgaggtttataagacatgtgtgatggagtatgtattaatttgagaattctaagcgcaaacaataaagacttttctacaagggtatatatttttgtgttacttagggctgaaccatagatagtattagatatgtttccttgggatataaaaaaaatctataaatgcatgctt

SEQ ID NO: 25839 - DNA, 426 bp, Glycine max
  modified_base (282)..(282): a, c, g, t, unknown, or other
ttcgctttaggaaagtctcatggtatagctcgatagggggtctagataagcacacccatacaatgattttctttgttgttttaatgctctccaaaaaagctggtctccatcgctaaacaacaacgtcatgatcggccaccatccatgacccctcaaacaaagcatgtctataatctttctccgatgtgaattgcaccagatagtaataatctggcatgtctacaattcgaattttaccatattgggcccaaccttgttgtaatttatactccaacatcttanaccccactgtctttctaagaacatgtaccacaagagaacccttccatggtgcacaccagacaacacattcagaatccagaatattcacaataggacaagagataaaatccttctcctcttcacttttgtcccttgacattttat

SEQ ID NO: 25840 - DNA, 62 bp, Glycine max
  modified_base (15)..(15): a, c, g, t, unknown, or other
tgtgagatctcaggncaggcggggctacccgcggagtgtaagcatatcaaaaaaaaaaaaga

SEQ ID NO: 25841 - DNA, 419 bp, Glycine max
  modified_base (15)..(15): a, c, g, t, unknown, or other
  modified_base (364)..(364): a, c, g, t, unknown, or other
aagtatttgaagcanatgagtgatttataattttacgattttgttcataattattttagccaagtgtggattgtttttaattttttttaaactatactaatttactaatttgtttttattttgcttttttattatttttatgtgtctcatctcttgttaggaggctagtttttggttcttgtgtttgaaactaagtacccaattttctgagatgagaaaaaagaccaaaaactttttttttttatcagcaaagactaaaaaactttgatataaaataaatgcatttattgttatgattctattctcttaacccgaagtgttgaaatcttttataattttccccccattgtatagctaagtttcngtaggtggtggttttgtgacatatgtttggtagtgaaaattaaatattcgcatgg

SEQ ID NO: 25842 - DNA, 292 bp, Glycine max
aaaaaaattaattaataattttttatttaaaattaaatttattttttttttaataattataaattttttttttttataattttttttttttattttttttttttttttatttttaaaattattttttttttatttatttttttattttattttattattttttttttattaattatttttaatttttaatttttcaattctatattttattaattttttaaattttttatttttttaaattttttttattttattatattttttacttttttttaaatttataattttttta

SEQ ID NO: 25843 - DNA, 456 bp, Glycine max
  modified_base (20)..(20): a, c, g, t, unknown, or other
cgggccgacccacgcgtccnacttctctatagactacagaatggttttctcaaaaacagagaagagaggggggtaggttatttttgtagaatttaaaagacgatctcacataagacattatttatttgaatttattacacaaatattatatatataataagttgttgattttcataataaacatcttgtaaaataatttttaattgattgataatgtaaaaaatactaataatatatgtcaagggatctaattcattagttgagaaaatacattagttatgttgttttttattcttataatatcaaattttaggtttgaatatttttacttattttttatataattagaagagaaatgaaataaaaaagacataaaataaattatgaaataatgttacaaagacaggataattaacgcgagaataaataattaagtattgtaaactattttgaatt

SEQ ID NO: 25844 - DNA, 104 bp, Glycine max
  modified_base (16)..(17): a, c, g, t, unknown, or other
  modified_base (29)..(30): a, c, g, t, unknown, or other
  modified_base (53)..(54): a, c, g, t, unknown, or other
  modified_base (62)..(63): a, c, g, t, unknown, or other
  modified_base (82)..(82): a, c, g, t, unknown, or other
  modified_base (84)..(85): a, c, g, t, unknown, or other
ttcaccggattggcannaccatgtcgagnngagaaagggttagagaagccaannaggaggannaaacgtgactttctgggcncnncagctgttaagaagaatgg

SEQ ID NO: 25845 - DNA, 368 bp, Glycine max
aggacgcacttagcaatcaatcaacacttccaattgcgatatacacatcttcaattaagccatgactctctctaagcttatagttgcttcccttcttgcctcgcttctccttcttcatcttgttgatgctgatcaatcggcacatgtacaaacgcaggggtctcttctgcagaagatagattgtaatggagcatgtgctgcgaggtgtcgtttatcatctcggccacgtctctgcaaaagagcctgtggaacttgttgtagacgctgcaactgcgtgccacctggcactgctggaaaccaagaagtgtgtccctgctatgctagtttgactactcatggtggcaaacgcaagtgcccttagacttaaa

SEQ ID NO: 25846 - DNA, 460 bp, Glycine max
ggtcgacccacgccttcctaccggttgcaaaaaaccaacaaaggggtttttttcttggaaaattccaaaccagggtcctggggagctgatccaagtttcatggttggaggtatccggcgtggtaaacttaccaggtgtcaagaaatatagggttgaattcgaagtgagagttaaagacgatgggttcggttggagtggcacggacgtgctagtgatggctaagattgggaaaacgggaaaatatacgtataaggtgacgaaactaaaccctggtgaaaccttgaatattccaaaatcaactgacccacttgagattcaagtgaacaagcaatctgaggaccttcactttggattatatgaagtgtggagcggaaaatggaagggaggccttgaaattgtcagagccctcatcaaacctttaacttaattgcatgcaactcatcataccatatatcgtttt

SEQ ID NO: 25847 - DNA, 374 bp, Glycine max
cagaggggggtgttagtatttaattgtttgttgtccaaactcgttcttcttcttttgttgttctgtgtttgtgtttgttttttctctcacctgaaaatgtcttgctgcggtggtaactgtggttgcggaagctcctgcaagtgcggcaactgctgcggaggctgcaagatgtacccagacttgagctacactgagtcaaccaccaccgagaccttggtcatgggagtggcacctgttaaggctcaatttgagggtgctgaaatgggtgtgcccgctgagaacgatggctgcaaatgtggaccaaactgctcctgcaacccctgcacttgcaagtgaggtgttgggagagcaagcttcaagcatagatagccctt

SEQ ID NO: 25848 - DNA, 428 bp, Glycine max
ttccgcttgcaaaagaccaccatatggggccccattattcctttccaaaccaaaccagaccaaggggggggggtgtgaaaggtgaaccaaaaaccagaccaccattggcaacactaaaggttcctaagccttttccccccgttgcaaataattgtaaccagttccaaaaagccttctaaggttggggaactaacaaggagctgattgtatcaatcttggctcatagaaatgctgctcaaaggaagctaatcaaaaaaacttatgcccaaacctatggaaaaaatctcctcaaggccttgaccaaaaaactaacaagtgattttaagaggctggttcatttttggacacttgattctgctgaacgtgatgcatttttggcaaacgaggcgactaaaaaatggacttcaagcaatcaggttctggtggaa

SEQ ID NO: 25849 - DNA, 466 bp, Glycine max
  modified_base (17)..(17): a, c, g, t, unknown, or other
  modified_base (21)..(21): a, c, g, t, unknown, or other
  modified_base (61)..(61): a, c, g, t, unknown, or other
  modified_base (413)..(413): a, c, g, t, unknown, or other
cgggccgacccacgcgnccgnactgtttttatttgacttcagatttttgtttgacgagggnaaggtcgcgttgtcgtgcgtggtgtcatgcgctgttcctctgtctgtcgtttttgttttcagaccaaaccctagctccgcatcgcaaccatgtcgaccaagcaaggtggaaaagctaagcctttgaagaaacccaagtctgataagaaggattacgacgaggttgacatggctaacattcagaagaaaaaggaagaggagaatgcgctaaaggagttgaaagccaatgcgcaacagaagggaagctttggaggttctgggctcaagaaaagtggaaagaaataaaggctctttatcatgattgtatacatccaatattgagccctgtagtttattaccatgattacttctgncttattgtggccttctttattgctctaatgttagtactgaactgaggtatttc

SEQ ID NO: 25850 - DNA, 379 bp, Glycine max
gagagtggtggggtgtgcaaaagagcgtcgcaggtgtaaccctaatcagaagaagcgcagcttcaagcgagtgacagccaccagccatgggtcgtatgcacagccgcggtaagggtatatcctcttctgctttgccctacaaaaggacacctcctagctggctcaagatctcttcgcaagatgtcgaagaaaatatctgcaagtttgcgaagaaaggtttgaccccgtctcagattggtgtcattctcagagattctcacggtattgctcaggtcaatagcgtcactggcagcaaaatccttcgcatcctcaaagctcacggacttgcgcctgaaattccagaggatctgtaccatttgattaagaaagcagtttcaat

SEQ ID NO: 25851 - DNA, 413 bp, Glycine max
  modified_base (51)..(52): a, c, g, t, unknown, or other
  modified_base (54)..(54): a, c, g, t, unknown, or other
acccacgcgtgcggctttaaccaacagatgggattcaagttcctgacgaanncngcaacagcgcgcatggagggtttaacaagctcgcggagttattggaggtggagagggttggcgtctgccatcaggctgggtctgatagtttactcacttcttgtacatttagaaagttgagggatacgttcttcagtggctccacggagaaatatgctggtgtcttgtatggtttaggggttgagagtggacagactaattgaaattgaaagagaaaaagaaaaaaggaaagaagaatataattggatgtagagtacgttttaagtgtgagtctctttttacttcgtgtacacttctgccaaaaaatggttgttgtttacttgtaacattttcatcatcatccttgcttgaactgtaac

SEQ ID NO: 25852 - DNA, 421 bp, Glycine max
  modified_base (22)..(22): a, c, g, t, unknown, or other
  modified_base (25)..(25): a, c, g, t, unknown, or other
tttttattttgcaagagtttgntgngagctatgagctggtttattttgaggagaatatgaacttgtttgttttctttgttgctgcagtagttttggtagcatggccatgccatggcgcaggctaccaaaggttccctctccgaatgaaaactggctatggtgagcgttcttcggaggtaaaatgcgcaagttttaggcttgctgtggaagcacacaacatccgagcctttaaaaccattcctgaagagtgcgttgaaccaacaaaggactacattaatggcgaacaatttagatcagactctaaaacagttaaccaacaagctttcttttatgctagtgaacgcgaagtccatcacaacgacatatttatattcggcataaataacaccgtactctctaatatcccatactatgaaaaaca

SEQ ID NO: 25853 - DNA, 353 bp, Glycine max
  modified_base (334)..(334): a, c, g, t, unknown, or other
cctaattaaggtgaaaatgaaggcatcacccattgcttggttcactttggtggttgtgtttcttgtggctgaagttcaagtttcaatggcagtgacatgcagcccagtgcagctgagtgcatgtgtaagtgcaataacctcttcaacccctccatcaaacctatgctgctccaagatcaaagaacagaaaccatgtctctgccaatacctcaagaaccccaatctcaagaagtttgttgactctcctaatgcaaggagagttgctagcacttgtggaactcccttcccaaagtgctaagtgttaataaattggaaagaggtttaatttctctgnctgattatgcatcttgata

SEQ ID NO: 25854 - DNA, 477 bp, Glycine max
  modified_base (12)..(12): a, c, g, t, unknown, or other
  modified_base (39)..(39): a, c, g, t, unknown, or other
  modified_base (72)..(74): a, c, g, t, unknown, or other
  modified_base (83)..(85): a, c, g, t, unknown, or other
  modified_base (118)..(120): a, c, g, t, unknown, or other
  modified_base (128)..(129): a, c, g, t, unknown, or other
  modified_base (140)..(142): a, c, g, t, unknown, or other
  modified_base (149)..(150): a, c, g, t, unknown, or other
  modified_base (157)..(159): a, c, g, t, unknown, or other
  modified_base (172)..(173): a, c, g, t, unknown, or other
  modified_base (185)..(187): a, c, g, t, unknown, or other
  modified_base (198)..(199): a, c, g, t, unknown, or other
  modified_base (207)..(208): a, c, g, t, unknown, or other
  modified_base (236)..(237): a, c, g, t, unknown, or other
  modified_base (247)..(247): a, c, g, t, unknown, or other
  modified_base (250)..(250): a, c, g, t, unknown, or other
  modified_base (256)..(257): a, c, g, t, unknown, or other
  modified_base (262)..(263): a, c, g, t, unknown, or other
  modified_base (271)..(273): a, c, g, t, unknown, or other
  modified_base (287)..(287): a, c, g, t, unknown, or other
  modified_base (289)..(290): a, c, g, t, unknown, or other
  modified_base (297)..(299): a, c, g, t, unknown, or other
  modified_base (318)..(319): a, c, g, t, unknown, or other
  modified_base (325)..(326): a, c, g, t, unknown, or other
  modified_base (333)..(333): a, c, g, t, unknown, or other
  modified_base (335)..(336): a, c, g, t, unknown, or other
  modified_base (351)..(352): a, c, g, t, unknown, or other
  modified_base (362)..(363): a, c, g, t, unknown, or other
  modified_base (380)..(381): a, c, g, t, unknown, or other
  modified_base (429)..(430): a, c, g, t, unknown, or other
gaattcccgggntcggacccacgcccgtccgtaccggcnttgcgagaagaacgatcagaagggggagagtannnagttggtgnnnaagttggattatttgtggtgagtattgagagannngtttcgtnnttaataccatnnngcattcnnaattatnnntaaacccttatanntgttttgggttnnntttttctttcnnttctggannaataagaaatgttttcattttcgtcgannaaattaatangcnttttannatttnntttagagnnngagagaaattatangnnaaataannnattttatttatttctttcnnaataannatatgtntnntggttttgggttttnntttttttaannaaaaaatattattattnnttattccggtggcttattaagttaccaagtaatttaatttgaaggttnnaccatttaccaaccgtgttgtaagtcgtaaaagcatgattaaagcga

SEQ ID NO: 25855 - DNA, 320 bp, Glycine max
tttcaaaactaaacaaatactaaaaccatataagatcgagttcttcatacccttatatttttagattatatacattaataacctcattaattaattcactttttttccattccaaatttttttccccctttccccaaaaactatatcaacttcttattatcgccacaaatatataatatctttcaaccaacttccactcaaacttctttttgttcaatatttaatttttttctatttttctttcaccctatccttttcttatatttccaaagatcttttccaaaattaaattttaaccccaatttatttataaatttttt

SEQ ID NO: 25856 - DNA, 441 bp, Glycine max
  modified_base (39)..(40): a, c, g, t, unknown, or other
  modified_base (42)..(43): a, c, g, t, unknown, or other
  modified_base (45)..(45): a, c, g, t, unknown, or other
tgtttttattttacttcagaattttaatgtgcacgagcnngnngngagctatgggctggtttattttgaggagaatatgaacttgttcattttctttgttgctgcagtagttttggtagcatggccatgccatggcgcaggctaccaaaggttccctctccgaatgaaaactggctatggagagcgttcttctgaggtaaaatgcgcatgttttacgcttgcttgtgaagcacacaacatccgagcctttaaaaccattcctgaagagtgcgttgaaccaacaaaggactacattaatggcgaacaatttagatcagactctaaaacatttaaccaacaagctttcttttatgctagtgaacgccaagtccatcacaacgacatatttatattcggcatagataacaccgtactctcttataatccatacttatgaaaaca

SEQ ID NO: 25857 - DNA, 417 bp, Glycine max
gggggccttttccttttttggtttttccttcaattcaatgggggggaggagaggagaggagggggaaccccagatcctttccttcctttccacaaaaaaaaggtttttcatcgctcttcttgccgattccgccatttctcatttcggattcgagattgttgcaggtgcattgcttttgcctctcgatggtatgttccccgggaagtgggagaatggaagtcatggccaggcttctcgctgctgagactttctctcacactgtagcagatgactttgcccgtgagaagttggctgctgagtatatttgtagagaactacgtgaggcagatgaaacaaatttgcttcaggaagaagatatgcatgtctatggtgagagccccatgactgatgccttgcagctggtatgctgcaacactt

SEQ ID NO: 25858 - DNA, 258 bp, Glycine max
acgggggcgaccgacgcttacgcccacgcttcctaccacataatggaactgtttttagaagacgacagaagttttcgggggcgggattactacggaagggttcggttgttttaagactacatatgggggctcttatcaattaatcaacacttacatttactatatacacatcttcaatttatccatgactctatctaagcttattgtgcttacctttttgcctcgcttctcctttttcatctagtagatgctgatcaa

SEQ ID NO: 25859 - DNA, 277 bp, Glycine max
ccggggcgccacgcgttctactgtttcatataatacacaagtttatttttcacagtaccaacatctccctgcggggggattgatttgcttcttccgatcccatcactaattgcatattgcaattcctctactcacaaaaaacctattcctataccctttctcttttcctgaacccaacacaacaactcaacacaggattaataaattaaattaaaatctatcttaaatcctctctctctctctttctcttttaacggtttgcatttctcttcctccc

SEQ ID NO: 25860 - DNA, 311 bp, Glycine max
agctgtttcctttaagaagaagatggatatgtatcaccgctggattcttaggatagcgtggggagcgttcgcgtttgttctgcttttcctatcggcctcagcatacgacgtcgttgtgctctctgaagataacttcgataaggaagttgttcaggacagaggagctttcgttgagttctatgcttcttggcgtggacactgtataaagcttgctccataatatgaatagcttgttaccatcttcaagaaagccaaatctgttttaatctgcataggttgactgtgatgagcacaataatttttgcatcaaa

SEQ ID NO: 25861 - DNA, 208 bp, Glycine max
aaaacaacaaaagggctcaattaagcaacactgccacttttacctggaaccgcactattaacacgtgtgcagggctcattaattacaattcactaaccttatactactattccaaaacaaccccatatccaccatctcatttttcacaaccaaatatttataccttccctaaatacaaaactcttacccattcacttcttcaaataca

SEQ ID NO: 25862 - DNA, 300 bp, Glycine max
  modified_base (140)..(140): a, c, g, t, unknown, or other
aaattatattttttaaataatatatataataattaaatttataaatattataatatttatatatttatatttaaatttaataataaattatatttaattatataaataatattattaaaatattatatataataaaattntaaaatttaatatttaaatataaaataaaaatatattaatataaatatataataatatattattaaaatttaaaaaatattatttatattataaaaataatataataataattatattaaaattaaaaattataaatattaaaataaatatatttaataa

SEQ ID NO: 25863 - DNA, 387 bp, Glycine max
  modified_base (8)..(9): a, c, g, t, unknown, or other
ccggaatnncggggccgacccacccgtccggacaacaaatgggggtgagagagcgaccgaccaaccagtttcaaagagaggatttgggattgggaaggcgagggattgcgctgcgtctcttcctcttctctttcgattcatccctcattcataatcttccaatccaacaacctcagcctcacacttacacatacacacatctgaacgcgtatcgtccctcccatggcttcaaagcgcatcctcaaggagctcaaggacttgcagaaagacccaccaacttcttgcagcgctggtccagtagctgaggacatgttccattggcaagcaacgattatgggtcctgctgatagtccttatgctggaggtgtattcctagtcactattcac

SEQ ID NO: 25864 - DNA, 182 bp, Glycine max
cggataaccgttatatttcttgcgctcgggcgtattacaaaccccgacttttttattgtatacatttattacataaaatgtcaacacatgctctgcctgttgctttgattattcatgataacttttcctatctcactgactttgagccctctacacatcattcaaattttttccctatcaac

SEQ ID NO: 25865 - DNA, 255 bp, Glycine max
gtggtgcttctcacccatcagggggcgattggtgaaattccaggacatgccgaaaaaccaaataaatattgatgcacaatccgtaagtttccgtcacacaccgtaaatcaaattgtatcatcgctgcataattaaatgaagttccctaacattccctaagttaaaaatgggataactatgtaatccccaaggttacgtaacattacggaaagaaaacatttatcatttcgaaattcataagtttacgtaacttta

SEQ ID NO: 25866 - DNA, 261 bp, Glycine max
gatggttttgcgctgttgttggggctcattctgcggaacctccgagctctgcaccgaataacgaatccatggggaagacatatggaatgggatctgctcgcaagctcaagtcccaccgcatgaggcataagtgggctgacatgtcatacaataaatcacatcttgtaaatgaatggaagaaaccttttgctggttcatcccattccaagggaattgtccttgaaaagataggttttgaggcttaacagcccaactctgcca

SEQ ID NO: 25867 - DNA, 474 bp, Glycine max
cccggggcgacccacgcgtgcgcccaggcttccgaacggttacaaaaagacatcagaagggatattactatggatcgagaggggataagagtatctactcggacactacaatggaaatgtgttgaatcaagaatagacagtaaacgtctttattatggacgctgtattctgtctccacttatgaaaggtcaagccgatacaatatgcattgcaatgcgaagagttttactcggagaaatagagggaacatgtatcacacgtgtaaaattagaaaaaataccacatgaatattctaccataataggtattgaagaatcagtacatgaacatttaatgaatctgaaagaaattgatttgagaagtaatctgtatggaactcgggacgcgtctattgtgttcaaatgtcctggatatgtaaccgctcaagacattattttaccaccttctgtggaaatggttgataatacacaatct

SEQ ID NO: 25868 - DNA, 406 bp, Glycine max
cgtccaccggctacaaaaagacgacagaaagggactccatacatcacacttaactgcgatctacgtgagacactaacaaaaatcaccccggccaaaaactcatgactcttacactttaacgcgcattatccgaactactcaccctaatagctaaacactcaatatttctaatgatccctacctttagtttcaaccccaaaaagctttataatgcttcatattattctccatctaattcagattggtcacctgcagaggacacttggtatggacctgccaatggatatcgaagagaatgaggagcttgtgcatatggtaacgctgttgggcaacctccattatattctttaatatccgcgggaagccctcttatatatgactctggcaaaggatgtggttcttgtta

SEQ ID NO: 25869 - DNA, 164 bp, Glycine max
gcatttcaacaattcttccataaaaaatatatagaatttcttttgcttaccctcttctcctaacacctaaaagatccctacttttcctatacaactacaattctttcactctttcacaccaaaatcttttcttattactgaaaacagtgcaattttgagtcttt

SEQ ID NO: 25870 - DNA, 227 bp, Glycine max
gattttcacatattcaacatactaataatgaaggaaggctgggtacttataaatgtaatgtcttctcaaaaggaatgttttgacctctctggacccttacatttaacttatgctgactgagataatgcatatcatcgaaagtctgttgctgctagttttgcccaaacgtgctatgttctaaagaaagacaagctagaacggcagtgaaagccctgatgctcttacac

SEQ ID NO: 25871 - DNA, 273 bp, Glycine max
attgtacaattatctacttgtaagaagttcagattcgggcgacaacatttgtaatgcagaattaggtcattaacattgtaaatcttctggcgatgattggaatatcaatgtgaagacgctatatgacttctgctatggcaatatcattgtggttgtcaaggtatttttgaagaaatatcgtggatttacaaagaatctggttaggcttctacaattctttaaggtgaagataacttcggctctttacacaagcatagaatgatattttttctt

SEQ ID NO: 25872 - DNA, 380 bp, Glycine max
  modified_base (20)..(20): a, c, g, t, unknown, or other
  modified_base (25)..(25): a, c, g, t, unknown, or other
aagacacagagggtagtttntaaanagatattgaaagtaagcatatccagacacataagggaatgattgggtgtggacggcagatccacgtgggcagtactcaacgcaaagtgcttacaatatgttgaggggggaagcaatagaggggatctaggatcgagcctttgaggaactgtggaagttgaaggtcccaaccaaattttcagtgtttgcatggaggctacttagagatagattgccaattaaaataaaccttcacaggagacaagttgaggtcaatgataggcgctgtccattttgcagcacgatggatgttgatgcatgacacttgttctttcactgcaataaaatcaaccctattcgggaggaatccttgtctt

SEQ ID NO: 25873 - DNA, 324 bp, Glycine max
agacgccaaaacgacagacaggttaatctacaataattataagaactataaagtgtagaagatattggatagctatacgatggccgattaaaaaataaatattcactaaagaccaaaatccaaaattccttatgaggcgatgcaaatacaaatggacagagatttgtgcaccatactgaagggcaagcgcatagaaatgggcattgcttgtctaaagggtttacttgactaaaagactggaacacttcggtcatcggcgttgtcagtgttaggtctcgatttcttaatatgttccacagtctatttctcacgctatcaaacttt

SEQ ID NO: 25874 - DNA, 239 bp, Glycine max
gaaaacgcgtgcggacaagagcaaaaagacgacagaaggggattctagtgtgttattgtttgttaatataactgaagcttttggttttgttattctgcgtctattttacatctttctctcacctaaaaatgcctttctgcaatgataactgtggttgctgaagctacttcaagtgctaaaactgctgctgatgcttctagatttacccatactttatcttcactgattcaaccaccacc

SEQ ID NO: 25875 - DNA, 378 bp, Glycine max
  modified_base (22)..(22): a, c, g, t, unknown, or other
  modified_base (118)..(118): a, c, g, t, unknown, or other
  modified_base (121)..(121): a, c, g, t, unknown, or other
aaagggccgaccacgcggacgnacaggcgtaaaaacggtttttttacgactttttgggacgacggaaaatggggctaatcgggggacataccctaatttcctctggagattattactngangacatgcaacctttagttatccgttttgacgtactagtcgttcttcgaagcacaataaatgaagtccctatacgtctcggaaatcaaaaggaaacatgcttgcgctatccaggatatttcttaatgttagctaatagtctataatagatgtttttgcgcaatcctcgagtttccgtaacttcttcgaaagctaaaaaatattaattacataattcacttagattcttagccttgcgcaagggaaataagtatctata

SEQ ID NO: 25876 - DNA, 418 bp, Glycine max
cactataataattgtacaggacttggaatccagggtctcacttaaggagattaagttcattaggagactaaaaacttgttggtaaaaatttaaatgtttttttatagagttacttttacttaataattgaaacaatttaatgtgttaaagttataaccttttcatttaatatttgtatttaaactatttaactaacttataattttaaattattacactacaacacatgtgatctttaataacattttatttttgtctaacacttagttaaaatgttgctaaaaaattttgttgataacatttaaaaaatgttgtcaaatatgaataaatgttactaatatattttcatgacattttatcaaatgttgtgtatagtccatggtgttaaaaaatcacatgtctagtggtgttattttat

SEQ ID NO: 25877 - DNA, 295 bp, Glycine max
aagacgacagaaggggtgaataatacaaatttaaataatattagaaaaatttttgaataatgattaaataagtccttcatatttttagagataggatacaaaatttacatggatatagtaagtcttgcttgggctgctttaatggtagttttttcattttctctttccctcgtagtatggtgaagaagtggactatagggatactcaaaattgagttaaggtatcaaagtaccctctttgttttctacttgggttttttaattttctttatcttttctatctaatttaagtattt

SEQ ID NO: 25878 - DNA, 309 bp, Glycine max
ggtgtgtgagttcattaacgtatacatattctctgtgttgtgttgtgtacttgtgttaattgtgttgttgttgtaggaaatttaagtgaagagagaatgatgatgaagtctgctatgtgtgcattggtgcttgtggcactggttgtggttgaagtggtgcccatggctgatgctgctgtgacttgcaacccaacacagttgacttcttgtcttccggcaattaattcatgttctgcacctttcagtgcttgtttccatatacttaatgagcaaaagccatgcttctgtggctaccttaaataccctatc

SEQ ID NO: 25879 - DNA, 286 bp, Glycine max
aaaaaaaaaaattgttaataataaaaatatataaaaatttaatatataaatttaataaaatttaaaatatattaaattaaaaaaattataaaatataaatattaatgtataaattaaaaaaaatataaaaaataaatataatataatatatataaaaaaataaatataaaaataataatttaaaaaaaaaaattaattaaataataataaaataaaaaaatatataaaataataaaatatatataaaatataaaaaaataaaaaaaaaatattattgatttataat

SEQ ID NO: 25880 - DNA, 314 bp, Glycine max
gatagctgtagcggcgacactaagatcggagaaagaatggcgaaaacgacgtcgttgctgctctttacactgctcctcttcggaaccctagctctcatccaggcgaagaaatcgaaggaggatttgaaggaggtgacccacaaggtttactttgatgttgagattaatggaaaagaagcaggtcgtattgtaatgggtctttatgggaaggctgttccaaaaactgcagaaaacttccgagcactttgcacaggggaaaagggaactgggtaaagtggaaagctctcattacaaggtagctcattcatagaata

SEQ ID NO: 25881 - DNA, 407 bp, Glycine max
agtttgttgtgagctttaggctagtttatcgagaggagaatatgaagtggttggttttctttgttgctgcagtagtttgggtagcatggccttgccatggcgcaggctaccaaaggttccctctccgaatgaaaactggctatggtgagcgttcttcggaggtaaaatgcgcaagttttaggcttgctgtggaagcacacaacatccgagcctttaaaaccattcctgaagagtgcgttgaaccaacataggactacattaatggcgaacattttagatcagactcttaaacagttaaccaacaagctttcttttatgctagtgaacgcgatgtccatcacaacgacatatttatattcggcatagataacaccgtactctttaatatcccatactatgaaaaacat

SEQ ID NO: 25882 - DNA, 421 bp, Glycine max
catccacttggttgttcaaagagaacaagggatggtacataccttgtggatctttgcttgtaaaggcttttataaggttgaaaagaaatctcaaggaccgcaggtcgcttggggactgtatgtatgcacgggttgttgccgaaccagtataaaattcttgtgtttgtcttcttcttccctacactctttaatttccgctgtgcactttaattatcgcttttacttttggttaagtttctatttctgttctttattttcttaacattatagtaaaagcctaattgaatctagtaacattaagaaggatatcttttaattagtaaaggttcattaataattaattcaatccccccttcttaattattccgaggccacttgatccaacaagatacaacagagtcagttctcaattattaaaatg

SEQ ID NO: 25883 - DNA, 356 bp, Glycine max
gtagccagaggcttcttgaggaagatttctaagcgcatcccatttactaagttcaccccccttttcatattttatggaaaagttacggaatccttacagaagtgttttggatttgattttaatcttttttatcttccctttcaccaatgttaagtgaaatatgcttacccatggttttcagaaattttacggaagcattacggaagccacgaaagccccaaaaaccatttttcaacaacgtggaggagcttgccgcccagttgcttcccccttaagcaatcccaattgcctagattcaaattgctatttacacccctatcttgataagttcacccccttatttttgtgtttttggg

SEQ ID NO: 25884 - DNA, 391 bp, Glycine max
  modified_base (138)..(138): a, c, g, t, unknown, or other
  modified_base (172)..(172): a, c, g, t, unknown, or other
  modified_base (178)..(179): a, c, g, t, unknown, or other
  modified_base (204)..(205): a, c, g, t, unknown, or other
  modified_base (248)..(248): a, c, g, t, unknown, or other
  modified_base (276)..(276): a, c, g, t, unknown, or other
atttccggggtcgatcccacgcccgtccgctccacgtcgtctcgtcccacgtcgtctcgtaccggctttgcgagaaagacccgacagaagggggagaagtgaagaagaatgggctcccaagggggtttaacctttctnggctgtgttaatatgcccgtttcagcactgtcanctgagnntccttctgttgcgggggatagggcnnaaaataatggccctttgttatgaaccttctacaagggaatcantgccctcatggctgaagacatcatcacnagaacaaagtcaatgcttcttctacaaagcgccacaaagaaccacttgctttctcctggctcaaggaacccatcttccatgactgtgcttgttcaagagtttgtgaatgcttcac

SEQ ID NO: 25885 - DNA, 421 bp, Glycine max
ccatcattcaaagtcataaccgatacctaaaatcctcattccaatcaaaaccaaccccaccatgcccacaaaattaagtcatcaaattaaagcaccgatgatcctcaatttgatccttgtgcttatttgtgtcactactccaatcaaaggtgagaaatcaaggaagcttgatgaggtcacaaacggtaatgagaagtgcacaccatgtgaaggtggttacaccccatcaccaccaatagagtatttatcaccaccaccaccaatagagtatttttcaccgccaccaccaattgtgtatccatcaccaccacccccttcacccaagaaaccaccaacgaagtattgccctccaccaccatcatcagcatatttgtacatgacgggtccaccggggaacttgtatcccgttgatgagaatttt

SEQ ID NO: 25886 - DNA, 416 bp, Glycine max
gagatctgaagtgtgtagagttaaagactgagagagacgaagccagagaaaaccaaaaaccttactctttttcacgcgacgccctagttcatttttcttctccgttctcttctctctctgttcttcactcactctcattcattcaccatgacgaaacaacatgccaattggtctccttacgataacaacggaggatcatgtgttgcgattgctggagcagattactgcgttatcgccgcagatacgagaatgtccaccggttacaacatcctcactcgcgattactccaaaatctcccaactggctgagaagtgtgtgatggcttcatctggctttcaagctgatgtcaaagctttgcagaaggttttgtctgctaggcatttgatttatcagcatcaacacaacaagcaaatgag

SEQ ID NO: 25887 - DNA, 331 bp, Glycine max
gatacttctccttcttttgaaataattttatgctctctaaaaaagttgtaaattttatgagatttggactcgaatatctgcttgcgttttttgctacactgaagtatacaatagaaagaagcatgacattatcttttatatgagggggcattgcacatggtcatgaggaagcgaacatcatataaattacaaagttaaaagcgaacgatattatcaactcttttatgccatttctattaacacgtgctgcaccaaatttacagatgcatttaacttattgtgtctgaacatttacatacaaaactatttgaatgtcaaacgtatttttata

SEQ ID NO: 25888 - DNA, 318 bp, Glycine max
aatgattggagatgggatggtgatcttttcactgctgaaccactcaattcagtgccatctgattgtaggggtcgccagttttccccacctcatcctgaaattcctgcaaaaaatgctaatccatctaccaccaatttgtcttattctgttttcatctcaggtgaaggaaagagggaattggagaaaaggaggaggggtgttataggtgaaagtgaaggtgagggactgaattatgaagctggttctcttagtttgaaccttgcgggtcaaggttaccctctcatggtggaagaagaaaaaaagagtggaaagaaaaca

SEQ ID NO: 25889 - DNA, 281 bp, Glycine max
ttggttccaatttttcaacccagtagttttccgtcaaagttcatttcatataccagtttatggtcttactaatctcaatacactagaactccaatgataacattctttttaagacgagtaaatcatattctggaaattaagctttcatagtaccattacattctttcatcctaatcaaatatacgagcacaaagtcctaagcaaatatttgatgatggccagggagggttgaatcgaggttagcaaatagcaatgacacattttgagtaatgcaacgcgtg

SEQ ID NO: 25890 - DNA, 285 bp, Glycine max
ccgggatttgagtacctgtaccggctggcgttccagctttccctaatgcgtgtcgacttaaaatgaggtactgtgtacaatatacgtctagcttgccattgataccattcattcgtttatgtgtaatgaggactggattgagactactacagcttttactgaggaccttagatgctcccaatagaagcaccgcgcctctctatagagctttttcttaagacttgaacacttactgcaacaatctctcgagcgcttaaaacatcttaaaaggtcactacttaaaat

SEQ ID NO: 25891 - DNA, 355 bp, Glycine max
gtaggaaggttgtttgttgggactggcttgggcctgggccctcctgttgcctctctgtatgtgacagaggtttctcctgcttttgtgcggggcacctttggagctttcatccagattgccacatgccttggtctaatgggagctttatttattggaatccctgtcaaagaaatatctggatggtggcgggtttgtttttgggtatctaccattccagctgctatacttgccacagctatggtcttctgcgcagagagtccacattggttatacaagcaaggaagaactgctgaagcagaagctgagtttgagaggcttcttggtgtatcagaagcaaaatttgcaatgtcagagt

SEQ ID NO: 25892 - DNA, 369 bp, Glycine max
  modified_base (320)..(320): a, c, g, t, unknown, or other
ggcgctcgtttgagaaacactgagtgtccctactctctaaccttttctctctcactaaccctaatcccaactaattcgaatttcgcttccgtcgtgtctccttccatttcacaaggtcaattcatcttaacccaattcttctctttctttttgttctttttctatgtagtctcttgttatttctgttccttaattccgcgcgtaggtacaacatttcacgccgcttaacgttagggtttcaaatttgacaaatcttgccaattcgtttttttcttttctccctcctttttaaagcaattcgccgattcggttaaagattntcaaaatccaaaatttcatgggaagcaacgataatttcggcgacgggat

SEQ ID NO: 25893 - DNA, 318 bp, Glycine max
ggtgtccaagcttatttgttgctttgtgcttaatggaaggcccttgagcttttctttctttctctgctctcttttcttttaggtttccactctcacacactctccctcttctctttctctgcaataatctctcttctcttcttcactctctcaactcctgccaaacccccatttccgcagttcttaaatttggagtctgatgtctccgccattgctggttaccgaagatgaagggcagtgccatgcctcgatggtagcatctgcatcttcaccatccctgaactgtttctccctaaatgaggccggatttaaagaatg

SEQ ID NO: 25894 - DNA, 407 bp, Glycine max
aaatataatgaatgtatagtcattggatgaagaataaaataatagaaatattccattttgaatattctatctcatgtatttactataaaaaaagtatataaatcaaataactaggattagtaactgaaaataataaagagcgagttggtattaaaaagaaatgataataaaatcaaaaataataagaaacattaaaaaaaaaagtacctcaataggggtaatctatttatctatttataagtccaattacttcatttagtgactattttttttctttttcctatattctatcttttatctctatacattttttcattttgttttgaagatcgatgcaaatttcatttctttttctggctatagaaaactacatcctatcattctatataaccacaagaaatagaaaa

SEQ ID NO: 25895 - DNA, 383 bp, Glycine max
gaatttgaggttcgacccaggcgtacgcgcccgcgaacacgacgccagaggggggcactgcaattgcaaccaaataaggtcattctgtttgcgcagttccctacctctcctttcaagatgcagatcttcgtcaagaccctcaccggaaagaccatcacccttgaggtggaaagctctgacaccatctactacgtctaggccaagatccaggacacggaaggaattcccccggatcagcaacgtctcatctgcgccggaaagcagctcgaggacggacgtaccctctccgactacaacattcagaacgagtcaacccttcaccttgtccttcgtgtccgtggtggcatgcagatcttcgtcaagactctcactggcaaaaccat

SEQ ID NO: 25896 - DNA, 415 bp, Glycine max
agatgtaaaaatatctgtgcctacccgtcttataagatttccaaagcattctggccccactgggcgtatcggatgtttgactcttattcgcttgcacaaagggctgcagatatgtggaagcgaatagttgggatgcctgacatggatagtctcattaagaagcctgatattttatcatttcacatagccagtaaaatacctgtgtctgagtctacaaggcaggagcttttggatattgatggcattgcatataggctgcgcaaggaaattgaattactagagagcattgatcttatccggtgtaaaagctgcgagactataattgcaaaaagaagtgatatgttggtgatgtcaagtgagggtcctcttagtgcatatgtgaatccaggtggttatgtgcatgagataatgactc

SEQ ID NO: 25897 - DNA, 291 bp, Glycine max
ggtgtgtgagttcattaacatatacaaattctctgtgttgtgttgtgtacttgtgttaattgtgttgttgttgtaggaaatttaagtgaagagagaatgatgatgaagtctgctatgtgtgcattggtgcttgtggcactggttgtggttgaagtggggcccatggctgaggctgcggtgacttgcaacccaacacagttgactccttgtcttccggcaattaattcatgttctgcaccttcgagtgcttgttgccagaagctgaatgagcaaaagccatgcttttgtggc

SEQ ID NO: 25898 - DNA, 415 bp, Glycine max
ttatggggaccgtatcatccaaactattggccatgcaattgagacccaggataacaatgatgtcttggcttattggttatccaatgcctctacacttctcttgttactccagcgcacactcaaggctagtggtgctgctggaatggctccacaacgccatcgttcttcagcaaccctgtttgggaggatgactcaaagtttccgtggagcaccagctggagtcaatgtttccctaatcaatggtaacacaagcagaggagtagatacattaagacaagttgaggccaagtacccagctctgctgttcaaacaacagcttacagcatatgtggaaaagatatatggaatgattcgtgataatttgaagaaagaaatttctcccttgcttggattatgcatccaggcaccgagaaca

SEQ ID NO: 25899 - DNA, 401 bp, Glycine max
  modified_base (304)..(304): a, c, g, t, unknown, or other
gagttctgcactgatgaagttcccataatagaatcaaatgagattctagttccttctgctccttcttccacttcaccaaccactactactactacatcatcttcaacatcaacatcagcatcttcaaattcaaattcatccaacttccttgaagaccttctgctcccagattttgagtggtctgatgattacaatgatactaattctgacaataataacaatagcagcatggccttgtgggatgatgactttattagaagttggaatttgcttattaatgatgatgatggtgatggtgacaganagcaagtgtttgaggctcctatcaatcagtacccaagagtgatcatggattcagattctcgggcctatggcttgttttgatttggaaattttttttc

SEQ ID NO: 25900 - DNA, 450 bp, Glycine max
  modified_base (15)..(15): a, c, g, t, unknown, or other
agaagggccctatantgtacgtggaaccctcaaaagggttggggctgaagaaaatctgtgtggttttctaaatggagggaagcgccaccaaaagggggtcacaatactgattagcgatcatgcccatgagtaccgctgtttctgaaaacaatgcctaatcaataggcctcctgggtgtgacttgggccacaagaaaaactccctaaggctggatgattgggtgttatgccggatctacaagaagggtaacacacaaaggtcacatgagagggatgattccatggacgacatgattggagaagtacctccttccatcaacgtgggccacatgaatgcgaggtttcacctttcaaagatgtccacgagctacagtggtgcattgttggaaaatgacagaaacacgttagaaggtgtggttataggcaatggtaatgtcaatggaatcaacac

SEQ ID NO: 25901 - DNA, 442 bp, Glycine max
agacgacagaagggggtgtgagttcattaacatatacaaattctctgtgttgtgttgtgtacttgtgttaattgtgttgttgttgtaggaaatttaagtgaagagagaatgatgatgaagtctgctatgtgtgcattggtgcttgtggcactggttgtggttgaagtggggcccatggctgaggctgcggtgacttgcaacccaacacagttgactccttgtcttccgacaattaattcaggttctgcaccttcgagtgcttgttgccagaagctgaaggagcaaaagccatgcttccgtggctaccttaaaaaccctagcttgaagcagtatgttaactctcctaatgccaaaaaaaaccgtagttcttgtggtattgcctatccaacttgttaaacacctcttatatatatatataaaatgtgtgaacaatatttttttt

SEQ ID NO: 25902 - DNA, 320 bp, Glycine max
  modified_base (227)..(227): a, c, g, t, unknown, or other
gacttttcaatacattttaaccactggtctagcaatattagagaagggtttttgtattaaaaaagttaagtcatataggctagtttatggcagggagtagcctgtttggttcctctctagactctattaagtctgatttggaaccaattgcacggccatccaaaactatgtatttcagtacctctggtactcagtttcatatatataaatatctatctttgctgaanaaaaaaaaaaaaaaaaaaaaaaaaagcgcgggctctctagaagacacaattttacacacgcgcgcgtgagacgatatatcttttatattgtgt

SEQ ID NO: 25903 - DNA, 437 bp, Glycine max
agacgacagaaggggatcacatcccaccttaaacccatttccataatcactttttcctactttcttctccatccatcccttgactaattaattatccctcacaactaccaatggccgaagagaaacaccacaagcaccgcctcttccaccaccacaaggacgaggataataagccagtagaaaccgatactggttacgacaacacatcatattccaagccttctgatgactatgactctggtttcaacaagccatcgtatgagtcttctggcggtggctatgaaggtggttacaacaaaacatcttattctagtgatgagccagcttctggtggtggctatgaaggtgggtacaagaaaacaagttattctggtggcattgatgagacttctggtggctatggcgcttgtggtggtggatactctgacgtcactgat

SEQ ID NO: 25904 - DNA, 407 bp, Glycine max
tggtgacccatacaatacaacacaagttttccatccacattgcacagttagcacttagcagactctgctgcagtgaggtgaggggaggtttgtttgttgtttcgtttttcctttcctttccgccagaatccgttgagaatggcgttgccggtagtcgtcgatgcagagtacctcaaggaggtcgacaaggctcgccgcgatctccgcgcactcatcgctaacaggaactgcgctcctctcatgctccgattagcctggcacgatgccggaacttacgatgctaagaccaagaccggtggacctaacggttcgatccggaacgaggaagagtattctcacggagccaataatggcttgaagaaagctattgatttctgccaggaagtgaaagcaaaatatcctaaaat

SEQ ID NO: 25905 - DNA, 407 bp, Glycine max
gacaccggttgttgacattggaagaggcattgtgcagtagcttcaatttttgtttcctgggagagcgagaagagtgttcggatttcaccattccaggtgacggcggaagatgcttctgtcgtcgatacgcagaggattcactagtcgagtaggtcccatacgaaccctctcttcgcactccgaaatgaaagactttctggattacctcgactccctcaaaaattacgagaaatcaggagttcccaaaggtgccggcaccgattccagcgacggtttcgatcttggtagaatgagacgcctcatggagcgttttggtaaccctcactccaagttcaaggctgttcatattgctggaactaaggggaagggatcaacagctgcttttgtatctaatattctgaggaatg

SEQ ID NO: 25906 - DNA, 299 bp, Glycine max
ccactcgttcgtacaggtgttgaagacaactgttagttttacacacaggtgtggtgcatcagaggcccgggtttcatgcctacttgcactgcgataccatctcttactgaaacaccccatatggcacctcaaagctcacaacgtaacataccttacgatatctaaggtgacgtcaccttcactaagagggatgatatggacatcagctccgttcactcttgcttatgctaattccatatccatggactatcaacacagaccatacttgtatgctaaagctcttcgtgtttgcgatactt

SEQ ID NO: 25907 - DNA, 337 bp, Glycine max
ggttctagtgtgtgattgtttgttgttgtaactcgttcttcttcttttgttgttctgtgtttgtgtttgttttttctctcacctgaaaatgtcttgctgcggtggtaactgtggttgccgaagcttcttcaagtgccgcaaccgctgccgaggcttcaagatgtacccagacttgaacttcacttaatcaaccaccacccagaccttggtcatgggagtggcacctgttaaggctcaatttgagggtgctgaaatgggtgtgcccgcttagaaccattgcttcaaatgttgaccaaacttgttctgcaacccctgcacttgcaagtgaggtgttggg

SEQ ID NO: 25908 - DNA, 369 bp, Glycine max
aatgattggagatgggatggtgatcttttcactgctcaaccactcaattcagtgccatctgattgtaggggtcgccagttttccccacctcatcctgaaattcctgcaaaaaatgctaatccatctaccaccaatttgtcttattctgttttcatctcaggtgaaggaaagagggaattggagaaaaggaggaggggtgttataggtgaaggtgaaggtgagggactgaattatgaggctggttctcttagtttgaaccttgcgggtcaaggttaccctctcatggtggaagaagaagaaaagagtggaaagaaaacaaaggtaattgggaccactacagctagtactaccacttgctttaatcgtgct

SEQ ID NO: 25909 - DNA, 418 bp, Glycine max
cttcgttcgttcttcattcttcatctggttagcatttgtctttaaggatttgaacatgattcatggacccttaggggtcctttttattgttttgtgcatctttatctccttctcttatcatcggtaattgtttttctcttgtaaagcatgttttaaccgatcattagtcctgcaagttatctttaaaaaaggttgaaggttaataagcaaaaaccaagataaaaccaactcataactaacttcctttttatcaaatatcacttgagatcgtttcaaggtccaacgccttagcgattctctcctctttacaaaaaaaaaaaagatcgtttcaaggtccaatgccttaacgatcctcttcgctttttaaaagtttgaaacatcgtttcaaggtctaacgccttaaatgacttttgttcgt

SEQ ID NO: 25910 - DNA, 317 bp, Glycine max
atctgaaggatcatctaacagggtagaaatagaaggactctcaccatcatttcgggacccagggaaacatgtatttgggtgtgagcactataagagaaattgcaagcttcgggctgcatgttgtggcaagttatttacttgcagattttgtcatggcaatgtccgcgatcactctatggatagaaaagcaacatcagaaatgatgtgtatgcgctgcctgaatatacagccaatagggcccctatgcataacaccttcatgtaatgggttttcaatggcaaagtactattgcaatatatgcaaattttttgatgatg

SEQ ID NO: 25911 - DNA, 327 bp, Glycine max
ggttctagtgtgtgattgtttgttgttgtaactcgttcttcttcttttgttgttctgtgtttgtgtttgttttttctctcacctgaaaatgtcttgctgcggtggtaactgtggttgcggaagctcctgcaagtgcggcaacggctgcggaggctgcaagatgtacccagacttgagctacactgagtcaaccaccaccgagaccttggtcatgggagtggcacctgttaaggctcaatttgagggtgctgaaatgggtgtgcccgctgagaacgatggctgcaaatgtggaccaaactgctcctgcaacccctgcacttgcaagtg

SEQ ID NO: 25912 - DNA, 268 bp, Glycine max
gacaacggggccgttccttcaaaaaccaaagccagaccgaccctgagaagaaaccaacaaacatgggacgcaagaaaacctacgaggaagaagaacgcacggctctattttcccattcccaaacacaaacagacctgctgctacccttgaacgagaacgacccacaggacatggtcatataccaagtcctccacgaagccaatgctctcaccaacacattccttcctcagcccaccagaaacataacaaagaagcactacagatgagt

SEQ ID NO: 25913 - DNA, 357 bp, Glycine max
gaaagaaaccaaagtctatttttttttggggctgagcctcccctcccctctctctaagatccccaaattgcttgtgaatgctagaaaccctagacagattcgattggatgcgctcccatttcacatcaagggcgagcgcattcggttcttgcaagcaagcctggtactaccgctgcctcggcctcgacccctgaatttgaaccattcatcaccacctttcttcattcattcacggttttccttttcgactcgatttgatggtttttttgttttgtttccttgacgatgtttaccaatagcaagcacaaaaagaaccggaacgcgaagaggctgctgataatcatcaatgtgctgggg

SEQ ID NO: 25914 - DNA, 311 bp, Glycine max
cccgctgcggctagacgacgacaggagactgcactgagagcacgaaccattactactgtggttcatgctgtcgcataacagtcatataactagaactacatgtatcatgattacgcacagccgttcaattcctggattacagcagtggacgctcatgcaccagtggcattgtggatgcctacacagacccatgcatatgcaggtagaatcatgccctaagatcacttcaacaccatgtcaaaaaccatgttgagtcattgtctcacgctaacaagctttctccttctgctgtgatatccacaacactcaaa

SEQ ID NO: 25915 - DNA, 274 bp, Glycine max
  modified_base (184)..(184): a, c, g, t, unknown, or other
gtcaaacacaagtgttatgcaacagataccctagattcaagcctacatgcaatgtgataccatttttcagtgaaaaaccttgtcgggcacctagaagtacacgatgagacatgcctcacaatggctaaggcaggtcactctcactaagtgaaatcttagggagatcagttagggtcactctgtnttgcgagaaatgctcaaccatgtaggatcaacacaagctttaaggagcactcatactcagtgtattttcaaaattaattttaactcatcg

SEQ ID NO: 25916 - DNA, 383 bp, Glycine max
gaaaatggaaagagatcactcgggatgatagttcttccttcgggaaggaatcagagaaggatgtgtcaagctttagccaaactactgggaaaaagaagaatgaaaagggcagtaagagcacatacaagaaaacctcatctttggatgataatgtcatttctccaatgaaagtggatacaaaaccactgttagataactcagatggtgggtttatcaattcaactaccactatggaagtagatacattaaataaggtagatcatgaggaaaaagttaaacacgccagaatttatgatgacaaggagcaaaatgaatctgtgcctggattggaccaaatttcttttgattggatgcctgattacaattttggatccctggatgtg

SEQ ID NO: 25917 - DNA, 273 bp, Glycine max
ttggggaaagaaaccaaagtctattttttttggtgtctgagcctcccctcccctctctctaagatccccaaattgcttgtgaatgctagaaaccctagacagattcgattggatgcgctcccatttcacatcaatggcgagcgcattccgttctttcaagcatgcctggtactaccgcttcctctgcctcgacccctgaatttgaaccattcatcaccacctttctttattcattcaccgtttttcttttccactcgatttggtggttttttt

SEQ ID NO: 25918 - DNA, 222 bp, Glycine max
gtcaaacacaagtgttatgcaacagagaccctagattcaagcctacatgcaatgtgataccatttttcagtgaaaaaccttgtcgggcacctagaagtacacgatgagacatgcctcacaatggctaaggcaggtcactctcactaagtgaaatcttagggagatcagttagggtcactctgttttgcgagaatgctccaaccatgtatgatcaacacaagc

SEQ ID NO: 25919 - DNA, 121 bp, Glycine max
ttacatgtattatttagttcacaactcttttcaaagtaagtggtcaattggaattttaaccttttatttgagtttattaagatgattaccagggacaaaaacctggttacctaatataaaa

SEQ ID NO: 25920 - DNA, 215 bp, Glycine max
  modified_base (40)..(40): a, c, g, t, unknown, or other
ggacggcaataccattcattcatcaacagcgatatgccgncaatgaagtttgtggtgaaaaaagcatggagcaatggtggatgtggtccggtaggaacactagagatgggaagctgcccgggacccataaagacacccggtcttcttctatctactcgtaaagggctttcttactttatcttccctgaactaattaattttcttcctttccccga

SEQ ID NO: 25921 - DNA, 316 bp, Glycine max
aaaagggaatcattgccgcatatgaatatcctattatcctctggcatgaacaaattgaaaccccaatttatgcatcacgaaagggggcattagaatggtctcaacacttgactattgagacaattagattagacaattggaaaaaaatatcgagacaattatgaattccattgagtctcccttacttgatcaaacaaccaaaaattcagttatttcaactacattcaatgatctttcaaatgaggcaagatcatccagtgtatggacgcttatctatggaactagttgatgcttcatcgaatttgcttcattaata

SEQ ID NO: 25922 - DNA, 526 bp, Glycine max
  modified_base (85)..(85): a, c, g, t, unknown, or other
  modified_base (98)..(100): a, c, g, t, unknown, or other
  modified_base (130)..(131): a, c, g, t, unknown, or other
  modified_base (196)..(197): a, c, g, t, unknown, or other
  modified_base (214)..(216): a, c, g, t, unknown, or other
  modified_base (237)..(237): a, c, g, t, unknown, or other
  modified_base (239)..(240): a, c, g, t, unknown, or other
  modified_base (265)..(266): a, c, g, t, unknown, or other
  modified_base (277)..(278): a, c, g, t, unknown, or other
  modified_base (289)..(290): a, c, g, t, unknown, or other
  modified_base (301)..(302): a, c, g, t, unknown, or other
  modified_base (331)..(332): a, c, g, t, unknown, or other
  modified_base (502)..(502): a, c, g, t, unknown, or other
ccggtccgtgatattcccggtgtcgatcccacgtcgtctcgtaccggtctgcatgaagaacgacagtaagggggagagcatattnatttccgtaccgnnntctttgtttttcgctttcgatcgttttccnnttctccaaatttatttgtacccgtattccaaccatctgggctccccaataaccgcgccgatgacnnttcactttcgctggccnnntctttgaaaaaaatcaacacncnntctttttcttcctttccttctgatnntccgattccannattccattgannatatggagaannaactctcctcaaagggatttcgagcctcnncagcacaaaaatcccttccgtcgaatgccctccgccgatggaagatcccgccgtcacttctcgtcaaaaaccaaccgccgccgcttccgcatggtcgccgatctcgacaagcgcgtccaagccgagcagattaagcaggggatcaaggttttttttctttcactttcctnctctttttttttatttcattatta

SEQ ID NO: 25923 - DNA, 402 bp, Glycine max
ggggttattggacacattcttcagcgactgcgtttttggatcggaacctcttctgcggcgtagcaatgggacactccaacgtttggaactctcacccaaaaaactacggtcctggttctcgcacttgccgtgtgtgtgggaatccacatggactgatcaggaagtatggccttatgtgctgcaggcagtgcttccgtagcaatgccaaggaaattggcttcatcaagtatcgctaaaagagcagttgtcaactacggaccaatattgtgttctggcactaagatgttttgaagatgttatgtttgaagaaacttgaaactttcttttttcatctaattaattattaaacgtaatttgtggtactaaagaatacttttatataaaatgggtttgaaccccttt

SEQ ID NO: 25924 - DNA, 212 bp, Glycine max
cacggggattgtgggagaacaaagcaatggcttcagctaaaaggtggcttccgctcgaagctaatcctgacgtcatgaatcagttcctttgggggcttggacttcgagaggatgaggcagaatgctgtgacgtttatggcttagatgaagagcttctggaaatggttccaaagcccgttcttgccgtgctttttctttatcccataaccacc

SEQ ID NO: 25925 - DNA, 358 bp, Glycine max
  modified_base (338)..(338): a, c, g, t, unknown, or other
gcacagcaatgacgaccaggaatgggcacagacaccacgtgagccggcgtacgtgcctacaacaccggtgactattaactccggggtcccaccgcgcgccttaacttccccgaactcttgttccaggacgacgaccaggagggcagtgattcggtgcagcacggcgcagcagggaacatgtccgctgattccattcgccgaaaagccacgcaagtcggcgccagagtcgacgctctccaaaccgcgcttcaccaccacgcgccaagtaccaactctctcaatctcaagcccgacttgaacgagtttccaaaactcgaagagcttcaagattgatatanatcaaatatcaatatcaatc

SEQ ID NO: 25926 - DNA, 380 bp, Glycine max
gaatcattgcgtcgtaggagtctcttattttcctttgtaatggaaagttagaaaccctcatcgtcaaagcacgcgttttttttaatctctctctctcaacaaatatttgtgggtagattcaattcaccatgtcgagctcatcggagtactctgaattttccggccagaaaccggcgaggtcgccggagaaatcgagcttctctcagacttgcagtctgttgagtcaatacatcaaggagaagggtagcttcggagatcttaccctcggaatgacatcatgtgggtcacctgagacatcttgtcaatctgctacaaccatgaacttgtttcctcccaaggaaaacaacgtggcaccaaagaacctgacagctatggatttg

SEQ ID NO: 25927 - DNA, 421 bp, Glycine max
  modified_base (40)..(41): a, c, g, t, unknown, or other
  modified_base (74)..(74): a, c, g, t, unknown, or other
gacagtaaggggctactttttctgttctgtatgctttganntaacttgtttaggttcgcatgttgataggtagnggaagttgtaacccgatggtgtgcggtgaaagagggtgcaataactgggtagaagtggtttgtaatagctcttccaaatcatcgagaactctcgtggtttctgagaattcgggaaagctatcaagtagctcatcttgttcagagaagaaataagaaaaatcagcatttgggtcatccatggtgatggcttcaccggtgcttcctcttacaatagcttccaaatcccaatctctcaagcacgcaaattcatccatcaaccaagttgcaactaattaagttataatatatcaagatatatcaaattaaaaatgaaaaaagaacttgaaagggggtgttggaccgtgtga

SEQ ID NO: 25928 - DNA, 359 bp, Glycine max
  modified_base (346)..(346): a, c, g, t, unknown, or other
gatcatccaacatcacacacaactacaagaaagaacttccttataaccaaaaccaacaacaactatggcaagttatcagaagcactacgatgatcagggtcgcaaggtcgacgagtatggcaatgttgagaggcaaactgacgaatatggcaacccggttcatgccactagtgtcacttatgtagccaccaaaagtgttggtggctacaatgatgacgctaataagcaacatgatattactggtgtctatcccgagaaagacaccggtagacatcattttggtcgtggttacgacggtgacactaacaagcaacatgatgctactggtgttatccccgaatagacnatggtagagatca

SEQ ID NO: 25929 - DNA, 413 bp, Glycine max
  modified_base (6)..(7): a, c, g, t, unknown, or other
  modified_base (123)..(124): a, c, g, t, unknown, or other
cggaannttcccgggtcgatcccacgtccgtccgacgtgctggcgatgaagaaccgacagaagggggatttcaacttaaaagccaagaaccaattacctttagtgggttttctctttgtcacnnataaaagtcatctaagaaagaattacaagaaatcatcatcacaataacccaagatgagttcaggaattagagcatggagtgtggcagcaagtggttggaattgtggagggccttgaaagaccaaggcatatgcaggtggaatcatgccttaagatcagctcaacaccatctcaaaaaccatgttggctcattctctcaggctaacaagctttcttcttctgctatgatatccacaacactaaaacatgagaaggcaaatcaatcagaagagtctttgaaaactgtcatg

SEQ ID NO: 25930 - DNA, 350 bp, Glycine max
gtttgatatataactaatactatagcacgtatagagcactttcgcactacacaactaagatttataatatagtatataaagtaaactataattaaaattcgctatgaataaatattttttaacacgcttcatcattaagcgacgatcgaagttagttattacgagctattagaagttacgtgaataattactctagttatgttactagaagttattgaagttagttattaggaattactagaaattggttattctctatatttgtataaataaatcacctttctaatactttgatgaatgaattcgaaaactatcggttcatttctttcattctcgatatgggatcaaaa

SEQ ID NO: 25931 - DNA, 453 bp, Glycine max
  modified_base (412)..(412): a, c, g, t, unknown, or other
cccacgcgtccgacgacagaaggctcttacatctctggcccaatcttcttggagtcgctaccgaatcgcgatcatgatcattccctacattgttctcttgttttgtgtcgctcgtgcaacaattggttagtcttttccaagagtttaatgtaatctatgtacccttaggggttccctctgttattatgtgcatattcatcttctccatttatcatcggtgatcacattttttatttgtaaagtttaatcctaaccgatcactagtacagtaacattgtctttaaagcgattgaaagttaataaacaaaactagaataaaaaacaacaactcataactaaatttctctccatgaaaaatcacttgagatcgtttcaaggtccaacgccttaacgacctgcttgtttgtcatanaaatgaatatctcaaaatcataaaaccaactcaacacacaa

SEQ ID NO: 25932 - DNA, 411 bp, Glycine max
cattccattatggacgcagattagattcgcgctcacattcccttctcctcgatttgttcaaactctctgctctgagatctgatcgcattttcattcagaaaggaaactcgtgtgactgatttatgcgctaattgcaattgcactgcgagcgtcactctgccgaatcggaagatgggaatagtgttcaccaaattgttttcctctcttttcggtaacaaggaagctcgaatcctcgttctcggcctcgacaatgccggcaaaaccactattctctatcggcttcagatgggcgaagttgtctccaccattccaacaattgggtttaatgtcgaaacagtgcagtataacaacattaaatttcaagtctgggatttaggtgggcaaacaagtatcaggccatattggaggtgt

SEQ ID NO: 25933 - DNA, 315 bp, Glycine max
caagcaaaggtggactccttggggatggcatcaaatggaacttcgccaagttccttgttgataaagaggggaatgttgttgatcgctatgcacccacaacttctcctctgagcattgagaaggacttgctgaagttgttggatgcatgaagttatgaatgtttggagttgccaataaataaactatgaataagaaatgtactgcagatgctgctgcaatttcctgtgtgccttatatgtaccgaaacaattgctcttgtagctttgacattagattcataaccatgaaaatgtgtacttattaatgggggaatgg

SEQ ID NO: 25934 - DNA, 216 bp, Glycine max
gtatcaaaagcacaagggctatagctcagttaggtagagcacctcgtttacacgagcgccaatgtttttttcagaggagtttcatcttgtaatcaaaagagtttatcttatggttagaaatcgatgtcttactccattttaagggacacaacaggagaacaatatcctgacaaagggtttagccagtgaatcgaatccatcattgagttgagatat

SEQ ID NO: 25935 - DNA, 411 bp, Glycine max
ggcgactggagtggttccctcagacatatctgtaacgctgcttcttctgtgaggcatcaatggagacaaaagctttgtccttcgctctgtctctcaatgacctcaccaacaaccgcttcacttccaatgcgccacatgctgccgccaaagtttccgtctttaccgtcagatgctcttcttcgggtagtggagagaggccttggaagaattcagatgctagacttgtgcttgaagatggttcaatttggagagcaaaatcgtttggtgcttcaaggacccaagttggcgaggttgttttcaatacatcattgacagggtatcaagaaattttgactgatcctagttatgctggccagtttgtgctcatgacaaacccacatattgggaatactggcataaattttgatgatg

SEQ ID NO: 25936 - DNA, 327 bp, Glycine max
gaagatccaaaagcgctaaattactttctttccatttgccttcgttttctctctctttctcagtttctcagtttctcagtcatcaccatcgcagcagcaagatgtggaaccaaccattcggaaaaaccgatttggaaagcggttctcggcctctgtatccgatgatgctcgagagccctgaactgcggtggtcgttcatcagaaaagtgtactccataattgccatccagttgctcgtaaccatcgtcgtcggcgccgtcgtcgtcaccgtccgcccaatcagtgtcttcttcgccaccaccggcgccggactggctctctacatcg

SEQ ID NO: 25937 - DNA, 428 bp, Glycine max
gtcattcattttaaatataaaagtttttatacaatcaagtaatgaaaaacatttttagtggaattgttaaggaaattgattaattattctaaaaaaatttatatatatagttgcaattacataataatgttaagaaaattttagaacattaatacatatattatttatttaaggaaaatttatttgacttgcatctaaataggatgattttttctcttgggttagagattgtctttcaatttgctgagacatatactaattattaatttaacaaatttttacacacaaaaaaaagcacatcaatcctatgaattactctaaataggatatgtcaaactaaagaacaattcaataatttaatgtatttagaggatttactatttaattaaaatatttatttttcatttaaaaatcatatgtatattttt

SEQ ID NO: 25938 - DNA, 351 bp, Glycine max
gctgttggtgacggtgtgattgattgtgacgaaatctgacaatgaagcgtggagcattgttgtcagtgcttgcctgcgccttcgcggcggtgatctgggcagcgaacggcgacgacaacctcgtcccgcctcgccgggaagtgtacggcaatgggcgaatattcgacatcagtcatcggtaccaacccgagatgccggaatgggaatcgaatgacggcatagggcagttcctgtggcttcccaagagcatgaagaacggttccctcgccaacaacttcgaaatgaagtttcccacccacaccggcacgcacgtcgatgcccccggtcacgtgttcgaccactacttccacg

SEQ ID NO: 25939 - DNA, 382 bp, Glycine max
ggctgttctgttgcgtgaacaaattgaggtgtgcatgttcattattgggcaccgatggattcagtttctgtgcaaatagcgacgtcaaaatttgttctttgccccgcggcgacggccagttctaagaagaatgccatcatcaatttcagttccaatttcaaaggaactctcaccaaaatccatgccatttccccaaatggctctgcctctagctgcacttcgcgtgtgtctgtgtcaagtttaaagacagacaagaacaaaggcagaagtaatcttgaatccctgttttgttatgataaggctattccagaagaaataattgagatacctgttgggttatcttttggaagagaaagctattggtaacaatttcccattgcac

SEQ ID NO: 25940 - DNA, 298 bp, Glycine max
  modified_base (246)..(246): a, c, g, t, unknown, or other
gacggctaaaagctaaaaatcatcgaagtactcaaattagcatggctgtcacggttgcattcttgaatttgatcatcatgttttcagtagtctctacaagcaagtcactgagcttaaactactattcaaaaacatgccctgatgtggaatgcattgttgccaaggcagtgaaggatgccactgctagggacaaaactgttccagctgcacttctgcgaatgcacttccatgactgtttcgttcggnggtgtgatgcctctgtgctgctaaattcaaaaggaaagcacaaagcagaaaa

SEQ ID NO: 25941 - DNA, 352 bp, Glycine max
gggtgccgtcactctctccctgatggtctgatgagggctactgatgtgatgattgctggaaaggtggctgttgtggctggatatggtgatgttggcaagggttgtgctgctgcattgaagcaggctggtgctcgtgtcatcgtgactgagattgaccccatttgtgcccttcaggctctcatggaaggccttcaggttctgaccttggaggatgttgtttctgaggctgatatctttgtcaccaccacgggtaacaaggacatcatcatggttgaccacatgaagaaaatgaagaacaatgccattgtttgcaacattggtcactttgacaatgagatcgacatgctggggc

SEQ ID NO: 25942 - DNA, 312 bp, Glycine max
gggcaaaagacagtgtttgggtttcacaaacagacacacagtcggttcttccttctcaaatattcttgagatccccattttctccgaagcaaagccatggctaagggtcctggtctctactctgacatcggcaagaaagctagggatctgctgttcaaggactaccacagtgaccagaagttcaccatcaccacctactcaccgactggagtggctattacagcatcaggaaccaggaaaagtgaactgtttctggctgatgtcaacacccatgttgaagacaaaaacatcactactgatatcaaaagttga

SEQ ID NO: 25943 - DNA, 403 bp, Glycine max
tagcatcatcaagacatcaaaacatcttgcttctacataggagtcatttgacttaatccatcaactgaaagatccttcaattatttctcgtccttggaaaattcttttttgcaagaatcaactgcttctttcattctcccttgctacaaggttgtgaaaacaagacgacgatggttacctcatagccctacactggggcaatgaggggcatcgtgcatgagcctcaagtgaacctaggggcagattagaagttctcactcaataggttcccagctacaaggtcatgacgaaagacaacgattggtacctcatagccttacactggggcaatgaggggcaccgtgcatgagcctcaagtgaacataggagccgatcaaaagttctcacccatcgatgtttttac

SEQ ID NO: 25944 - DNA, 349 bp, Glycine max
gatataaaggagggaaagagaggaatattagcaaattaacctgcgcaagcgaaggtgctttcttagttgtgctgctaacgacaatccatggaaatgataagctccaaattcttcttcttcttcttttcaactctctatcttctctacggattttccaacgccaccgatattcactattgcgataagaaagctgactatgatgttgaggtcaaaggggttgaaatatctcctgatcccatcgcacgaggccagcctgctacattcagcattgctgcaactacaagtaaagctttatctggagggaaactagtgattgatgtgtcatatttcggatggcacatacacagtg

SEQ ID NO: 25945 - DNA, 165 bp, Glycine max
  modified_base (79)..(79): a, c, g, t, unknown, or other
ttatttatgtgcatttttgagcaaatgaggagcgatatcagactagatatactgtcgatgatcaagatggttcacttanggaagtctatatctcgagaagcaaaattagcattgtgctgatgcaaaatgtatgataaatataaaaatttttaatcaaaatgattt

SEQ ID NO: 25946 - DNA, 367 bp, Glycine max
gctattactagatgtggctttagattttaaacaacttgcttggtgagggtccattctttgatcagttttctgtggcaatatatgttacttttatgtcccatcttggggtcagctaggtaaaggtggttggagccttgcctctatcactggtgaatttagataatgctgatgagaatgattttacagtttggttgaaagtcgtgatgctaacagattggaagggaaaaaagggagtgtttgtgattgacttgcagataacttggcttgaaagaatcatagtaagcatgctgcatgcatggcactatctgacctaatgtgtctgaaactttgtgcttaagatacataattataatgaaatatttattcc

SEQ ID NO: 25947 - DNA, 239 bp, Glycine max
cgcgtccagagcaacaaagagatggtgctggcgcgaaaatgcatacaagagactctgatgaaaatgaacatctgatacgaggtatacacactgtgataagatgtgataaatgcacaatattcataaactataaagagagattgatcagtgattgctctgtaatacataagtagatcagtggatggtgatcactcacaaaaacaatgctcgcgatcttgacaaagaccttttttacacat

SEQ ID NO: 25948 - DNA, 402 bp, Glycine max
gattgcagtaagtaacagcgaacgaagaagaagaagaagaagaagaagaagaacgcagaagccacgatgagtggcagagccatgatctcctgtttctctcctccttcaacaactccatgctctgcccccattccactctggcgccgaaaccacctcctccatgcaactcctccaccttcgctacacctcctctcgcggcggagccacctcgttgccggcggaaggagggtgtgggtgaatgtgaagtccgagaagaacttatccgaatcccccaagtacgaggatgatgtcgtggttcagaagaagaagaagcgtggtttggataacgtggaagatgaaacgaggtggtgggcagtgtttcccaaaagatgggtcattgtggttctctgcttcttagctttt

SEQ ID NO: 25949 - DNA, 421 bp, Glycine max
cacctagtctctaaggggaccaagaattggttatatggataacaagcttgacgcttatgctccagcttgagggggaatgtagagaatcagtattgatattctgcattcattgtaataaatatagtttataggcacataatcactgatttagaggaaatcaaatatcctccatttatttgcaataagtgcaataagcctctgttctttctcctttaacaagaccaatcaaagtccacaataatgttaatggttgatttctcctcacctacttttgcagcttgttcgagagacagctattcaatgtcttggtgccttgtctgaattgccccacgcccgtatctatcctatgaggacacaggtttggcatgcttttaacttgaaaggatgaatatcagcttttgatagatattcttattgatct

SEQ ID NO: 25950 - DNA, 334 bp, Glycine max
  modified_base (312)..(312): a, c, g, t, unknown, or other
gttctagtgtgtgattgtttgttgttgtaactcgttctgtcttcttttgttgttctgtgtttgtgtttgttttttctctcacctgaaaatgtcttgctgcggtggtaactgtggttgcggaagctcctgcaagtgcggcaacggctgcggaggctgcaagatgtacccagacttgagctacactgagtcaaccaccaccgagaccttggtcatgggagtggcatctgttaaggctcaatttgagggtgctgaaatgggtgtgcccgctgagaacgatggctgcaaatgtggaccaaactgctcctgcaaccnctgcactttcaaagtgaggtgt

SEQ ID NO: 25951 - DNA, 148 bp, Glycine max
agctgaagttaaagtcagtgatgtcaaacaccagtgcaagcgcctgcgtagaaagtgtcccgcctcatacttcactgggtgctctggtctttacgatgctcgatgggactggctgaacaagcttataacttatgagcgtgataagcgg

SEQ ID NO: 25952 - DNA, 167 bp, Glycine max
ggcagcaaaccccttcaacatttttcaccctcagaattcatatcatgagttttcatgatacatcaaacacggggcttggacttggtcttggtcttggacttgttagcttccatgatcaatcagagaattgcatgaagagtactaatgatcctttgagagaaatccat

SEQ ID NO: 25953 - DNA, 314 bp, Glycine max
ggaagactggactaccagaaaggtattgacctgattcggttggcaatgccagagctcatggaagctgatgttcagtttgtaagtgattttgtatatgtgttctataaacagatgatgtttcaatcacaaattaaatccctggcctatccaaaaaaaaaaaactaattaaatccctggacatggtggtatcaaaatgtaggctgtgtttactggtagggtataaaatatatcttgagacgttgcagaatatacctgctaaataaattttaaacaacttgatacttgccataaaaaaaatatgtgatggatcattc

SEQ ID NO: 25954 - DNA, 343 bp, Glycine max
gaaagcagggttgttttttctggtgttagtgttagctctatgtatccatgcttcctctgtgtggattttcattttatcttctcctccttaattttccaacaaaatctcaaacataaataaattaaaaaataacatttttatttacaattaataaagatatcgggattcatcttgttcttattttgccccctttttcttctggtctcccgaatcagaaaccctaatcagtgtttgggatttcagataaagaaatttaaacagatgaagggtctcttcaagtctaagcctcgcactcctgcagatgtattgcgccagaccatagatcttctgctctttgttgatc

SEQ ID NO: 25955 - DNA, 274 bp, Glycine max
acctgtttttcttggccaagaccaatgttgataccttctttgggtatatctaccagaagtggtgaggaattggataaggttggtggtggtaatctgtgatttgctataatatgtaggttgtgttcaaggactcattctatcttccttctaagcttagtttgtgttatatgtattccttaatagatgagggaacctgttctccgtagattcccaagggaaccagttcaaatgttcaatacttgactaaacatccaacccttaattactatttaaa

SEQ ID NO: 25956 - DNA, 306 bp, Glycine max
actgattaattgtgttaagaaatttaagtgaggagtgagagagtgatgatgaagtctgctatgtgtgcagaggcggttgtagcacttcttcttctggcggaggtggggcccatggctgacgctgcgacatgcaccccaacagagtctagtgatcccttgagagaaatccatatgataaataaggcggagaatgcatcataatgtaacagcacatacccttcacttacattatgaccaccccatgatgatgatgatgatgatgatgaagtgaataatcaaccacccaagtcaaaactgagtcctatg

SEQ ID NO: 25957 - DNA, 344 bp, Glycine max
  modified_base (309)..(309): a, c, g, t, unknown, or other
ggcaccactctctctttgttctttctcggttcagtgtctctctttgacggtggtgctgtcagcattgacctcagcttgagcagtaaaacatcatcagcactactacggtaccatggctgtgctgcaatctttcgtttcggtccacccagattctcacttccccatacagaacctcccttacggagtcttcaagccccaatccgcttcgcctcctcgtcccggcgtcgccatcggcgacttcgtcctcgacctctccgaaatatcttccgctggtctcttcgacggtcctctcctcaaaaactccgatgnctttctccagcctaatctaaataagtttgtatcac

SEQ ID NO: 25958 - DNA, 422 bp, Glycine max
tttggcatctcaatatatatataacaacacggggatggtaatagaaagatagagatccatcaagtctacgttgaaatttattgctacaaggtagacagaaaacgataccaaatctataaaatgtatggaataaaaaacacataaaatgaaggtaaaagaaaagaaaataaaaacgatggctgtttttttgctaaagggaatttttgtatagtgaatacaagcaaacaaacaaggggctagaagaaacatcttttgttatcatgcaatttgcgaaataattaacttccccattgaacaatatgatgtttaaggggttagccaaccaactcatagtgaaaataaagttagcaatttcatgtaaaatacatcagtataaaaatctatttaaatttggattcgcttgtctactttactttaataat

SEQ ID NO: 25959 - DNA, 322 bp, Glycine max
gagatctgaagtgtgtgtagagttaacaagaccagagagagagacgaagccgaacgaaacataaataaaaccttgctcttttttcacgccctagctcattttcttctccgttctcttctctctgttcctcactcactcgcatttattcaccatgactaagcaacaagctaattggtctccatacgataacaacggaggatcatgtgttgcaattgctggagcagattactgcgtcatcgccgcggatacgaggatgtacaacggtacaatattcttactcgcgatactccaaatctccaactggcgaaagtgtgtatgggtt

SEQ ID NO: 25960 - DNA, 152 bp, Glycine max
  modified_base (8)..(8): a, c, g, t, unknown, or other
gaaccgcntgcggagacccacgctcgacccacgcgtgcgacaacacatcacgagggaacacgacagattgatatgaagaagatcactgaggcttaccggctcaagacataagattatccttctgaagctaccaacatttttaacatctatgc

SEQ ID NO: 25961 - DNA, 174 bp, Glycine max
aaccgccgggtcgacccacgcggccgatcacacgcacttccgggcccatttataattcacaaggatcatctaaaccgcggaaccgagataggctctacaggactttaaaacccttcatcattctttctttgccgaattacggagtgggatttatttatacatatgtctaaacca

SEQ ID NO: 25962 - DNA, 422 bp, Glycine max
gtgctgcacatgtgaggctgttgagatggttagaacccttgcgatgatcaagcccgatgggttgtcaggtaagtacacagaagcaatcaaggaggtcatcttggattctggatttcatatcgtcaaagaaaccgaggtccagcttgatgctgagagggcatctgtcttctatgcggagcattcccagagaagcttctttgacagcctagtcaagtacataacaagtggtccagttcttgctatggttctggaaagacctgacgccgttgcgcaatggcgcactgtgattggaccaactgatgcaaaaaaggccaacacctctcatccaaacagcattagagcaatgtgtgggctggactctgagaaaaattgcgtgcatggttcggattcaccagaatctgcagacagagagatctcatttt

SEQ ID NO: 25963 - DNA, 414 bp, Glycine max
ttgggggtctccccccaaaatttcttaagggtcccatgctcttcatcattgcttttttgttgggtgcggctttcttttctaaaaggagaaaggctcaaatttgtaagccaatcatatgtattttatcgagttgagaagggtcaaactaaggcatatgaagaagggttaatcaagtaattatacagcagctttagggagagagaagagaatagttatgtcagacgttgacagataaagaattcatacacattgatgatcccagtggatctagtattggatcagcaatatcagtggccgcaaatttggtggcaggctccattggtagctagactgatgggtccattttatgcccttcatgttctaactcagtagtgggcattaaaccaacagttggccttactagtatagcaaggg

SEQ ID NO: 25964 - DNA, 54 bp, Glycine max
tgggcataccactgcaagcagattttgactttgagcaggggtagactactaaat

SEQ ID NO: 25965 - DNA, 108 bp, Glycine max
actgttacattactacacaatgttatcgtttacaccccgactgcttggaatgggagcacacatcctccctatatgtccctcgccagaaccacacaatcatatcttcta

SEQ ID NO: 25966 - DNA, 376 bp, Glycine max
gcgggcgactgatgctttaagacaacatatgtgtttcccaaccagtctctgtattcttcgactcttttgtaattgtggcgggggtatccctttctctccaacctcttaatttgaaaatggtgaaaggaagtgagagcggtgcagttcccgaaccggttatggattcagtcaacaccactctctccaaccttcaacaactccgaacgcactttaacgagtttttgtctctctccgaccctcaaaccctctcccaaatgccccctcttcaacgggctcattccctcttcatcctcgccaaagtcacatctacccttcttgcattgaacctaaggtttaccggggtccacccagatgatcatcccatcaaatcagagct

SEQ ID NO: 25967 - DNA, 326 bp, Glycine max
actcgtcttaacacaacatatctacttaccgagccggcccttttttagcggccccgttttatacactccgcggccacctatatctatgccgaccattaagttgtgaaaaaggtgaacgaggctctgcatagatgcgagtacatcctcaataatctaggtttgatctctcccaatttgaccaaataagatactaacaccacaaatctcaaattcattctgtttctattatatttaaccgagctcacagaaataatatctcaagatgacatacatacatattctaactacttaaaagcaaaacattactgattgtatctcattttgtg

SEQ ID NO: 25968 - DNA, 264 bp, Glycine max
tttgataacccaaccagtctctgtattcgtgcactggtttatacttgtggctgtggtatacattactctccaacctcttcatttgaaaatggtgaacggccgtcagatcgttgcaaaatcctatccgcctattgattcaatcaacaccactctgtccaaccttcaacaactccgatcgcactttaacgattttttgtctctctccgaccctcatactctctctcaaatgcccacctcttcaactggctcattccctcttcatac

SEQ ID NO: 25969 - DNA, 392 bp, Glycine max
gatgcttcaaaaccaagaaaaattagtgacaattcctggtcctcgtctgactttttttatatcagcaaaaatataatgatcagttggtgtccaaaaaagttttatgcaattgtgctgcttttatggtatgcagcaggatccattcatggattttcaatggtgcagaaataaagtgcatagagagggagagaatggcactcctcaacttcaaagaaggcctcatagatgtctatggcatgctgtctacatggagtggcgatgaaactaatagagattgctgcaaatggaaaggaatagatgcaacaatgaaacagctcttgtacaaaagcttcgtcttcgtggtcagtatacacaatatttgagagtggctatatttaactggatttccaact

SEQ ID NO: 25970 - DNA, 306 bp, Glycine max
  modified_base (104)..(104): a, c, g, t, unknown, or other
gggacgagccacgcgtgcgtaccaccacattctatcgtcctataatatataatactactaggctgtggtccggtatggcttgtccgagccaaggaagaatacancagaagctagcaaacaacatgagtggtgccatggacatggtgcgagccgcgtgacccaaacaaactacatacgcctgcctagctaggagagagcagacattgagagctcagaagcgtgcgtgcacacgtaatgatcgatgtgctgaggaggaaaagagaacgagatcgaagggattattaaagttctgtcacgtcttttttc

SEQ ID NO: 25971 - DNA, 234 bp, Glycine max
cattggtattcaaaaactattcttattcatgcgaacattattttagattaaattacaacaacaccactatacttttatataataccctcattcttattcacccaatcgtccggctcacaacagcttaagcacacaataatcccaccttatctataatctataacgtccaccaatatatctacttctacctaactatctaaactactgacacaaggcctttaacattactcaatc

SEQ ID NO: 25972 - DNA, 318 bp, Glycine max
aacacgcgcgcgcgcacgcgtttttttactctttcgtactgttttgacaagacgagagagtgtagacccacaaaggactttaataattaatactttttaaccactactataaagccagtctagattatctatgcgacttttctcgcaaagaaaaaataactcaatatctctctataatagttcgagctagatctgaactaggcagacactcgcatacgggtcttagctaacatatactaatttatgacatatatgacatgtgcacaacaaagttgccacctttatcagtgaagctcctcacctcaagatcgatgttac

SEQ ID NO: 25973 - DNA, 195 bp, Glycine max
ggggcgacccacgcgtgcgcacacgcgtgcgtacagatgacaacagactacttagggttcgataataacatagaacggggctgttgagataagtctgaagagtgttactgtttcgatgaaacgactcatggattcgattgattaatgacatcgaatgggaacttttgtcgttgacgaacttccaacacaagggct

SEQ ID NO: 25974 - DNA, 84 bp, Glycine max
ccggaacggaattcccgggcggacgcacgctttcgaacagacgtccgaacacgccagctggagttttctatactaccacctaca

SEQ ID NO: 25975 - DNA, 436 bp, Glycine max
  modified_base (33)..(33): a, c, g, t, unknown, or other
aaaacggccgacccacgcgtcgcggggcgtggnataacattcaaagcacgtcttggttgcagatcagacataacaaaagggtctctttccataccaattagcaacaacaccacaatacatctatctctcgtgcacatagcaaatgacaatgtcgtccggctcagaatggcgtcagcgcacagcgtcacggcctataccataatctccagcgtccaccgatataactcctgctccggcacgggcaggtcgacggacacgaggccggtgtcggcatcgtagctgaactccacttccgccgagtccaatagacacctcgccggctcccgcgagcagtaagcgccgaaccgaccgcacccgcgaaccctgagagccatggccttgccgccgacattgctgatcacgtcgcactcctcaacgggcccccagcgttaacata

SEQ ID NO: 25976 - DNA, 424 bp, Glycine max
  modified_base (356)..(356): a, c, g, t, unknown, or other
tggtgggttctttgcaattaacaatatatgagaagtactcttctccaattttgttaacctcaaataacccagcaccagtaccgacatcagactcctgcaattcatctggtctagctgttcataataacaacaccagaagcctttgcaattctattattatcacttttgctcagcctcctcattgcactaactccatgcttgctgagataatgtgttgccaaatcagtcagaccctggtccaaaataaccaagtccggtttaaacttcaatatttgcatgcatagctcctcaatatattcttcttcaatctttaataagagaatccagtcttctgcatgcatatctacatctgtcanaccttggccaatctcaacacctactgttgtagtagcttcaatagctaagtcagcaattaaatccccaa

SEQ ID NO: 25977 - DNA, 433 bp, Glycine max
cccacgcgtgggcggctgccagatcgacagacgggggcacctaaactacttggggatggtcatggatttgatatcttgatttcttaaactacatggattcttccttccttctcatggtttgtcacataccaactagcttgggaccaataattcgatatgttgacccactagatgttccttctacatggtgctccaatctatcaaatacactttggcaaatctggtgaggcattcatatacctcttgttggttatggggactacaacctttcaaataccgaagtccttgcgatggatcctatcgtttcctgcttccctattgtacttgaatgtcagacttacttcatcttcttcctttaattatgaggctgtttatagaaaaccatattaatattctaactatggggaaggacctgtatctactaccatttcgg

SEQ ID NO: 25978 - DNA, 200 bp, Glycine max
ccacgcgtaagaacggttaattaagaatacagacgcggccctcactctttcgcatcgatctgtcactacaactctcatctctaaaacacacaattaactttctgccttcttacacctctctttatatcatctattccaatatcctccagcacattattttcaacctcactgctactaaataccccattattctgcattta

SEQ ID NO: 25979 - DNA, 301 bp, Glycine max
gggagacccacgcgtacgcacgcgtgcgaacagatgagagagggaacactggggtctgcttatatacactcatatggggaactatggggagccaatgatgatacagcccacgtgtatacttatttgcttgagaaagtagttgacaactctattactgtgagacaccatgaggttgctcaataccaacgagcaaatggcctactatgctaggaggacaatttataaaatctaacccttgagagctcagacagaattggaatactattaaatgcatgcctttgatttacactataaaacaaaa

SEQ ID NO: 25980 - DNA, 423 bp, Glycine max
gacactaaaaaaaaaagaaaaaaaagtcttaatgggtttcttgttttctctgtcgtttcgttcccttaatctttgatctctgagttacaagttataacaaaagaaataaacaacacatataaatatttgtaagaaaatatatatatgatcatgggttttcttcacaaactatgggacgaaacgttggcgggtccagcaccggaaacgggtctggggaagctccgaaagtacaactcgttctccggcggaagctccgtccggtcaacggtggcggagcatgttccgataagtcgcagcatcaccattgttcgctcccaatctggtttcggaaccaccaccaccacctctgctccttctgcgcctaccacccctcgcacccccttgactccggaggcaccaggcggtgatttcaagaagctcacg

SEQ ID NO: 25981 - DNA, 387 bp, Glycine max
gatgacatgcagtggctgacatatacatcacttgatgctgctcgtcaacgtatccaagaacagttaagtgctgtgacagctgatatggatatgctttctacagatgaaccacacaataagaaaaaagcagcaagtaacggaaatggcggttctcataatgataactcaatgcactatagtaccctggttggggaagtgaaagctaatctgaagaaaggtattggagcgaatgaattgctgtcccatctttaagcacatcctgcacctgctcaagaaaagatgagtgctctggttgaagctctacactagggaactgagaaaggttttgctatagaagctgataagaagacaaactactttgctgctgctgtagccaaagatggatcc

SEQ ID NO: 25982 - DNA, 403 bp, Glycine max
attacaaatctttcgctcacactcagggattgccagaatggcacttggttgcttggtgatgcccctttctgttctcttcactcttggtcttgcgagagaaagccatgccagagacaaaaatttttggcatgctgtttggccaaacactcccattccaagttcattgcgagatcttctaaagcctgcccctgcacgtgttgaaatcgatgaacaccctatgccaattgaagaaacacagtacccgaaaaccttcttctataaagaagaccttcatccatgcttaacaatgagagtacagttcagcacgcgctcctttcaacaaccattgagtgttggtacatgcctaaaggaaattaaagacactactactcaacgatatagttttgaagagctatgcatcaac

SEQ ID NO: 25983 - DNA, 386 bp, Glycine max
gggaccctgctgatccaaactacaatccgtggggtgatctgatagatgatcctgtgcacaaacatgctcgcagggttctgttatctgttgcagtttatgggagtctgattgtgatgctggtattcttgcctgtcaaacatgccatgcggatggcaccttcgattttcccgcttgacatatcggtatctgatccattcactgaaattccagctgacatgcttctctttcagatttgtatcccatttgctattgagcattttaaattgaggacaactattaaatccctacttcgatattgggttacttgttgtggttgggcacttggtttgactgatttcttacttgctaaacctgatgagagtgttaatcaagaaaatggaaatggg

SEQ ID NO: 25984 - DNA, 403 bp, Glycine max
cgacggtttcaccgcttgagcagacttaacaacagcggaaagcggtttactgtctgttcaagctaccatctatctctctctttcttagtgcctccttgccagaagttaaaatggcccaagaaactttcctattcacatctgaatcagtgaacgaggggcaccctgacaagctctgtgaccagatctccgatgctgtgctcaatgcatgcttggagcaggaccctgacaccaaggttgcctgtgaaacctgcaccaagaccaacatggtgatggctttcggagagatcacaaccaaggccaacgtggactatgagaagattgtgcgtgacacatgcaagaacatatggtttgtctctgatgatggtggtcttgatgctgacaactgcaaggtcctcgtcaacat

SEQ ID NO: 25985 - DNA, 277 bp, Glycine max
aaccgaccgacgcatccacgcggacctccttccacttccacacctttctcatccctttcataaaacgcatcacgcccggcgatgctctacctcatctggaggcactaccccaatctccataccgacatcaccctcacttccttcgaccgcttccgcatacacccctcttaccagaccttcctctacctcagtcacgaccccatgccctatcatgcctcacccaaggagctacactctacctcactaatactgctttcacacaaggataagaaaatta

SEQ ID NO: 25986 - DNA, 300 bp, Glycine max
gaattgccggatcgacccacgcgtacgcccacgcgtctgatacctcagtattgtcgtcatagacctgtttatcaaacgtgcggagtgttaaattcctataccgaactcaaccccctggttaattgcaccttgccttttgccggagctctactgtgacatgctgaaactcttattccgctctctatactaacaagcctattgcgaacgtgcctcgtctattggtggcgtcgggaatgcgttaaactgcgacctcagtggaggaaactccactaacctctcctcctaagaagtgttggccga

SEQ ID NO: 25987 - DNA, 240 bp, Glycine max
gggagacccacgcgtgacccacacgcgtccgcgcgagaaaaagaacgcttgatgatgtttctattgccctaggaacgggggccactggttgcatctgccaacaaaacttttaatgaataaattattcctaaaactataaatattccttctgtggagaatttgtcagtctatgatgttgcagagaaatacaacgatgaacggcatgatatgactatcttgcctagtgctgaggatgtgagc

SEQ ID NO: 25988 - DNA, 361 bp, Glycine max
tgcggctagatgactaccactgcctgttttgttcgagtcatgaggaggaagcatcccacatatttttcggctgccaaagaataatgcctttatggtgggagagccttgcatggacagaggttgtaactgtgttccctgcatcacctaaggaacactttctacaacattcatactgtaattcatctggaattgtccaaaacagatgatggatttggtgggctgccctcacatggtgcgtttggaattgtagaaacagaattgtattctcaaatgaggattttaatggacagaaattgatggaggatacaattttcttctgctggaccgtgctagatatttagaataagattttgagctgctg

SEQ ID NO: 25989 - DNA, 304 bp, Glycine max
ctatatgacgacagtttgttccattaccatcttaactatgccgggcacagcactactgttgaagaagacactaccttccttattatgataagccacctctcacagaacacaacaccgtgtcatccaaaagctcttcttgcgcctccctacacacaagccttatgcaacaggctccctctctaccatgagatcggactcctagaatggttgacctggcttaaggatactatcccgagtcagggttcgataatgcatctgccattgccggctgatattacaaccatatttaactcatggtccacta

SEQ ID NO: 25990 - DNA, 293 bp, Glycine max
cccacgcgttcgggggagcaagtttgaagagcgaagagaatggctcccaagggtttaatctttttggctgtgttatgcttctcaacactgtcactgagtcgttgtcttgcggaggataatggacttgttatgaacttctacaaggaatcatgccctcaggctgaagacatcatcaaagaacaagtcaagcttctctacaagcgccacaagaacactgctttctcctggctcagaaacatcttccatgactgtgctgatcagagttgtgatgcttcactgttgctgactccaca

SEQ ID NO: 25991 - DNA, 446 bp, Glycine max
cccacgcgttctggtcagcaagttgtgaagagcgaagagaatggctcccaagaggtgaatctttttggctgcgttatgcttctcaccactgtcactgagtcgatgtcttgcggaggataatggacttgttatgaactactacaaggaatcatgccctcaggctgaagacatcatcaaagaacacgtcatgcttctgtacaagcgccacaagaacactgctatctcctggatcagaaacatcttccatgactgtgctgttcagagttgtgatgcttcactgttgctggactccacaagaatgagcttgtctgagaaggaaacagatagaagcttccggttgagaaatttcaggtacattgagaccatcaaagaagctttggaaaggtaatgcccaggagttgtttcctgtgctgatatcctcgttctctctgccagaaatggcattg

SEQ ID NO: 25992 - DNA, 291 bp, Glycine max
  modified_base (171)..(171): a, c, g, t, unknown, or other
gagaatgaagaaggcaagggcgttgagcgtggcagtgaacgtgttgtgtttggccatagtttgcagtgcgatcgagtcaccgcaacacacagtagtacactccgagtccgatttcgagatcaggctctatcgtacctctgtttggatgttcgctcctgccctcgacatttncttcgaaaaagccacctggaatggctttcacaggttgtttcagttcacagaaggtgccaacttgaatttctctcgaattccaatgactattcccgtgttgacaaccgcggtccccggagc

SEQ ID NO: 25993 - DNA, 311 bp, Glycine max
aaccggtccggagttcccggctcgacgccccgcgtgcagaggacgacagaagggaacggctgcggaaggacgacggactgtgcctgggtgctagtagacaacagagggggccgggtgtctgatgacgactacacgttccgggtgggagatgacggctgcaagacatatcctatagcaggcggagctacccgttggattactcgtatcatgttactggctatgatgatttaaacttgaagagcggccgctctaatcgatccttgctcattgctacttgcatgcggacgcatggcatttcaatcaagtgacct

SEQ ID NO: 25994 - DNA, 371 bp, Glycine max
  modified_base (16)..(16): a, c, g, t, unknown, or other
  modified_base (303)..(303): a, c, g, t, unknown, or other
  modified_base (357)..(357): a, c, g, t, unknown, or other
tcaatgatctctttcncagctgttaccactgtcaaccgtgccggtgccggcatggttgctccattcactggcctcaagtccatggctggcttccccaccagaaagaccaacaatgacattacctccattgctagcaacggtggaagagtgcaatgcatgcaggtgtggccaccagttggcaagaagaagtttgagactctttcctacctgccagaccttgatgatgcacaattggcaaaggaagtagaataccttcttaggaagggatggattccttgcttggaattcgagttggagcacggnttcgtgtaccgtgagcacaacaggtcaccaggatactacgatggacgctacttnaccatgtggaagct

SEQ ID NO: 25995 - DNA, 209 bp, Glycine max
tctacatagcatcatcctgcaccaccatgctatatattataaaactacgcagttttgttaggatcttaaaaaacactccgctaacagccagatggcctcttccgacagtaacatgctactaaagaatgatgcagtttatgagatgctcccactcggagttgcccatgctgactctgttgatgaagacccagattgactttaagaacagc

SEQ ID NO: 25996 - DNA, 69 bp, Glycine max
  modified_base (11)..(11): a, c, g, t, unknown, or other
  modified_base (39)..(39): a, c, g, t, unknown, or other
  modified_base (65)..(65): a, c, g, t, unknown, or other
gacccacgcgnccggcgagaagacgacagaggggctccncatcaaaccaagacatagcaaacganccaa

SEQ ID NO: 25997 - DNA, 386 bp, Glycine max
cggaattcccgggtcgacccacacgctcgcccacactgttgtacagctccgaaaatacaactcaaggggacgtccacattcaggaagggtgttgttcaaaaattcgccatcgtcgatagaagcatgatagccttactcgatcatgatgatacctatgcgcaagaataagcgcatgatgacgctgatgagctagcgcctaacgatgagacattaatctacttaagtgcttgagcaggagtagatatgagctttccatctgctaccagcctcatcacattataagctcgcatggctcttatgatctttaagtctagccactaggagagcttcactcttgacttactttgctttactgacccttgtcctgggcccatactattgagtgt

SEQ ID NO: 25998 - DNA, 354 bp, Glycine max
gtgagagagagagcgagcagtttcagacacagagagaggggtttgggattggagggattgacgctgcgtctcttcctcttctctttcgatccatccctcattcctaatcctccaatccaaccacctcagcctcacactcacatatacacatatctgaacgcgtatcgtccctcctatggcttcaaagcgcatcctcaaggagctcaaggacttgcagaaagacccaccaacttcttgcagcgctggtccagtagctgaggacatgttccattggcaagcaacaataatgggtcctgctgatagtccttatgctggaggtgtattcctagtcactattcacttccctccggatta

SEQ ID NO: 25999 - DNA, 406 bp, Glycine max
  modified_base (348)..(348): a, c, g, t, unknown, or other
  modified_base (382)..(382): a, c, g, t, unknown, or other
gatgtgacaggaagccagaacagcgttgagatcgatgctctagctcgctttgctgttgaagaacacaacaaaaacagaatgcccttttggagtttgaaaaggtggtaactgcgaaacagcaagtggtttctggtaccttgtacaccatcactttggaggcaaaagatggtgggcaaaagaaggtttatgaagccaaagtttgggagaagtcatggttgaacttcaaggaggtgcaagagttcaagcttgttggagatgcacctgcatagtctagtgcttaattaggttgctgaagagtgaagaatgagacagcctgtttcgaaggggaaaagcctaaggatatatcanaggatcctatatgtataaaataaatgttgcttantaccttcgtattgatatctgaagt

SEQ ID NO: 26000 - DNA, 365 bp, Glycine max
ggctccttcgtctttcactctttgtatttttcgctgactccggcgtcactttccgttgagtctccgtccaccggcgtggcgatgggctcggaatcttcaaactccgattctcaaccgcaccctctctcgaacccaatcgacgacgcgtgccacgacatgagctccctggaagagctcgcgaaccgcggcgcgtggcgttccatcattgacaaggtctcacgcgcccgcgccctctctgttctccacaagccccacgaccacctcacctaccttgccttcaacgccctctccttcaccaaactgcgtcgtttcaacgaagcctctgcggaactcgattccctcgaagacctcgacagctaccacta

SEQ ID NO: 26001 - DNA, 400 bp, Glycine max
ccatacaaaagagcgagagccgtggccacatttgactggaagcatggaaactatttgcatcgcgctatacaatggctactattaaataccgcgacatgaaccttaatagaaatgaactagtttgaaaaataaaccaacgtcgaatgtaaaaatatgtaaaaggagtgtagtgacttattaaagtgctttgtaacaatgttatttatcattatgacttgtcaagtacttacttaataatagatccaaacactatagaattgcataatagctcattacctgcagatctatctaagaacataaataactcattaagtatcagacactcatgggatgaactgttggatgtgttacatgacttatttgatgcgatcttgatcaaactgattatcacacatgtgta

SEQ ID NO: 26002 - DNA, 104 bp, Glycine max
cccggccggaatccgggcgcccacgcgtccgctgcggaagacacagaaggggacacgctataccgctgaagcttgctactgacactctcacgactgcatacgct

SEQ ID NO: 26003 - DNA, 57 bp, Glycine max; identical to SEQ ID NO: 410

SEQ ID NO: 26004 - DNA, 286 bp, Glycine max
ggttctagtgtatgtgattgatgtgactcgttcttcttcgtcgttatcttattcttttgttgattgtgtgtttgttttttctctcacctgaaaatgtcttgctgcggtggtaactgtggttgcggaagcgcctgcaagtgccgcaacggctgtctgtgctgcaagatgtacccagacttgagctacaccgagtcaaccaacaccgagaccttgtcatgggagtgcaccagctaaggctcaattcgagagtgctgaaatgggtgtttccgctgagaacgatggctgt

SEQ ID NO: 26005 - DNA, 365 bp, Glycine max
ccctgagaccaggagatgttctttctattattttcggacagaagtgcccttgaggttgggaaaaattactttgttgcatgaaccggcattgctcgtcaaccgtagttacttataatcacaattagggacgtatgaagggtcccaaatcacccaacacgtgttaaacgagagccacatcgtgccacgtgtgagtcagccatgcacggatgaaagtcaaagttactaagtactgtagtggttaaataaagaatagatggagttaattactaacattaatgaggtaattaattgagacataaagaaattataaataaaactaagaaaacgccaagaggaaaacagggtccagtatggagggcactgag

SEQ ID NO: 26006 - DNA, 323 bp, Glycine max
ggttctagtgtatgtgattgttgtgactcgttcttcttcgtcgatatcttcttcttttgttgtttgtgtgtttgttttttctctcacctgaaaatgtcttgctgcggtggtaactgtggttgcggaagcgcctgcaagtgcggcaacggctgcggaggctgcaagatgtacccagacttgagctacaccgagtcaaccaccaccgagaccttggtcatgggagtggcaccagttaaagctcaattcgagagtgctgaaatgggtgttcccgctgagaacgatggctgcatatgtggagctaactgcacctgcaacccctgcac

SEQ ID NO: 26007 - DNA, 54 bp, Glycine max
  modified_base (53)..(53): a, c, g, t, unknown, or other
gacctcaggtcaggcggggctacccgctgagtttaagcatatcaataagcggng

SEQ ID NO: 26008 - DNA, 318 bp, Glycine max
ggtggcagagagcgaacccaaaactagagctaccttcccttcaaaccttccactcttctctccttttccaatcaagggaataatatttcttagagatattccgaaaccatggctcacgccaatcctatgatttttgttggtggaattctagggaaccttgtctccttctgttgctttctagcaccagtaccaacattctatcgagtttgtaagaagaaaaccacggaaggtttccaatcacttccttacgtggctgcactcttcacttcaatgctttggatattttatgcttacataaagacgggcgaaatacttctc

SEQ ID NO: 26009 - DNA, 370 bp, Glycine max
  modified_base (343)..(343): a, c, g, t, unknown, or other
tctggtgaaataccacctgaaattggatctctgaagcagttatcttctttgcatctagaagagaattctttaactggatcaatacctgcagaactgggtcattgtgcaatgctggtggacttgaatcttgcttggaattctctatctggaaatatcccccagtcagtttcacttatgagctcattgaactctcttaacatatctgggaacaaactttcaggttctattccagaaaatttagaagcaataaagttaagctcagtggatttttctgaaaaccagctttctggaagaatcccatctggtctttttattgttggaggagagaaagctttcttggganacaggggctgtgtgttgagggaaacct

SEQ ID NO: 26010 - DNA, 374 bp, Glycine max
attcttgattctttgagacgggtgaaggagattgttaaagaggtaaatgccggtctcgagtgtggacttgggttagaagactttgatgattgggaagagggtgacattcttgaagtcttcaacacagttcagaagaggaggacccttgaagaggcctcagcatcaatggcagctgctgtggagggagtaggagttgcattgtagaatgaaccatgatgtattccactatgagattggttcctatcttgtgtttgagcacagtgcaaatgcattccaggttccagtttgaaaaaaatgtattctctccaattgatgttatgaaagtggaaaggtaacaattccctcatcattatattgatattgagggtaccact

SEQ ID NO: 26011 - DNA, 361 bp, Glycine max
gatatcagtgaagaggatcaggagttctctggtctttgctccttggctccttcactatctgagagcattttgtgcactactgggttgaaaatgtatatgctggagagcaaaggaggtgccatagcatgcatgttcttgtctcttttcttcttggggacatggcctgctcttttgactatgttagagaggcgtggtcgtcttcctcagcatacctaccttgattactcaatcaccaatttcttggctgttttactcattgcttttacacttggtgggataggcaagggcacacatgatcagccaaatttcttagttcaacttgctcaggataactggccctccgttcttttcgcaatggggg

SEQ ID NO: 26012 - DNA, 303 bp, Glycine max
aaaaccggccgacggacgcgtacgacacgcttccgtacagtttcaaaaagactacagaatgggatgatgacgaggatgaggagcaggattaacatgggggtgaggtgtccatttaaaagaagatcttcagattttttacaacttgatggaagtatttttatcacaaatatatatacatatgtcatcatttcttatttaagatattaagcatttaatattacttcggattaactttcatgttttttttttgtatttattacttgacagataataatcattgttcttctgcctgtgttctcaata

SEQ ID NO: 26013 - DNA, 446 bp, Glycine max
ccccaaaagaacaacaaagggtattttttataattttccaaaaaaccattatttttggggtgtattaaaaaaggagtcctatttgggcctttccgttggtggaaaaaataaggctttcctccccaaaattccaatccaaagtttacttccttccaccgattaaatgattaactatcacaaccgaaatattcctttattttttgaaagtccctttttattttacttccacaaaaaagactaggataaaaacaaaaaaaaaagtgatcccccttttcttgttggtcttatatccatattaatggagatagaattcatgtcataatttaaaaaatgaacatgtataattctttttcctattcaaaaatgatgagggggttattgataattggaaaagagtttttatggaagatttaagttttactaacaattttaatttgaatttttta

SEQ ID NO: 26014 - DNA, 416 bp, Glycine max
  modified_base (404)..(405): a, c, g, t, unknown, or other
gaagcaaaaacaagagaacaaagagttttaattattgcctcattagtttctaagtgctgagaaaaatgtctgctatggtagaggtatgggttggggagctgacaaagcttcgagaaaaagttcttgcccgcaagcctttcttattatccaaagccaaagaaggatcagaaaggaaccaagaagaaaaggaaactcaaactgcggtggttaagagagacactactaatggaaccatgtctgaggcaacggtgtgtttgcttatggatcgatttgtgccttggtgatatgagcaatagcacaaccaagatgtcttgtattttcttcaactttttggggttatgatatgtcttgtatatttactatttccatctatgagttcttagtcagcgaaatatgtaatggannatgtatcaact

SEQ ID NO: 26015 - DNA, 431 bp, Glycine max
tatttttaaaaatatccaaaagaacatttatatttatgtataatagaaaaagaatactaattggggctttccgttggtagaaaaaataaggcagtactccccagaattccgatccagagtatacttccatccaccgattaaataaataactatcagaaacgaaataatcctttaatttttggaagtccccttttattttacttacacaaaaaagactaggataagaacgaaaaaaaaagtgatcccccttttcttgtttgtcttatatccatatttatggagatagaattcatgtcataatttaaaaaatgaacatgtataattctttttcgtaatcgaaaatgatgagggggttattgataatttgaaaagagtattttatggaagaattaagttattactcaacaaatttgaatttgaattttttaaag

SEQ ID NO: 26016 - DNA, 353 bp, Glycine max
gattggtgacaaagttagaaacaaggagaaagaatgaagatggcaggaaagaaaatcccagatgtgttgctgaattcaggacacaaaatgccagttataggcatgggaacttcagtggagaatcgtccatcaaatgagacccttgcttctatctatgttgaagccattgaggtgggttaccgacattttgacactgctgcagtgtatggaacagaggaagccataggcctagccgtgggcaaagccatagacaaaggccttataaagagtagagacgaaggtttcatcacttcaaagccttggaacacagatgcacaccgtgaccttattgtcccagctcttaagaccacatt

SEQ ID NO: 26017 - DNA, 247 bp, Glycine max
cgtgctcttacattgcctagtgcggccatgtcgactctgaggaacctctgccggtgtcgtgggttgtgtctatccggagcaagatataatacatgttttgacaacgtatatactagcaatgcttgccgatggccgaaactgctgtctttgcttattctggcaacaaccttgtggctggcactcaaggatacctccattgaggagcaacggtcacacacagactaatacaccgctcatgatgaccact

SEQ ID NO: 26018 - DNA, 401 bp, Glycine max
cccacgcgtccggacgacagaaggggaatacagttaagttattctcactgggctttgtagatattaagcatgggtcaaacacctaatcatttaaatagcctgatgagaccctttatgtattgcaacttggtttggttcattttttttaaaggtgcatatttctacatgaagcttaattttgggtcttttacatttttttccagatgtttatcatgaaaagcaagaggtttttgatcgtgaagcacaaagatatgagaagttagcccaggcaaattatgatatgtttgctgatgatgacgagcatgataccagtaagccatctacggatgaaaataatgcagttagtcaatcttcttcagatgccataaattctggtcctgagggtggagcatctcaaagcg

SEQ ID NO: 26019 - DNA, 374 bp, Glycine max
gtgaagagatggagtatgatttgtcaaacagaaatgtcgcctggttgtggctttttcaagaggaaacatgttgctgtgcccgaattaccttgtgctgaaattgagggttatgttgctggttgcttctcaggaacacctattatcttaactaagacactgcaactcaattgccggaatgaagcataacaggaaatgcgccttggattccattccagaatatgaaacaactgagtgccagaaagatgtttctgatcatggacttgatatgcaggtagatgactgtagaagcttcaaactggaacaagatgaggactactacagcatgtattgaccaagaacactatatgcagatggggaagatggcgaactatcat

SEQ ID NO: 26020 - DNA, 424 bp, Glycine max
gggagacgcatggttctgaactaattgttataaataatacctaaaattttgagttgtcctaaacattggggtttaaacaaatccaatctctcaatataaaacccaatgatctcaccctcactctgtttctgatttctcactcttcgtttctcgttcggttcatcagcgtgtgtctcagccatggcgtttccctacatggaagccgttgtcggatttatgatattaatgtacatttttgaaacttacttggatgtgcgacaacatagggccctcaaacttcctactcttccaaagactttagaaggtgttatcagccaagagaaatttgagaaatctagagcctatagtcttgataaaagccacttccattttgttcacgagtttgtgacaatagtgacagactctacaattttgtactttgggg

SEQ ID NO: 26021 - DNA, 336 bp, Glycine max
ctttcaagttgaatgaggagatgattgaaactttgtttgtagtgaacacgcctaatccgaaacctaaggatactactccacgctctgttcttgcgccacaaaaccaggaggatagggtattggatcctaaaaagtgccaaaacattgctatcttgttaagagcacttaatgtgactatagaagaagtgtgtgaagcactcttagaaggtgttactgatactctcggaaccgaactacttgaaagcttgataaaaatggcaccaagcatggaggaagaacgcatattgaaggaacataaagatgattctacaaccaagctagtgcctgctgagaaat

SEQ ID NO: 26022 - DNA, 399 bp, Glycine max
ggaagagtgaagagaatggctcccaagggtttaacctttctggctgtgttaatatgcgtttcagcactgtcactgagtccttctgttgcgggggaagggcaaaataatggccttgttatgaacttctacaaggaatcatgccctcaggctgaagacatcatcacagaacaagtcaagcttctctacaagcgccacaagaacactgctttctcctggctcaggaacatcttccatgactgtgctgttcagagttgtgatgcttcactgttgctggactccacaagaaggagcttgtctgagaaggaaacagatagaagctttgggttgagaaatttcaggtacattgagaccatcaagaagctttggaaagagaattgccctgaagtgttcatgtgctga

SEQ ID NO: 26023 - DNA, 329 bp, Glycine max
gacacctctttctccttctccccagttctcaaaccttacctagtattttcgtttctgaacccaattaattaagcacacaaggaccataacatacctatacctcaatatcacaagtcttatggaggcagagcgagacaagtacaagatgatcaactttgaagaaaccgagttacgactcggcctcccactcagtggaaacgagacgctcaaaaccacttgcagcactgggaagagggtttttttcggatactgccgtggatttgaagcttaacctttcctcaacctcaaacagtgcttcttctgacctgactaaagagaagaacatcact

SEQ ID NO: 26024 - DNA, 420 bp, Glycine max
cagctttcttattttttcttggatctccttgatttggatgaggaggctggcatgatccagaagtcaactaaccaaactgatcaaaatgagaatgtatttacttattatttctttggcttttttgggattcagatttgagaagaaaacagtctattccaaaatccctaaatcaaatggcggaagaagaatctggactaccaatagtcaatttgcatgcatctcattgtgcagtcatgaacttagggctccaatttttttttatatttagtagttttggaaggattgaaaaataaaattaaggattttctttccccatatgactacaggtgatccaccccaacagaagacaagtcaggaaatgagaaaaagaaagaagatgagaatattactcaaggcgatccacctcaataggagagaagt

SEQ ID NO: 26025 - DNA, 416 bp, Glycine max
gggcacagcaacagggagggaggaataacatgagatattcatggttggcatgtataaagcaggatataatgttgccgttgcccttgtagtactataagtatgaccaagtaaaagggggagctagcaggagaaaggatcagatagcacttgtatttgattgatgagttaatggaagaatatctcagtccattagctgttacacatcttcttcaacaaacactcagaagcttatgcatccatcaaaattctcaatgggtctatgtagtcttctggaggatcgtgccaagaaactatccaccacccaaatgggaaagtgaagcggctaatgataaatccagaggaaacagaaggaactggatattggtctgggaagatggtttctgcaactttgctacctcatcagcaccctgaaataa

SEQ ID NO: 26026 - DNA, 169 bp, Glycine max
gtacaattcaaaaaaatgcttccaatggctggggctttttagctggggtaagatgccccataaaaactgtgacttgaatcgttcttttgcaggggaaaggcaacataattggcccttggtatgaacttctacaaaagaatcattgcccttcaagcttgaagacatcatc

SEQ ID NO: 26027 - DNA, 181 bp, Glycine max
cggccgaatcccggtcgcccacgctccgacggctggagagaccaagaggggcagctgctatttacgacccaagggaaagggttgcagaggcgcttcctgctaaccatacatttcgctgtggtctatcttgactattaaacattatagcggccgattaggggatatctactagtaccgtgca

SEQ ID NO: 26028 - DNA, 358 bp, Glycine max
ggcagggtgcaaggtacagcttcgatgggaaattgctggggttctccacctcacaacccaaccccaacaactaccggtaaccttagtacaggtacgacggggacatctcaggcgatcagcagcggtagctatactactactactacgacgactactacttcttctggaagtgggagcagctccataaatagcaagttctcagtgtcaagcggtggtcagccttatccaaatggacagatcttacctacctctaatttgaggatcttcacttttgccgagttgaaggctgcgactagaaatttcagagctgatacagtgcttggggagggaggttttggaaaagtttacaagggttggc

SEQ ID NO: 26029 - DNA, 313 bp, Glycine max
cacggatcgctgactgtggtagagcatgtgctaatagagttgctgcaatccgttgaccatgatagatgctacagcctatatataacgatgctggtcatagaacaactgcgtggctggacaaatagagaaaatcaaatggttcattggctacttcgcgaattcaggtgagtatgcgccgcgtaatgcaaaccagtgctgctgaggaccgtacacaagacacattagacgaaggttgtcgatctattgattaaacatgggagagcttacatgatgtccaggtgagggaccgcacataatgtgcaactctgacttg

SEQ ID NO: 26030 - DNA, 390 bp, Glycine max
  modified_base (371)..(371): a, c, g, t, unknown, or other
  modified_base (383)..(383): a, c, g, t, unknown, or other
agagaaatttccattatagcttttccttcataatttctgcttaggattagaattgtagttgctaccatacactgtgtaatagttttgcttggtgaagttcataagaggaccgtgcgtttaatggcgttacctgataattgcagggagcatgtaacatgaatgcgttacgtaataattgaaggggcgtctaacatggatcggtccaaaatggtaacatcacatgggtctgagaatcagttttgttttataggttataattatatgatatttgtgtgaaatatcttttagctttttttatcttcttttaattatatttggttgtccatcaaatttaaatatgaagctttgtttaagaagatgaaatctaattnttgtcacactanatacata

SEQ ID NO: 26031 - DNA, 413 bp, Glycine max
atggtaatctttctaacacccgaattatatgagaaacttcgatccatttttggtaaaaaaaaaaagaaagagaaaacgcaagtttctaatagaacttccccctttatgtatatttgtgaatgtgataaggaatttaactggaattaaaaaaaggggggattcacgaagatttaattactaaatgaataacttacccatgaatcatttccccggggtatgtttcaagttcccttatataattaatgcaaattggattttgattataggatatgtttccaaaaagattcaacgtactttttatgggtatacgataaggaaagaaaaaaaatataagtcattcaatttaatttgggtgtttttcaacctcaacatttttttatggggaagaccacaattagaagtcaaaacgtaag

SEQ ID NO: 26032 - DNA, 411 bp, Glycine max
gacgcttattatggaaggcctgtttatgatagttacggtgggagcaggccttgttacgtgagccgttgcgatgaatatttctgtgaagaaaacacctctgcttgcacaattatgtgatcgatcgcattattacttacttacttcattcatcgaatctctctctcttgtgccgcccatgcatgcaagttgttgcaacggcgcgttcttccatcttattgttggagcgatcatcaccctcatcaatccaaggaataatgatctttgtttttttgtgtttgggagtacaaaatgtttcgtacgtgaaacaaatatagataatatgatatgataccagaggctagctagctaaagaataaatgtttttactgtaatgtatgtaactgatactatatactgtgatatcttacattt

SEQ ID NO: 26033 - DNA, 390 bp, Glycine max
gatctgcaaggataaagtcggccaacctcaagtctgggaggatgtgcctcatgtagaaggggccttaatagtgaacattggagacatgatggagaggtggacaaattgtttatacaggtcaacacttcacagggttatgccaacaggaaaagaacgttattccgtggcattcttctttgacccggcctcagactgtgtggtggagtgctttgaaagttgctgcagtgaatcatctcctcccagattctctccaatacgtagtggggactacttgaatgaacggttcagactcacctatggttctgaaaaggatctaaaatgtgatttatccagttgaaggactaaatgccgtacttattatggctggctgctaccacaaatatgaaaata

SEQ ID NO: 26034 - DNA, 402 bp, Glycine max
ggaggtaggaagctctagtatagtatccaatacaagatctcggaggaattttcatccaaattctggattacgtggccaagaaattaaaagctctggttcagtgactcgtgctggtaccagtaggtatggattgaggaacctcaaatgcaatactatttctgatgtcatccctgctggttgttcaccttcagattcaacccttaacagagggaaggatgtcataaaaaagagaaattgtgaaggggaaggtagttccactactagagggaagaaaatgagcgggtcttcattagaagcacggaattctggccccagaaatggcatatctatctctgatacaagaatatctaggaatactcaaagggacaggtcagacagcaacatggcaccagttagaactcg

SEQ ID NO: 26035 - DNA, 389 bp, Glycine max
gaagaagttaaacccagcaaaatggactctgaagcagtagccaatcctgaggatcagtcatctattgtggggcctggttgctaatgtcttaggtcttccaacatttcagttgttatatatatatacaatagatattggcatgaaaataggaagtagaacgtgagagaaacgagtatgtacctggcaagcccttcatcatggcctataaggagcatatggttagtgtattctgcatctatacaggagcagcataacagcaccaaagcagagggcttggggtattgtggcttttctctttctttcatagctctgtaatcaccgagtttcgatgccttgcttgttcagttttgtattggttgcgagcgtgcagaaatgtcttgttttttttg

SEQ ID NO: 26036 - DNA, 423 bp, Glycine max
gtttgtggtcccattatgtgtaatcgttgcttggataatgggtatcaatatggacatgaacttcaacctcttagagacaggttcccttgctttggcaataatagtcacaggcttcactttacaggatggaacttctcactacatgaaaggccttgttctcctgctgtgctacattgttattggggcatgcttcttcgtacaaagaacaccctttaataaccaagctgatgttactaacatcacacttaaaccagccactaatgcagttttaagcgcttaattagtaggctttggcctatttcttgtcctttcctgagatgaagaatggtggtatcgatccaaacccaaaatcagattcaaattcaatggattgttattggttcattctgatcacattgtcatatccataaagagggggggaaa

SEQ ID NO: 26037 - DNA, 419 bp, Glycine max
gttgatgcagaggttgcttgtagtagtgctcaaaagttcaacatatttggttcaatacttgtaaattaccagcttaattatactcctagtgcattgttcaaagcttcgtctgttgccacaacacaggaccaggagatgcatcttgatctctccaattttgaagttcatatgattgggagtgttgatgatgatgtggcggctaagtttggctgaatgaattgctgaagcaaaattttacctagtggctgctgaagtaggtaggtaaccagaatgttaattcatctggtcgtccatttttctgttaagagatattttttgttgtaggattcctttagttatagttcagtagttttgtaattcattttctagttttctgtatagctttgtcaactgaccctcttttgtagttgccatcattc

SEQ ID NO: 26038 - DNA, 426 bp, Glycine max
  modified_base (393)..(393): a, c, g, t, unknown, or other
cccacgcgtccgcccacgcgtccgcccacgcgtccgcccacgcgtccgagacgacagaagggtagatggatagcttgtgtctcaggtgttgttcagacagctttgtatgcagatttcttctactattacttcatcagctggaagaacaattcgaaactgaagttgcctgcctgaattatctcaagttgttttggaatttagacctgtgtgaccagtcaccgctaaattttacagagcgtcgtggtttggatgatgttagttttgagagtaacgagacaaggctaactcctctccctgttcatgagtggggtaagtaagttttgtttttaaggttcaagggtaaacaggttttaacttctgatgaatataaccgtcccgtgggttaaaatgcanatgttatgtgatgatgttttgtatattcacgtc

SEQ ID NO: 26039 - DNA, 420 bp, Glycine max
  modified_base (372)..(372): a, c, g, t, unknown, or other
ggttctagtgtgtgattgtttgttgttgtaactcgttcttcttcttttgttgttctgtgtttgtgtttgttttttctctcacctgaaaatgtcttgctgcggtggtaactgtggttgcggaagctcctgcaagtgcggcaacggctgcggaggctgcaagatgtacccagacttgagctacactgagtcaaccaccaccgagaccttggtcatgggagtggcacctgttaaggctcaatttgagggtgctgaaatgggtgtgcccgctgagaacgatggctgcaaatgtggaccaaactgctcctgcaacccctgcacttgcaagtgaggtgttgggagagcaagcttcaagcagaaatagcccttaattangaataatgataaactattaatgtgtagcttaaaacctatgtattatgt

SEQ ID NO: 26040 - DNA, 415 bp, Glycine max
aatattgcgtaatttaataatacaaaccattggtggcgcctattcgacatcatatattgtgtatagttcagagacaacatagactttttttaagccttgtaatttaaaggttaactccatcttacacaaagtttgataaaatgtggtagtagaaaattagtcttcaaaagcttaagaaaaattctctaaaaaacacataaatgataaaatatcaactataatcattgattaacgagcgcgtaaagcacaaagtctacatttcttccactagaacccatgtcacatcttgggttttcttttcccacccgagtcaaacgaaccatataattccaattttacttttagattctataccattaccagtagcacgtccatccagtgattcaaatgcaaacatagtagatatgattgattt

SEQ ID NO: 26041 - DNA, 407 bp, Glycine max
gatcatggacatctgagatgaggctgaaccacgacatagtttcatacgagttcttctattatcaccataccttagccgttcaactcccatataacccaagcaaatttgcctttagattctcattttccgtcaagactatctctctctctctctctaggaatccaaaatattccaactaaacctttcttccttttcatggcagattctacccgtctttcattcagttcaatctcatacctgtatgtgtatctttaatgcaatcagttgatgaatgagaagaggaatccaaaacgtcaaaaaccactgactttcatcatgcctgtgacagactcaaatgatccgcagaattttgatgataacattcttttccctgttgaagagattgaacaatacccgttgtccggata

SEQ ID NO: 26042 - DNA, 392 bp, Glycine max
gggagctttattgcgttgttgttgctgtagatggaaaagggtagaaccgtggtggtgtccgctctgcagtttgcttgcaccgatgatgtctcaacaaatgtcgccaccgccgagaggctagttagagctgcacataaacagggtgcgaacatcattcttattcaggaactctttgaaggttattacttctgtcaagcacagagagaggagttcattcaaagagcttagccacataaggaccatcccacaatcctcaggtaaaataattgaaaaagtagcttctgtaatctgcttcttagtcactgcttgcatgccactcaatggactggaaccatattatgctgctgtaagggacagtttaaccatattattcttttttgatgctcatgatg

SEQ ID NO: 26043 - DNA, 331 bp, Glycine max
ggaacaacaacatagttcatcctcttccttctttctccaccaaaccttaaaccttaaactcgcatataacccaatcaaatttgcctttagattctcatttcccgtcaaactatctctctctctctctctaggaatccaaaatattccaactaaacctttcttccttttcatggcagatcctacccgtctttcattcagttcaatctcatacctgtatgtgtatctctaatgcaatcagttgatgaatgagaagaggaatccaaaacgtcaaaaaccactgcctttcagcatgcctgtgacagactcaaatgatccgcagaattttgatgat

SEQ ID NO: 26044 - DNA, 268 bp, Glycine max
agggtgctcgaatgggcgaggtgactcaaaaaatgcggggtttatgagaacaagggtggagctgttgttggtgctgctatcggggttttggcgcgtatccggtgtgaaacaaagaaaaagaaatgcttacgctacgatgatgttcgtatgaacgccgtgggactactaattctacataggcatactcgtgctggtcatatcgctggctacgctcgacactcaagctgatcttgttgtctttgcttcctttggagcatctcctcgatgg

SEQ ID NO: 26045 - DNA, 338 bp, Glycine max
cgacatactgatgacagagagggaattgtctcaagttaatgatattaataacctcaaaattgtccatctcacgacaaacatccttaaagccaagatcccaagcattaccaaaaaatatgaatttaaatcgctcagtttggtcgctcaaagtatcaatgatcaaaatggtgaccaaataacgtgtgtcgcaaaaaccctactctcgaagtctttagcgaccgaatttcacttttgtcgctaaatagcgaccaaaacaatcaatcaaaagaaaagaaaattcggtaattgcatatttggttgctattttgcttgggattagttgcgcaaccgaaatattc

SEQ ID NO: 26046 - DNA, 333 bp, Glycine max
ttgtaagagaacaccagagggggtttacggatatgcgctctgttgggaataacgagggacatgttatgcccacttcgtttcccggcatcaaatattacacaaaatgaacaatattggcatcaccatttcctataccaatatctgatcccaggagatcaagtgaacttgagatagcacggttctaagtatcgatgaaacttgaatactttttttcaaagaaatgccgccctgaaactcattctaagtgaaaagctcacggtgtgacaactctactcagaagtattagactaattatatgaggaaaggtgaccttacaggactattcatgtttat

SEQ ID NO: 26047 - DNA, 429 bp, Glycine max
  modified_base (327)..(327): a, c, g, t, unknown, or other
gggaaacaaaagatggcaggtttgggaatatggatggatttcgttagcctgtgtcttctgtctgtatcagtatcaggtctgctccaacgcctagagcaccctgtcaaagctgatggctcacttagccttatggtcattggagactggggaaggaaaggaacatacaaccaatctcaagttgccactcagatgggaagggttgctgcaaagttaaatatcgactttgtgatatccactggagacaatttctacgatgatggattgactggtatagatgaccctgcatttgaaatttccttctcaaaaatctacactgccaagagcctncaaaagcaatggtatagtgtgttgggcaaccatgactacaggggtgatgttgaagctcaattgaatccaatccttcagaaaattgatcctagatggatctgg

SEQ ID NO: 26048 - DNA, 389 bp, Glycine max
gggataccataacctataattagggagcaaggataaaggacaatgcatggagcaatccaacctagaaacctactatatcaagcatattgatcattaattaatttgaaaagggatgaatagtgtgggaagtgcgcaaactttgccttaaacaattggttaattgaattgaaataattcccttttaaatcatgcatgttcattgtagctagttgctatcatgctgaaatttttatattttgatgctaacaggtgacaagcctacttaataattgaactcctctttgttgcatgtggctttgcttcctttttttttaatgtgttgagatcgatatacagtaggaccaagaaaaacaaacaggctacacacagtttagagaagccacttgcgt

SEQ ID NO: 26049 - DNA, 423 bp, Glycine max
gacctccttctactttgttttaagcttagagagtttgattgaaatccccaatcaaaatccaaggtttttctgtttggggcttcaagttttccaagaggtctctcgtcaagtgtttctgaacttgttgagggaaaccatacatcccttagagaaaaaagacatgatcattattctctaccttcatacttgcatggatataattgtcaaatcacgagagaatgtcaaggttaactggatcattccacattatcatcaacaccccttctcgattcctaccattacctttgtagtcaatcacaaaagagtttttcagaccagcaatatccttcacacaattagtctcactataaggtttttttgtctccattaagaagactacattgggagcttccaaggtaaggagctttcacaaagctcaaacta

SEQ ID NO: 26050 - DNA, 423 bp, Glycine max
ggttctagcgtgcgattgtttgttgttgtaactcgttcttcttcttttgttgttctgcgtttgtgtttgctttttctctcacctgaaaatgtcttgctgcggtggtaactgtggttgcggaagctcctgcaagtgcggcaacggctgcggaggctgcaagatgtacccagacttgagctacactgagtcaaccaccaccgagaccttggtcatgggagtggcacctgttaaggctcaatttgagggtgctgaaatggctgtgcccgctgagaacgatggctgcaaatgtggaccaaactactcctgcaacccctgcacttgcaagtgaggtgttgggagagcaagcttcaagcagagatagcccttaattaggaataatgatcaactattaatgagtagctaagaacttatgtattatgtctg

SEQ ID NO: 26051 - DNA, 316 bp, Glycine max
ggttacactgggtgtcatgatcagtcattttgggtgtgttcttcagccctttactgtgtgctgtattcccatgatggcgcgaacgcctccctgagggcgctgacgtagctgctactgagtcagccactgcggctgcaacaagcactgttatgacatgaactatccttctatgtctaccgtccaaactcttggaaagggtgtctggctctgtgaacgcccaactgggggtggctgatatggacgtagtcattgagaacgggaggtctgactgtgtatcccgctgcgcgtgcaagcccttccactgcatgtgaggtcg

SEQ ID NO: 26052 - DNA, 200 bp, Glycine max
ggagactagggtaaggtcaccttgaaacctaccatgtcaagcgctgttactatgtatgtagtttttgatggcagaccaaaccctaaatccgcataacaaccatctttaccaagcgatgaggaaaagctaatcctttgcttaaacacaagtctgattagatggatcacgacgaggttgacatggataacattcataataaa

SEQ ID NO: 26053 - DNA, 189 bp, Glycine max
agtcttctatagcgtcacctaaataccttggcggtatcatggaaatccctattaacattcaaagattttctgtttgtggctttaagatttccaagacgtctctcgtgcagtgtttctgaacttggtgagggaaaccgtacgtgccttataaaaaaaagacatgatcactcactgtctacctttatactt

SEQ ID NO: 26054 - DNA, 317 bp, Glycine max
accggcgcggaagacccgggccgacgcacgcgtccgaaacgcgtgcgcactgtagaggatgaagactgaggggcaagggcacgcgtggacttaggggtccttttgtgttaggtaaaaacaccaaatcattttaacttaaacaatgactacggtgggtatatattgtcgtcccttgtacttttctccgatgcaaatatctaatttttggctgtctagactatagctattagatctggagagatcggctgtcgaatcgggaggatatcattaatggcgagggatgagcgcttatatcgatcgcatattataacaatgtg

SEQ ID NO: 26055 - DNA, 386 bp, Glycine max
ggaagacccacgccgacgcacgcgtgcgagacgactacacaagggggctcaaggcgttttgtctcttggtataatcaaagacactcgtgagtaatataaaaggccctgttttcttaattgatacaatattgcctgtatagtaatgccaagcgttcgatatgtgccctttaccaatgaacactgactattgtgccccacattcggacgtgaaatgcgcaaattggaggcttgctgtggaaacacacaacatctttggctttgagaccattcctgaagagtgcgttctaacaacaaatgaatacattcttggcgaacaatattgattaaacttccaaacagtttagcaacaggcttactttttttccaaagaccttgaaattcattcc

SEQ ID NO: 26056 - DNA, 272 bp, Glycine max
ggcttaagggagtctgctgatcgatataactagggaccacgggattaatatgaagggccttgctttcttcgttcctacaaatttggtaacatgacaatgccatgcgtacgatatgttccctatccgaatgaacactgcctatcgtgcccttactcctaaggcgaaatgcgcaacttggatgcttgctgtgcaagcacacaacatgtttgtctttgagaccattcctgaagagtgcgccccatcaacataggaatacattcatggcgaacatt

SEQ ID NO: 26057 - DNA, 160 bp, Glycine max
aacgggccgaccgacgcgtacgcccactcctccgtacaattactagaacacttcttaaaattccacattacattaaaaactagatgcaattttatagactaacacaacactctaactctccaaaacatatcaaaccaacaaaccaattacttctcattca

SEQ ID NO: 26058 - DNA, 225 bp, Glycine max
gcccggaagacccacgcgtacccacgcgtccgcacacgcgtgagaacacgtcttataggacctcaaaagggaccctatgcatcgtgtgatgggttcctactgaaagatacactcttccattatcccgaaaggtagtgacggatgacttattcagacacctactgaccgctgcatatatatggacatctctttacgacccataaagatagacgggatggatcacta

SEQ ID NO: 26059 - DNA, 343 bp, Glycine max
gcatctgatgactgataaaagaatcagacacatgcctgtcgtagatgaaaagggaatggttggcatggtgtccattggagatgtggttcgtgctgtggtgcgcgagcaccgacaagaggtggagcgcttgaatgctttcatacaagggggttattagatatgatgatgaaaatttctcaagggcactcaagctaatttggattatgtaataagcttgagtgcttgtaaatatgttatggccacagagccttcttgtttgctttcatgtaatttcagttttatggacattaacccagtggagtagcagcatgttaataataacaactggatgcagtttgaattt

SEQ ID NO: 26060 - DNA, 448 bp, Glycine max
gcggaccagcggcgtacgttgctaaagcgacagattgaccttttccttgccccattacaacctgaaatgcctttttatcctcatggcttgtctttatgggttgattgtcaattttagaatcttgccaagtttatgtggtgctggttttcatgggtgctttgagggtaaatagtatcctagacacttgagagatggagtgcatatcttgtgaggctttatcacatttcattcttgagctgattaactattttgccatgattgggttgcttggatgatcttcactaatgtctagactctatggatctcttcatgttagatgttacccatttctttcattccttgatgttcattgagaaaaatgtgaatggtttttgtctttctctctttgatatcctaagattttgttcttttgttcattttttcccagcaattccatactgcaaaattt

SEQ ID NO: 26061 - DNA, 238 bp, Glycine max
ctaccctcactaatataaaaataacatctatcttctatacattccaaaccatatctcattgattccatatcaagaattatctaattacatcattaaacttctcatgttacatctataacacgcactcaccaacctacaatttcaatttttttaaatatattatatacccttcttcaattaaaaaaaaaaaattgatttcatacttatcatccttcatccctttaataatacatacaaa

SEQ ID NO: 26062 - DNA, 357 bp, Glycine max
gaagaaagtagaaaggatttggattcgaggctggctaggtgaagtcaacaaagaaagaaaaaaagctttctccgagaaagcttctgttcacgtcagggtccggggtaggcttcttcattgagattgggttggtgttcagtgtgaatgcatttccagtgagataagagaaaaggaacgaggggaagaagcgacttatattaagaaatattaatatacttaatttaatattaatgttcgggtacccccctccggctcgtagttgagaagagctttcgtttaggaaagggctaaatgggtgcgatccctctcgttgagagacaagggtctcctggagtagaaagcacatcctgtatctat

SEQ ID NO: 26063 - DNA, 174 bp, Glycine max
atacgttgcggctgctagaacactactgaaaggagacctcatgtcatgcgacgctacccgctgtgtttatgctacatgtctaacacgcactctccaacctccgcggccgctctataggatccaaatttacgtaccctttcatactaaaaaataatacttttttagtgtctccta

SEQ ID NO: 26064 - DNA, 397 bp, Glycine max
gaataaagtataaaggatttggattcgaggctggctaggggaagtcaacaaagaaagaaaaaaagctttctccgagaaagcttctgttcacgtcagggtccggggtacgcttcttcattgagattgggttggtgttcagtgtgaatgcatttccagtgagataagagaaaaggaacgaggggaagaagcgacttatattaagaaatattaatatacttaatttaatattaatgttcgggtacccccctccggctcgtagttgagaagagctttcgtttaggaaagggctaaatgggtgcgatccctctcgttgagagtcaagggtctcctgcagtataaggcacatcctggatctattaagccggcaagggttcagcattggctttcacgaccgcaa

SEQ ID NO: 26065 - DNA, 361 bp, Glycine max
aaggtaacagcatccagtggaaactaagaggagcttaactttttggttaacttctacgttcacgaatataaaattaagttctatcttctatgcattgcaaaccattgtgcattgatgccatagcaggaattatgttattacatcatttagtttctcatgttacatgtctagcacgcacgcaccaacctgcaattgcaatggtttgaagtatatgatggacccttgttagattaaaaaagaatagatgatgtcatacttatcatccttcataccgtttaagatacatagaatgctgaacgacgttttgctttatagatgaatgcctgatgatgttaaacagatgccaataacacataaaatc

SEQ ID NO: 26066 - DNA, 54 bp, Glycine max
  modified_base (43)..(44): a, c, g, t, unknown, or other
agacctcaggtcaggcggggctacccgctgagtttaaacacannaaataaaatg

SEQ ID NO: 26067 - DNA, 352 bp, Glycine max
  modified_base (65)..(65): a, c, g, t, unknown, or other
gcggagccacgcgtccgccacgcgttcgacgactactttatgactttataatgtcacgtctcctnataagaccactgacctgttctaatggcaaaaaacaacttaatttttctgttcctttaatacttcataaatattcatttgctataacactacaaaaagttacaactcctagaatactacatacaatacacctaatttcaaacaacactacactctttgtttaaacaccacaactaatccgaataatacaataaactctaccactttaaatatatccatacttacctacactctcattctactctataatttttttatacattcatataaattaaacttactttatacc

SEQ ID NO: 26068 - DNA, 402 bp, Glycine max
caacgcagagcgtgttcttgagtcaattcaacttctcttggatcttcttgaggcccctgacccttgcacccttgagactttccttggaagaattcctatggtcttcaatgttgtcattctttctccccatggttactttgcccaagataatgtcttgggataccctgacactggtggccaggttgtttacatcttggatcaagttcgtgctttggagaacgagatgctccatcgcattaagcaacaaggattggacattgtacctcgtattctcattatcacccgtcttctccccgatgcaatcggaactacttgtggccaacgtcttgagaaggtgttcggaaccgagcactcccacattcttcgagttccctttagaactgagaagggaattgttcgtca

SEQ ID NO: 26069 - DNA, 235 bp, Glycine max
ggttctagtgtgtggttgtggggtgttgtaactcgttcttcttcttttgctgttctgcgtttgtgtttgatttttctctcacctgaaaatgtcttgctgcggagagcactgtggttgctgaagctcctgcaagtgcggctactgctgcggaggctgcaagatgtacccagacttgagctacactgagtcaaccaccaccgataccttgttcatgggagtggcacctgttaaggct

SEQ ID NO: 26070 - DNA, 310 bp, Glycine max
cggaacgaccgacccgaccgacccgtccatacacacatacaaccacgactattaccttttctaaaagactacacaacttcggggtgagggggttccaattaacgactatcattctatatctaatataatactacaaaaatgtacacttaactaaaatcatgattaggcattaaaaaatattcgaattaacacttaatacccttagtaagcagcttctaccaattttacatgtcctacagcagaatctacttagacaaatcttctcatgttacaaaagatctacgtcacttcatgatctgcattacacatt

SEQ ID NO: 26071 - DNA, 424 bp, Glycine max
caaaggcaggactaccttgtctaaacatatattcaactgcggggcgaggttgctcccatttcccactagcagtcttgaataatatattaatagaaaaatatacacttaaataaaataatgattaggcattgaaaaataattgtattgaaactaactatacttaagaagcaacagtaacgaatattaaatgtcctacagcaaaagcttgaataggcaaatcttttcgaatattaggaagatttgtgggcacttcaatgactggcatctggaacatttttaagaactctttctcctgcaatgatatatatggtcatcaagaactcataatagcacaaattgtaatagtaatgacaactcaaatgaaatgtcaaaactatataaatctttacttctgttttggcagtaccagtcattcctgacaact

SEQ ID NO: 26072 - DNA, 311 bp, Glycine max
ggaaagacccacccgtccgaaccgtccaaaaaacaacacaaaggcagacttaacttgtctgaacatatattcaacttttggtgcatggtgctctcatttccaacaatcccattttaataatatattaatagaaaaatatccacttaaataaaataatgattaggcattccaaaatgattgtattgaaactaaacatccttatgaagcaccaactacgacttttaaatgtgctacagcaaaagcttgaatacgcaaaattattctaatattaaaaatacatgagggcactttaaacactgatatgagaaaca

SEQ ID NO: 26073 - DNA, 343 bp, Glycine max
tgaggcatctttaaggactgaggatccacattatcaagataaaagaatggtggctcaaagaaatggaaagatatcacttcaagtatttcatgtatatgctgggaaggaaagggaagctgtcttagatatgcttcgctatatgcgtgtgtgctatatctcatatccttctgagacggaatctgtacatcttctctcaaagtccattctgtcctgaacgccattgtatataacattctgcatcggatcatgtgcctgattactttaaggcacagtatgactggctaccctacaacattggctgaaggtgaatgtatgctgacagatgataatgtgaatccaaaca

SEQ ID NO: 26074 - DNA, 418 bp, Glycine max
  modified_base (282)..(282): a, c, g, t, unknown, or other
caggacgaccttgtctaaacatatattcaacttctgggcgaacttgctcccatttcccacgagcagtcttgaataatatattaatagaaaaatatacacttaaataaaataatgattaggcattgaaaaataattgtattgaaactaaagatacttaagaagcaacagtaacgaatattaaatgtcctacagcaaaagcttgaataggcaaatcttttcgaatattaggaagatttgtgggcacttcaatgactggcatctggaacatttttaagaactctntctcctgcaatgatatatatggtcatcaagaactcataatagcacaaattgtaatagtaatgacaactcaaatgaaatgtcaaaactatataaatctttacttcttgtttggcagtcccagtcattcctgacaact

SEQ ID NO: 26075 - DNA, 398 bp, Glycine max
cctttttaaacatatatccaactgcggcgctttgttacttctatttgccacttgcagtctttaataatatattaatacaaaaatatacacttaaataaaataatgattatgcattgaaaaataattgtcttgaaactaactatacttaagaagcaacagtaacgaatattaaatgtcctacagcaaaagcttgaataggcaaatcttttctaatattaggaagatttgtggtcacttcaatgactggcatctggaacattcttaagaactctttctcctgcaatgatatatatggtcatcaagaactcataatagcacaaattgtaatagtcatgacaactcaaatgaaatgtcaaaactatataaatctttacttctgttttggcagtcccaattat

SEQ ID NO: 26076 - DNA, 418 bp, Glycine max
  modified_base (390)..(390): a, c, g, t, unknown, or other
gacaccatatgaaggaaagtttcgtgggttttgggtacatgccttcttcggtttcacaaatcccatcttcgttgtttcaattttcctctcgaccacactttcctttttgcaagtaagtagcaccaagaggcaggaactagagagtaacaacaaattcaatgtcaaactcaaacatcacaagttgtgatagttggagcttcactacagagaataataataatggagaagatgcagcagcaactgttaaacagcaattggagatgcttggccagctttatagtccaaattcaaacacttcaaccacaacaaataatagcaatggtggctcaaacgcagattcacaaccacctgctaagaagaaaagaaacctaccaggaaatccaggcatcntttcttttttctttttcccttttctttt

SEQ ID NO: 26077 - DNA, 392 bp, Glycine max
accgagcgaccacgcgttctacgggtagcaaagacgacatttgggggttatataacacaaggtcttccaagagtagaggaggtattagaagttcgttcgattgattcaatatcgatgaacctacaaaagagagttgatacttggaatgggcgtataacaaaaattcttggcattccctggggattcttgattggtgctgagctaacgatagcgcaaagtcgtatttctttggttaataaaattcaaaaagtttatcgatcccagggagttcacattcataatagacatatagaaattattgtgcgtcaaataacatcaaaagtcttggtttccgaagatggaatgtctaatgtttttttgcccggggaaactaattggattgttgcgagccg

SEQ ID NO: 26078 - DNA, 291 bp, Glycine max
tatcggggttttttatgtatcaacacctcctgactcattgatgcattaacaacaccgctcaaacactattcacaaaaaactctctcccaaagtaccaaactctttcctaacagaaacttaccccaattctatcaagatttagatattcagcacagctcacattttagaaaacatactatacgctcacaaagactcattctacatactcataaaactcccattccagcatagacaagatcatatgttgcacaaggaaaaacaatactggtccaattctatacaaaccttctt

SEQ ID NO: 26079 - DNA, 340 bp, Glycine max
tttagagtgctttctgcgaaaaaaccacaaaagggaacgggtgaaattcgaccactctagggcttccttccattccttctcaacatagctagcctattcttctttaaatgaaggcctttgattcaatataacttccgattttcatcactcactattctcctaatacccgttatcttcccagcttcatattttatacctacatttcggtatgctcacctgttttcttgaccaactgccccagactgattgccattcattattacagctcacattacatttcaaaaccgctacaccatttcacctaacataaacaagatattgtgtgtcattatcatacacc

SEQ ID NO: 26080 - DNA, 369 bp, Glycine max
ttcatacggcaatattaccatctgaaacctgtgtaaaaatataatactaatagttatgtaaaaactattaacctgttcctaaagtacatataattatttttaaaagaaaagaaaaaaaaagctgagagaatggaatattattagtacaaattatatgaagcaattagtatatctcaatatttagaaatatggtaagtgaatgaaactcaataaatgcgtaccttagtcgaaagtcaaaaccattcaaagccctcaaagcagcaccaaatatctgatgccacgtgttacgacctgtattcaatcattagaaatgttcgaattttttacatcttatacacgagaagttaaataagaattatttacatataa

SEQ ID NO: 26081 - DNA, 409 bp, Glycine max
attctaaccttgtctgcatgatgtctgagagcggccttgtggtatgccttcttgatatctgttgctgtatcagctgatttgattcctctgatattgacattgtaagaggttgggtctttaataaccttacggttctgaatgaggtaaggcacattgcagagtgtgtgaaattgagagagatgttgaataacaagaaaatagaagatgagaaaacatcttctagctatctttatcttttggtttttggcatagaaccggatttcaaacttagtagattttgagtaagaaattgattgtttgtaagtatgaaattgctatggaaaacagtttttaaaaccaaaaaatgagaatgaaatcaaagaggcctttaatgcttcactcaaagggaacaaaataaagggtcccaaaa

SEQ ID NO: 26082 - DNA, 337 bp, Glycine max
ggctttttctacatttccctttcctgaattcctcttctactactcacacctctcttttctctcccactctttctccctcctcaattacttctccttttttttctgattttttctttctttctttgaaggtttcgttttgcaggtcgctccaatggggaaatcctcctcttcgctcaagaagaaacgttctaagaaattatcgaaggccaaggcaagcagtaaaagtaagagaagtaggaaaagtaaatccaagaaggttcgtcgccgtaaggtttctccttctagttctgactatgatgattcaaaaagttggacacattggcttcctctagttctg

SEQ ID NO: 26083 - DNA, 340 bp, Glycine max
gctgcgcgaacacgccggtgggggatgacaaccaatgggatcacgacttaaataccatcggatgttggggcattgacggacatgtgctcaccttaaacctccatgaaaaagtcaatatggagaaccgtgctctctctcagctccttctcgggatgggcccaaagcttgtcaacaagcatgacggatatagaagaaccgaggatcgtacctggatcgatgtgtgaattagcgtataataaatataagcgatggcaacggtggtgccttgtgacactcagcatagcctgtcttatagtagggcaatctgctattgttatccttggcagattgtatcatgatc

SEQ ID NO: 26084 - DNA, 160 bp, Glycine max
cccacccgtccacaccgatactataagacttcaaattgcttcaccccttacaggcaatcgaattcttatcaatgcgcgccactactaatctcttaaacttacttactaaaacccccacagcaaccctttttcttttttaacccctaattgcaatacaact

SEQ ID NO: 26085 - DNA, 281 bp, Glycine max
  modified_base (15)..(16): a, c, g, t, unknown, or other
cgaccgacccgtccnncacaacattcaaagacgacatttaaagacttataaacgcaaaaaaacaaaactggaaaacttgtaaaatttttcctttctataccatccaaacatactatctcacccattcaacatcttacctcttttatacattaacctaataacaataaacctgccgaaatttaacaacaacaaatctaataaaaccctcaacatacccaacttaatatccttacaacacattaacctatcaacaccagtcaaattaaccattaaacccaaac

SEQ ID NO: 26086 - DNA, 340 bp, Glycine max
  modified_base (46)..(46): a, c, g, t, unknown, or other
  modified_base (89)..(89): a, c, g, t, unknown, or other
tgccgtacaaccactcagatttgcggtctcaaaacgaccacataangggggacagagttaaaatggaactggatccagagaccatccangtcaaaatgcactggattatacacatccgacaaacctactactactatccatatacacgatctctttcactataaccacagcaccaagcgtttatcgagaagaagctaaagaactttgacaataagcttacgacatagcttatcacgcctttaatggatacatggaccacgctttcctcctacattaattgacacctccctcctgcacaagacataatacgcttgcaagctatgcaataaccttgattgac

SEQ ID NO: 26087 - DNA, 316 bp, Glycine max
catcaaaaagtgttgagaaactattcctcacttttttatgaataatttaaatttgtcaacattatttatcacacaatattcataattaattatttgttttgataataaatagtcacattaaatattatattactatttattataataacccctgattgtatgtgatttaattttatgaataattaaattgctcaacattatttattacacaacattgatatttaaaaatatttttataataaacaatatcctttaatattatattaatactttcggtccttttataaaaaaaaaaatatataggattttttatttt

SEQ ID NO: 26088 - DNA, 259 bp, Glycine max
cggccacgcgaacaccacctataagacttacaatcgaggacacaaacaggggtttagaacaaatgccaactacactaatatctacaacaactcacattacattaaggaaccgatacacgtttaatatactcatcaaatcgaaaggcatatagtcacttactcagcgacaataatctcatgctcttctaggaagaacaacccaaataaaacaactacatacaaaaatctgaaatggagaggttgctgcaacataatcaac

SEQ ID NO: 26089 - DNA, 204 bp, Glycine max
tatcgagatacctaaacactctcataaaaaagactattgtagcttttttcatcccaaccggctcccaacctgcccagaacactgatcttcccagctcaccgccagtctcactcactcaccaagccttcttctacgtctacaagagccactcgcattctctcaagatttcaatacattcttcccactccaacaaccgcatatcct

SEQ ID NO: 26090 - DNA, 328 bp, Glycine max
acaacaaaagcacccccctgatatttgtaaactttaaattactctcccccattcacatttcaaatcctcctttctttcatcacatcatacaacctcacaaactcctcaatcattcatacactataactactaacaaataaatatcaaccttccttctcccattcaaaaaccaaatctgctacaaactactttcaataaacactagcctatttacttaaccaacccaatcatattaaaatcaatgtcaaacaaccttatcttaataatcatcccaacatccaacaaaaacatttcgtatcatactctccttcccacactattcaaaaac

SEQ ID NO: 26091 - DNA, 248 bp, Glycine max
  modified_base (57)..(57): a, c, g, t, unknown, or other
ggaacaggaaaatcggggacatgtaactttatacaagattctttctcgactaaatancctcgatcccaccaatagcaacaaacatattaattgcatccgtatacacgatcccattttacataatcacatcaacaacaggtcttacttgtaccagcagatcacatttactatcatattactacaaaactttcaattgcatacaccagattcatcatctaagctttctattaccacaaaggcacatctca

SEQ ID NO: 26092 - DNA, 336 bp, Glycine max
aactgcagctagaagacaacaggagggcccagggtgctgaggacggcataaaggtactgtagcgaaagaacaacttataggcacgtattatcatccatacaacagaatacataaaccttatacaggtgatagaatgttgcacaagggggaagagagagagagaatgtgaggcacaatgaataactgcgatgggtgagagattgcgtgggataaacactagacgactctaggtcgtaagtgagtgttttagacataaaagtaatcacacatgtaagtgaagatctaaccaacagcacatagaagtgataagaatcaactgatcagtgaacgggattt

SEQ ID NO: 26093 - DNA, 335 bp, Glycine max
  modified_base (13)..(13): a, c, g, t, unknown, or other
ggaatggacgtangaaggaagtgaattgaaggtgcagtgagggcaaaatggaagggattattcagatccgatcagtgctgctactactatccataaccatggcatctctcactctggctgtggccgatggcgtttctcgagaagaagctaaagaacttcgagatgaggttaaggatatgttttatcacgcctttaatggatacatggaccacgctttccccctcgatgaattgagacctctctcctgcgcaggacatgatacgcttggtggctatgcgttaaccttgattgactctttagacactttggctttacttggtgaccgccaacgattc

SEQ ID NO: 26094 - DNA, 387 bp, Glycine max
gacaaaacaaaactgacaaaagaagtgcagttcccggatggcggtaatctttctttcaagctccgcaattcttcttccaagtcttgctttctttctcacattatttaaccttgcaagttccgaatcattcatcggcgtgaactacggacaagtcgctgacaacctgccgccgccgtcggcgacggcgaagctgctccagtcgacggccatcggaaaggtgcgtttgtacggaaccgacccggccataataaaagctctggcgaacacggggatcggaatcgtgatccgagcggcgaacggtgacattccggggctagcctcggaccctaacttcgcgaaaacgtgggtgaacaccaacgtcgtaccgtactaccctgccagcaacat

SEQ ID NO: 26095 - DNA, 408 bp, Glycine max
gtggtcatgatgtggctcttggtttgtttcatgagttagttgattctttatgcaagattcttcctggtggtggagcctcgatctcacgtatggcaacaaacatattaattgactccgcatacacgatcccatgttacataatcacatcaacaaagggtgttgagggtagtgcaagagctgtgttactatcatcttgctacaaaactttcaatttcagacacctatatatgtatctttgttgtcttttaccttagaggcacattttgaaggttaattagaagatattgtctgcaaccctaacgaaacccacgtaattctgatccctcgctcagacccgatcggactcatctaattacacttgtatgcatatgtagataaaattgacgagggttgatataagtagttaat

SEQ ID NO: 26096 - DNA, 367 bp, Glycine max
tacaacaacacatacgggctgttcctaaaatacctcataatgtggaacatggttaagatggaagtgaattcaagattcatcctggtcaaaatgccatggatcttacatatccgacagacctattactactatccatatacacgagctctttcactataactagatccacatggcgtttctctagaagaagctaaagatcttctactataagttaaggatatgtcttatcacgccttaaatgtatacatgaaccacgctttccttctcgatgaattgacacctatctcctgcgcaagacatatatacgcttgatggctatgcgataaccttgattgactctctatacactcatactatacttggtgac

SEQ ID NO: 26097 - DNA, 375 bp, Glycine max
tataaggggtttaagctagtagaccaatgccccagatcaaattgtaatattatttttctaacattctctctccataccatttcaacatttttaacaattttatatatcaatatacattcctatttacctcacagtcaatgaacaacctacacccatacaaactatgcgaccaaactttctatgctgccctcaacactccccttgaacaatacccacactactaggttgccttctaaacatccaccacgaccatcttcgaaatttctatcctaaacatcaccaccaatctctacaacaactaccataagatctatagtaacacctccataaacatatactccacctaaaactaaattcaacataaatcttacaact

SEQ ID NO: 26098 - DNA, 272 bp, Glycine max
  modified_base (70)..(70): a, c, g, t, unknown, or other
ccacatatagacttcactccactctaccacacaaagcttgctgtaccatttagctatgactcatgtccanactctatcacaattgagaaatggctacagatcttgatgttcaagaccaaggaagagagtactcttccaaagactaccatgaccctcctgcagcacctttgttcgacccacagcagctcacacagttcttcttctatcaagccctcatcactgagatgatagaaacacttctgtttctttctgatactaccctcaccatcatt

SEQ ID NO: 26099 - DNA, 295 bp, Glycine max
tatagggactccttttacagagagaaaagagaggattgtgctttctttagagaggaatagagccaaaaaaattggatttttttttggggtgttccaatggttgaactggaaatccaaagaagggtgtgagaaaaaaaaattgcatcttcttttggtgggtgtctctgaaactatgatcttgtgaaaacccacaaaggaaaccttcagtgcgcgttggtagatagatagagagagattattgctgttgggatattctgagagccgctgattgagaaatgaacggtggtgatgacgt

SEQ ID NO: 26100 - DNA, 297 bp, Glycine max
  modified_base (104)..(105): a, c, g, t, unknown, or other
cccgaccgaacggttccacaagacgtcagaaggggctttatgatcttgctcttgattagtaacatgagttattctgatctttattcaagatacttccttgtganntaacctccatctcacctatggcaacaaacatattaatcgactccctatacaccatcccatactacatcatcacatcaacaaagaatgttgatggtattgtaacatctgccttactataatattactacaacactttcaatttcagacaccactgtatgtatctttgttgtctttcaccatataggcacattt

SEQ ID NO: 26101 - DNA, 395 bp, Glycine max
ggcagcgcttgagaccaagccccgctcaaccgccacaccactctctctgctcttcttctacctttcaagtttttaaagtattaagatggcagagacattcctatttacctcagagtcagtgaacgagggacaccctgacaagctctgcgaccaaatctccgatgctgtcctcgacgcttgccttgaacaggacccagacagcaaggttgcctgcgaaacatgcaccaagaccaacttggtcatggtcttcggagagatcaccaccaaggccaacgttgactacgagaagatcgtgcgtgacacctgcaggaacatcggcttcgtctcaaacgatgtgggacttgatgctgacaactgcaaggtccttgtaaacattgagcagcagagccctgata

SEQ ID NO: 26102 - DNA, 397 bp, Glycine max
  modified_base (7)..(7): a, c, g, t, unknown, or other
tggcgtnagaacacttcagaaaggggttctctggcttacagctccaccatcttcggggtctccggggtcgatatgcacgacatgctctcctctatctaaacgtttccacccacttaccttccgatctttccacccattctgatactcatgctaaacaacaccagcgctatcataggcaattaccatatcacatcactgaattcggtgctattcaacagtgctcacctgagcattgaagtcatatacgagctttgtagcaattatcccaacagaaccatccttaaaggttatactttgactgaatccaccaatgtttgcgactacaccgactccttgtatgagattacaaggtacaggacagatggactattgtctcccgacacccaagctatgatcg

SEQ ID NO: 26103 - DNA, 295 bp, Glycine max
atttggaaaaattgtttcttgcactgtgaagccagagcaagaacccctataaaaggagaatgttggtgttcctgtccctgaaatttcataaccaaaagaccacaacgctcgaagtaactgcatgggaatttaccaaagttctctgtctggggaaaatgaaaatgatgtgcctctgaatataactgacatttcggtacataatttctggaggcgaggcaatgagaatattttttttaaagaaataactcacttccacgccatacaactcccgccaaaacatttatacaaatttttt

SEQ ID NO: 26104 - DNA, 393 bp, Glycine max
tattgggtttccttctataactttatatcaagccaactgttgcatagaaagtgctcatgaaaaaaatcaagtctataatttcatatcatttcaaaattgatatttcattacatcactttatttcgaaatgttacttaaatatataagttttctaccaatatattacatgtctatgaataaacttcgtaccccattgctcagaggctctttgctatgcgaaaatctggttgaaggatattgtacgcagccttaccctttcatattcaaagaagctagttcctgattctaacccatgaccaacaaaccaccattgcacaactttaccagtacaccacggctcaccctcagattacatgtttatcaatgtctaaattatttaaaatctggtataca

SEQ ID NO: 26105 - DNA, 364 bp, Glycine max
tagtgtaattatgatacttgcgggtgataagggtgtttgtacggtcacacacagttatatggtaaaactgaacaatggtttctctttctctttctctgtctgcttcttcactttctctcgtttcaatcgaaaaaaatcatgggcagaaaattcttcgtcggtggcaactggaaatgcaatgggaccactgaagatgtgaagaacattgttactactttaaatgaagctaaagtccctgtataagatgttgtagaagttgttgtgagccctccttttgtgttccttccttttgtaaaaagattgctgcgccctgatttacacgtcttggcccataattgttgagtttcgaaaggtggtgcttata

SEQ ID NO: 26106 - DNA, 81 bp, Glycine max
  modified_base (49)..(49): a, c, g, t, unknown, or other
tacggctgctaggggacgagggaatgtttcagctgctaaaagaccacanaaaggttctgctgccataagacgacaaaagga

SEQ ID NO: 26107 - DNA, 295 bp, Glycine max
tctcggcaacaaatatccctgctctttgataaatttaaaacgcaccaaaacgccattcttgttataaattgcaaaaacccataaaccatcaactctcttaacgcataatgcgcccaaagccattaaacctatgtcacacctgcctgcgtgtcacacatctaattcccaacgcaaacatgtaacaatctttctgctcagcgaatatgctgacctcccacaatcacccccctccaacttcgttgaaatctaagatcatggcctactattccaacataaaacccagcattaaccactc

SEQ ID NO: 26108 - DNA, 280 bp, Glycine max
acgcgtccgaaccgatgaaacgacagactgcggttctagcgtatctgaccgctgagagtcattcgtttacttcgctatcttcttcttttgttgtttgtagtgtatgctttttctctcacctaaccatgccttcctgcgcgtgcaactgcggctgcgcaagcgcctgcaagtgcctaaactcaatgcagtggctgcaagatgtacccagacttgctctacaccccgtgaaccaccaccgataccttgctcatgggagcatcaccagttaaggctcaattct

SEQ ID NO: 26109 - DNA, 349 bp, Glycine max
gatcactggttcttgtgaatctgatatttacaggtatggtagagactctcgaacatgctctgctttcattcacccttgttgtgaaacagattattagctgctgttacaaaatggatgctactacacccaagtattccaaggtctggtttgatgaaattgtgaaggaactctcttactacttcaagatagtacgatacaaccctgacaagatcccttatgttactatctctggttttgacggttacaacataattgaaaagtccacaaacctttactgacacaagggtccaaccctgcttgatgcactttacctgattattgatcccaagaagtcctctgacaagcccct

SEQ ID NO: 26110 - DNA, 329 bp, Glycine max
tcaaaaccaaaagctatcaagggtccttgcgaagcaacacatggcttctacagacaagcatggctacactgaatacataacatcatcttcaactccagctcctgcgggtgttgattactttaaatttgatgttatcctaaggattgtgttatttgcagcatcactggtagctgctgtggtgatcgtcactggtcatcaaacagaggttattcttgtgccacagcctgtgccatggccagccaagttcatatacacaccagcctttgtgtattttgtagctgcattgttcgttactgtcctttacagtatcattacaacacttgcattac

SEQ ID NO: 26111 - DNA, 419 bp, Glycine max
gactccttctataactttgtatcaatccaactgttgcatagaaagttctcatgaaaaagatcaagtctataatttcatatcatttcaaaattgatatttcattacatcactttattttgaaatgttacttaaatatataagttttctaccgatagattacatgtctatgaataaacttcgtaccccattgctcagaggctcttcgctatgcgaaagtatgggggagggatattgtacgcagccttacccttgcatatgcaaagaggctgtttccggattcgaacccatgaccaacaagtcaccaaggcacaacttaccgctacaccagggctcgccctcagattacatgtctatgaatgtctaaattatttaaaatttggtatacatgaccattagtatattatcgtataattcaatag

SEQ ID NO: 26112 - DNA, 379 bp, Glycine max
gactccttctataactttgtatcagggcaactgttgcatagaaagttctcatgaaaaagatcaagtctataatttcatatcatttcaaaattgatatttcattacatcactttattttgaaatgttacttaaatatataagttttctaccgatagattacatgtctatgaataaacttcgtaccccattgctcagaggctcttcgctatgcgaaagtatgggggagggatattgtacgcagccttacccttgcatatgcaaagaggctgtttccggattcgaacccatgaccaacaagtcaccaaggcacaactttaccgctacaccagggctcgccctcagattacatgtctatgaatgtctaaattatttaaaattt

SEQ ID NO: 26113 - DNA, 277 bp, Glycine max
accaaaccaactgtgcattgaaaacttttatcaacaaaatcacccctataattccataccattccaacattcataatcccttacatcactttattttcaaatcacacttaaatatataattcttctaccaacagactacatttctataaataaacttcgtaccccaccgcctatacgctcttcgctctgcaaaaaaatcgccgacggatattgtacccacccttacccttgcatatgcaaacaagctctttctcagattcaaacccatcactcaaca

SEQ ID NO: 26114 - DNA, 292 bp, Glycine max
  modified_base (11)..(11): a, c, g, t, unknown, or other
  modified_base (28)..(28): a, c, g, t, unknown, or other
  modified_base (64)..(65): a, c, g, t, unknown, or other
ccacaaatttnaaactttacttactganacaaaaaagtgctttttgcctatgttatacagcccnngtacccaaaatatttattaaatataaatctctattcatccaacatatgaatgtaagtcggaccttcctatcataatgaaccaattatcaaaaacgacacaaagttacattactagaatgtgggccatactacaaacatattcttaataccatatgttattcgccagtttatcctgcctctacatcctgtttactaattcttataattttcttgataagtacaaattt

SEQ ID NO: 26115 - DNA, 433 bp, Glycine max
gacagaaggggatgtcatgttttctttcactctctctccaattagggttttcctgattcccaatgccttctaattctctctgcctattcgcaaccgttcctactccttcgatcactcttcgaatttggtttctcgttcactctcgctcttcgattcggagaaaatcgggcgctattgcttgacactggtttcgtgccatgccgcctagtcgtagaaagggcggaaagaaaagcgccggcggtgccgccgcctgccggcagtttaagctcggcgatctcgtgctcgctaaggttaaggggttccctgcttgcctgcgacggtgagtgagccgcagaagtggggttactctgctgatcggaagaaagtatttgtttgcttctttggagccgccccacaaatagctttctgcaatcctgccgatgttgaaagtatt

SEQ ID NO: 26116 - DNA, 399 bp, Glycine max
gaacgtcacttactgagattgaaaatggcttttacgcctatgtaatacatttggggtaagcaaaatgttgatgaaatataaatatctattcgtccaacatatgggtgtaagtgggaccttcctatcataatgaaccaattatcaaaaacgaaaaaggtatacattttagtatgtggtttatactagaaacatattcttaatagcatatgttatttgtcagtttattttgtctttttatcctgttttctaatccttttaatttttgtgagaagtacagatgttgttgttgcacctccctttgtgtacatcgatcaggtgaaaaactcaattacagataggattgaaatttctgcccagaattcttgggtgggaaaaagtggggctttcacgggagaaatc

SEQ ID NO: 26117 - DNA, 251 bp, Glycine max
  modified_base (57)..(60): a, c, g, t, unknown, or other
  modified_base (64)..(64): a, c, g, t, unknown, or other
ttttgaacgtcacttactgaaatggaaaatgtctttttccctatgtaatacagtccnnnntaancaaaatgttaatgaaatataaatatctattcgtccaacatatgggtgtaagtgagaccttcctatcataatgaaccaattatcaaaaacgaaaaaggtatacattctattttgtggcctatactacaaacatattcttaatagcatatggtatttgtcaatttatttatgcctttctatcccgtttt

SEQ ID NO: 26118 - DNA, 256 bp, Glycine max
aagacgcctgaactagattacaactttatggggtgctatcactattcacgactgatgcacaattacacaggtgcaaaactatcaatggtctaaaatttcttctcttcaacctgactcatctactattctctctctctctctgtaactcaccatttttttttaaaagaactaaacagaaccgtccatctctctcatttcttatatttcacggcatatcttcaaccatacctttccatctttttatcttgctatttca

SEQ ID NO: 26119 - DNA, 164 bp, Glycine max
aaacgacgttttgggtctctttttttgcgctatattttagttcaaagattaatataatatgctaacagcaaatctttatttctaaattctgattttttttttttacaaatgaacagaaattaaattcttttccattcataatttttttttgcataagttctgac

SEQ ID NO: 26120 - DNA, 294 bp, Glycine max
tcattaaatctaaatatctatccgtccaacatattgatctaacatctaccttactatcataatcaaccaatcatcaaaaactaaaaatctatacattatactatttttcttatactataaacacattcttaatatcatattttatttcacaaactattttatctttttaaactcctatctaatccctataattatcgtcaaaaatacaaattttccttcttcacccttcctttatacacatcaatcacctcaaaaactcaattacacatattattcaaacttatttccaaaatt

SEQ ID NO: 26121 - DNA, 261 bp, Glycine max
aaacaacataatttacgatttttacacgctccccaaactttagacatttgttaatttcataaaaccacagcccatctttatttcataaactcttaatacaatctaatccaaataattcatcatcaaattattctccaatcttaaaatccacaacaacaatgattaaaagatttctcaacaatctcctatctctctcactctcaatcaccaaaaaatgtcatcacacttaacttccccatctcaacattcactattaccatt

SEQ ID NO: 26122 - DNA, 306 bp, Glycine max
  modified_base (25)..(25): a, c, g, t, unknown, or other
  modified_base (63)..(63): a, c, g, t, unknown, or other
  modified_base (77)..(77): a, c, g, t, unknown, or other
tactttaagggattttacattttcnaaactcatatgttacatttgttatcttttaaaaaccanagagcaaaacattnccctgctttctatttttttcactcataaaagtgacgtataaaataaaatcacaaaaaatatacagcaaatatcataattaacatcaaagtcagtccctatcacatgtcaaacatttaatataatcactagctaactatttagacaatatatacacacatataggtttattaattttacaactgtcaaaaaattacttacaaaaaaaaattttacatgataaaaatgtta

SEQ ID NO: 26123 - DNA, 298 bp, Glycine max
ggcgtttggcacaggctgcgcagtgtttgaacgttgaaggagagcgtagaggcagtggttttctttttttgatttctctttgtagaatcgaatcgagttaatttttgatcgtgtgagtgtccgatcttgaaatccacaacaacaatggtgagaggattgctcaacaagctcgtctctcgctccctctcggtcgccggaaaatggcagcacaatcaactccgccgcctcaacatccacgagtaccagggtgctgaattgatgagcaaacacggagtcaacgttccgagaggcgtggctg

SEQ ID NO: 26124 - DNA, 234 bp, Glycine max
tttcacatgctacacaacgacgtaacgttgcgggtgttcgaagacgccatagttttacttttttgatatcactacataaaataccgtcgggttaatttttgatcagtgtgaatgtacaatcttgcaatctacaacatccatgcttacgaacacttctctacaacctcatatctctcttattgtgtcacctaaataaaattcactacactcaacttacacccctcaacatgcaca

SEQ ID NO: 26125 - DNA, 286 bp, Glycine max
ttttgcgtttttcacaagctgcgcaatgttggaacgttggaggatatcgtagaggcactggttttctttttttgatttctctttgtagaatcgaatcgagttaatttttgatcgtgtgagtgtccgatcttgaaatccacaacaacaatggtgagaggattgctcaacaagctcgtctctcgctccctctcggtcgccggaaaatggcagcacaatcaactccgccgcctcaacatccacgagtaccagggtgctgaattgatgagcaaacacggagtcaacgttc

SEQ ID NO: 26126 - DNA, 385 bp, Glycine max
gccacgcatacggaaagaaaaccactaatttttccgtttttcacaccctgctacaactgggaactttgaaggatatcataaagccacaggctctctttttttaatttctctttatataatcgaatccagttaatttttcatcatgtgactgtccaatcttgaaatccacaacaacaattgtgacaggattgctcaacaacctcctctctcactccctctcagtcgcccgaaaatggcagcacaatcaactacaccaccttaacatacactagtaccagtgtgctaaatttatgatcaaacacgcagtcaacgttccgagaagcctcgctgtttactctgttgaagaggtcagaaatgtcatcaatgaccttttccctaattaaaa

SEQ ID NO: 26127 - DNA, 277 bp, Glycine max
  modified_base (29)..(29): a, c, g, t, unknown, or other
  modified_base (144)..(144): a, c, g, t, unknown, or other
  modified_base (229)..(230): a, c, g, t, unknown, or other
aacatttaaaaagatcctagccccccccnttttctttatttaatttctctttttataatcaaatccatttaatttttcatcctcttactaacccatctttaaatccacatcatcaaaaataacaatattgcccatcaaactctnatctctctccctctcttacacccgattttttttaccacaattttttttttctccttatcatccatttttaccattgaaccttaanncatgaacaaacaccgacccaaacctcccataaacctcccttatcctc

SEQ ID NO: 26128 - DNA, 322 bp, Glycine max
gcagtttgacggtgttcaatttgagggggttgagggtgctatttctgctaataatccagcgtttgttgctgcgagctaagtgatacaacacaatgagcataaagaaatcctgttgctggcattaggaacaggaacaataaaagctgaggagaagttatcttgcattattgatggcttgtgtcaacttgagtggctagtaagcatcactaacgtttatagtgaggctctatatatttcaaacatgatccacttctatctttccacagttgtttcaggtgttttgcctgctgattaactatcttcgaatagaggagtatatacc

SEQ ID NO: 26129 - DNA, 409 bp, Glycine max
  modified_base (29)..(29): a, c, g, t, unknown, or other
  modified_base (65)..(65): a, c, g, t, unknown, or other
  modified_base (83)..(83): a, c, g, t, unknown, or other
  modified_base (115)..(116): a, c, g, t, unknown, or other
  modified_base (147)..(147): a, c, g, t, unknown, or other
  modified_base (158)..(158): a, c, g, t, unknown, or other
  modified_base (167)..(167): a, c, g, t, unknown, or other
  modified_base (177)..(178): a, c, g, t, unknown, or other
ggttggaaccacgcggccgaccaacccgnccgaccaggcgcgagaagaccaccgaaggggcaacngaggggggaacaaggccngcgctaggcgagatagaggagaaacacgcaannccaaggaacccagacagccaaaaccgagacnaccacgcactnagaggaaangcaagaactnnaagaaagaaggggtattgggtatcttgttttccaactcaataagatagtggggaggaaagagatatggctgtaggtagcaaaaccagaaatatgcttgaaggtctggttaaagaaggatcatttaaatggttgcttgtcaagaagagttacttttatgaagaatttgaagaaatggaaaattctccttttgctgggaagaaattttatacgagagctttctcctgttgcaa

SEQ ID NO: 26130 - DNA, 426 bp, Glycine max
ctgttaagcaaaggataggatctgagtgtctgggggatgaggcaacaaggcctgtggcaggaaaacctgtacaagctaccatgaccggtcttcctcccattagtgcagttcggttggaacagatgagtaaagctgttcgatggcttgtgattgaattgcagcatggctctggagctggttctgctaattcagctcttacccacccctcagctccgtttgatgccaggttttctgaagatgctgctcagtagcattaatgtgactgcgatgattaatgttatatatttttttctctatgatgatcatgcttagactatattgtgttaaacattttattcaagattaaggattagatttatgttaagctgttaaagaatgtaacttgtgtgtattgtgcatgacacaacaatccttattccttatttt

SEQ ID NO: 26131 - DNA, 271 bp, Glycine max
ttattggggcattgtgaaatcaacagataaacatttcactagtagagagacatatgcataatattgagaaataatggagggttgtacttattgtgtgaagttgctatgccttgttgggtttgtggtgcttgtgagtactattgcatgggtggagagtgctggtgaatgtgtgaaatctaccaccccagataattaggcttataagctagcaccatgtgcctcatcatctcaagatgagaatgctagttgtttttataattgctgtgctcat

SEQ ID NO: 26132 - DNA, 356 bp, Glycine max
gcgttctacggcttctataagacttctttaagggactctgcatctgactcctatagaagcctctgagaattccatatccccgttttccttcactcttaaacccctattcatttccaccatcacaagaagcatggctgcaatatcaattccttctcacatgaaagcttgtacatactctgtgtatgtaaaatccaaagaagttctcaagtttaatctataattggctttgccttaagtgaatgaataccatgtccttatcaaagtctcttctgtttcccttaaccccattgatcataatacaatggaaagctattttaagaacatctacttctctttacctactgctcctgattatt

SEQ ID NO: 26133 - DNA, 226 bp, Glycine max
  modified_base (20)..(20): a, c, g, t, unknown, or other
  modified_base (25)..(25): a, c, g, t, unknown, or other
  modified_base (28)..(28): a, c, g, t, unknown, or other
  modified_base (31)..(31): a, c, g, t, unknown, or other
  modified_base (37)..(37): a, c, g, t, unknown, or other
  modified_base (47)..(47): a, c, g, t, unknown, or other
  modified_base (84)..(84): a, c, g, t, unknown, or other
  modified_base (114)..(114): a, c, g, t, unknown, or other
  modified_base (116)..(117): a, c, g, t, unknown, or other
  modified_base (120)..(121): a, c, g, t, unknown, or other
  modified_base (123)..(123): a, c, g, t, unknown, or other
  modified_base (126)..(127): a, c, g, t, unknown, or other
  modified_base (129)..(129): a, c, g, t, unknown, or other
  modified_base (137)..(137): a, c, g, t, unknown, or other
  modified_base (168)..(168): a, c, g, t, unknown, or other
  modified_base (171)..(171): a, c, g, t, unknown, or other
  modified_base (174)..(174): a, c, g, t, unknown, or other
  modified_base (182)..(182): a, c, g, t, unknown, or other
  modified_base (200)..(201): a, c, g, t, unknown, or other
gaagcacgcagcaaggaacnaggancancancaaagngcaaaacagncgagaccgaacaccacgagcagcaaccaaggagaccncccaaacgaccaccggagaagagacaacgngnnccnncngcnnanaaccggancaacaaggaggaaacacaaagaagaaaggcnagnaanccagagancagccacagggaagcagnnagcacagcagccaaaaaccgggcac

SEQ ID NO: 26134 - DNA, 409 bp, Glycine max
cagttattgcttttataattttgggcattacaaggatctctatttaaacagataattattcaataaaatgtggccattcatctcccttcattctgtgagttaagtttttttccaacaaattcctatcctagattgtttttgaatccaaagaatcaaaaggaatgtattaatcaagtagggaggtgggaaggtgaactttggaggcgggaattgaagtggcgtagatcgtggtttcaataggagctaaacttgatgcataatttccaaaatctgatcaacaatggtcaacttcataaagaggtagatgatactttgtggtgggaaggggaaggagctggaaagttctcggttcactcaccatacttagcaatgcagaattggtattatggcagccatgaagtggtttttt

SEQ ID NO: 26135 - DNA, 280 bp, Glycine max
gactggaggaagggggcgtataggagtgccctgtgtcatgggcaccaagaccacgtgtgtaatcatagacactgggtggcgaaaacttcacgaacacttcacaatgtgtcaaaccctgcaccaaccaatactcctatacttaatcaacccacaggagtggtcctctatcaaagtctctacaaaaccctgcttaagcttgtgtggtaacatcatcaaaaaaagaatagagagactttatgtaattcaagtagatcgagatcgcgaaaatgacgaactgcat

SEQ ID NO: 26136 - DNA, 282 bp, Glycine max
ggattgggtttggttctcagtgtacccaaaaacagaggcagaaggaggaagaagtagaagaagattagagagagtgagtgagtgagcgagggataattggcgagttagggtttcgaattgactcactgagtctttgcattgtgtcgccggtttttttttcgccggagaaaactcgtgctccgatctcctctgcttttgttttcgatagcatagctgtttgaaaggttcggttttcccggcgaggatagtgggattttccggggattccttggtgaattgagt

SEQ ID NO: 26137 - DNA, 301 bp, Glycine max
ttgaagggggttgtttgatcgtggaatttcggtggttctgagttgccggaatatgagtaaagtttatgattggttcgaagaacgtctttaaattcaggcgattgccgatgatatatccagtaaatatgttccgcctcaagtgaatatattttattgtttaggaggaattacacttacttgttttttagtccaagtagcaacgggatttgctatgactttttattatcatcctaccgttactgaagcttttgcttctgttcaatatataatgactgaagctaactttggttgttaaatctat

SEQ ID NO: 26138 - DNA, 70 bp, Glycine max
  modified_base (1)..(2): a, c, g, t, unknown, or other
  modified_base (4)..(4): a, c, g, t, unknown, or other
  modified_base (9)..(9): a, c, g, t, unknown, or other
  modified_base (16)..(16): a, c, g, t, unknown, or other
  modified_base (29)..(29): a, c, g, t, unknown, or other
  modified_base (31)..(31): a, c, g, t, unknown, or other
  modified_base (39)..(39): a, c, g, t, unknown, or other
  modified_base (42)..(43): a, c, g, t, unknown, or other
  modified_base (45)..(45): a, c, g, t, unknown, or other
  modified_base (47)..(49): a, c, g, t, unknown, or other
  modified_base (51)..(51): a, c, g, t, unknown, or other
nngnccaanagaggcngaagcggaaagancncggggganacnngncnnnanaaagaaaaaggaaagaaaa

SEQ ID NO: 26139 - DNA, 318 bp, Glycine max
cagatccaaaccagtggaatggtgctgctggtgctggttctggtggtggatattatgggtatgctgctcaaggatatgaaaattatggttatgctcctgctggacaggatcccaacatgtatggcagttatccgggatatcctggttaccaagctcctcaacaacagcagcaaataggatatagttgagaagagtctgttccttttcttctgtaatcttttatgatacttatcgacttgcgtatctcttatctcgtggaaaacccactctgctacttttttccttttgtttgcttagtaacattaaattttatcggag

SEQ ID NO: 26140 - DNA, 405 bp, Glycine max
tgttgactggatgttggtcggggatgtaccctggaagatgggtgatgtatcatgcaagaggataacacttatgattagctcagaggccgttggtttaggtccgaggtctacttcttcaaaatgtacgggttccacctagctagctagaagaataattaattagtgcgtaataatgataagctgatagctgataattaagcattccttggacaccttcaacgtttacaagcttcggttagaagaagagtgaatttggtacagggaaatatccatgcatggtgcttgatgtacatgtccctttagcacctctggttaattagctacttttgttttgactttaaatgaagaactagaacaaatactgttctctatattagctagttgactaaaaaacaaataatggga

SEQ ID NO: 26141 - DNA, 344 bp, Glycine max
ctctcgcaagagctacaaacaaaatataataatagtattttggttcttctcttcctgcttaggactttaattaattatataatatgtatatagtctaaagttggaagctttgtattcttgtgtatgatggttgtgttgtgtgagttctcaagggaagcaaagtcctctctttcacacctttcagtctcaaaaccgtgggaagaagaatctagggtttaacagcaccaccccgagtccatcaaggtctgtgctttgatgcttttttcttcttctttttcactgggaaattcggtcgttttttttttctgaaagaggttttgctgcaacttgtgaggcaccctcag

SEQ ID NO: 26142 - DNA, 370 bp, Glycine max
gacactcatcacaaccactcttaatttctctctggcttgctgatttacacacctctccaacctttcactttcagctttatttgaatccctctctctcctttccaaatggccagcgttgaggttgcacatcaaacaccaacaacagttccagaaaatgaaacaaccgaggtaatcaagacccaggaaacaaccccggaaccagtaccagccactgaggctcctgcaacagaacaagcagcagctgaggttcctgctcaagaagaacaacaagcaactgaggttcctgccccagaatcaaccaccgaagcaccaaaggaagaaaccaccgaagcaccaacaacagaaacagtagaaacaacaactacagaag

SEQ ID NO: 26143 - DNA, 342 bp, Glycine max
ggatggattacgatttagcagcgttgaagcttttctgttcgcagctgaagcaggctcgagaagtagcaatgccttgtcaaactcaaagtcaaagtcaaagcagcttcactctcggcggcctccttttccagcgcccttggttgcagggcgttctcgtctccgcctccgacgccggctctctgcttctcgacgacggaaccgacctcgtcgagctctccctcaatagcgagtttcgccaccgtccatggaaactcgggatgtatgtaatggtggttggagggtatgctgcacgtccagggaaagcttcccatgaacaaggtttacaaaattggtgatctttca

SEQ ID NO: 26144 - DNA, 406 bp, Glycine max
  modified_base (360)..(360): a, c, g, t, unknown, or other
gagtgaattagaatccaccttggcctagccagggagcgcttgttctctcgcattcccgggagatctaatgctgcccaaccttgctgaaaattaaggtttcgtttcggaggtagaccaaaatgttcggaagggcaccgaagaaaagcgacagcaccaggtactacgaaatcctcggcgtttcgaagaacgcttcgccggatgatttaaagaaggcttacaagaaagccgccattaagaaccaccctgacaaaggcggtgatcctgagaagttcaaagagcttgctcaagcctatgaggttctgagtgaccctgagaagcgtgaaatttatgacacatatggagaagatgctcttaaggaangaatgtgtggtggtggcggtggccatgatccatttgatatcttcag

SEQ ID NO: 26145 - DNA, 316 bp, Glycine max
catatccaaactattggaatggtgctgctggtgctggttctggtggtggatattatgggtatgctgctcaaggatatgaaaattattgttatgtttctgatgtacaggattccaacatgtatggcagttattcgggatatcctgattaccaagctgcttaactacagcagcaaataggatatagttgagaagagtctgttcctttgcttatgtaatcttttatgatacttatcgacttgcgtatctcttatctcgtggaaaacccactctgctacttttttcctttgtttgcttagtaacattaaatcatatcgga

SEQ ID NO: 26146 - DNA, 337 bp, Glycine max
ggaaaaccaggcgcgacccacgcgtgcgacaggaccaagaaggacccatagcgggctctactaacaaaatatcatactggtatcaaatgcactcattatgcgcgaaagacttaaataaagtgcatgataaacatacaaggtctagttaaaagctgagtctgcaagcaggtgaagatagcgtcctttgaggcttaccactaagcatagtgatcgctatgacacatatcatactcgactccgcgttaagaatacattacagtgccacatcgccagcaccggtacatcaaagactgtgctttgaagcttccaaaaacatctctttcagtgcaaaatgaga

SEQ ID NO: 26147 - DNA, 360 bp, Glycine max
aacacctctagcttgcctctccggcatcttgtgctcaaaaatcctgcactttgtcaccagctgattaaaatccgtgatctgcatataactaaccgcttgttggatctccaaccgaagcccattctcaaactgagcacataaatcttcctcattccgagcatcttggtattgaggccaacactgcagaagctcattgaacttagccgtgtactccccaacagacatgtttccttgcttcaaatccagaaatttcctcgccttcctctttctgagatctcgtggaaagtgattctccacgaatttgatcttgaaggcattccaaggaatcacgcctccacgtgcgacaaatgaaggcttcac

SEQ ID NO: 26148 - DNA, 374 bp, Glycine max
aacacctctagcttgcctctccgtcatcttgtcctcaaaaatcctgcactttgtcaccagctgattaaaatccgtgatctgcatataactaaccgcttgttggatctccaaccgaagcccattctcaaactgagcacataaatcttcctcattccgagcatcttggtattgaggccaacactgcacaagctcattgaacttagccgtgtactccccaacagacatgtttccttgcttcaaatccagaaattccctcgccttcctcttactgagatctcgtggaaagtaattctccaggaatttgtccttgaaagcattccaaggaatcacgcctacacgtgcgacaaatgaagcttcacaaactccaccaattc

SEQ ID NO: 26149 - DNA, 353 bp, Glycine max
gatattgagagaattctatggagcggggaccagatttctcgccgtgttttcgagctcgccgccgaaatctctgacgacttcggcggccattctccggcgcccgtggtcgtcggcgtggccactggcgcgttcctcttcttggctgaccttgttcgcaaaatagatctctccatcgccgttgatttcgtccgagtcgaatcctacggttccggaaccgtgtccaatggcgcacccaccatttccttcgatttgaaggtcgacgtcaactcccgccatgtcatcgtggtcgaagacattgtagatactggacataccttatcaaaagtcattgagcacttgaaaatcaaaagagc

SEQ ID NO: 26150 - DNA, 353 bp, Glycine max
ggttctagtgtgtgattgtttgttgttgtaactcgttcttcttcttttgttgttctgtgtttgtgtttgttttttctctcacctgaaaatgtcttgctgtggtggtaactgtggttgcggaagctcctgcaagtgcggcaacggctgcggaggctgcaagatgtacccagacttgagctacactgagtcaaccaccaccgagaccttggtcatgggagtggcgcctgttaaggctcaatttgagggtgctgaaatgggtgtgcccgctgagaacgatggctgcaaatgtggaccaaactgctcctgcaacccctgcacttgcaagtgaggtgttgggagaacaagcttcaagc

SEQ ID NO: 26151 - DNA, 452 bp, Glycine max
ctgctgttacaggtggaagtaaaccagtaggaagtgctcctcctggagttgaaggtcaggcgaataaagtaaataaccgcaaaaatatgagaggtggaggccctgcattagctagacgacaaacagttgcagcagattcttctccaccatctcctgcagctctacgagcttctatgtcattacggttgcagttgctcctgagatttcttcctattctttgcactgacagggagccatctgtgcggagcatgagacaatttcttgccactgtaatttttcgtctccttggtagccgggttgtgcatgaggatgcagacatttcggtgaatgctgtgccatttctgcctataagggaggcagagtcatcttctgaagttgcttctgctgcttttgtggattcttcttctgggagtttgtttgatcgtttggtgttggttttgcatggattatta

SEQ ID NO: 26152 - DNA, 309 bp, Glycine max
gagttcaattccaatatattccattctctctgggtatttccgtacctctcccttcaagatgcagatcttcgtcaagaccctcaccggcaagaccatcacccttgaggtggaaagctctgacaccatcgacaacgtcaaggccaagatccaggacaaggaaggaatccccccggaccagcaacgtctcattttcgccggaaagcaacttgaggacggccgtacccttgctgactacaacattcagaaggagagtactcttcacctcgtcctccgtctccgtggtggcatgcagatcttcgttaagacact

SEQ ID NO: 26153 - DNA, 298 bp, Glycine max
gatagggaaacatatagtggtttcagtgagtgatcggtgttcacttgatccttcataagtcgtcatcatcatcatcatcatcaccgttgattgaagaagatgccgatcagaaacatcgccatcggaaggcctgaagaggctactcaccccgacacgttgaaggcggggttggctgagttcatctccaccttgatcttcgtgttcgccggttcaggttccggcatcgcctacaacaagctcaccgacaacggcgccggcactcccgccggccttatcttcgctttcaatcgccatgctt

SEQ ID NO: 26154 - DNA, 307 bp, Glycine max
  modified_base (179)..(179): a, c, g, t, unknown, or other
cgaataaaatcatctgcttcgccgttcaaaggcaaaattgacctcaatatccaaccagagcgagaagaagaattatcacctggttcggattctggcggcatgatgaagttgctccatgatgctactgagcgatatctcaaacagcaagactgtgaactctggtactggagattcatcangcagtcagtcacagctggtaggagatgcaatgagggaagataaacttagcaatggtgttgcccatggcagtagtagtcataatactgataaggaacatgcccaatctttgcctatgaatgtgtgaaaa

SEQ ID NO: 26155 - DNA, 218 bp, Glycine max
acgacacaagggaacaactgtatcttgccgctacgtgatcttgtgcttaaaaatcccgcactttgtcaccagctgattaaaacacctgaaaatgtcttgcttaaccggtaactgtagctgcagaagctcctgaaagtgcaactgcgcatgcaaatgctgcaagatgtacccagacttgatctacactgagtcaaccaccacctcatacctacttaatc

SEQ ID NO: 26156 - DNA, 262 bp, Glycine max
gagtgctattgtgacgttgtgacgggtacggagggaaatggagggcggtgacggtgtgcattggttctctcacctccaaatgcctcgctgtacccataactgtgcatgcacctactcctgaaagtgcttcgactgctcccacttgctgactgatatacccagacttaaactacacttattctaccaccactgaaacaccactcattcgatgggtgtctgcccaagctcaatctgaagaccctcaaactcctgtacccactta

SEQ ID NO: 26157 - DNA, 240 bp, Glycine max
ggttcaattccaatatatgccaggggctctgtgtaaatccctacctatcccttcaagatgcacatcttcgtcaagaccctaaccggcacgaccatcacccttgaggtggaaagctctgacaccatcgacaacgttaaggccaagatccaggacaaggaaggaatacccccggaccatcaacttgtgattttcaccggaaagcaacttgaggacggtcgaacccttgtgactacaacattc

SEQ ID NO: 26158 - DNA, 105 bp, Glycine max
aatcaaaaccaaatcaagcgggccagaacgaatgagttaacaaggccaaaagatgatgatgaagacggcagatcatctggatcagagaagaatgtttcagtttcg

SEQ ID NO: 26159 - DNA, 362 bp, Glycine max
ggtagctccatgagggatgagagtcgtatgatgtcacataacaaaaattgatgtgctacaatgccactgaaattgtcgcgtggttccatttccatagaagaagaatcaaaaaaaagagcattgtagcgtttcaagttgatcataaatgcaagtgcgttactcctacgttcgaagactatgctttttgctctgttcacctttagccaaactcggcacttccaaaactcaatcttcttcttcttttttagccaatttattcgtcgatgacgattccacgctgttaagccttaagctttatcgacccttttatccaaataaatatcgtctaatggggtgtttaaacatattttctttctattttc

SEQ ID NO: 26160 - DNA, 305 bp, Glycine max
gaaatcactggacgaggggttctttcaacagaagtgattgagaaggctttggcagaagtggacaggctagtcaaactaaaagcaagcagaatgaaagaacttgttaataagaacaggtcagagttagaggaaatatgtaaattgactcatactgaaccagatacaagtactacaggcgcgatagctagtgcattaatagattttggactggtggatccttatgagctattagccaacattgaatcacagatcatcaaagcaaaagatgaagctttgagcataaaagatgaacaaatgcgattgat

SEQ ID NO: 26161 - DNA, 347 bp, Glycine max
aactcatggttgcttgatttggttttagtaaatgtactttgattttttattgatcaactatatgatattctttcctcattagcttttgactgatctggttccactcttcattttgttgaagagatgtaattgtacctagtacaagaaaatcaaggtcaaagcatggacgctgtgtcatccgcactactagagccagtaactaattctgtgttggatctgattaaaaagcaagtggattacatccgttataggcaaaactttgatgaactacgcgagtgtgtaaagcagcttaaacttgtaaaggagaaagtagatcatcaatgtgaggaagctttcaaaaatggaca

SEQ ID NO: 26162 - DNA, 294 bp, Glycine max
gacaagtgagtttgttgatcgagataactagaaacagtgtgatgaaaatgaaggtccttgttttcttcgttgctacaattttggtagcatggcaatgccatgcgtacgatatgttccctctccgaatgaacactggctatggtgcccgtactccggaggtgaaatgcgcaagttggaggcttgctgtggaagcacacaacatctttggctttgagaccattcctgaagagtgcgttgaagcaacaaaagaatacatccatggcgaacaatatagatccagactccaaaacagtt

SEQ ID NO: 26163 - DNA, 359 bp, Glycine max
gaagacatgtatatgtcatgttcttagttccaatctaactgctcataacaaaaggaaccatatagacaccttcgtacttgtcatggcccttaagatcaacactttccttctagttcttctcttgatcctcattcccttatcttcaggcttggctgaaggcttcggggaaaacatgcatccaactcatggcttactttataaggatggtatcaagatgaactcgaggaagcttttggttcatgattttgtgttggattatgatgaggcaagacccaacccaaggcacacaaagaaacctggcaagggcccttgaatacccttaccaccaaataatgaaataaaataatctatatactatc

SEQ ID NO: 26164 - DNA, 364 bp, Glycine max
gaatacatgtttatgtcatgtgcttagttccggtctaactgcgtcataacaaaaggaaccatatagacaccttcgtacttgtcatggcccttaagatcaacactttccttctagttcttctcttgatcctcattcccttatcttcaggcttggctgaaggcttctgggaaaacatgcatccaactcatggcttactttataaggatggaatcaagatcaattccaggaacttatgggttcatgattttgtggtgtattatgatgaggcaggacccaaccttatgcacacaataaaacctgtcagggcccattaatccctttcctccaataatgaataaattattcttttactttcatttttttt

SEQ ID NO: 26165 - DNA, 356 bp, Glycine max
aactcatggttgcttgatttggcctgagtaaatgtactatgattctttatctatcaactatattatataatatcctcattatcttatgactgacctggttccactcttcattccgatgaacatatttaaacttacctcatacatcaaaatcattgtcaacatattgacactgaggcctacactctactagatccttgaacttattctgtgtctgatctgattaaaaagcaacttgattacatcccatatattcaatactcttactaactacgcgagctcgtaaaacgacatactctaggaaattatacatttaaagcattacatagaatcacgcctccaaaatcgacacaaaaatg

SEQ ID NO: 26166 - DNA, 350 bp, Glycine max
aacacctctagcttgcctctccttcatcttgtcctcaaaaatcctgcactttgtcaccagctgattaaaatccgtgatctgcatataactaaccgcttgttggatctccaaccgaagcccattctcaaactgagcacataaatcttcctcattccgagcatcttggtattgaggccaacactgcagaagctcattgaacttagccgtgtactccccaacagacatgtttccttgcttcaaatccagaaattccctcgccttcctcttcctgagatctcgtggaaagtaattctccaggaatttgtccttgaaagcattccaaggaatcacgcctccaggtgcgacaaatg

SEQ ID NO: 26167 - DNA, 399 bp, Glycine max
ttatggggattaaaaataaaacaaatcgcaagggcagaggagaatataaagcctttctccctgttccagtccagttcattgtatagagcatacaccaacaccaaaccttaaaattattttgcccctctgcttctctctctgtctttctcataatacaacttataaaaaccattgacgtgggtcagatgcaaatacagtggatcgactacaccaaatccctcttccttgatggcttcctgtatggtcagtttctgcaacttcagcagcttcaagatgagaacaaccctgactttgttgttcatagattatcctctctttttttgaaaattctgaaaggctttcttaagatctcaccttttcccttaaatcaagattgagtttaactttaaaaaaatttta

SEQ ID NO: 26168 - DNA, 378 bp, Glycine max
  modified_base (7)..(9): a, c, g, t, unknown, or other
  modified_base (46)..(46): a, c, g, t, unknown, or other
  modified_base (81)..(82): a, c, g, t, unknown, or other
  modified_base (124)..(124): a, c, g, t, unknown, or other
  modified_base (146)..(146): a, c, g, t, unknown, or other
  modified_base (202)..(203): a, c, g, t, unknown, or other
gcactannngaactttacttgtcttcctgtttttcaaaggaaaatntttaaaagggtgaaatacacgtgaattgatgttanncctaataaaagtaggacattaaaacaattctaatccaaaggntgtctttattagttcacataanagttgcagggttgcacctagctgtgtgaatggcttaggaagggtttgaaatgttcnnaattcattgtggatctttgtgttttttgtttgaaatgtttcaatttggcaaggttaaaatcacaaattaatctaattggtcaagatttttaaactaaattctaaaacactcagcttcaaggggtgaaaaattgaaaaagttattataccggcgactatattataccatacaaaat

SEQ ID NO: 26169 - DNA, 360 bp, Glycine max
gcctcctcatcaaaccaagacatagcaaacgatccaaactcttttttcatttgcagcatcaaaatgagtggtagcaacgatggtagcggcagctggagctctaggtttttgaaggtggctagtgcagctgccgctacagccgccgttgccggcggtttatatgccattctttcatcctcaacctctgctagctctgagatggaagtgccgtttggcagcgcacggcgtgagagcaaagaacgtgacgatggtggctccgggtctcatcctcgcgagggtgccaccacggtcagtcgttggaagaaacctgagattggttgggtgaagctgaacgtggatggttcacgcgacccatacaaa

SEQ ID NO: 26170 - DNA, 416 bp, Glycine max
gaacaaaacagagttcacaagacaaaccctcgaaccgaacgtttttcagggttgatagaacacgatggttcagtacaatcttaagaagattaccgttgtgccaaatgggaaggacgtggtcgacatcatcctctctcgcacccagcgtcaaacaccaaccgttgtgcacaaatgctttggttggtgcgtgatgggatcagtgacaaagtggggagaagactgaaaataaaccaatagatcacataaagaaaggatgttaagtgtcagggctgcttcaacatgcagaagaagcatcatccaggcaaattgcatttgggttaacatagaatgaggtaaaagaatgacaagatgcatgggaagaaagggataaggattttgagaagcaaggaattaataagcaagattcattttggagc

SEQ ID NO: 26171 - DNA, 322 bp, Glycine max
gaggatggaaaattctgcattgagggaaaaactgagaaatactcaactgggacaaggggaagagataattttgagtagcatcgagagtaagagggctgcacctgtaagtacagaaaacttgttatcaagagttaataattctagttctaatgacagaactacagagaatgagaatgatttctgtgagaacaaaccaaattctggtgcaaagctgcatcaactattggatacaaatcctagagcagatgctgtggcagctggttgaaaccagtaactgcactggctgattatgcaattttggcatattacaagcccaaaatta

SEQ ID NO: 26172 - DNA, 295 bp, Glycine max
tattttttaagtgatcctgagaagagggaactgtgtgaccagtatggtgaaaatgcccttaaagaagggatggggggaggaggctcgtttcataatccatttgatatatttgaatcattttttggaggagcaagctttggtggtggtggtagttcccgaggtagaagacagaagcatggtgaagatgtggtgcattctttaaaggtttccttggaggacgtttataatggcacaacaaagaaactatctctttctagaaacatattatgcccaaaatgtaaagggaaaggttcaa

SEQ ID NO: 26173 - DNA, 323 bp, Glycine max
ggatgagcaacaaaaaaattaaattcttatcagttacagagtatggagtcccagacttccacacgagagaaggagtctctcaatctcagggaagtcccagaagcagataaaaccttgggcttggacatggccaagggcagcgcattctgcaagatgggtgaaggttggacatgcatcataactaaaactgaggggcctgatgctggcaaagttttcgttaaatgtggtgaaaattgcacctgtaccattgagggcgaagcagtgtcccaagaattgaatttgccacctgattgtgtgagcagcagtggcagtggagcattctg

SEQ ID NO: 26174 - DNA, 125 bp, Glycine max
ggttctagtgtgtgattgtttgttgttgtaactcgttcttcttcttttgttgttctgtgtttgtgtttgatatttctctcacctgaaaatgtcttgctgcggtggtcactgtggttgcagaagct

SEQ ID NO: 26175 - DNA, 241 bp, Glycine max
tacggcgaatgtgcccgacttatctgaccgcgatatgcgagtttatccaaactagaatatgattttcatcatcaactttattgctaccaacgatttgatcgcatggtcatgctatggctcatgctaccaaactatcccatttcccattacaaccgcctatggcgaccgttcatctgccgttaaatgctcatgatccatgcctacttcggaaacacacatcccgttagccattacacccctt

SEQ ID NO: 26176 - DNA, 294 bp, Glycine max
acgacagaagacttcatcaagcggttcaatcccaacataccctagtgcctatctgtatttatctaccactcactacaacattcaaatccaatcttagaccctaacaccctagaccatcacccttgagactgaaagcacttacaccattctcaaccccaatgtcaaaatccaacacatgtacacaattcctccggaccatccacgattcaatctctcacaaaagcatcttaagaatggtcgtacccttttttactacatcatttataattatagaacttttcaccttttcctaca

SEQ ID NO: 26177 - DNA, 350 bp, Glycine max
ggatctcgggcggagccctctcttcaggtcaccatctagactgcaatcatggctgatggaccacagcatccatcagttgttcagaagctagctggacagtcttacctggtgtccaggcttagccccaactttaactctaggaattattctgcaactggttcttacgtcaatggcggaatgcactcgcctgggttggctgttgtgtcacctgtatctccagttactgtgcatgctccagcagagaaaggagtgagtggatttctagtggattttctgatgggtggagtatccgctgctgtatcgaaaacagcttgctgctccaattgaacgaatcaaattgcttatccaaa

SEQ ID NO: 26178 - DNA, 478 bp, Glycine max
  modified_base (6)..(6): a, c, g, t, unknown, or other
  modified_base (84)..(84): a, c, g, t, unknown, or other
  modified_base (96)..(97): a, c, g, t, unknown, or other
  modified_base (108)..(108): a, c, g, t, unknown, or other
  modified_base (152)..(153): a, c, g, t, unknown, or other
  modified_base (172)..(172): a, c, g, t, unknown, or other
  modified_base (185)..(185): a, c, g, t, unknown, or other
  modified_base (195)..(195): a, c, g, t, unknown, or other
  modified_base (202)..(202): a, c, g, t, unknown, or other
  modified_base (205)..(207): a, c, g, t, unknown, or other
  modified_base (234)..(234): a, c, g, t, unknown, or other
accggnctcggaattacccgggctcgaccccacgcccgtccgtacccggctgtcgagaagaccgacagtaagggggtatacganggtgggatgagnntattcaagatnatgtgagattcggaagggagttgagaatgacccttcaggagttnntatggggataatgggtctncttactttatcanccatggatantggatantgnnngccttatggcccctattcgccagcagnggtctccagttccaaccatggggaatgatggtcagttgtatgggcctcaacactatcagtatcctccatatttccaaccgttaacaccaaccagtgcgccattcacacctactcctgctgtcctacctcagggtgaggtttccacctctgtagctgctgatcaaaagcctctccctgtcgatgcagccaatggaaattctaatggtgttgcgaatggtgggaatgcaaaaagtcggggtccact

SEQ ID NO: 26179 - DNA, 376 bp, Glycine max
aacaatctcatctacaagtttcggtccatcaacagcaacagcaacagcaacagtctccaaggatgccaggacctgcaggccaaaagtcacttagtctaacaggatcacagccagatgtgactgcatctggcgcaactacaccaggtggtagttctagccaaggaactgaagctacaaaccaagtccttgggaagagaaagatacaagatttagttgcacaggtggatccacaaggtaggctggaccccgaagttatagatcttcttttagagcttgctgatgactttcattgattctgcaactacacatggttgcattttggcgaaacatagaaaatcgtcaactttggagtccaaggatttattgctacacctag

SEQ ID NO: 26180 - DNA, 400 bp, Glycine max
ggaaaaaaaagagtgaagaaaagaacgcagaaactgaaataaaaaatggcagaacccaaggttaaatacgatcgtcaactcagaatatggggtgaacaaggacaggcagcccttgagaagtctagtatttgcttacttaactgtggtcctactggttctgaaacacttaagaatcttgttcttggtggggttggaagcatcactgtagttgatggatctaaagttgaagcgggagacctcggaaacaattttttggtggatgaagcaagtcttgggaagtcaaaggcaaaatgtgtatgctcatttctttaagagctgaatgatgcagttaaagcaaaatttgtagaagagtctccagaaacattgattgagacaaatccatcattcttttctcaattta

SEQ ID NO: 26181 - DNA, 324 bp, Glycine max
gacttttcacaatgaagaagcacattcacatagccctattgctccttctggtgtcaccgttaatccccatcgccgtcgcgcaggcccaatcccagcccaatgacttctccgacgcaaacctcaaccagttcagcccctccatagccataatcatagtcatacttgtcgccgcgcttttcctcatggcttttttctccatctacgtacgccactgcgccgattccccttccaccaccgttagccctctcactaccgcacgctcccggagggccgcgcgtgggcttgacccagctgtgatccaaacattcccaatcctcgaatact

SEQ ID NO: 26182 - DNA, 407 bp, Glycine max
aggatgctattgatattcaagatgggcatatagtattgggcttaacggaatttctaatgtgtatgagccctatgattacatatcaaaaacggtattttcaatgtatgaattgcctgactttttttttatctgtaagagctacctattgcaatgtaatttattaaaaaaaaataatagttcagtctaaacttgtttaaggatgataaaaaaaaaaacatttcggattgtggcacactatgcataacgtaaataattttgtttgtatgttgggcttcattagttcctattatgtatgacaacgaccactgcgactcctattatataattggaagaagcccatactcccaacaaaatgtgtactaagagactgcttttatttttcttcaccgcacaaaaataattccaaa

SEQ ID NO: 26183 - DNA, 322 bp, Glycine max
ttttagaagggtcatgtagcttggcaagggagggttgaagcatgggtacaggatcctttacatgtaagacctatagctcatgcaatttgggatcctcattttggtcaaccggctgtagaagcttttactcgaggaggtgctctaggcccagttaatatagcctattctggtgtttatcagtggtggtatacaatcggtttacgtactaatggggatctttatactggagctctttttctattatttctttctactatatctttaatagcgggttggttacacttgcaaccaaaatgggaaccaaacgtttcgtgggttaaaa

SEQ ID NO: 26184 - DNA, 217 bp, Glycine max
  modified_base (23)..(23): a, c, g, t, unknown, or other
  modified_base (28)..(28): a, c, g, t, unknown, or other
  modified_base (43)..(43): a, c, g, t, unknown, or other
ttgatcctgccagtagtcatatntgggnttttttggaaatttntaactttatttttaaattctactataatattattttttttttttttttagtactttaatatttttaaaatttttttatttttttacttaactgtattcctactatttctaaaaaactcaaaaatcttatttttatttattattagaataaattcattttttaaattaaaatttt

SEQ ID NO: 26185 - DNA, 405 bp, Glycine max
gaagacgacagaagggattagagtaataaggaggtaatagtttcatgatttcaaattatcactaacataatatactaattatcaatatttatggattaaaaatatcacttccagttagtgttttaaattcaaagattggaaattaattgtgtgctaaatattttatttaggtttttgaatttatcataattaaagattaaatgtgcattttatgtttattattatttttttagttgttgttactactcttaatttcactactcaaattaatcatatcctaaaattacatgtacaaattttaatgtttggaaggagtctcttgagattgttctcaattgcatggaatggacgaatcagtccattttaactataaaaaaatctaataagacttaatttttatgacac

SEQ ID NO: 26186 - DNA, 293 bp, Glycine max
tggggctttatgccaatcttcagattggaccttatgtatgcgctgagtggaactttgggtacatgttgcttccataatccatatttctctctctctctctctctctgagtgcgtgtgttaatatgttgtgattctcaatcgcattctttaatggtgtactggagaggaattactgtatggttgaagtatgttcctggcgtaagcttcagaacggataatgagcctttcgaggttggacttacaattccatcgacatggcttctctatattgtctcaagtcttggataatctat

SEQ ID NO: 26187 - DNA, 365 bp, Glycine max
ttcctatttacagatgctccaatcttgcatttactacaagactttgtacaacaagtggcttgcattcaaaacctttaacctcacatttcatcacaaaaaatatgatctataccgacgaaatcatatggttgcaccatttttgcctacttgcattattggcttcacaactctaacatgaacagaatgtttgtatctatattgctcaatgtcagtgaatatgattactcaataagcacttgttgctgcaaagtcttggaatcttaggaattacttcctccgtttttttcttcaagaaacatgcttcagttttttatgtaactataagtatcgcaaatagctcttggattgtattcttatctgtagca

SEQ ID NO: 26188 - DNA, 243 bp, Glycine max
aagacccaaatgttttctttgccacaaaaatcaagaggtatggctctatattcaagtcacacattttgggttatccttgtgtgatgatttctgacccggaagcagcaaagtttgtactgaacaaagctcaactcttcaaaccaacatttcctgctagcaaagagaggatgttggggaagcaagcaattttctttcaccaaggagcataccatgctaatcttagaaggcttgttcttcgcacct

SEQ ID NO: 26189 - DNA, 344 bp, Glycine max
gggaatgcagccccaatcgggcggtaaattccgtccaaggctaaatactggcgagagaccgataccgtctaagggaagaaaaagattatggtcgtgagagagagggtagggagcgggagagaagagagaaggatcgtgaccgtggaaggcgaaggagtcactcaaggagtcgaagtagaagtagggatcacagggaacatgatggcggggactacagaaagagacatgctcggagtagtgtaagtcctagaagacatggagatggacttgaggatggtgagccaaagaagaagaagaagaaagaaaagaaagaaaagaaggatgatgggactgaccaccctgat

SEQ ID NO: 26190 - DNA, 367 bp, Glycine max
ggaagagtgaagagaatggctcccgagggttgaacctttctggctgtgttaatatgcgtttcagcactgtcactgagtccttctgttgcgggggaagggcaaaataatggccttgttatgaacttctacaaggaatcatgccctcaggctgaagacatcatcacagaacaagtcaaacttctctacaagcgccacaagaacactgctttctcctggctcaggaacatcttccatgactgtgctgttcagagttgtgatgcttcactgttgctggactccacaagaaggagcttgtctgagaaggaaacagatagaagctttgggttgagaaatttcaggtacattgagaccatcaaagaagctttgg

SEQ ID NO: 26191 - DNA, 360 bp, Glycine max
tgttaattgacgaggttgttcgcagaaagtagggtgacatgccaccattgactgtggctgaagcaattgagcagcttgaaaatgttgatcatgacttctatggttttcgaaatgaagaaactggggaaattaatattgtgtacaaaagaaaagaaggaggatatggactcattgtaccaaagggagatggcgaagcatataaattggagcctgtagtgcttgaaccagctatagaatccttcctgaaagaatgatatgcttctacaatatactctttttgtaagaacattaaaccttgtacatgaattagcggatactaatggcgggttttttggagccagaaattgcatacacaaattt

SEQ ID NO: 26192 - DNA, 303 bp, Glycine max
  modified_base (278)..(278): a, c, g, t, unknown, or other
gaagtagaacccatggatgcagagcgtctgctgctgaccgcgtcgtgggattggggcttaaggtttccgctagtgaaagagatgattgttgaagaatgtgagtgggcgctaggggtggaaataggccaggccagaccaggctttaaaaggcctgagcctagcctacgatgaattttttaggcctgagcctggcctatagcctatcaaaagcttttattttggctcggcctgtaccttttaaaagcctagcctgacctgatagcctttttaaaagcctntttatatttgtttgctttggggtag

SEQ ID NO: 26193 - DNA, 407 bp, Glycine max
ggtgccttcactctgacaatggatccagcgtgagccattgtggcgctgtcgcttctcttgggtgccatcatcgccttcctcatcttcaacacctacttctgcaagcgccaatccgaaatccgatccatcgccgatccaaatccaaattcaaattcgaatcccaaactcgtgtcttccaaaccccctcccaagaagcctctctccaaaccccattcctccgacaaggatcaaaacaagcgtcaccatccgttggatttgaataccttgaaaggtcatggtgatgcattgacaggggtatgcttctcccccatggacgaaatttggcaactgcttgccctgatggagttgtgagagtattcaagttggattatgctttcagtaaagttttaagtttcttaaggattaat

SEQ ID NO: 26194 - DNA, 397 bp, Glycine max
ggctctttccgtggggaatgggatggcggaagaattatcaacagcgattccgcaatcgcaagcaagctccacgaagaaacgcgcttcaaagaatgaaaagctgtgcctcgaggactaccttcatctcgttcactctcgccaaacgcttcatctcaccatgaatcaactccatcaggtcatccgcattcacggcttcaagaaaatccaccacgctcctaagaaagtgctggtgcaagcggtggagtcgctggatctggtggatctgccgcagtctaaggtgagcgagagcgtgtcggcgtttgctgcggtggcgctggaggacgtggttggggatctcggcgagctcagctggcatgagtgctgcgtgaccttcgtcgagaagatcagcattttcgac

SEQ ID NO: 26195 - DNA, 358 bp, Glycine max
gatcacttcatagtaagcactatagaaaaaacgacattcattcatctatggctacccttattgctcccagcaaccactctccccaagaagacgctgaggctctcagaaaggcttttgaaggatgggggactgatgagaaaactgtcatagtaatattgggtcatagaactgtttatcagaggcagcaaatcagaagagtctatgaggaaattttccaggaggatcttgtgaaacgcctagagtctgagatcaaaggagactttgagaaagccgtgtaccgatggatactagaacctgcagatcgtgatgctgttttggccaatgttgccatcaagaatggcaaaaactacaatgtcat

SEQ ID NO: 26196 - DNA, 415 bp, Glycine max
  modified_base (18)..(18): a, c, g, t, unknown, or other
cgcgtccgaccacgcctnccaaccgttcgaacacacatccgaacggttgcgtctagtgagtgaatgtgggttgcggggaactaaaacaaaacttttgttgttctgtgcatgtgtttgttttttctctcacctgaaaatgtcttgctgcggtggtaactgtggttgctgaagattatgcaaatagattataaggatgcggaggctgcaagatgtacccagacttgaactacactgatttaaccacaaccctacacctatggacattaagattgaacaaaagtatgcaaaaagtgcaggtgctaaaatggtttgttccacgatgaaaacatatgtttaataaatcccacattaaatacgaaaaactcaaaacaacctccaaattaataatataaggattaaaaaaaaggcaatttat

SEQ ID NO: 26197 - DNA, 325 bp, Glycine max
gcgctcacatcgtgttctctggggcgcgagctagctagggtttagaacctcgcagttacagaaaacatggcgactgtggtgccaacctccgaagaagacgctgcactctccgtcgttcgattcgcctctgaacttgcctgggccgatgccggtcccgaggttgctgagccccaagttagcagactctgcgtggaggctgaagaattcattgttatgggaaagtggttggagctagcatcattgatgattacctctgctgaattgattttttcgaagtttttaaaaaagatatagagtccatcttcactattatcttgcaatcttg

SEQ ID NO: 26198 - DNA, 346 bp, Glycine max
  modified_base (287)..(287): a, c, g, t, unknown, or other
gaacaacaacatatgcgagctttacaatatataagtgcgcttctaacttctaaatagtgtgtgtggtctctctctatactataggtctcgcccaatacctactctccgctcccaagagcacgcaccaccactattgcacttcttcctcgttctccctctttttcttcttcttcgctaaacccttttttctatctcactaacacaacaatgggagacgagaagaagggcaagcctgctgcttccggcgtgtggtccaccatcaagcctttcgtcaatggtggagcctncggcatgctcgccacctgcgtcattcaacccatcgatatgatcaaggtgaggattcaac

SEQ ID NO: 26199 - DNA, 271 bp, Glycine max
gaccacaccgagtcgcagaaaaagaaaaaagcgatcatagtttcacttcggccttatccagtttagggtttcggttctctaccctatctttcacgtatcgaaaccttaaatttacgatcaggtctgagcaatctggttggtagaacctttggtcttagtgagtcaagttttatgtctgaattagacgatcaaattcctactgccttcgatccttttgttgatgcaaatgctgatgactcgggtgctgggtcaaaagagtatgtgcatattc

SEQ ID NO: 26200 - DNA, 337 bp, Glycine max
ggttctagtgtgtgattgtttgttgttgtaactcgttcttcttcttttgttgttctgtgtttgtgtttgttttttctctcacctgaaaatgtcttgctgcggtggtaactgtggttgcggaagctcctgcaagtgcggcaacggctgcggaggctgcaagatgtacccagacttgagctacactgagtcaaccaccaccgagaccttggtcatgggaatggcacctgttaaagctcaatttgagggtgctgaaatgggtgtgcccgctgagaacgatggctgcaaatgtggaccaaactgctcctgcaacccctgcacttgcaagtgaggtgttggg

SEQ ID NO: 26201 - DNA, 351 bp, Glycine max
agctaccggggcattggaacaaaatgggtgtttagaaataaattagatgaaaatggcatagttattagaaataaggctagattagtcgccaaaggatataatcaagaagaggggatagattatgaggaaacatatgctctagttgctagattagaagccatcagaatgttattagcctatgcatccataatggactttaagatttatcaaatggatgtaaaaagtgcattcttaaatggctttactaaagaggaagtatatgtagatcaaccccctggatttgaaaactcagaacagcctaatcatgtttttagaataaaaaaaggctttatatggcttaaagcaagcccc

SEQ ID NO: 26202 - DNA, 412 bp, Glycine max
ttggtaatatatgaatgttttaaagtaatttttggaacatattaaatacattttaaaaataattttcagaaatgttaagatttacatattttagaaattaatttccaaaaatattaaatttttcaaaatttatttttaataataataggtaaatgttgttgaaattaaattctaaaatatattagttacattatgaaaattaattttcaaaagtaaaatattaaaattataaaacttctaaaagttaattccacactcatacaacatgaatccaataactgagttatatgccaaaaaattcagattacacacattgatcttattgcagagacacagaacatcattggtttactctttcatgagaatgaggcaccttattcccttcccttttagcattaattcaaatgctttg

SEQ ID NO: 26203 - DNA, 359 bp, Glycine max
gacctatcctgcgtttcatctcatgtactactagcgaccctcagaaccgttccccacttgcttttcaattttctttttttgcccttttcgccgccctcaaagagttcaaggatttatacaattaatagttttttaatttggaatggctggaatttgctgtggagttgttggagaatccggagagacttcttcctcttcaatcgaacccacctcgcgcccctccgttcgccggagtttggaccttttgcctttgagatacatagctgctgacgtgtcagtcccggcgccggagaacagccggaagcgccagaagctggatcggtgcgtttcttccgcaagggagtgcgaaaaccctgttc

SEQ ID NO: 26204 - DNA, 336 bp, Glycine max
caaaatgtaaaggataatactgattgggatcacgcggggcatgattctcctgttgctgatcagagtgctggtaatagtttatgccatgatgctgcaaatcatgtcaatagtagtgcatatggaagcatggacagtggaaatgatggaaatgctacttcagctatagtatccaagaacgccccagatggtttcagtgatagtggttgtcataattatgatggatttagagtgacagatcctcatcgctccagtcaaagagaagcagcgttagtgaagtttcgactgaagcggaaagagagatgcttcgagaaaaaaggtcgatatcaaagcctgaaa

SEQ ID NO: 26205 - DNA, 278 bp, Glycine max
gatgcatagcaattcccaattcctaattgtttaaacctaattctcatttcttcatcgttcgattcttctcctcctaaagatgcagatcttcgtgaaaactttgaccggtaagaccatcacccttgaggtggagtcctccgacaccatcgataacgtgaaagctaagattcaagacaaggaagggatcccacctgaccagcagagacttatctttgcgggtaaacagcttgaggatggtcgaacccttgccgactacaacatccaaaaagaatccactc

SEQ ID NO: 26206 - DNA, 350 bp, Glycine max
ggcacaaaaatacaatacaaaacaaaacagagcggagagagagtgtgtgaaaagtgaaacaaaaaacagaacaacaatggcgacacttaaggttcctcagcctcttccccccgttgcagatgattgtgagcagctccgaaaagccttctcaggttggggaactaacgaggagctgattgtatcgatcttggctcataggaatgctgctcagaggaagcttatcagagaaacttatgcccaaacctatggagaagatctcctcaaggccttggacaaagaactcacgaagtgatttgagaagctggttcatctttggacacttgattcttgtgaacgtgatgcaattttgg

SEQ ID NO: 26207 - DNA, 396 bp, Glycine max
accttgctatgagaaaagaataagattttaattgggtgagaatgatatatatattataaattttatttacattgaaaaattctaaacatttttatattgatgaagacaaaaattatattttaactttttttttatcatactattgtactagctgacaatttcttttagttttttaaacagtgttcttaaagttagttgaccatgtaaaaactgtccggccatattcaatccaatttttaacataagtctgactacgtctaaggctttaattaacatattgagtctagcatataaaatctctttcccttgtcttctgtacaaagtgctttgtgttgttagtggccgggttcagtttccatggattcgatgcatgttattatgtcttcttctaatgct

SEQ ID NO: 26208 - DNA, 305 bp, Glycine max
  modified_base (14)..(14): a, c, g, t, unknown, or other
ggcacaagtgagtntgttgatcggtataactagaaacagtgtgatgaaaatgaatgtccttgttttcttcgttgctacaattttggtagcatggcaatgccatgcgtacgatatgttccctctccgaatgaacactggctatggtgcccgtactccggaggtgaaatgcgcaagttggaggcttgctgtggaagcacacaacatctatggctttgagaccatttctgaagagtgcgttgaagcaacaaaggaatacattcatggcgaacaatatatatcagacttcaaaacagttaaccaacaag

SEQ ID NO: 26209 - DNA, 414 bp, Glycine max
ggggtttggtcgtttggtgtttttgcgaattagggtttgtgatttgatctccatcttcaccaatcaccattaccataacttgatcttctctctcgccatgacggacggcttctggaatcggcagcagcagcagccgcttcaaccttcttccgccatgctcaaacgacctcgtactgaatatgatatgtcaccttctggtctgacagggggtaatgagatgcataattatattgctcgaaatgatgaccataccggtcatcgaatgctaaaggacactaaaacacttggatctgcttatgaccgctaccttcaaagtgcaaggcttacttcgtttaattcttgggaagccaatgcaatttgtgggtgttgatttggaaagggtgttggtggataccacccatttactaactgatc

SEQ ID NO: 26210 - DNA, 330 bp, Glycine max
gatgccctacaatgtcatttggacttgcttcaactgagtatgttcttgctaatcttttgtattggttcaattggaatatgtccgagtctggacgtatattgatgcacaacattgacatgagtgagacaaatggactcactgtcagtaagaaagtaccacttcatcttgaaccagaaccatataaaacatgatcatttcacattatgcatgtttggcaacacctataaagagtatagatctggaagtacttcaatttagtaatggatgtaaaagctatacaataagaagtgctaacaagctaagatatgagcatttatggaagtacgagtg

SEQ ID NO: 26211 - DNA, 378 bp, Glycine max
ggacagagagaagggaaagagagagaggtggttgaagaaacgaaccctaagagagagagagagagagagacagagagtctttgctttgatttcaagctcctttaccattgcatttcgggatctcgaatcttcaatctgcaaaggtattgttgattctgcttctatggcaaattcaaagggctcattaggtttcagaaattttatgtatcctggaaagcattctctacttcctcctaaaagtccgtttcctagtgtttcccaagcatatgctgattatgtcccaaattctgctgttggtttaaaggctggtaacagacctaaagatggaaacacacaccaccaacgtactttatctgagagccttgatatagaggagca

SEQ ID NO: 26212 - DNA, 315 bp, Glycine max
agaagacgacagaaggggaaacagagatggctcttgcagagcatcaggggaggtatgtggctattgtagtcaacaagctcgcccagtcatgaatggtgttttcttcatttcattctattcttgttgatcatctgtatttttttaccgttcttttttgtcaaaattggttctggcattttaccattgcattgtgatgaggaatggaagctctgttacactattttaattgattctgttgggtttgggggttctgcattgtatccggaaggtttagatgttgataaaatttcgtctaataataattgttaatttttg

SEQ ID NO: 26213 - DNA, 243 bp, Glycine max
aagatatggtcttcctccattgcttatgtttttttctcatctaagacacccacggatggagattcatggatggaatctttcataactccatattgctttaacaagcaccatgcgtataccatatttaatcccgtgctcacaaaatactgcctacctaggcagaatccaaggctgtttttgaatatcaacgtagccgtcttacaacctacaaacacctaaaaacatccaaaaaaaattggattc

SEQ ID NO: 26214 - DNA, 336 bp, Glycine max
acgcgtccgaagacgagcggccgctttttttttactcttttttttttctttttataaaacaactaaattgaggattatctgataatgaatatgaactaaatatatcatgatcttattatgaatatgaatgcataataataatcgaaatcaaaagaatgtaataaataatgatcaggttctaaattatataaaagttggctctgataccaaatgttaggaaaactatgccattaattatatattttataaaaatttaaaacgccgttaaaagtcttgttgaaatcattatctaaaatattggaaaggactattcatactatatacctgtttaaaccc

SEQ ID NO: 26215 - DNA, 193 bp, Glycine max
tacgtttcaaagaatatttcataagggtttccccactaccacttctgtgaaattttctggttcttaccagataaaaaatgaaatttttctttaatatccctcccccatcctataatatttaattttaaattatcgtctaaactgatgttagctatcttataggtgtgtcaaaaaatgtacatatgtatgtgtg

SEQ ID NO: 26216 - DNA, 208 bp, Glycine max
gaacaagcaggattgatattctccaaccctttcagggtcctccgaacacactaatgcaaggggcaaactcgggaagaagaaaaagaagcagaaaaataagaaaagctgcacacgagaattctttgaaaattgactagaacacatttatctcatcttacacaggattgaagacagcactaggttcaaccacccaagcccccctccactg

SEQ ID NO: 26217 - DNA, 290 bp, Glycine max
ttataccaaaaacaaaacacaatccaactaaattaattatatatttaaaataatttctcctttcttattattcaactttttacctttcatctacttcatattctttatattttacctaaattattttatttttccatttttacttcttccttacttatataaactttttctttaccctattaatttctttttatatattttaattttttcattttttcttatatcttaatattccttatataattttttctttcaaatatttttttctatctttatttatcaatttatat

SEQ ID NO: 26218 - DNA, 431 bp, Glycine max
gataccaaaaacaaaacacacgccaagtgaaagtgagaaaaaataaaaatcaacgagcataatgtcagggatcattcacaagattggggagacccttcatgtgggagggcacaagaaggaggaggagcataagggtgagcaccatgctggagaatacaaaggggagcaccatggtgaacacagtagtgagtacaaaggagagcatcatggtgaacacaaagctggagagtaccatggtgagcacaagccagagcacaaagaggggttcctagacaaagtcaaggacaagatccatggtgagggcggcgccgccgagggcgagaagaagaagaaggagaagaagaagaaggagcatggccatgagcatggccatgacagcagcagcagcagtgacagtgattaaactgctgcatcacctatatatttaaaag

SEQ ID NO: 26219 - DNA, 212 bp, Glycine max
  modified_base (48)..(48): a, c, g, t, unknown, or other
gcacacacacacgcacacacacacactttcacacgctccctccctccngcgctctaggccgcgcccgggcgcccgctcgccctccccccctcctcttacgcaccggcctcggctccccgcgcccagcgtcgagcgaagattttctaggatcggagcagctcatggagaaagtgcccggcgacatggagatagagcgcaaggagaggaacgag

SEQ ID NO: 26220 - DNA, 427 bp, Glycine max
ggcatcacgcacgtgtctctctctcgctcgccatggctatggctatgcacagcggaatcggagtctccaagatcctcatcatagcaggagcaggttacaccggcaccgacctcatcaaaaacggaaaactctcggatttaatcggcgagcttcagttgctggtgaagggattggaaaaatctggggagcatgctgaaggtgaaggtgaatatgctgatgccatagctgctcaggtgcgtcgcctggcgaatgaagttcggcagctagcatcaaacaggccaatcacagtactgaatgggggttctgaacaaagtaatttatcatcccttgtcgttccagctgctgccttgggcgctctggggtatggctacatgtggtggaggggaattcattctcagatcttatgtatgtgactagacggaatatg

SEQ ID NO: 26221 - DNA, 173 bp, Glycine max
atttattccaataaaaaaatctccttataaaaaactcaactattttatttccctcacatcctacttcataaattacacaaaactaattcttaattcataaaattcaaaaaccatatcacaacaataatttcaataaaacaccccccaatttctaacatagtagaccaaaataa

SEQ ID NO: 26222 - DNA, 171 bp, Glycine max
caactggtcagaaggggtggctggatgaagtaaactatctaggccagctttctcatcctcatctagtgcaatcaattgtccattgcttttactatgcacaccgacttctgccctatgaatttacgcctactggccacttggaatatcacttgcccatgagaggctcgaatc

SEQ ID NO: 26223 - DNA, 220 bp, Glycine max
agaaggggttgcagatgtagttggatggagaagctggatttgatgatgctcaacatgagggaggaaagggagctcttgatgactctagttgaaaaagtcactaattcaaggtttggtgaaataataatggaacctcaaagagcaaattatgatgtatcatttggagttcctccaattgaattggagagaaagttgcatgaactgctttgaacacgactgg

SEQ ID NO: 26224 - DNA, 264 bp, Glycine max
  modified_base (16)..(16): a, c, g, t, unknown, or other
gggccgaccgacgcgntacaacacctccaaaagacaactttacgggaccactatattctaagacacttatgggaaaaccgtgcgaataaatatgatttcatattatcatctcactttttatcacgggacctaaccgccgtagaatatcctgtagacttgacttgacacatcataattgtaatatttaaatctcaatctaattctccatttacacagatattttgctactttatcctttttgctcattaaatttatcctaaacac

SEQ ID NO: 26225 - DNA, 190 bp, Glycine max
ttcttaaaggcttattgagaataaagacttggggatttaagagtgagatttaaagcactctctatttatttattgatgcaacaactctgtaatgcaatttttagacaaagtcaacaatatatcttttgtcaaatgcacaaatacagtagctttatttaaggttgatgttgcaccatgtcatattgtatac

SEQ ID NO: 26226 - DNA, 178 bp, Glycine max
gtactacatttggcataatgacggaatatgagggagagcatatgataatctggtagttttatatttgctcacaactaactttttaaagagttatttttaatcctaaaagagatttccctgctttgatccttatagaaatgatttcgtataattaaggctaaaaaatgcacttagtcat

SEQ ID NO: 26227 - DNA, 178 bp, Glycine max
ggtaaaccgcattccttatgaggttacctaacggaaccgttcccttttaaactcttatctctctttttcgcccaaaatttaatttttttttattattaaatcgcgttttatgatcatgcttacttacaagcttagcttttgactgcgcataaattttaaccttccttccttggatccc

SEQ ID NO: 26228 - DNA, 123 bp, Glycine max
cgtccgaccgcgcgttccaatccgatcggacctactttttttgggggttttttctcctctttcccaagggtaaattatgagcttcaattaacaaagatatttctactatctaataatcaaaag

SEQ ID NO: 26229 - DNA, 214 bp, Glycine max
tttataatacacttaacggtgccaatttgagagacgacaaaaggcgaagacagaaacatattttttacggatttcaaagatggtttgaccaaatttcttatattaacacatattctttctcatgtctttcatcagtaacaacttaatttgctctttcattatgatcttcctactaaattctttggcgcttatgagccataacttaatatgaact

SEQ ID NO: 26230 - DNA, 325 bp, Glycine max
atagcaaacgatccaaactcttttttcatttgcagcatcaaaatgagtggtagcaacgatggtagcggcagctggagctctaggtttttgaaggtggctagtgcagctgccgctacagccgccgttgccggcggtttatatgccattctttcatcctcaacctctgctagctctgagatggaagtgccgtttggcagcgcacggcgtgagagcaaagaacgtgacgatggtggctccgggtctcatcctcgcgagggtgccaccacggtcagtcgttggaagaaacctgagattggttgggtgaaactgaacgtggatggttcac

SEQ ID NO: 26231 - DNA, 274 bp, Glycine max
  modified_base (15)..(15): a, c, g, t, unknown, or other
ggttgagccacgcgnccgaatgcgagcgaccacttttttttttttttttttttctatcctttctctaaaatcataacttgtttactacatgtgatttattatcttcaatcattctttaacttccacaagttttgagtaatcaatgagtatatacaaacttaaatcaaaatacttaatatcattgctatacatttatacaaaacttctaccctaagcacacgcaatggatccctatacagtcaagtaaaatccaatccacgaaatcatttgatct

SEQ ID NO: 26232 - DNA, 427 bp, Glycine max
accgacccacgcgtgcgtccaggcgtgcgaacaggtgagatacgacttatgggaccccattctacaatgaaggtgcgggtccattgtgaattgtgaattatgatgttttcagaatctttgaatgggattttgatccaaaagcaatcttgataggaccaataacaatttcatgttattcataatctattatcttttcttatgttaaaatactatgatattttatgagcttatgaactatcacttttgacttcttcttttaaaaataccttgatcctttaaatttccacttacctcaattaagattgcttacatagggttgtgatttaaaacttaaacaatttatttctatataatgaccattgcattaaaaataaactacttttaggcttaattacatattttgtcttcaaagattaaaatgtttgat

SEQ ID NO: 26233 - DNA, 201 bp, Glycine max
gacacaaggggtaacaaaaagggtcgggctgccaatccttaccggtctgttgatccagatttggctgcttcagctgcagaaataatcttacagggtattgtctcccgataagcaaaatcattggattcgtatgaagactctgtgactttggttaatggaggcaacaatcattacatttgaataaaccatctgatcctattg

SEQ ID NO: 26234 - DNA, 232 bp, Glycine max
cgcgttcggacggctgatagaatacaaccgacaactgctctgaatgtttaaaatccaatacccctcacggggggctgcccttgccctttcttggtttataaaccaaccagctatttacaacaaacaagtctttcctcttcctatagtcgagatactaccaacctcatttgtcttttttaaggggagcatagctatttcttacagttacctcatgttgaataacatattaact

SEQ ID NO: 26235 - DNA, 292 bp, Glycine max
gaccgaagcgttcttacagctgaaaaaagactacataaggggatgcgaattatatatctagacgctggaaattggtcaatggtagctctcgtgcaattcaaatggtcataactttgcactctgatttgcgattcatgctcataatatatcgtgacccttgtaatagatcaactgaagctctcgagcacataaatgatcctaacttttcacttggagttcctattaaggcgcataatatatgtagacgctctaaattgaataacgttggctcttgtgaaatgcatatggtcat

SEQ ID NO: 26236 - DNA, 259 bp, Glycine max
ccacgcgttcgttgggtgcaaaaagacgcttaaggggttccaaacagaaagatatccaggagacatggggagtgttattggggtgttcgcataattcacatacatccctctatctattatgatattaaatagcatagttgattgttaggaacaatgttttacatctacaattaatgaaccaaatcaatcctatacaattgtttagagtttaacaaattcttaagaagtaccccacaccttcccaacaaatttaaaacat

SEQ ID NO: 26237 - DNA, 303 bp, Glycine max
gacacacagctattcctcttaagcttgctactgagtttccacactgcataccttatgtcttccgaattcgaagttaatttgcaagatggctaaggaaaaggctcagatcaacattgtggtggttggtcatgtggaccctgatgaggcaaccaccattaacgagctgaataagcctgttgtggagaaagaagctccagggcatgccatatgagggcatgcacgtaccgcctctgaggggaaccagaaaattatgtttacaaaatattctgaaacccttaagtatcagagtcatcatcagtgtgt

SEQ ID NO: 26238 - DNA, 430 bp, Glycine max
  modified_base (206)..(206): a, c, g, t, unknown, or other
ggggacaatttattccattattaaagggataagcctcaggcttgcggcccaacacaaccaaaattcgctacttgttaagggctgcactataccagaatgtctcagggaagaggcagtgcatctttgcctattgtggtcactgtggtttcactactgtgccttttggaacgtgctaacgcagcaacttactccgttggaggacctgngggatggaccttcaacactaatgcttggcccaatggaaaaagattcagagctggtgatatcctaatcttcaactatgactcaacgacccacaatgtggttgctgtggacagaagtggatacaacagctgcaagacaccaaggggtgctaaagtgttcagttcagggaaggaccaaatcaaactagcaagagggcagaactacttcatatgtaactaccctggtc

SEQ ID NO: 26239 - DNA, 235 bp, Glycine max
gatgacggggcgtccacacggccgcccaaacacgcccgattgtgtatgtgagtgcaaggatttgtctttcaaactaaacctaggttcactctctacggtaaggtcatgcattatcttgtcacgagggaattgaatggcactagtattcactcgatcaggagaacagaagctggacagattgtagggtatgctgttcttagttgtgaggcgaaggggactgaaccctatacatcat

SEQ ID NO: 26240 - DNA, 331 bp, Glycine max
ctgccacacgacctcccacggggacgcaatgaccacctcagggcttcattggacgcagggatgatataccagaccctagccagcctgtacaggctactcgctctgatgttgccggtcctgctcgtgcataaggatcttgaagtataagacgaataagtatttcgtgttatgctttgagatagtcgtactcgaatggatgagaacttggatcatgtaggggagagttctttattgttttaaagaccgatactcagttaaatctggatggtaatgagcggttgagaatacatgtcggaacttgaaacttcataataattgtttgattgcatat

SEQ ID NO: 26241 - DNA, 521 bp, Glycine max
  modified_base (6)..(7): a, c, g, t, unknown, or other
  modified_base (15)..(15): a, c, g, t, unknown, or other
  modified_base (42)..(43): a, c, g, t, unknown, or other
  modified_base (90)..(91): a, c, g, t, unknown, or other
  modified_base (157)..(157): a, c, g, t, unknown, or other
  modified_base (159)..(160): a, c, g, t, unknown, or other
  modified_base (186)..(188): a, c, g, t, unknown, or other
  modified_base (203)..(204): a, c, g, t, unknown, or other
  modified_base (300)..(300): a, c, g, t, unknown, or other
  modified_base (329)..(329): a, c, g, t, unknown, or other
  modified_base (512)..(512): a, c, g, t, unknown, or other
cggaanncgccgggncggacccacgcccgtccggttccatcnnccaaatatttatggcgtgtatggtatgcatcgtggtttaggaccacnntctacaaagagtcagtgggggagtccagaatttatagagtagtatgcttgcaataccttgacatcntnnattcaagtcattgggctttgtgatcnnncaaatcactaattcnnccctgcaaattctagaagtctgtctcggatagtttagtggagaaccaagcgccgaataccaataggagagtaccgtgagatatgtcgagcagagtntggacgctgctgattgatctctcatgttnggatttccatagtcagaacaaagcgtggatacattaggagagcatgtgagactgtcaagcatagttggactgctgattgatagctcaacgtttggtttggtttctatggaacgtcaaaaatagtccaatgtcgtgtctaaataacattgaacaccgcaaatgtgttgcaaactactttgtctntattatgtt

SEQ ID NO: 26242 - DNA, 335 bp, Glycine max
ccacacgaccaaaggggggggtacttactagtggtataagaagcaaaaagacttacctgggtccgagaggggaggtttcactcttattttacactctggaaatcctgacaatttgatgaacgagagtcctactgtcatagtcgatcctttttcatcacggcttgatctgggatacatcctcttagatccaccatgggcttttcgtgcaatggctggaaaaggctaccattgaagaagaatacgtattgatggcagagcctgaccacatttttggcactcccctacctaatctagcacatgggggatacccgggtgcattactgtttttgtacatt

SEQ ID NO: 26243 - DNA, 412 bp, Glycine max
  modified_base (8)..(8): a, c, g, t, unknown, or other
gcgtgcgnacagacgaccgcacacgcggaagagcatgtatataatcaccatacttctatgggggatgagcgcttattgcatacgggcagaaaactatttctcattaccagcaccactcctagtgcagttgatccaaaagatgcaagtgctaaagatgatcaatctcagattgtttatgaagaacatagagatcatgacaatacttttgtggttgaggagcctgaaagcatacaggagaagattattcaacagacaggaaccactcctagtgcagcttaaccaaaggaagcaagtaataacgatgatcaatctcagatttttgatgaagagcatatagatcatgacaatacttctgttgttgatgagcctgaaagcatacaagagaagactattcacagacaggaaccactcc

SEQ ID NO: 26244 - DNA, 291 bp, Glycine max
ccgccagggcagccgtcactgaaactgagggaccgtgcctgtccgtcattgcttagatacctgtcgaggtggccaagcgccttcgtgagccaagactggttgtgaaatgcatatggatggaaaagatcatgaggcttggcctggagcgagtcctgccgggccacggcactgtacctataaggccgtactcattgtgggcccggaatgatgccttggcagagcggaaggcctgtgtacaaagtaccgccacggatttctgagaggacgatgaggatgctcctcaatcaggcc

SEQ ID NO: 26245 - DNA, 285 bp, Glycine max
gctgccagacgacctcggaagggggttctagatgcatgattgcttaccgacctgacggagttgagcctatagtgatgggccccgttcgtcttggtagaaaaatacacatgacattgccaaagctaacagtggatactggggatgctgaagatccatgctgttcgcattggcgatgatggtgcatttgaatgtgcccaggctggagctcctccggagcgaccacctgcggcacctctaccataggagtgcgccctggccaggctgacttcgatgctgccgaaacgg

SEQ ID NO: 26246 - DNA, 388 bp, Glycine max
  modified_base (8)..(8): a, c, g, t, unknown, or other
cacgcgtncgccatgcccaaaaaaagaggatttcgggtgctggtcaggatgtgcagcaaaggggtgagcagagggggttcatccctcgcgtggtcaaggagcttgccttcttagatgccagtaaccatggctgactcaccgaggaagatcatttgagagatgccaagtgttgcaaacgaatctacgacgatgaattacgccggataaacagtggttctttgaaaataaaaaggcctaagactgattgaggggtagaaggcaacaatggtgaaaccaaatccattatggcatcaggacattacagtgatgagacaaataagatgtcggaggaagaagattagctcgcgtatataaattttaagttttgaacgatgaaactagagcttta

SEQ ID NO: 26247 - DNA, 470 bp, Glycine max
tggaaaggggtaataatggatcatgagctaccaaagccgtacctgatagtgacttgagccctgcacgtctcttcgtcactggcgcggctacgatacgaataaactagaaattaccatgtgccaaactgaacaatctgagaattggaaagtcctcaaagatccactgctgctggcatttgcaagcattggtgacaattgactatgaagcgtgctgttaaaccttgctgagggttttaatggtgctgatctacgaaatgtttgcacggaggccggaatgtcagcgattcgtgcagaacgtgattatgtaatccatgaagatttcatgaaagcagtaagaaagttgaacgaagccaagaaactggaatctagtgcacactacagtactgattttgggaaagagtagagagattacttcttttccgttttggaagccatggagtacggagcagtgcattatattttagatgtct

SEQ ID NO: 26248 - DNA, 418 bp, Glycine max
aattgaggggtggacccacgcgtccgcccacagcgttagacgaagggggctgcggcggttgtggtgctgcatgtggtgggggctgagggaatttgattaagagtactggctgcggaggtcgtggtggtgatcttatggatagtaaatgtggtattgatgaacatctcaatgaagagctaaagtatgcgaatgaagaagcagtcactgcatgaatcatgtttcatgattatgcattggcactattgtattgtatgtatgaacgtgtggctatgagcttctcaatttcgcttctctgtcattgaagtctttcttagacagaaaacgtagaaaaataagcaggagagttaaatgtgttataatcaacttggaggttatgattctcagttagttacctgtgtgtgtacttatgcctttctgt

SEQ ID NO: 26249 - DNA, 96 bp, Glycine max
ctctctctctctctctctctctcccccccgcgcgcttgctttttgtgtgtctcttgccggcttgctgttcctgctgttggctccctttctttcttt

SEQ ID NO: 26250 - DNA, 266 bp, Glycine max
ggcgagccgcgcgtgcgaccacgcgcgcgcgctgttgttagaagacgacagaaggggacaccacacgagccatctcggggtaaggttctgcacgctgtgctttcagcgagtgtgcttttttcgtttcaacaccccaattttcacacgctgcttctttagattcagaaatggcgcaagaaacccttttatttacataataatctgttaacaaaggtgacccccacaagcggtgcgaccacatatctgaggcacagcgccatgggtgc

SEQ ID NO: 26251 - DNA, 227 bp, Glycine max
  modified_base (43)..(43): a, c, g, t, unknown, or other
  modified_base (57)..(57): a, c, g, t, unknown, or other
  modified_base (92)..(93): a, c, g, t, unknown, or other
  modified_base (148)..(148): a, c, g, t, unknown, or other
  modified_base (150)..(150): a, c, g, t, unknown, or other
  modified_base (206)..(206): a, c, g, t, unknown, or other
aaaagaccaccgaagggggggcaacagaaaagaaaaaaaacancaggggcggggcgngaaaggacgcgccacgaacggaaccagaaacgaanncaaggcagccacgcacagacgagcccaagcagagggaggaacgacaacgaaaagnancaaccccacaacgaagagaaggccacgcagccagaacaaaaaaggccaccaccggncacaagaacagggacaacaaa

SEQ ID NO: 26252 - DNA, 346 bp, Glycine max
accttcgacgggcctgaacatgctggccacggtctctaggtatatggcggtctataatccctaattactgttaacatagacagcactgaacgtgtatcccaaatcatgaacttccatagatcaaatgttatgctcctacaccctcagttgtggattaagaaaaacctctttttttttacggtgaagaatttgcttacacatatagatactgaaatactatgcattctttttttctttccaaatgtttattagttgcagacaacagtgaacatttaaaaaaaaatgtactcactcgtaactgttatgaaagcgtcttttgcatcagattaaacaaaatttaattctt

SEQ ID NO: 26253 - DNA, 241 bp, Glycine max
acctccctttgttaaaagaaagcctccaagatcctcacttcttgattaattagagatttctttttttttacggtgaggaattgcttacaaggatgtatactcgaatactttgtattctttttttcttttcaaatctttataaggtgcgggcaacaaggaacattttaaagaatatctccctaatgtaagcttttatgagtgcggccttttgcctccgattaaaaaaaaatttaattttttt

SEQ ID NO: 26254 - DNA, 283 bp, Glycine max
  modified_base (211)..(211): a, c, g, t, unknown, or other
aattatacggggactatatccccaatggcaataagtcttgaggagttgataccatcaaaccatgccaaggcttatctatattccatcttcatcaaaacacgggtggtactttctaccctgggtattgggctctcagaaccctcttttcgtctggggaagacattgattggatcattacccacaatgccttgttacttttaatctaccctgngcgtgtttcctaataaaacttgcgcggcaaaaagacacgaacacatgcagcacttttcattacaattattac

SEQ ID NO: 26255 - DNA, 325 bp, Glycine max
ttaaatttttcactttttttttttttccttgttttttaaattggaagttgtacatttatttttcagtttttttttctttgaaaatttccttttgggttttttaacttggtttatttaagtggttttttttttcttgttttaatttttttcttttatataaaaaaagttttataatattttttttgtttcttaatatctgattttttttccccattttattttttttttttttattttattttttaatttttttttttattttttttttttaatttttttttgttgcggttttttttattgtttatatttttttattttttttttt

SEQ ID NO: 26256 - DNA, 400 bp, Glycine max
cggtccggaattcccgggtcgacccaagccttcggccaacccttccgtccggttgcgaaaaaaacaacagaaggggaaccttttaagcacaacacatcacacagtgagagaagtatacgtacgaggatgtctgacattgctatgtttggtggcgaggagtatgagaggagggtcaagagtttaagaaaggccgtggtggtggaaaccgagcggggaatttgcatggttcttggtttcgggatgggctagctcaggaaagagcacttttaatgggttggacccaagaccaagtgcatggtgttcaacacttttctctgtaaacaactattatcactcctctgactctgactgcttgtgatgattgtgcaccaatgtatctagttttcatatctaatttatg

SEQ ID NO: 26257 - DNA, 373 bp, Glycine max
ggtccggaattcccgggtcgacccacgccgtccgccaagccttccgggagtacattgaccaccatgaaggttgatggttcacgtactatgtatgaacatgtcattgagatgacagacattggaccaagacttaagaccttggaaatataatggctgtgaatgagaactttcttgctcagattgttctaaactcattaccgtctgagtttggtccgttctatatgaactatactaccacgaaagatacacggaatgagcatggatcgcacagtatgttagttcagaaaaaaaatatggctcacgaatcaaggaagccactcagttcattatgtgagccaccaatgacatcaaagagcttgataagaaatttatg

SEQ ID NO: 26258 - DNA, 314 bp, Glycine max
  modified_base (91)..(91): a, c, g, t, unknown, or other
cggaattcccgggtcgacccacgccttccttccggttggcaaaagaacaacagaaagagcctacccctttctcttctttcttgtagatcgngatggcggcgcagctaatccgtgatcgagtagagatggagtgcctagagggagcttgggagaccctcgaaggcaacacgaggtgccgatttcggggcaccattcgattcacggctacttctttggtgcatccagatgaacctgcacggacgcttcagcgcactgtggagtggatactacccacgcctacaccatatcgtctagtggagcccgttcaagtgatc

SEQ ID NO: 26259 - DNA, 397 bp, Glycine max
  modified_base (346)..(346): a, c, g, t, unknown, or other
cggtccggaattcccgggtcgacccacgccgtcctaccggttgcaaaaaaccaccaaaggggggtggcaaaaaccgaccccaaaactaaacctaccttcctttaaacctttcactctttttttcttttccaatcaaaggaataatatttcttaaaaatattcccgaaccattgctcaacccaatcctatgatttttggtggtggaattctaggtaaccttgtctccttctgttgctttctagcaccagtaccaacattctatcgagtttgtaagaagaaaaccacggaaggtttccaatcacttccttacgtggctgcactcttcacttcaatgctttggatattntatgcttacataaagacgggcgaaatacttctcatcaccattaacgcattc

SEQ ID NO: 26260 - DNA, 263 bp, Glycine max
gtcgaccgactcgtccgttcatagtctacataaggttgatctagagccaaaaatgagccactagcagtctagcacaagggcgcactgtcatgtttgccatttctctttcctttcctccttttttcctttatcagcacccttttgatttgccacttgtacttgcagaccctaatcaacatatttttcaatgcttcttctctcattcaacctatgttcgtgcgcctctaattataattgaaaatctccgatcttcaaggtttttc

SEQ ID NO: 26261 - DNA, 183 bp, Glycine max
actttaaacacctaaataattttgcctttttgattgactgggttgaatacttgtaacttgtggcattaaattatttgtacgatgctgaaatttatactatatctgttatatgctataagtgctgatatgatctaaatgttgtctttgaattaacatacaggagtaccagggtgaagtacattt

SEQ ID NO: 26262 - DNA, 291 bp, Glycine max
ggggttctagtgtgtgatggtttgttgttgtaactcgttcttcttcttttgttgttctgtgtttgtgtttgttttttctctcacctgaaaatgtcttgctgcggtggtaactgtggttgcggaagctcctgcaagtgcggcaacggctgcggaggctgcaagatgtacccagacttgagctacactgagtcaaccaccaccgagaccttggtcatgggagtggcacctgttaaggctcaatttgagggtgctgaaatgggtgtgcccgctgagaacgatggctgcaaatgt

SEQ ID NO: 26263 - DNA, 287 bp, Glycine max
atgttacaccctcgattcaagatgaagttggtagattattattatccgcaaatttttggcagcatgtctgcaaatcgaattgaagaggtctttgatggtgtaaaggctctatacaatgaacattcaatatgctcccctttagcttctcatgatcaaggtctggcctggcaggttggcaatggttcacttctcttgcaaggttctgcgaaggattccagggatcgattgatggggtttgataaatttctccatgaaactacacatggtgaatgcacaaaatcggatct

SEQ ID NO: 26264 - DNA, 355 bp, Glycine max
gagaagacgaccgaacgggcgtttgactatggactatcagactgggctagagctttgggggtccggatggggagtcgggtgtacactgtattagcatttatggagtgcctaacatcacgtttactgttggagacaaaactttcacccttactactgagcagtatattctgaaaactggagaaagcattgcagaagtttgccttattgggtttattggttttgacattcctcctccacggggtcctctctggattcttggggatggtttcatgagggtatattacaccgcctttgactattgcaatatgacagttggtttttccaaagctgtcttacaagacatgtttgagattat

SEQ ID NO: 26265 - DNA, 131 bp, Glycine max
gggttgttcttggtgtgcaccatatcaatggggggctctggaaccaggctatgggttttttcactcacacttcaaagctccccatcaaataagttgcgccccccattatttttttttgctttaaaattttt

SEQ ID NO: 26266 - DNA, 263 bp, Glycine max
  modified_base (5)..(5): a, c, g, t, unknown, or other
  modified_base (28)..(28): a, c, g, t, unknown, or other
ggaanacagggccgacccactcgtccgnactgtttctggatgacgacttattgtgttgtcttgtgtgtgattgttatgttttgttactcgtttttcttcttgtgcttgtctgtgtttgtgtttgttttttctctcaccttatgttgtcttgctgctgtggtaactgtggttgctgtggctcctgctggtgcgatacttgtttcttatgctgttgattgttcccttacagtttcttctctgtttcaaccaccaccgagaccttg

SEQ ID NO: 26267 - DNA, 366 bp, Glycine max
agaaaacaacatatgggggtttaagatagcgaacccaaatcgagaacggggttattttcaaaggtgacaatcttttttcctatttcaaacaagggaataatatttcttatagatattcccaaaccatgactcattccaacactattactcctgttgtttgaatactagataaaaaatatcttcttttgttacatatctaccaccattaccaacatactatttactatttaagaaaaaaaccatctattgtttccaatcactttcttacgtggttgtacatctaactaaaatacttagtatatattatgcttacataaatactgtctaaatacttctcataaccattaacgcattctgttgtcatat

SEQ ID NO: 26268 - DNA, 181 bp, Glycine max
  modified_base (28)..(28): a, c, g, t, unknown, or other
  modified_base (51)..(51): a, c, g, t, unknown, or other
  modified_base (62)..(62): a, c, g, t, unknown, or other
  modified_base (77)..(77): a, c, g, t, unknown, or other
  modified_base (102)..(102): a, c, g, t, unknown, or other
  modified_base (142)..(142): a, c, g, t, unknown, or other
cccacacgtccgcggaggaggagaagcnacagaggaggaagagagaagcgnaaaagggaggnaagagagaggaggtngggcaggaggtgaccgaacgaacanatagagggtttgcaggttggtggggcagagaagagagagngaaagtgcctaactacatgcgaggggaggctccaggtgt

SEQ ID NO: 26269 - DNA, 425 bp, Glycine max
gcgtccgtccaggagttcgaacgggtgagataagacttattgattgtaaaattgttgatcaccacgggtaacggaaaccgtgtgaaggttccccacaaatctcaacacattttaatattttaaaatcaaatatttttggaaaataccacatcagtttttagctttctacaacgtttgatttggatcacttttcgagagaaaatatttgatcatataaacattgcttctcaatcatatgttgtgtgccaacaaaacgttttttgtgttggatgtgtactatttttcaaataatggaagctatgtttaccacatcggagactctgattcttttttttcttcgtgatttgatcgattttgtttcattgagttattttttgtcgagttactcactatacattatgattttaatgtttcatatttgatct

SEQ ID NO: 26270 - DNA, 224 bp, Glycine max
gcgtacgacggatgaaaaaaaaaaatatatgggattttacaacatctctaaacccacggggccgggggacaatccaagggggctaccccttaatatatacttacaaaattcgtataattaaaactgctcctgtgacactgtttttacactgttttttttaatacttttttttttcacactttttaaacaacataaactttctatctaatttaattttaatttaa

SEQ ID NO: 26271 - DNA, 397 bp, Glycine max
ccggaccggaatgcccggctccgacccatcgcgtccgttcgcgataagacgacagacggggaaagattttggaggttctagttttgatgggagggatttgttgggtggtcttgttggggtggtcaagaaaaagaaggatgtgctgaagcaaactgatttccatgatcctgtgagagaatcctttgaggcggagcttgaaagggttcagaggatgcaagaacaggagcggcagcgaatcattgaggagcaagaaagggcattggagttggctcgcagagaagaggaggaaagattaaggcaggctagagaacaggaagagaggcagaggagattggaagaagaggcaagagaggcagcatggagagctgaacaagagaggattgaagctttgcgaaag

SEQ ID NO: 26272 - DNA, 316 bp, Glycine max
  modified_base (14)..(14): a, c, g, t, unknown, or other
cggcgacggtgcanaatacacagaagggaaattttttcttctatcctaacccctaccatgggcgggggcttttggattgattccataaacaaatttatttactattataatatttgtagcatttaataaatattatcttcgacctaaatatttaataaagttatcacttttttttttgaaagaataaagtcttcattaattggcttatttaatattacattattctacttaatttttatattatctgtattaagataattaaactgatatttatattaaaactaatatttttccatgaaagaaaaatgttatttaa

SEQ ID NO: 26273 - DNA, 143 bp, Glycine max
  modified_base (6)..(6): a, c, g, t, unknown, or other
  modified_base (15)..(16): a, c, g, t, unknown, or other
  modified_base (49)..(49): a, c, g, t, unknown, or other
  modified_base (108)..(108): a, c, g, t, unknown, or other
cccggnccggaattnncccgggtcgaacccacgcccgtccgtaccggcnttgtcgagaagaaacgacagaaggggtgatgtgtaaaatttggtcattaccttgcaccnaacttttttcgaactgatgtttttgggtattaccg

SEQ ID NO: 26274 - DNA, 410 bp, Glycine max
cgaccccacgcccgtccgtacccggctgctgagaaagacccgacagaagtggggatgtaacttatgaatagatgtactcatctcacattaaattcgagagtgtcaatgttgtgactcccaagcgaacgcgctacatagacccataatcgatagtccaataaacgacacctgcaatggagattggacgtcaccgctacctactttcgagtcgctttcattataccttttaacaaaagcttcaattaccaattgacaagtgggtatatctgaaacctttgccaaaattgtagaagaatactagtcgtgccaatgatattggcgtggagaggtaccttaagatgataaaatgggtgccagaggagggactatatgctgaaagcctatgccatattggcactgcgcatttgata

SEQ ID NO: 26275 - DNA, 169 bp, Glycine max
gtgagactgctgatctaaataactggtgggcggtttattaaaatgaatgtcctttgaaatattcgttgctacaatttttgtagcatggcaatgccatgcgtacgatatgttccctctccgatgaacactgtatattgtgcccttacttcttatgttgaaatcgcaagat

SEQ ID NO: 26276 - DNA, 206 bp, Glycine max
acaaatcaaacagctgccggggctttctctatgcctctgaacacattttattttacattcatattacttacactacacatagacagcaatacacaatgataggatcttttattaacaatgcacttgagatggttttaggttatgcctttccactctataaatgctataaatcaattgaaaagaatatgccataaattgaacaactt

SEQ ID NO: 26277 - DNA, 350 bp, Glycine max
aaaaaaacgacaaaaagttgttttgaaaaacacgcaaaaattttacatttggttgtttattcttaaaatggttcggatcctaataccggaaagacgattatatatacttgacaccacacttgttatacgtgaacttcaataaattgcaactcgcatcttgattgtcaactaccataaatgatgtatgtaatgttccctattcaaactggaagatattaaagttttattaacagatctaaattgctcaattgtattattaacttattgtacaccatatattgtatcctccaacttaaattttattttgtgccagaaatttttatcaaaacttaacctattatttatcaaaa

SEQ ID NO: 26278 - DNA, 421 bp, Glycine max
accacgcgtccggacgacagaacggtccttcaccatcatacgatcatcactacaaaatttcccattaaatactggtatgtggaatggaccctaatttcatattatttcctcattaattatcaattattgcgcgctatttaactttctagcatagagtttaggcggcaccaatatactctctccaacctataattattatcgagatttctttttttatctcacaacagatcttattttaattttttaatataatattaattacatttttatttataatattaatggtaaacaaaaaatatataaataaattaataataatataaaattaatgttataaatacatttatgattattttttatttatgtaaagtaatctaaaatgactgatattttgtaactaagtagatatctttttcagaag

SEQ ID NO: 26279 - DNA, 403 bp, Glycine max
caaaagggggggaggtgccttttttcactacctaactctatatcgggtcgcggaacataccctagccttttgagtcttccaagatttcaccatcgtaatgggttccgaaggatccagcgtcgtggttcctacgaatttcagattattggaagagcttgagagaggtgagaagggaattggggatggaactgttatctatggaatggatgatgctgatgacatatacatgcaatcttggactgggactatcatcggtccccctactactgttcatgaatggcgtatctaccaattgaaattgtgttgcagcatggattatccaaacaatccttcatctgttagatttaaacaaggattaacctgacatgtgtcaatcaagaaactggggtggtttgaccccatt

SEQ ID NO: 26280 - DNA, 199 bp, Glycine max
actcaacttaacataactaacatgaattcattctctaatttcatcattatctttttaatcatctctacaacatgcaaattactcatcttaaactactatacaaaaacataccctaaatgtgatattatttattccaattcactaaatcattccactcctatgaacaaaacttttccatcatcaattctaccaatccact

SEQ ID NO: 26281 - DNA, 245 bp, Glycine max
agtctagggttttctgtgagctctcggctctggtcttcaaccttctccggtcaccgtcgatcgtgccggagcctccggcgaggcgttcgccggcgggggcgcagattactccggcggggttcgcgtcgctactgctagggatttcggcggcgctgatgctgtgtggatcggtgactttcttcatcgggttcatgctgatgccgtgggttctcggattggttatggtgttttacgtcgctggcgtc

SEQ ID NO: 26282 - DNA, 322 bp, Glycine max
  modified_base (263)..(263): a, c, g, t, unknown, or other
atatttctttcttatgctcttaaacttttcattatgcaagatgaatattttgaggttgataattctgcaatcaaacatgatgggttctttgtaaatagggggaaattggaacgcatgtaagtttttctgttttaaaaaatctactttgaatattacattttgttcttttcaaaccacacatgtttaaagcaaatcatagaaaggtttctttgaaacttattttatttgttgatcccttttcatttctgagggtggtctcttgntatcattttattgtatttgctgttaaataacatctttttagctggctcaaattattcat

SEQ ID NO: 26283 - DNA, 418 bp, Glycine max
  modified_base (386)..(386): a, c, g, t, unknown, or other
ccacgcgttcggccagcgttcggccatgccgtcggcctttttctcttttagccgtccgaccggttggggagaacgccaaagggggttttccgaacccgttgatgttaggattaaggaagtagactagattctcggaaccaagctcaacgcggcatgttccggtattgccaatacagtcttgtccagtaacccgctagaacgattaagccagtgtcctgatgaatcccgtggaacctagtataggatctcgtctgaggatcctcggcattctgagtggatgtatgattcgccctaatccattaatcacaaaagaagcgcatcagtacaagcggatattgatcctgcaagtggagtggctctccatactacctacagaggtagcttgngagcacatgcctatctgtgtactgttctttcc

SEQ ID NO: 26284 - DNA, 390 bp, Glycine max
  modified_base (18)..(18): a, c, g, t, unknown, or other
ttctctctaaaaacaatnctaatgtcattctccttctgttcaaacactctctctcatggcatcagataagaagattaagatcggcatcaacgggtttggaaggattggccgtttggtggccagcgttgcccttcaaaggaatgatgttgaacttgttgctgtcaacgatcctttcatcaccactgattacatgacatacatgttcaagtacgacaccgttcatggccagtggaagcattttgatgtgaaggtgaaggactctaagacccttctctttggtgagaagcccgtcaccgtttttggaatcaggaaccctgaggaaattccatggggtgaggatggtgctgattatgctgttgagtcaactggtgtattcactgacaaggacaa

SEQ ID NO: 26285 - DNA, 350 bp, Glycine max
tgagggcactgtacgtatcatattgtcaacatcattaacaatatcagagatacagtcctttctaatctcacgtggctagagttccattgattttgatgcttatatttgcaatagtggcagtgatctatactatccatccctcaatcctggagagcgcccatttgtggatgactttcattaccactcacacaatgaataccgttggcgtggagaagggttgaggaagactttaatgccatgggctgattcaaccactgataacaagggtgataatgaaaaacaaatcgtcagtcctgttgaacagctttctacacactattgatattcctttcaagtgcctaatccactca

SEQ ID NO: 26286 - DNA, 252 bp, Glycine max
tttttattagactcatataccatattccatcaagctatcccccctgagtgtgacaagccatttgattgctcacggcttggttattaaaaatgcttttttgttgctttgcttcaaaccacaggtttgttggtaaggagtttttttttttttttatacggtttaaaaaaaaaaagttaataaacaaatacacctcaaccctaaaaatttcaaaaatctaaccccattaatataagtacatgctttaatataccc

SEQ ID NO: 26287 - DNA, 277 bp, Glycine max
ggggttttaaaagaatcactaataaaataccaaatgtacaagcccattgacttcacacatttagacaaagatggaatagcgaccctcgggtcgtgggtagaaacgggtgatctttaagcgggtcaatcaacacctcaaatggcaaaagaatcctcgtattgccccggagatggattattacgagcgatacttggcattcagggatccacctcaaaggaaacttggataatactacctacaggcgggaggggtagagttattgatgagagatggatcc

SEQ ID NO: 26288 - DNA, 462 bp, Glycine max
  modified_base (6)..(7): a, c, g, t, unknown, or other
  modified_base (35)..(35): a, c, g, t, unknown, or other
  modified_base (106)..(106): a, c, g, t, unknown, or other
  modified_base (376)..(376): a, c, g, t, unknown, or other
aaaaanntaaaaaaaaaaattaatttaaaaagttnaaaaaaaaaaaaaaaaaaaggagaaagggggaaaaaaaaaaaggaaaaagaaaaaaaaaaaaaaaaaaaanaaaaaaaaaaaaaaaaaagaaaaaaaaaaaaaaaaaaaaaaaaaaagaaaaaaaaaaaaaaaaagaaaaaaaaaaaaggaaaaaaaaaaaaaaaaaaaaaaaaaaaaaaaaaaaaaaaaaaaaaaaaaaagaaaaaaaaaaaaagaaaaaaaaaaaaaaaaaaaaaaaaaaaaaaaaaagaaaagaaaaaaaaaaaaaagaaaaaaaaggaaaaggaaaaaaaaaaaaaaaaaaagaaagaaaaaaaaaagaaaaaaaaaaaaaaaaaanaagaaaaaaaaaaaaaagaaaaaaaaaaaaaaaaaaaaaaaaagagaaaaggaaaaaaaaaaaaaaaaaaaaagaaaaaaaaaaaa

SEQ ID NO: 26289 - DNA, 258 bp, Glycine max
tcgaaaccttaagtttccgatcaggtctgagcaatctggttggtagaacctttggtcttagagagtcaagttttatgtctgaattagacgatcaaattcctactgccttcgatccttttgctgaagcaaatgctgatgactccggtgctgggtcaaaagaatatgtgcatattctcgtacagcaacgaaatggaaggaaaagcctgacaaccgttcatggattgaaaaaagaattcaactataacacgatacttaaag

SEQ ID NO: 26290 - DNA, 381 bp, Glycine max
  modified_base (20)..(20): a, c, g, t, unknown, or other
  modified_base (36)..(36): a, c, g, t, unknown, or other
  modified_base (46)..(46): a, c, g, t, unknown, or other
gaattttacagcaggggtanacaatttgaacaacanaagcccccangggcgatccgcaagaagagcctggtccccagaaaccattagtcttgaatccaattcatatcaaagcaccaaagtgttcactgatgactgggagctcaattccccattttctgtcgtctcttcgctttatcaagaacctgacgcaaaattttctgtgcatgatcgtgtgctttcagaccaaattatagaagatgatgatgacgacgacgacgacgatattatgagctcctatgtcattgaactcaactccaacctgagaagggaagagtgtggaaaatcaaccattgatgaagcaattgcatgggccaaaaagaaatttcaatcgcaaagctctga

SEQ ID NO: 26291 - DNA, 451 bp, Glycine max
gttttgaattcccgctgagaggacgcgtccgacagttcctcccaccatttacttcaatgttcttcgaacatccagccgcgcaagcctacagactacttctagcgcttgcggcgagcgtcttacaacaaccaattgcccaattgcaacaacaatccttggcacatctaaacctacaaaccatcgcaacgcaacagcaacaacagtttctgccatcactgagccacctagccgtggtgaaccctgtcgcctacttgcaacagcagctacttgcatccaacccacttgctctggcgaacgtagctgcataccatctacaacaacgtctgcaacagtttatgccagcgctcattcaactagccatggtgaaccctgtcacctacctacaacagcaacaattgctttcatctaacccgctcgctgtggacaatgcacctacttacctacaacaaca

SEQ ID NO: 26292 - DNA, 323 bp, Glycine max
attccgggtcgagccaacgctcatacagatgccataagacgactgatggagctgcctatgccattttatttcgctatacctacaggcttctacggttcgcagcttggctctcatacaatggccctgttccttatctacaaatccaattcttgctacaccctagcctacgttcactggctcgacaaaatcacacagaacaccgaaccgactcagaactccatcccagacctaaacaggctcctactagcaactaaacttacttgcttcaaacctattacttccgctctacatgctctcatacaatgcaccaccacctctgaaag

SEQ ID NO: 26293 - DNA, 443 bp, Glycine max
gcgtacgcccacgcattcatctcatcttgctagaagacgattttaagggggatgaagaaacagggacaatagacatttttaactgtgaagagctgaaagaacctttgtttttgttgttgttgttgttgttcatctggattgggttggctttagggctttgaatgccatctggggttttgctctcaagcaatcaagctccaaagctgacccctttctctcacttctaactcacataccttgttccattcttcactttctctctctagaactacaatggtagaagacatgtgtttcctctacaaagaaattcttgttatgaagcctccaaagagatcaccaatgttgttaaggacggcagtcataatattttcgattagttgtgagcgttttatcttccttgtatgtctaaaacagataagcacccaaacttaggactacattta

SEQ ID NO: 26294 - DNA, 409 bp, Glycine max
attcgagcggccgatatacttatggggtgttttttttttttccattctacctttggagggttggtcccttcaaagcccaagtttactgccttataaaatatagctgctgatattttatttgtggtatgatacaattaacttttctttaaacttaaaaaatactttgcaataacaacaaaaccttaatgttgttttccattttgatcacccaacttaagtgacatcttaaataacttatttatcattttctttgcaatgcatatatacttaatctattcctactcaagtaaaaatcctttgattcaatgtttgtgtccaaaactcaagtttggagttaacttcttgccttattttctcaatcagaaattctattttaggtaaaaaagcctgcatttatagaatttttttt

SEQ ID NO: 26295 - DNA, 168 bp, Glycine max
ggaaaaccggcggacgacgcgtccagttgcattgaacgaacggatgttgcataccactaataggaatacacaaacccaatggagggctactattgacctgatatacgtacctgatcattttgttgtagaatttataagtgttcccaaaagacaaagggattgctactt

SEQ ID NO: 26296 - DNA, 344 bp, Glycine max
cacaaaaccacaaacaaacggcgtcaaatacaaacccatacatccatcctaacccttcttctttctttctctatccttatctcttaatccacttctatttactacccaccagttaatactccatcatttttcaagctttcataatacaaaccaatactctacaaactactcctactattatccaaaaacatcaaattacaatcctaaactccctctttaacaaccatcatataataatcctccatacaatattccaccttatccttaatacccttctccaaattaccccccccatacctaacttaagtcatgaaatctattttctactttataaataacattta

SEQ ID NO: 26297 - DNA, 330 bp, Glycine max
gatgttataaaacaactgaaatatgctattttactatccttcaatctttttcattggggggtgtactaaatataccgttccttctttcacaaaatatctattaaaaagatatctgctcacccatatatctcttaccttctcacatcatatcctttcttcccttttgattctctataataaactatacatgtaaaatttaccatacttattaaaacaatctttatcatggtatcaacaaatatccagcatcttttaactttaaaactctaacaatgaataacaactcatatttcctttcttaaaaaatatcttaccaattcaaaaaacaac

SEQ ID NO: 26298 - DNA, 131 bp, Glycine max
aattcccgggccgacgcacgcgtccgtccactcgtccgaacacctctgaaaagactttttatagccgatcctctgaattatcataagaggtttttttctatcgccttagagcatccaaacgacccacaact

SEQ ID NO: 26299 - DNA, 290 bp, Glycine max
tcttgctagcagacgaccgatgggcaatctggggccttttattcatggtccaaataatctaatatattctgtaaaatttacattctatcatttgatcctccctcccttcaacgcggggatcaaaagtgatttgcatgacaatgaaacacaatcatcggttgatcatcatgctgctgcctatcctacgtctgagatagctcttgcttttacccacaaccagcttatccgcaataacacacattatcatatactcatttacatcaaccagccctgcgataaaatgcctatcc

SEQ ID NO: 26300 - DNA, 156 bp, Glycine max
tcttaattccacaaccaaaaatgcatagttcaatgttacaatctgagatttttatcactgattaccttgtaccccaagaagtttcatgtcaatttcaatttcaagatatgagcaagaatgacaacaacatgccaatgaaccataccaataataacc

SEQ ID NO: 26301 - DNA, 103 bp, Glycine max
ttgaaataagaactaagcgcggccactctgccggtacaacgactgtcttcagagaagaaactttcgaacccaatgagggggataaaggtgcaatagctagaaa

SEQ ID NO: 26302 - DNA, 314 bp, Glycine max
  modified_base (14)..(14): a, c, g, t, unknown, or other
atgttttattaatntcttattgtgaactctttaatgagtttatttggtgttggtacttgattattgtatgaacttatgaaacctttttagtttatttgaatgcaatcttttgtttttttcaatttcaatgagtttatatatatgtttttttttttttgtgtccgccatgacatccgccattttccgctacgccatccgccatatttttatggcggatttttgactttccgccatgaaccgccatccgccattaacaacattgcttaaaagtccatccctcttggaaagtgtcctcaatatgtataacccacata

SEQ ID NO: 26303 - DNA, 338 bp, Glycine max
tcggaaaacaattttgactagattaagtgcagcacagagggatgtgcgattcagagagagaaagagaggcatggctgctgcaggtccagaaaacgtccctcctttcatcgacgctcagattagccacctcctctcccacttcggtcttacagtcaaggttgaacaaacgtggtcgagtgacaaatacaactccacccccctcgatcgcttcaccctcctcataccctactgcttagacttcatcaaatgggatgttatatacgacgcggaatctccgaacaccgcccccgacgttatctttagccccgaagacgacgatttacaccccctttcacatg

SEQ ID NO: 26304 - DNA, 341 bp, Glycine max
aaaaagatttggtatagttttccttgcgatgggcccgggacgaggcggtacttgcgatatttcggcttgggacgcattttatttggcagttttctggatgttaaataccattgggtgggttactttttattggcattggaaacacattacactatggcagggtaatgtttcacagtttaatgaatcttctacctatttgatgggatggttaagagattatctatggttgaactcttcacaacttatcaacggatataacccttttggtatgaatagtttatcagtctgggcatggatgttcttgtttgacatcttgttgggctactggattatgttctaat

SEQ ID NO: 26305 - DNA, 401 bp, Glycine max
accggttgcaaaaaacaaaagagggggtttcatttttccaatccaaaccaaaccaggccaacgtgaaagggtggaaaaggtgaaacaaaaaacagaccaccaatggcgacacttaaggttcctcaccctcttacccccgttgcagatgattgtgagcagctccgaaaagccttctcaggttggggaactaacgaggagctgattgtatcgatcttggctcataggaatgctgctcacaggaagcttatcagagaaacttatgcccagacctatggagaagatcttctcaaggccttggacaaagaactcacgagtgattttgagaggctggatcatctttggacactcgattctgctgaacgtgatgcattttttgcaaacgaggcgactaaaaaatggac

SEQ ID NO: 26306 - DNA, 178 bp, Glycine max
  modified_base (6)..(6): a, c, g, t, unknown, or other
accggnccggaattcccggtcgacccacgccgtcggccacgccttcggaccggtgggaaaagatcaccgaagggggggggccttgtaattaccatttccggttccaggaggaaaagcccgccccaaccggtgtgaagtaattgtgtgcggaaaatcgaggaatcaaaataggggttcg

SEQ ID NO: 26307 - DNA, 303 bp, Glycine max
ggagcaggttacttggaaaatgaaaatcccccttatgtcatgacatgagtagtagtatttaagacgcatccgtgcttgtgttgtaataaagttttgtgtgttgttaggaataggatggagggggttgagagcaaagaaagagaagtgatggtggcaaaaccagttgcagtagtaagtgtctgtgatttgcttatgaggctgttggccttcacagttactcttgtcgctgctatagtcattgcggtcgataagcaaacaaagcttgatcccatccagctttcagattcttttccacctttgaac

SEQ ID NO: 26308 - DNA, 276 bp, Glycine max
aaaaatgcaaatgtaggttcttttttgacacaaatattttacttcatttttgactgaagaataaaaatgattggtcacctaaactcattgatgtactgataatacggacacgcgaactgatggtttcgaatctagagctgtatcgacgattgcttatttgggacattgtgtgtgaatcaacaagcagaccaatcgacttaaaagatcaaaggacagactgtattgacgtacttgtaagactaaacgtacacggatataatcatatgatgatatgct

SEQ ID NO: 26309 - DNA, 377 bp, Glycine max
cctttccattccccaattcctaatggttgaaccctaattctcatttcttcatcgttcgattcttctcctcctaaaggtacgtctctggtttcctctctctcttgttcattcttttcgtaatagcaaccttattagccttcgtttattgatttttctcctaattacacttcaattttttcgatttgtgtttgttacgtcaatctgtatatcttttttgttgtcgtcgaatccgaaacttttcattcgcctttctgattccgtaaatcgtttgttaagtgcaacatctttccctgttcttaggtatctgattgatttctctctttcttttttttttatcaagtttgaggaattaaggttcgtgatctgaatttgttctt

SEQ ID NO: 26310 - DNA, 373 bp, Glycine max
aggggtttcttataaaatggtaaaacctgggaatcttcttcaacaaaattctggtactctttggtcggcccccagaggctattataacttatatgacttggccattataaaggcaaagtgacatttatctgtgggcgtgctggtgtttgtgctcttggtgctgtgatagctaagcatactggtgatgaaagattacttgactattacctgaagcaattcaaagagaacagattgcgatacctcgcgagtctccctatgagctattgtatggcagagcaagttacttatgggcttgttcattcttaaacaagcatattggtaacaacacaatacctactacccacatgagaatcaatgtggatgaagtattatg

SEQ ID NO: 26311 - DNA, 82 bp, Glycine max
tgttattccacccatctacaccatttaggccatgttctaatggcatgataatgaattcgtgtgctccatctaaagattccat

SEQ ID NO: 26312 - DNA, 359 bp, Glycine max
  modified_base (97)..(97): a, c, g, t, unknown, or other
ccactgcctgtggcttccaaactctttccaatagctctcttgaaaacttctgcaggggtgatttcatcatctccatgaaggttgttgtatattgcanatgatggggctgaatgcaaggttgttgactcaaattcatcctccatcactgaattggaagaactatccatggacatagctagcaacaagatctgccaatatctccaatttgctattagagttatcaaaattgagaaatgctaggaatgaaaaacagtgctaaaaaagaaaaggtcggcgttagatattgctagcgatgatatggtaaagagactatgttcatgagaaatagcgaaaacgagtatttctatactctaagtgat

SEQ ID NO: 26313 - DNA, 243 bp, Glycine max
  modified_base (24)..(24): a, c, g, t, unknown, or other
tccaactacacagcccagaaaggnccatcacctcccacaaccttggacttggagcatcataaaacaacaccatgtttgctttcttccatcgaaaaaggacgtgcggttaataggagacaacttattcttcacacgccagtaacactagctgcatttgcagtcccaaatgcatcggcactcaatgatgtgtctgaagatgttcgtgtctacactgacgatgagaacaagttcaagattgagatt

SEQ ID NO: 26314 - DNA, 402 bp, Glycine max
  modified_base (26)..(26): a, c, g, t, unknown, or other
  modified_base (272)..(272): a, c, g, t, unknown, or other
cggaattcccgggtcgacccacgcgntccgggagaagaccaccgaagggggccaccatccctttctttcatggcctaatggtaaccatggccttcttttttctcaatccatttcttcctcctcctttcaatagcccttttctcagtttgttgtttagcagtatctcaagctcccaccaccaaatcacccccctatatctttcccattaagaaagaccccgcaacaaatttgtactacacttcagttggcattggaactcctaggcacaactntgatttagtcattgatctttctggtgaaaacttatggtacgattgtgacactcattacaactcatcatcctacagacctatagcttgtggctcaaagcaatgccccgaaattggatgtgttggttgcaat

SEQ ID NO: 26315 - DNA, 314 bp, Glycine max
  modified_base (115)..(115): a, c, g, t, unknown, or other
  modified_base (178)..(178): a, c, g, t, unknown, or other
  modified_base (279)..(279): a, c, g, t, unknown, or other
  modified_base (290)..(290): a, c, g, t, unknown, or other
tttttccttatggtacaagttggagatcaaaagcgactttccacaacacaagagctttcaaggggtcaacggaccatcgacttttaagccattccttcacgaacccttctttagntggacgtaagtggtggaaagagacttccttactccaccctactcttcctccaccatgacttanggagtttttcttttcctatctccttctttgcttttattacacttgtccgattctctttgatgatttaattcgttttaatcttttacatgtgctacattgangacaatgtgtngttaaaatatgggggggggagtgt

SEQ ID NO: 26316 - DNA, 249 bp, Glycine max
taccggtccggaattccggggtcgaccaagccgtccgtacggtggcaaaagcaccacaaagggtttctctagaggatggtagcacgtgggcgcggctaaagcttgaggattagttggtcaaccgggggaagcagttgatctatactctgacagaggatgctgcaactagtaccggagctccttgctggtctggaccaaacagattccctcgtccactacaattctaagactcagatctggagcatctaa

SEQ ID NO: 26317 - DNA, 259 bp, Glycine max
gacccggtccggaattccggggcggaccacagccttcgcgccggtgtgaagacaacaacagaggtgtcatatggctgatgtaccttgatgaatcagaggcttattctttgtttgattaggccactactgtttgatagctggaggacacaaagaatctgcgttttgtttgctagatgacacgcaacactgagaatgtgtgcgagtttcaacgctgctcagaacaagctcttcgagcttaagaactcaggtcagcatctac

SEQ ID NO: 26318 - DNA, 143 bp, Glycine max
gattccgggcccgaccacacccgtccggcagaatacgacaaatacgacacagcggatagtcacataggctattaacggtgagagcgggagagaaacatacgacatcagatacaaatggataagtttccagccgttgacatggg

SEQ ID NO: 26319 - DNA, 270 bp, Glycine max
gcgtccgtccggattcccggtcgacccacctcgtcgtgcaagcgacgatggtgaggaagcttccgagatatttcgcttgtcagaagggaaaagttatgggaggatgttgcttgattgccacaggaggatcgtgcgacgcaaaaaggttgtgtacgaccccgaccccctttgaccgtgtcatgatcctgctggagatgtggttctgcaaatgtggcaacgccaattaaattgaggtcaaaatagaagttctggacccagaccacacactga

SEQ ID NO: 26320 - DNA, 452 bp, Glycine max
  modified_base (135)..(135): a, c, g, t, unknown, or other
acccgtccggaattcccggtcggaccaacccgtccgccaagccgtccgccaacccgtccgacggtttggtttaagcgacagaaggggaagtaaaatcttaaatttctgaacattgaacaactcttcacacaacanaacttttttctggcattgtagcatcatgactggcagagaaatcctccatatgatgaaggtgaaagcagggtttggaacaccagacacagggaatggaaaaggcaaaatatcaaaacacattacacatggctttcacttgatgaagggcaaatcagcgcatcctatggaagattatttagtttcagaatttaagcaagaaaaggacagagaattaggcttgtttgcaatatttgatggccacttaggccatgatgtagcaagctatttgcagaaccaccttttccaaaacatcttgcaacagcatgacttttggactg

SEQ ID NO: 26321 - DNA, 413 bp, Glycine max
tttgaaggggaagagggtgtttgcaaacatgcgtttgagttgatttttgcatttgatgaactcatctctcttgggcacaaggaaaatgtgactgttgcacaagtgaagcaatactgtgagatggagagtcatgaagagaagctgcacaagttggttttgcagagcaagattaatgaaactaaggatgttatgaagcgaaaagctagtgagattgataaaagcaagattgaaaagaacagaggtgataaaggaggatttggtccattacagtcaatgggctctggaagaattgaaaatagctttagtgatttgagcatatctagcagtggaaactggttttggaagtggctcttggtttggaatgacttctgatgtcgattcctttgcaaccaaacctaaaggtcgtccaactt

SEQ ID NO: 26322 - DNA, 266 bp, Glycine max
gatttcaagagtgattagggttttggtttggtggggttcttacgcttgagatcaggaattaatttcagaggttcagagaatggcaacggattcttctaatggtaatggacatcaccaaacaacaacaaagcaacctcctttgccgtctcccctgcgcttttccaaattttttcagtccaacatgagaatcttggttactggaggagctggattcattgggtctcacttagttgacagattgatggaatatgaaaaaaatgaggtaa

SEQ ID NO: 26323 - DNA, 391 bp, Glycine max
ggaggttgcagagttagaccgagagagagagagagaatgggtctcatctcaatgcaatttaggttctgaaaaccaaagcttttcataggaaaagttgtgctaagatgccagggaaacctgacactgatgattggcgtgtagagcgtggggagcagattcagtttcagtcttccatttactctcatcatcagccttggtggcgcggagtgggggaaaatgcctccaaatcatcttcagatgatcaggtaaatggctcaatcgtgaatggtatcacgctgtctgagaccaatgataagtcaagcggaggtgttgccaaagaataccaaaacatcaaacatgccatgttggcaaccccatttaccatggagaaacgtcttgcttcaaaatccca

SEQ ID NO: 26324 - DNA, 271 bp, Glycine max
ggcttaggcggaatatgtttggtgcaccttggtgtgatccacacgatgtggattgtgctaatgatacacctaaacttgttaattctgacccacttgattttagctcattggagcattgtgatgtttactatggaactcatcgcttatggccaaggaagcgcaggatgtctgaaagagatgcagcttttgggttgaatacttctgtgggcttgggaggttatcttggtataatgggttctcgaagagatgttgttactgcaacgtggaaaac

SEQ ID NO: 26325 - DNA, 221 bp, Glycine max
aggtgttatagaccactgagtcccatgattaaggtggcatcagcactgccactgcgagtaccacccccagaatgggggccttccgcagagctttctacaccgtcggattttggatccgcgagaccggccaagccatcgatcgcctcggctctcgtctccaatgcaactacctctttaaagaacagctatctaagcatcgacctctgatgaatctgctcgac

SEQ ID NO: 26326 - DNA, 294 bp, Glycine max
  modified_base (67)..(67): a, c, g, t, unknown, or other
ttatataagggggagatgaaagagtgaggagacgggttacagagcacttttccaacagcgattacancgaccgaatcaaacacctctctttctctccgaagctgcgtttaatatcttactcgccttagattgttcttctctttcattatactgttctcttttcgatttgagggaacagttcaagagtgtgaggatcggttaacccaactgcacaggtagacactaaaataatggagtctaacgatgagactggatgccagtctcctgaacgccccattctttgcattaataatt

SEQ ID NO: 26327 - DNA, 440 bp, Glycine max
aattcgagctttcgcttgatggtggcgtcttttatttgtagggttgacttgaggacatagatgtgcttccaggattcaaatcctaagcatataccaaacatttggtacatcattagagattgcctttgctttcaagaaacagtgatacaattaatacgatctgataaaaactaacctaccagaaagtttattacatcttatactaaacaactatacctgattagggttacgcatggacatgctctaaccataatcatttaccccattttgataactccctaagtttactatctaatcttagtgcgaacaatttttgattgacgttttatactaggactttgcattctcaagaaccatggtacaacactggattgtggcttaccaaacgtcaagggaaattcatcatcatgttcaaagaaacctcgatctttggatatgct

SEQ ID NO: 26328 - DNA, 227 bp, Glycine max
ggaatccgagaagaagaagatggttatgtatcagggctggagcacgagaatagcgttgggagccttcgcgtttggtctgcttttcctatcggcctcagcagacgacgtcgttgtgctctctgaagataacttcgagaaggaagttggtcaggacacaggagctctcgttgagatctatgctccttggggtggacactgtaaaaagcttgctccagaatatgaaaagc

SEQ ID NO: 26329 - DNA, 311 bp, Glycine max
gtcctaaggaatgcagaaagccgatcaggcacttgtctctggatgttctgcgggtggtctggcatccataatacactgtgatgagttcgggagcttgtttggaaaatcttccaaagttaaatgtttgagcgatggaagtttttttcttgatgcaatggatgtatctggtggacgcacactgaggactcttttcagatgtgtggttcacttgcaggatgtacaaaaaaatctgccaaaaagttgtctcgaccaactagacccaacttcgtgcttcttttctcaaaatatgatcgaacatgttgagaccccat

SEQ ID NO: 26330 - DNA, 149 bp, Glycine max
cgggggttttggatatgaagatatatattttctacttggattcataaaatcaaataggagggtaatccctactttacggagtaacctgatctagctctcaaaaaaagcagtcgatctagatgatccaatctaacttacacattcaaact

SEQ ID NO: 26331 - DNA, 184 bp, Glycine max
gtgcttatgaagacgacacgaacggggagtttctacaagtgagtgttgttcgatcgatgataacgtgagagaacagtgtcgatcgaacaatgagacggtcccttgttttctttcgttgcgtacaagttttcggtagcaatggcaactgcgcatgccgtaccgtatatgtttccctctccgaatg

SEQ ID NO: 26332 - DNA, 433 bp, Glycine max
atgaatcaatttcaaatgaaactcctgcattttgtagctcaggctctcagataactcaaggggtgtttgagaaggagaaaggggagttccaggtgaaggttgttaagcagatcttatgggtaaatggaatgaggtatgaacttcatgagatatatggtattggaaattcagtggagagtgatgtggatgggaatgacccgggaaaagagtgtgttatatgcttgtcagagcctcgggacacaactgtccttccatgtcgccacatgtgtatgtgtagcggttgtgcgaaggttttgaggttccagacaaatagatgtccaatctgcagacaaccagtcgagaggcttttggagatcaaagttggacccgagcttgaggagtgaagatacattggtagtgacacatgcttcctgtacaatccaactggtatagc

SEQ ID NO: 26333 - DNA, 336 bp, Glycine max
ggttaaaatgttgaggaaggaggagtggaggggagcggatctgctgggtgggacgggataaagtgaaccaagctgacaagactaagggaagattggatggtggaaatggaatcggcagctgaaaaccctatttacccggcggtggactacaagcaaccttcaatttggtaatttcttcgggggcctgccttaaaagttccatcccatttcatatgttaagcccaattttttttcattagaatttcctgaaagtgtttgacaagctttgcaaattaaaagttttgtttaaacaacagtggtaagggcggtacaattttctaaacttaatttaagttt

SEQ ID NO: 26334 - DNA, 140 bp, Glycine max
tttagggtgtgaattctaaaaggaaagaacagctgagctggtcagaaaatcaatggcatcatccttgggttttgagttcctgacgaagaagccttacagtccttcatactgggcattccaatttcaccctttacctttcc

SEQ ID NO: 26335 - DNA, 225 bp, Glycine max
catattgaattgacctgttagtggattgccatgttgctggtctaagccatgtagaaagtctatacatttttggcatttttgtagaaaaaatgaagatgaattatttcaagttgttcttgttgaactgaaatctttttgattcattgagtgcattacaaggttgcaggcactgattatcttttcccttacatttttcactctaatgtattaggatatttcaggaaa

SEQ ID NO: 26336 - DNA, 282 bp, Glycine max
ccacgcgtccgtagcgagaagacgacagattgtggtagtggaagtagtaacaggtacgtcgcatatctagttcatctttagcggctatacagttttggcccttccaattatcagatctgaatcaccggtctcactctgcacactcactcacactgaatggctgctgaatgcaaccatcaccaccaccaccaccaccatcaatatcacgaccatcatcattatcatcatgatcaccatcatcatcacgatcgagagggacagaccaactcatggctaggtaat

SEQ ID NO: 26337 - DNA, 154 bp, Glycine max
  modified_base (37)..(37): a, c, g, t, unknown, or other
  modified_base (48)..(48): a, c, g, t, unknown, or other
gatgataattctgttcatggttcacctgtgaatgcanatgggaagcangataatgctgctaatggtgattatacagttgatgatgaatcctatgcacacagtgaagatgacctggcaagaatcccccatagtctagctgggaggagtccggtgg

SEQ ID NO: 26338 - DNA, 279 bp, Glycine max
ggcgcatatctagattagaaatgggttctgataagcgtaagttcctctgcttgcccagttcgtttgtgcgtagatgagcacgtgacaaggatttataatgcattccgtcctatcctttatcaatttgttggggaagaattaacaaagtcggaagctgttgaagtactcaggattactaaaggaattcttttggatcttagcaagtccccctataaaacaagaaggacctccattgactcagttctagataacccaaaatttcagaaactattgccatct

SEQ ID NO: 26339 - DNA, 258 bp, Glycine max
  modified_base (14)..(14): a, c, g, t, unknown, or other
gacacacagatcgngaaagcgcctttctactctcttctcttctttgttagagctgtgtcacagtcacacagatcttggctgtgcctgcgcctacggtgatagaggaaactgaagcctttgtacatgccacggtggcaatagcagcattattactcctaaatttttcatgcttatcttgtgctacacactctctctctctctgctagagcgcgcgcttaaacttgtaataggtttaaaaagagcaggcaaaaagtgaat

SEQ ID NO: 26340 - DNA, 363 bp, Glycine max
gtatcaagggataaataatcggaccggtccttagattttgttaaggctttaagggagccgtatgaggtgaaaatctcatgtacggttctgtaatagagatggtaacagtaatgtcatcaccgactaggattatctaacagtttaagtacagttgatatagttgatgcacaatcaaaatatggtttttggggatggaatttgtggcgtcaacctatgggtttcattgtttttctaatctcgtccctagcagaatgtgaaagattaccttttgatttaccggaagcggaagaagaactagtaacgggttatcaaaccgaatactcgggtatcaaatttggtttattttatggttgcttcctattt

SEQ ID NO: 26341 - DNA, 356 bp, Glycine max
  modified_base (15)..(15): a, c, g, t, unknown, or other
gccaggcgattgaangcgagcggacgcagttttcttcgtgtgggattacgagtttttggtggttccgatattgggacgcatcaacttgttatgaaatcacattgatagcctatactcgtgtcctagctcgtctaagagctagatttgcctcaattgtttggctcttgccttccggcttattcaaattagcttctggtatttcaagagtttgctgggcttcttgtggatcaatggcactaccctttttcgcatcatttactaaaacagtgatctcattattggttattctagcaaaaccggccatcagagccatgggtaaccattgggctttaagaagacgtattcttaaaatacct

SEQ ID NO: 26342 - DNA, 197 bp, Glycine max
ggcttcaaatgtggaccaaactgctcctgcaacggctgcacttgcaagtgaggtgttgggagagcaagcttcaagcagagatagcccttaattaggaataatgataaactattaatgtgtagctaaaaacttatgtattatgtctgtgatggttttcgtgcactctggtgttttgtgttaaacaaacatccttagaa

SEQ ID NO: 26343 - DNA, 344 bp, Glycine max
ggggtgttgtgtcggtaggtttgtggtggagaagaacagtttgaaggtgacttctccgaaatcgttgaagggtacgtatgaatgtgcaattgggaattttggggttcccaagtatggaggaacgttggttggttctgttctgtacccaaaggtgaatcagaaagggtgcaccaacttcagtgatgtcaattttcagtccaagccaggagggtttcccacttttcttcttgttgatcgtggagattgctacttcactttgaaggcttggaatgcacagaatggtggagcagcagctattcttgtagctgatgacaaggcagaaacgttgatcactatggacactc

SEQ ID NO: 26344 - DNA, 436 bp, Glycine max
gaatacatggagtggaatgacaagaattcacaggtaagaacatgcaataaagatacggagaatttgatgcaaggtagtactgtcccacaagaagttgatacaagcaaggatattgtattcacatatgatgtttccttcacggaaagtgatatcaaatgggcatcacggtgggacacatatcttttaatgaatgatgatcagatccactggttctacatcattaactctctgatgattgttcttttcctgtctggaatggtggcaatgatcatgatgagaactcttttcagagacattggcaattataatcaactagaaacccaagatgaagcccaagaagaaacagggtggaaacttgttcatggaaatgtttttaggccaacaatcaattcaaatttgctttgtgtttaatgtggtactggtgttcacatctttg

SEQ ID NO: 26345 - DNA, 399 bp, Glycine max
ggagctagagtgaagagcgaagagaatggctcccaagggtttaatctttttggctgtgttatgcttctcagcactgtcactgagtcgttgtcttgcggaggataatggacttgttatgaacttctacaaggaatcatgccctcaggctgaagacatcatcaaagaacaagtcaagcttctctacaagcgccacaagaacactgctttctcctggctcagaaacatcttccatgactgtgctgttcagagttgtgatgcttcactgttgctggactccacaagaaggagcttgtctgagaaggaaacagatagaagctttgggttgagaaatttcaggtacattgagaccatcaaagaagctttggaaagggaatgcccaggagttgcttcctgtgctga

SEQ ID NO: 26346 - DNA, 312 bp, Glycine max
gaatgaaaggagtgatatattgtctttggaatttgactgtggtgtcttcttctttgtgactcactctctcttcagctcttgaatttgatccacctgtgttgcttttcccaccaaaccaaacaaaataacctgatattaacgtaatagtagttcttttatcgaacattgtgccatgacattcgacgaggtttccatggaacacggcaagagcttcatcttcgccttgcaggaacttaagaacctgaggcctcaactctattctgctgcagactaccgtgagaaatcttatctcaatagtggataaaaacccat

SEQ ID NO: 26347 - DNA, 309 bp, Glycine max
ggaatcgccattgagctcatagtcatgtacccgattcagcaccgcaggtacagggaaggaattgacaacctgttagtgctcttgattggaggaattcccattgccatgccaactgtgttgtctgtcactatggctattggttcccacaggctttctcagcagggtgccatcacaaaaagaatgacagctattgaggaaatggcagggatggatgtcctatgcagtgacaaaactgggactctcaccttaaataagttgagtgttgacaggaacttgattgacgtgtttgctaaaggtgttgagaaagag

SEQ ID NO: 26348 - DNA, 416 bp, Glycine max
  modified_base (19)..(19): a, c, g, t, unknown, or other
gacttataacatgggcagngaaactgaaaagggggagaagagagagaaaagggggagctttacgcgttggacttcgatggagtcatatgtgatagctgcggagaaagctctctctctgctctcaaggctgccaaagtgagatggcctggtttgtttgatggggtggattcaaccacagaaaattggattattgaccagatgcacacagtgcgaccagtagtggaaactggatatgaaaacgttttacttgtgagattgttgcttgagagcagaacaccaaccatccggaagtcttcggttgcagaggggctaacagttgagggtatattggagaactggtcaaagttgaagcctattatcatggaagaatgggatgagaagagggatgatctgatagatctttttggaaaggtcag

SEQ ID NO: 26349 - DNA, 327 bp, Glycine max; identical to SEQ ID NO: 25911

SEQ ID NO: 26350 - DNA, 413 bp, Glycine max
ggatagaagagaagcttacgatggctacttttctgtgcaaccaatctgtgatgggttcttgtccttgttctactcccttctcttcaaagccctttcaaaccctaaaaccccaaatcttatcttttccatctcgcgggtttccgagccccctaatttcctcagtcaatcgaagaacccaattgaagtcttgccaagatatgcctccaactacaaacgatgaagcagaggagacccacaatgacgtaagaaggacaaatgatgatgaagatgataaacaagtacctactttaatgatcctccttgaagcatacaaagaagccttttttaatggcgaccaaaataccgtagctcagattgaacaagggatatattcaatagccaatctgaaaaataaattgattcagaaattatca

SEQ ID NO: 26351 - DNA, 351 bp, Glycine max
gagggagcgaaggtatgaagccttcaacaggctgagaatattccaagttgtaagtgtcgcttttctaggtggactattgtggtggcatactccagagtcacacattgatgatcgggttgccttgctctttttcttttctgttttctggggattctaccctctctacaatgcagttttcacattccctcaagagaggagaatgctgatcaaggaacggtcttcgggaatgtaccgcctttcttcctactttctggctagaacaataggagacttgcctctggagcttgcactaccaactgcatttggcttcataatctattggatgggagggcttaaacctgatcctatgac

SEQ ID NO: 26352 - DNA, 288 bp, Glycine max
ggtgcacaagtgagtttgttgatcgagataactagaaacagtgtgatgaaaatgaaggtccttgttttcttcgttgctacaattttggtagcatggcaatgccatgcgtacgatatgttccctctgcgaatgaacactggctatggtgcccgtactccggaggtgaaatgcgcaagttggaggcttgctgtggaagcacacaacatctttggctttgagaccattcctggagagtgcgttgaagcaacaaaggaatacattcatggcgaacaatatagatcagacttc

SEQ ID NO: 26353 - DNA, 324 bp, Glycine max
gatggtcagtagtaggtaacttgttttctcttgctcgatttggtcgatcgttgcttctctctcttgagtttatgccaggaatgacagcgtatcagtggcagtgcaggaaacgagagggagagctttcattgggaaggtaaaagcctttggttgtagcagtgccttacatgaaccctcgtcccccttctctcgttcgctaccactaactcatcgttttctcagtgtgccccgcgtgcgttctgctgtgtcctctcactcacaggtgtaaccgtgtaaccactatgatcatacttagtggcatggaaagaaagaatgaaagattaa

SEQ ID NO: 26354 - DNA, 208 bp, Glycine max
gatggtcagtattagagaacttgttttctcttcctggattggatcgatcgtgcgttctctctctcgtgttgatgcgatgattgactgcgtatcagtgcctgtgcttgaaacgagagggagtgtttccattgggaaggtataagcctttgtttgtagcattgccttacatgatcccttgtcctacttatctcggtctcttccactaact

SEQ ID NO: 26355 - DNA, 398 bp, Glycine max
ggccaaagggaatggataaaagtttgcagtcaacaagtagaggacgtgaagttactgtcacgaatgatggcgctacaatcttgaagtccctccatattgataacccatctgctaaagtccttgttgacatatcaaaagttcaagatgatgaagttggggatggaactacctcagttgttgtgttggctggtgaacttttaagggaggcagaaaagctggttgcaaccaagattcatccgatgacaataatatcaggttttcgaatggcagcagattgtgctcgtaatgctttgttggagaaaggtgtggacaataaagcagattctgagaaattcaggtcagacttattgaacattgcaatgactactttgagctccaagattctctcacaggacaag

SEQ ID NO: 26356 - DNA, 414 bp, Glycine max
cgatagggaagcctttgatatataccgagcatggttgaaaatcacaagaatatggggcaactcaaggtcgtatcctcaacctctgtggtgttgcggtcatggtggagctttgatggtgcagttggagaccctcaactctttttactcaaatgggagtgcagcgtattcgcagtacacgacttgctcaacttcaaccaaaatctaaacgcaagtttggtcgaccttagagcacaagtgagcaaccaaagaaaacactttgccacggctcaatcaaccaggcggagcatacccagtccatgccatgttccaatggaagaactacctctccatcactgactgcaccacctgctttggcaccgctgccaccagaattcacaactgctccactggaaacggtgcccatgtcgtgtatga

SEQ ID NO: 26357 - DNA, 295 bp, Glycine max
cgatagggaagagggtgtttgcaaacatgcctttgagttgatttttgcatttgatgaagtcatctctcttgggcacaaggaaaatgtgactgttgcacaagtgaagcattactgtgagatggaaagtcatgaaaagaagctgcccaagttggttttgcagagcaggattaatgaaactaaggatgttatgaagcgaaaagctagtgagattgttaaaagcacgattgaaaagaacagaggggttaaaggaggatttggtccattacagtcaatgggctctggaagaattgaaaat

SEQ ID NO: 26358 - DNA, 370 bp, Glycine max
  modified_base (311)..(311): a, c, g, t, unknown, or other
ggacaaatgattgatttacctattcaaagcaatttgcgcgaagggctttctttaacagaatatataatttcttgctacggagctcgtaaaggggttgtagatactgctgtacgaacatcagatgctggatatcttacacgcagacttgttgaagtggttcaacacattgttgtacgtcgaacggattgtggtaccattcaaggaatttcggtgaatacccagaatggaatgatgccggaaagaatatggatacaaacattaattggtcgtgtattagcagacgatatatacagaggttcacgatgcattgncgttagaaatcaagatattggaattggacttatcaatcgatttaaaacccttcaaaccc

SEQ ID NO: 26359 - DNA, 447 bp, Glycine max
ggaggcaagaagttgtattttggcatccccgtggcttcaagaagagaatctcaatggaggcccatgagctgaagcgcgtgttccagatgttcgaccgcaacggcgacgggagaataacgaagaaggagctgaacgactcgctggagaacctgggcatcttcatctctgacaaggacctgatccaaatgatccagaggatcgacgtcaacggcgacggttgcgtggacatggacgagtttggggagctgtatcagaccataatggacgagcgcgacaatgaggaggacatgagggatgccttcaacgtcttcgaccagaacgccgacggcttcatcaccgtcgacgagttgaggaccgtcttgtcctccctcggctagaatcaaggaagaaccgtccaagactgcaaggccatgatctccaatgtcgatgttgatggagatggcatgg

SEQ ID NO: 26360 - DNA, 282 bp, Glycine max
gggggcagagactgatatatggtatggtcgtctctgagtctgaagatctgtgagttaattgcatttgcagagagagagagagagagggaagacggttgtggggattcgatgggggccaccgttcactcgccgctagtcacttatgcttccgtcatatctctgcttacactctgccctccgtttgtcatacttctatggtacaccatgactcttgctgacggatctgtttccgagacattccattatttaaggcagaatgggttgcagggtttgctacatata

SEQ ID NO: 26361 - DNA, 416 bp, Glycine max
ggatctgaatcagtgtgtgactgtctttcttcatttctctcttgcaatatttgcaatggcagaaacacaaacccagagaccctgttcaagcgtcctcgattctctgggggaagaaatcgtgagaatcatcgcacccgtttcaatatgcatgttcctggtcgtaatcctggtctcaactctcaacaccgattcttctctcttcgacgcatcgatgagcatggtcaccatcgcgtacaacgaaacaacctcggactccacctgggacaagttcctaggagcccttctgaactccttagccttcgtcatcctcgtcaccttcgcaaccttcgtcttggtcctcctcttctacttccgatgcaccaggttcttaaaactctacatggctttctccactttcatcgtgctgctattcctcg

SEQ ID NO: 26362 - DNA, 418 bp, Glycine max
  modified_base (403)..(403): a, c, g, t, unknown, or other
ggagggagacggagacgattttacaaggaagatctgaaattctgaattcttaactggaatcagggttttggttttttttcattatcttcctcagtaagcaatgtcttctcccgcggagttttatcactctcttccgccaataacgaaggcatatggcaccgtttgcctgttggctaccgcaacttaccatcttggattatatcatccagcttacattgcactattctacgataaagtgttctacggttttcaggtttggaggttgttcacaaacttatttttccttggaccattctctatcaattttgggatccgtctcctaatgatagtaaggtatggtgtccaacttgagaaaggaccatttgatcgacggactgctgatttcttgtggatgatgatattnggtgcctttgcacta

SEQ ID NO: 26363 - DNA, 427 bp, Glycine max
gaagacaagagtgattagggttttggtttggtgtttttcttaagcttgagatcaggaattaatttcagaggttcagagaatggcaacggattcttctaatggtaatggacatcaccaaacatcatcaaagcaacctcctttgccgtctcccctgcgcttttccaaattttttcagtccaacatgagaatcttggttactggaggagctggattcattgggtctcacttagttgacagattgatggaaaatgaaaaaaatgaggtaattgttgctgacaactacttcactggatccaaggacaacctcaaaaaatggataggtcatccaagatttgagcttatccgtcatgatgtcacggagcctttattgatcgaggttgatcagatctaccatcttgcatgtcctgcctctcctattttctacaaa

SEQ ID NO: 26364 - DNA, 325 bp, Glycine max
ggaggttgcagacttagaaagagagagagagagagaatgggtctcatctcaatgcaatttaggttctgaaaaccaaagcttttcataggaaaagttgtgctaagatgccagggaaacctgacactgatgattggcgtgtagagcgtggggagcagattcagtttcagtcttccatttactctcatcatcagccttggtggcgcggagtgggggaaaatgcctccaaatcatcttcagatgatcagttaaatggttcaatcgtgaatggtatcacgcggtctgagaccaatgataagtcattgcggaggtgttgccaaagaatacc

SEQ ID NO: 26365 - DNA, 421 bp, Glycine max
ggcagcgcttgatttgaggccaggcaagccccactcaaccaccacacctctcctcgttcacgctacccctttctgctcttcttctacctttcaagttttaaaagtataaagatggcagagacattcctatttacctcagagtcggtgaacgagggacaccctgacaagctctgcgaccaaatctccgatgctgtcctcgacgcttgcctcgagcaggacccagacagcaaagttgcctgcgaaacatgcaccaaaaccaacttggtcatggccttcggagaaatcacgaccaaggccaacgttgactacgagaagatagtgcgtgacacctgcaggaacatcggcttcgtctcaaatgatgtgggactggatgccgacaactgcaaggtcctcgtcaacattgagcagcagagccctgata

SEQ ID NO: 26366 - DNA, 343 bp, Glycine max
  modified_base (291)..(291): a, c, g, t, unknown, or other
ggacacgacgagtacatcgtaaaaggaggcagggatttgtttcacttgttgcccgatgctttcaaggggatcaagcagattggtgttatcggttggggatctcatggacctgcgcaggctcagaatctacgggactcacttgctgaagcaaagtctgatattgtggtcaagattggactcaggaagggttctcgttcctttgctgaagctcgcgcagctgggttttctgaggagaatgggactctatgtgatatatgggaaactgtctctggaagtgatcttgtgatgctngtaatttctgattctgcacatggctgatactatgagaagatattgtctcaca

SEQ ID NO: 26367 - DNA, 365 bp, Glycine max
ggagagtgagtgagattgagagagacgcctcgcagatctcaatcgaatctcagaaaaatgagagaaatcatcagcattcacataggtcaggccgggatccaggtcggaaactcctactgggaactctactggctcgaacatggcattcagcccgacggcatgatgccttctgactccaccttcggtgtagcccacgacgccttcaacaccttcttcagcgaaaccggatctggcaagcacgttccccgtgctgtcttcgtcgacctcgaacccaccgtcatcgacgaggtccgctgcggcacctaccgtcaactcttccaccccgaacaactcatctccggcaaggaagacgccgtcaacaactt

SEQ ID NO: 26368 - DNA, 398 bp, Glycine max
gacggctaaaagctaaaaatcatcgaagtactcaaattagcatggctgtcacggttgcattcttgaatttgatcatcatgttttcagtagtctctacaagcaagtcactgagcttaaactactattcaaaaacatgccctgatgtggaatgcattgttgccaaggcagtgaaggatgccactgctagggacaaaactgttccagctgcacttctgcgaatgcacttccatgactgtttcgttcgggggtgtgatgcctctgtgctgctaaattcaaaaggaagcatcaaagcagaaaaagatgggccaccaaatgtttctttgcatgcattctatgtcattgatgcatcgaagaaagcactagaagcttcatgcccatgtgtggtctcttgtgctgac

SEQ ID NO: 26369 - DNA, 388 bp, Glycine max
ggaaggagtgaggtagcaacagcgctgccactgcggctaccaatagcagaatgggaaccttgggcagagctttctacgccgtcggattttggatccgcgagaccggccaagccatcgatcgcctcggctctcgtctccaaggcaactacctctttcaagaacagctatctaggcatcgacctctgatgaatctgttcgacaaagctccctcggttcacagggatgcatttgtggcccccagtgcctccctcctcggcgatgtccacgttggcccagcttcctccatttggtatggatgcgttctcagaggtgatgttaacagcattactattggatctggaactaatatacaagacaattctctggttcatgttgccaagtctaattt

SEQ ID NO: 26370 - DNA, 319 bp, Glycine max
  modified_base (163)..(163): a, c, g, t, unknown, or other
ggcacatgcggaatatgtttggtgcaccttggtctgatccagatgatgtggattgtgctaatgatacacctaaacttgttaattctgacccacttgattttagctcattggagcattgtgatgtttactatggaactcatcgcttatggccaaggaagcgcangatgtctgaaagagatgcagcttttgggttgaatacttctgtgggcttgggaagttatcttggtataatgggttctcgaagagatgttgttacttgaacgtggaaaactggccttgaaggggtctggtacaagtgcgtaagatgtcagcggcagac

SEQ ID NO: 26371 - DNA, 410 bp, Glycine max
gggcgtgttatagatgttaaaggcacaacagttcgtgttgagttggaatcccaaatgaaggttgtgacagttgaccgcatccatatatctgacaatgtggctgtaaccccatatcgtgatacatctcgctatggaatgggaagtgaaacaccaatgcatccttctcgaactcccttacatccatatatgactccaatgagagatcctggagcaacacctattcatgatggaatgagaacacctatgcatagccgagcatggaatccttatactccaatgagtcctccaagggataactgggaagatggaaatccaggctcttggggagccagtccacagtatcatcctggaagccctccttcacggccatatgaatcccctactcctggtgctggttgggctatcactcc

SEQ ID NO: 26372 - DNA, 420 bp, Glycine max
  modified_base (360)..(360): a, c, g, t, unknown, or other
ggagcgagtgatgctcatcacatcatgtgcttccaaaactgatctatttcccttctccttcttacttctgtcgttctctctgctgcaaatccaaaaaccaccaaatcgcggttccaaattgcaatttctcgagcgaactttgcgagttctagggttcccccactgccatggaccaggccgaattaacctccgaacaggttctgaggagggacatcccatgggagacctacatgtccaccaagctcatctcaggcaccatccttcagctcttaaggcgctacgatcaccggccatagagtcacagagcacagttgctcgatgatgatggtccctcttatgttcgcgtgtttgttcgtgttntgcgtgacattttcaaggaagataccgtggagtatgttttggcactgatagatgaaatgc

SEQ ID NO: 26373 - DNA, 397 bp, Glycine max
gctggaaatattgataaaactggtgaaatttggtcaaggagcctgtcaaatgagtaccgaggaaaatcttatgttgaccttcttcaagatttaatggaaaagactattggtcttgccttggcaactgggcagaagcggtttagtgcttctctgtgcaagcttgttgagaaatatgctgaaattttagcaagtcaagggctgttgactacagcgatggagtatttaaaacttttgggttctgaagaactgtcgcctgaacttacaatcttaaaggatcgaattgcactttctacagaacctgagaaagacttcaaaactactgctttttgaagttctcaatcacatagtgggtcctattatggtgccgataattccaattataataggaattattatc

SEQ ID NO: 26374 - DNA, 422 bp, Glycine max
ggatcaaaacaagtgtttcgaatagattatcctaagtctttgggaatagtgctgcggtggcttcaagtcaggaggaggtgacccttttgggagctactggaagcccatttgtgtgcagggttcatattgccctcaagttgaagggagttcaatacaaatatgtcgaagaaaatttgaggaacaagagtgaactgcttctcaaatccaacccagttcacaagaaggttccagtgtttattcacaatgagaagcccatagcagagtctcttgtgattgttgaatacattgatgagacatggaagaacaaccccatcttgccttctgatccttaccaaagagccttggctcgtttctggtccaaattcattgatgataaggcttttggtgctgcatggaaatccgttttcacagctgatgagaaa

SEQ ID NO: 26375 - DNA, 417 bp, Glycine max
ggagagaaagagtgaggagagaattacagagcattttccaacacgattacacgaccgaatcaaaccctctctttctctccgaagctgcgtttaatatcttactcgccttagattgttcttctctttcattatactgttctcttttcgatttgagggaacagtacaagagtgtgaggatcggttaacccaactgcacaggtagtcactaaaataatggagtctcacgatgagactggatgccaggctcctgaacgccccattctttgcattaataattgtggcttctttggaagagcagctaccatgaacatgtgttccaagtgttacaaggacatgctgttgaagcaggagcaggacaattttgcagcatcgtcggttgaaaacattgtgaatggcagttccaatggcaatggggct

SEQ ID NO: 26376 - DNA, 270 bp, Glycine max
ggaaaccgagaagaagaagatggagatgtatcagatctggagcaggggaatagcgttgggagcgttcgcgtttggtctgcttttcctatcggcctcagcagacgacgtccttgggctctctgaagattacttcgagaaggaagttggtcaggacagaagaactctcggtgaggtctatgctccttggtgtggacactggaaaaagcttgctccagaatatgaaaagcttggtagcagcttcaagaaagccaaatctggtttaatcggcaa

SEQ ID NO: 26377 - DNA, 363 bp, Glycine max
ggcctccggcatgcagtagaccgatctgtctctggtctctagctggggaatagctggtctagcgtgcgtatttcacctgcttttcctatcgatcttagcagacgacgccggcgtgctctctgaagataactacgagaaggaagttgttcatgccataggagctttcggtgaactctatgctccttctcgttgacactgcataaagcttgctccagaatttcaaaagcttggtaccaacttcaagaaagcccaacctgacccaatcggcaacgtcgactgtgatgagctcatcagtcttgtcaagacatatggagtcttatgttacgcatctattcattggtttccaaaccgatctcttgtacc

SEQ ID NO: 26378 - DNA, 73 bp, Glycine max
gggtttggatatgaagatatatatgttctacttgcattcataaaatcagataattgtataatgttttcttttc

SEQ ID NO: 26379 - DNA, 412 bp, Glycine max
gaagtctatgttcttaaaccaagccacatatcaaccttgcaatgcaaaataattgaaaattccataccagacagtgtttcagctatcccaaatgtcacaaatgtggagtctgaatttgaagcaggccatgatgctgatccaccaaaatccaaaggtgatcttgtatcagtcttgaaggctgagaaagaagagttggagtcatcactgagcaaggagaaacagcatgctcttcaactaaagcgagatctggtggaagctgagtctcgtaactctgacctttacaaggagctccaatcatttcgtggtcagcttgcatctgatcaatcgaggtgtttcaaactcgaggtggaggttgctgaattaggtcagaagctccaaacgattgggacattacagaaggagctggagcttc

SEQ ID NO: 26380 - DNA, 450 bp, Glycine max
atgaatcaaaatcaaatgaaactcctgcatccggtagctcaaactctcagataactcaagcagtgtttgagaaggagaaaggagagttccaggtgaaggttgttaagcagatcttatgggtaaatggaatgaggtatgaacttcaggagatatatggtattggaaattcagtggagagtgatgtggatgggaatgacccgggaaaagagtgcgttatatgcttgtcagagcctcgggacacaactgtccttccatgtcgccacatgtgtatgtgtagcggttgtgcgaaggttttgaggttccagacaaatagatgtccaatctgcagacaaccagtcgagaggcttttggagatcaaagttggacccgatcttgaggagtgaagattcattgttagtgacacaagctttctgttcaatccatactgtatagctaatactattcacttac

SEQ ID NO: 26381 - DNA, 324 bp, Glycine max
atgaatcaaaatcaaatttaactcctgcatttgttatctcaaactctcagataactcaagcggtgtttgagaaggagaaaggagagttccaggtgaaggttgttaatcagatcttatgggtaaatggaatgaggtatgaacttcaggagatatatggtattggaaattcagtggtgagtgatgtggatgggtatgaccctggaatagagtgtgttatatgcttgtcagatcctttgtactcatctgtccttccatgtcgccacatgtgtatgtgtatcgtttgtgcgaaggttttgaggttccatgacttatatatgttcaatc

SEQ ID NO: 26382 - DNA, 420 bp, Glycine max
attgaaacatatgacgtgactacaattagagcaagcacacctatgtttctcatgtgtcggaagattaaatcacttggtgtcaaatgggttatctcaggagaaggatctgatgagatctttggagggtatttgtacttccacaaggcacccaacaaggaggagttccacagagaaacatgccgcaagatcaaagcacttcaccaatatgattgcttgcgagccaataaatcaacatttgcttggggtctagaagcccgtgtaccatttttggacaaggcgtttatcaatgctgcaatgagtattgaccctgagtggaagatgataaaaagagatgaaggacgaattgagaagtggattctgaggagagcctttgatgatgaagagcatccttatctgccaaagcacattttatacaggcag

SEQ ID NO: 26383 - DNA, 286 bp, Glycine max
  modified_base (263)..(263): a, c, g, t, unknown, or other
ggaaggtgtggattctaaaaggaaagaacagctgagctggtcagaaaatcaatggcatcatccttgggttttgagttcctgacgaagaagccttacagtccttcatcctgggcattccatctgcaccctttaccttcccacttcttctctcttgcccatcttcccactccaattcacagatggaaccttcccaatctgcccaccaataccgagctgtggatcaagcgagacgacctttccggaatgcagctgagtggtaacanagtgaggaaattggagttcctga

SEQ ID NO: 26384 - DNA, 401 bp, Glycine max
gagtgtgtgagttcattaacatatacaaattctgtgtgttgtgttgtgtacttgtgttaattgtgttgttgttgtaggaaatttaagtgaagagagaatgatgatgaagtctgctatgtgtgcattggtgcttgtggcactggttgtggttgaagtggggcccatggctgaagctgcggtgacttgcaacccaacacagttgactccttgtcttccggcaattaattcatgttctgcaccttcgagtgcttgttgccagaagctgaatgatcatatgccatgcttctgtggtacctcaaaaccctagcttgaacagatgtaaacttctatgccaaaaaccgtagtcttgggattgctatcaactgtaagactctattattattaaatgggatcatttttat

SEQ ID NO: 26385 - DNA, 284 bp, Glycine max
  modified_base (193)..(193): a, c, g, t, unknown, or other
catattgaattgacctgttagtggattgccatgttgctggtctaagccatgtagaaagtctatacatttttggcatttttgtagaaaaaatgaagatgaattatttcaagttgtttttgttgaactgaaatctttttgattcattgagtgcattacaaggttgcaggcactgttttttttttcccttacattnttcacttcagtgtattaggatatttcaggaaatcaggaaactgtatgtaagtaaccggagaattgagaagatattggaatattgaattagc

SEQ ID NO: 26386 - DNA, 407 bp, Glycine max
  modified_base (349)..(349): a, c, g, t, unknown, or other
gatgataattctgttcatgggtcacctgtgaatgcaaatgggaagcaagaaaattctgctaatggggattattcagttgaggatgaatcctatgcacacagtgaagatgacctggcaagaatcccccatagtctaactgggaggagtacggtggagaagccttctcaagacttttcaaattctcattttggaaaaagttttgaagcagatgcagaaacacacagaagttttgatgaatcaacctggggtgcatttgacaacaacgatgatgtggactcagtgtggggttttaacaccaagaccaaggactctgacttcgagcagaaagatttctttaaatctgatgaanttggtataaacccagttagaacatgatctacacatacagatgggacgttccagacgaa

SEQ ID NO: 26387 - DNA, 428 bp, Glycine max
ggcgcaaatctagattagaaatgggttctgataagctaagttcctctgcttgcccagttcgtttgtgcgtagatgagcacgtgacaaggatttataatgcattccgtcctatcctttatcaattcgttggggaagaattaacaaagtcggaagctgttgaagtactcaggattactaaaggaattcttttggatcttagcatgtccccctataaaacaagaaggacctccattgactcagttctagataacccaaaatttcagaaactattgccatcttttgatgacttacttggtgctctttcactggagaaaaaggtgaatacagatgggagagttgaattttgttagattgttgaccctgtagtaacttctttagcattgcctgctgcgttagatgctctggatgacatgatttacattcttaac

SEQ ID NO: 26388 - DNA, 432 bp, Glycine max
gacacacagatcgtgaaagcgcctctctactctggtgtcttctttggtagagctctgtcacaggcacacagatcttggctgtgcctgcgcctacggtgatagaggaaactgaagcctttggtacatgccacggtggcaatagcagcattattactcctaaatttttcatgcttatcttgtgctacacactctctctctctctgctagagcgcgcgctaaaactggaataagtttaagaagagcaggcaaaagtgaatgtatctatctatctgaaacagcattattatttgttcgctctgtgcaactgcaactgcaactgcaaccaaccgcgctttaccgaatgccaacaaattaagcctggggtagtgaagatctgggaataatcttagagtaagagacctaattagatctctcgacgtctcaaatcgagag

SEQ ID NO: 26389 - DNA, 280 bp, Glycine max
gtatcaaggggataataatcggaccggtccctaaaattttgtaaggccttaaggggaccggattaagtgaaaatctcatgtacggttctggaatagagatggggacaggaatgtcatcaccgactaggattatctaacaggttaagtacaggtgatatagttgatgcacaatcaaaatagggttttggggatggaatttgtgggcgtaacctatgggtttcattgactttctaatctcgtacctatcagaatgtgaaagaataccttttggattaccgga

SEQ ID NO: 26390 - DNA, 361 bp, Glycine max
ttttgggttttttggttattccgatattcggacgcatcaacttgttatgaaatcacattgatagcctctactcgtgtcctagctcgtctaagagctagatttgcctcaattgttcgcctcttgccttccgccttattcaaattagcttctgctatttcaagagtttgctgtgcttcttgtggatcaatgtcactacccttttccgcatcattgactaaaacagtgatctcattattggttattctagcaaaaccggccatcagagccatcgttaaccattggtctttaagaagacgtattctcaaaatacctatatctacggctgtggcaataggcgcatgatttggtaatactccaattt

SEQ ID NO: 26391 - DNA, 349 bp, Glycine max
gagagtgagtgagatagagagagacgcttcgcaaatctcaatcgaatctcagaaaaatgagagaaatcatcagcattcacataggtcaggccgggatccaggtcggaaactcctgctgggaactctactgcctcgaacatggcatccagcccgacggcatgatgccttctgactccaccttcggtgtagcccacgacgccttcaacaccttcttcagcgaaaccggatctggcaagcacgtcccccgtgctgtcttcgtcgacctcgaacccaccgtcatcgacgaggtccgctgcggcacctaccgtcaactcttccaccccgaacaactcatctccggcaaggaaga

SEQ ID NO: 26392 - DNA, 399 bp, Glycine max
gaatacaaggagtggaatgacaagaatccacaggtaacatcatgcaataaagataccaagaatttgatgcaaggtagtactgtcccacaagaagttgatacaagcaaggatattgtattcacatatgatgcttacttcacggaaagtgatatcaaatgggcatcacggtgggacacatatcttttaatgaatgatgatcagatccactggttctacatcattaactctctgatgattgttcttttcctgtctggaatggtggcaatgatcatgatgagaactcttttcagagacattgccaattataatcagctagaaacccaagatgaggcccaagaagaaacagggtggaaaacttgtcatgggaaatgttttatgccaacaatcaaattaaatttg

SEQ ID NO: 26393 - DNA, 379 bp, Glycine max
ggagcaagagtgaagagcttagagaatggctcccaagggtttaatcttgttggctgagttatgcttctcagcactgtcactgagtcgttgtcttgcggaggataatggacttggtatgaacttctacaaggaatcatgccctcaggctgaagacatcatcaaagaacaagtcaagcttctctacaagcgccacaagaacactgctttctcctggctcagaaacatcttccatgactgtgctgttcagagttgtgatgcttcactgttgctggactccacaagaaggagcttgtctgagaaggaaacagatagaagctttgggttgagaaatttcaggtacattgagaccatcaaagaagctttggaaagggaatgccca

SEQ ID NO: 26394 - DNA, 300 bp, Glycine max
gaatgaaaggagtgatatattgtctttggaatttgactgtgttgtcttcttctttgtgactcactctctcttcagctcttgaatttgatccacctgtgttgcttttcccaccaaaccaaacaaaataacctgatattaacgtaatagtagttcttttatcgaacattgtgccatgacattcgacgaggtttccatggaacacggcaagagcttcatcttcgccttgcaggaacttaagaacctgaggcctcaactctattctgctgcagactactgtgagaaatcttatctcaatagtga

SEQ ID NO: 26395 - DNA, 405 bp, Glycine max
gacacacaacattttcagtgaaactgaaaaggggaagaagagagtgaaatgggggagctttacgcgttggacttcgatggagtcatatgtgatagctgcggagaaagctctctctctgctctcaaggctgccaaagtgagatggcctggtttgtttgatggggtggattcaaccacagaaaattggattattgaccagatgcacacagtgcgaccagtagtggaaactggatatgaaaacgttttacttgtgagattgttgcttgagagcagaacaccaaccatccggaagtcttcggttgcagaggggctaacagttgagggtatattggagaactggtcaaagttgaagcctattatcatggaagaatgggatgagaagagggatgatctgatagatcttttt

SEQ ID NO: 26396 - DNA, 313 bp, Glycine max
ggttctagtgtgcgattgcatgtcggtgtatctcgctcttcttcttttgttgatctgtgtctgggtttgatctttctctcacctgaaaatgtcttgctgcggtggtaactgtggttgcggaagctcctgcaagtgcggcaacggctgcggaggctgcaagatgtacccagacttgagctacactgagtcaaccaccaccgagaccttggtcatgggagtggcacctgttaaggctcaatttgagggtgctgaaatgggtgtgcccgctgagaacgatggcttgaaatgtggaccaaactgctcctgcaacccc

SEQ ID NO: 26397 - DNA, 412 bp, Glycine max
ggagagaagagaagcaaacgatggctacttttctttccaaccaatctctgttgggttcttgtccttgttctactcccttctcttcaaagccctttcaaaccctaaaaccccaaatcttatcttttccatctcgcgggtttccgcgccccctaatttcctcagtcaatcgaagaacccaattgaagtcttcccaagatttccctccaactacaaatgatgaaacagaggagacccagaatgatgtaagagggacaaatgatgatgaagataaaaaacaagtacctagtttaatgatcctccttgaagcatacaaggaagccttttttaatggcgaccaaaataccgtagctcagattgaagaggggatatattcaatagcaaataggaaaaataaattgattcagaaattatc

SEQ ID NO: 26398 - DNA, 210 bp, Glycine max
  modified_base (108)..(108): a, c, g, t, unknown, or other
  modified_base (120)..(120): a, c, g, t, unknown, or other
  modified_base (152)..(152): a, c, g, t, unknown, or other
ggaagtgtgaagcactgagcagttgaggaaatgggagcgcctgggagagcgatctacagcgttggtaactggattcgaaaaactggacaagccattgatcgtctcggntcccgtcttcanggcgggtactacttccaagagcagctctctangcatcgaactctgatgaacatatttgataaggctccttgtgttgataaggatgtattt

SEQ ID NO: 26399 - DNA, 352 bp, Glycine max
ggaacacaatgttcttgttgatttctataaggtggaaggaagggtgggagcagccgcaagcaagaggtagcgaatcagattgagatggggtcgtttggtcggagaagcatgtccactgtggcgaaagcggtggaggaaatcaccggcactggcaacaccaagatccgcaaatcttccagcgagctctgcaccttcctcggcatccctcgccaatctcgttccgaaatcgctctcattctctccaagttcatcaaactctataatttcaagagtcccggcattaagaaggacaagatttgggagcagaatttgcagacactgttgcgtggcagaaacaatgttggttttcctg

SEQ ID NO: 26400 - DNA, 383 bp, Glycine max
ggcaccacaatgttcttctagatatatatctgggggcaggaagaataaaagcagcctccttcattacttagctaatcaaattgagatagcatcgcaatgccatacaaacattttcattgctctgaaaacgaacactgaaattaccgcccctgctaacaccaagatccgcacatcttgcacgctctctgcaccttcactcagcattctttgccaatctcactctgaaatcactctgattctctccaacttcatcatactctattatttaacaagttccagcattactaaagacaatatttcagcgcactttcttcaaacactgatacctgccagaaccaaccttggacctactgagattgcgaatatactgtctccacaattct

SEQ ID NO: 26401 - DNA, 412 bp, Glycine max
agggggaagtgaaagaggagagggagaagaagaagaagtggaggaagaaaaggggaaaacgcaaagaaaaaaagaggaagatagatcaagatctcccttgcgtttgtctcacgtgaagaaattcaagagcagaacgagactaactcaacggtatcagacgtttcaaggtttcagcacttccattttttttttttccggatttgagttggaaaaaaatcaaaaaagttcctacgtgcttggattgttcctctgggtggtggagactttgtgtatttttaaaatattgacaattcaaaatgccaaaagagagaagggataggtctttgtcacatgaaagtagcagagcctcaccttaccctagcagctctagtcgtgttggaagatcttctcttaaagagtcagaggaaaatgt

SEQ ID NO: 26402 - DNA, 363 bp, Glycine max
gtcaacactctaagcaaagcaggcgtgaagaagggcatgaatgactttgtattcatcatgtactccaatgccttcgctgcatgcctcctccttctcttagccttattcttttataggaaaagaacacttccgccactctcctgtaacacccttggcctattccttgttgttggcatgctcagttgcattaatcagtcgatcaagtttttcggcataggttacagctctccaactttggcctcagcactgtccgatttggtgcccgcctttaccttcatacttgccgtcatcttcaggatggaaaaattagattggaaagctaatagcactctggccaagtccattggcacagtggtatcgatc

SEQ ID NO: 26403 - DNA, 367 bp, Glycine max
gacgacagaagggggcacaaaaatacaatacaaaacaaaacagagcaaagagagagtgtgtgaaaagtgaaacaaaaaacagaacaacaatggcgacacttaaggttcctcagcctcttccccccgttgcagatgattgtgagcagctccgaaaagccttctcaggttggggaactaacgaggagctgattgtatcgatcttggctcataggaatgctgctcagaggaagcttatcagagaaacttatgcccagacctatggagaagatctcctcaaggccttggacaaagaactcacgagtgattttgagaggctggttcatctttggacacttgattctgctgaacgtgatgcatttttggcaaa

SEQ ID NO: 26404 - DNA, 354 bp, Glycine max
gagagtgagtttgataattatggttttcccatgttgtcttgtgacatctcttgggtaggtgtccatcgttgcccaataatatatttttgttattatttgagctacatctggactccacaacgcaaaacctcagccctttgcctttgttccttcaacaaaatttttctttattacttgtgctattaaaatttagaattcctattatcgtggtagaatacctgttatttttcttaccagacatagtcaggtgtctgctttgtttggagtttggtagagaccgttacatgtctgggacataaaataccaagagtgagtctgataaatatgggtttcccatgttttatgataaaatct

SEQ ID NO: 26405 - DNA, 401 bp, Glycine max
gcccgaacaagagagcatggccgtagctgatcccaagcctgactccgaacctaaggtctggaacttcttcaagctttcgtttcgccatttcgtcgtcaccaatacgacgccggcttccgctaaccttcaccatcttcattatcaccattaccaccaccaacaccatcatcatcaccacaaccctaataatctacccctcggagggtccaacttccacaccctgccattgcgtttactccgccgcgagatctcttctgccaacacgacatcgtgttaagctcgatcccttcaacaagctctactttccttatgagccgggcaaacaggttaggagtgccatcaggattaaaaacacccgttaatctagcgtagctgtcaagtttcaaacaactgcacccaaa

SEQ ID NO: 26406 - DNA, 334 bp, Glycine max
ggagaaagacggaagggcgaaggttggggaagcgcggtgagggaactgactcaggcgattctgaaattcggtgaggcttatgaacaagcagagagttcgaagctgcagcaggtggtggagatggagaagcagaggatgaagttcgcgaaggatttggagttgcagagaatgcagtttttcttgaagacgcagctggagatttcgcagctcaagcttggaaggaaaggtggtaaccctagcaacaatctcaatggcaccaccaacaataacaacaacaatcataacaataatagtgacagtgaatgaatgtgtgagagtcaggaagggataacta

SEQ ID NO: 26407 - DNA, 403 bp, Glycine max
gtcaacactctaagcaaagcagccatgaagaagggcatgaatgactttgtattcatcatgtactccaatgccttcgctgcatgcctcctccttctcttagccttattcttttataggaaaagaacacttccgccactctcctgtaacacccttggcctattccttgttgttggcatgctcagttgcattaatcagtcgatcaagtttttcggcataggttacagctctccaactttggcctcagcactgtccgatttggtgcccgcctttaccttcatacttgccgtcatcttcaggatggaaaaattagattggaaagctaatagcactctggccaagtccattggcacaagggtatcgatcgctggggcattgttattgtctttgtacaaaggccaagtca

SEQ ID NO: 26408 - DNA, 299 bp, Glycine max
ggggggaggaatggaagcaaacaagaacaagttcatagaggattggggcactgccagagagaatctggagttcaatttccgttggactcgccgcaaccttgctcttgttggcatcttcggcatcgctattcccgtcctcgtctacaagggcatcgtccgtgaattccatatgcaagatgaggataatggtcggccgtacaggaagttcatgtgagagagtatggagagtcttttgtaataattcgtcaagttagaccttgatattatgaggctacaaaccatgtttttttttccttaat

SEQ ID NO: 26409 - DNA, 395 bp, Glycine max
gaaggaagagatgaatattgatattggaagcgaagacacaggtttcacaaatggagcagtggtaaaatggcccttcatgaacaaagtatatgtccatcctcttttgatgtcattcaatcctcctcaggtgaattctgtgaaccatcctcatggtatgaagatgttttcagttcccaatcaagcaatttcagtttccatgggacatccatccctaaagaatcattttgcaactgttggtcagaatatgaatgttgctactgtgaagcaaccactactcggaggaatacctgttacggtgcctcattcagttcatcccattgttggtgctgttgctggaatgaccgaaacacgcgtgaaaccatccgtacctgctcctaaacttacaatcttctatg

SEQ ID NO: 26410 - DNA, 255 bp, Glycine max
  modified_base (246)..(247): a, c, g, t, unknown, or other
  modified_base (249)..(249): a, c, g, t, unknown, or other
  modified_base (252)..(253): a, c, g, t, unknown, or other
gatccttgagttggataaagcaagtcggaacttctatcatcttgattttgcaggatttgaatcatctaaatgtgcagagtacatttcaaaggataaaatgtaataacaattgttatcaatgattgagattttaataaaaatatgtgtaaaataaattgaaatttattacaatctcaatcgttgattaatcagcaattactattctctactttattctatgtagggtacaatttagagtcaaccccnnanaannaa

SEQ ID NO: 26411 - DNA, 219 bp, Glycine max
ggtgtgtgggatgagaagatgatgaggaaacattggtagaagaaattgaagagagagagagagagagagagagagagagagagggttggattgcatttcttcttgctttgctctaaagagaatctaatctcaatcctcattacaaattgattgattcctatctcagtcttttgtgctttctccctttgacatactcgttttcgccgaaacataaacaac

SEQ ID NO: 26412 - DNA, 416 bp, Glycine max
  modified_base (116)..(116): a, c, g, t, unknown, or other
gaaggtgcaagagtttgttgtgagctataagctagtttatcgtgaggagaatatgaagttgtttgttttctttgttgctgcagtagttttggtagcatggccatgccatggcgcangctaccaaaggttccctctccgaatgaaaactggctatggtgagcgttcttcggaggtaaaatgcgcaagttttaggcttgctgtggaagcacacaacatccgagcctttaaaaccattcctgaagagtgcgttgaaccaacaaaggactacattaatggcgaacaatttagatcagactctaaaacagttaaccaacaagctttcttttatgctagtgaacgcgaagtccatcacaacgacatatttatattcggcatagataacaccgtactctctaatatcccatactatgaaaaac

SEQ ID NO: 26413 - DNA, 106 bp, Glycine max
  modified_base (39)..(39): a, c, g, t, unknown, or other
aggggttctagtgggtgattgtttggtgttggaactcgntcttcttcttttgttgatctgagtttgcgattggtttttctctcacctgaaaatgtcttgctgcggt

SEQ ID NO: 26414 - DNA, 407 bp, Glycine max
  modified_base (348)..(348): a, c, g, t, unknown, or other
  modified_base (389)..(389): a, c, g, t, unknown, or other
ggatgtggaatgtgggaaaccacgaagtagagtttttgcctgaagtgggagaagttgaacctttcaaaaactatctttaccgatatactactccctattcggcttccaaaagcaccagccccctctggtatgcagtcaggcgtgcctctgctcatatcattgtgctatcaagctattctccatttgtgaagtacacgcctcaatacatatggcttaaagaagagctggcgcgggttgatagaaagaaaacaccttggctcattgtgctcgtgcacaagccactctacagcagcaacgtagctcactacatggagggtgaaaccatgcgatcacgttttgagacatggntcgtccaatacaaaagtgatgtcatctttgcccggcatgtncatgcttatgaaagatca

SEQ ID NO: 26415 - DNA, 414 bp, Glycine max
  modified_base (116)..(116): a, c, g, t, unknown, or other
gaaggtgcaagagtttgttgtgagctataagctagtttatcgtgaggagaatatgaagttgtttgttttctttgttgctgcagtagttttggtagcatggccatgccatggcgcangctaccaaaggttccctctccgaatgaaaactggctatggtgagcgttcttcggaggtaaaatgcgcaagttttaggcttgctgtggaagcacacaacatccgagcctttaaaaccattcctgaagagtgcgttgaaccaacaaaggactacattaatggcgaacaatttagatcagactctaaaacagttaaccaacaagctttcttttatgctagtgaacgcgaagtccatcacaacgacatatttatattcggcatagataacaccgtactctctaatatcccatactatgaaaa

SEQ ID NO: 26416 - DNA, 419 bp, Glycine max
ggcaaaagaaagagagagaaatggcactgagggcagccgtgctccggcacgttcgtgtgccactccaagccgctccaaaactgcagccatggcgtgccatgtcatcacacggcgacgatcatctctccaaaaaagaagtcgtcgaaagagtcctcgccgtcgtcaaagatttccccaaagtcgatccttccaaggtgagtccagatgtacatttccagaaagatttgggtttggatagcttggacaatgtggaaattgtaatggcactagaagaggagttcaagctagagatcccagacaaggaagctgataaaattgactcttgtcatcttgctattgagtacatttctaaccatcccatggctggttaactaatgtgtcctttttcctatttggcttcatgttgaacttaaacacag

SEQ ID NO: 26417 - DNA, 371 bp, Glycine max
  modified_base (115)..(115): a, c, g, t, unknown, or other
ggttttgagcatgagtagattgggtggagttggtgcagtggcgccactggtaactgatatcccattatcgtcagtcgaagaagaaggcggtgagggaagaaaccagccagcctgngagaagtggtcaaatgatggcacagaaagacaggtagccaagcttatggaagaaaatgtgggtgctgccatgcagtttcttcaatcaaaagcactctgcatcatgcccgtctcactagcttcagcaatataccagtcacaaccctcaagcacttctagtatagttaagcctgaaactaatcctccttcataatcatagtcagaactctggcacagatgcaccatccagtggtcccatcaagggctcacctaacact

SEQ ID NO: 26418 - DNA, 173 bp, Glycine max
ggaagcagctcacgatatggaagaggatggagctgataagggaacttttccaagtacaaggagtgttgaaaaggtgggggacatgaagcaagtaaatgatgctgtgaatttgagttttgctactaaggattccgaggaattgaagtcaaggttgagtataatggatgcaaagc

SEQ ID NO: 26419 - DNA, 84 bp, Glycine max
gggctcaaggaatttcgcttaattctttgcagaaaaatcagtgcagatgagagcaaattgaatttttaagccgagaacaagatc

SEQ ID NO: 26420 - DNA, 404 bp, Glycine max
ggggcgaggtagccagagagtgatacaatacagagtgcgttgttgctccttcgccacaactccctgccaacatgggtatctccagagattctatgcacaagaggcgtgccactggtggcaagaagaaggcatggaggaagaagagaaagtatgagcttggtcgccagcctgctaacactaagctgtcaagcaacaagacagtcaggaggatccgggttagaggtggaaatgtgaagtggagggcactgagattggatactggaaattactcctggggaagtgaagctgtaactcgcaagactcgtatactagatgtggtttacaatgcctcaaacaacgagcttgtgcgtactcagactcttgtaaaaagtgctatcgttcaggttgatgctgctccattcaaa

SEQ ID NO: 26421 - DNA, 343 bp, Glycine max
gatacaacagttatagtgtgaactcaactaagaataataataaaaaaagaagaaaaagaagcggaacaatggagctaactcctgcgagtgttgtttggtgacagttgaagtcgaacaaaagacggctagaaacgcggcatggcgtcgtcgaagcttgtctcgacgaatccggatctgccacgggacccttcttcttctatatctcccctttcttctcttctctccgatctgcaccccatggacgacctcctcaagtgcatcacccccaattccgtcgacgacttctggaaggggatcgctgccgcctccaccgacaatgccggcggcgtgaccctcgaggatt

SEQ ID NO: 26422 - DNA, 351 bp, Glycine max
gatacaacagttatagtgtgaactcaactagggggaataataaaaaaagaagaaaaagaagcggaacaatggagctaactcctgcgagtgttgtttggagacagttgaagtcgaacaaaaaacggctagaaacgcagcatggcgtcgtcgaaccttgtctcgacgaatccggatctgccacgggacccttcttcttctatatctcccctttcttctcttctctccgatctgcaccccatggacgacctcctcaagtccatcacccccaattccgtcgacgacttctggaaggggatcgctgccgcctccaccgacaatgccggcggcgtgaccctcgaagatttcctcacc

SEQ ID NO: 26423 - DNA, 172 bp, Glycine max
gagaataccactgaggggtgggttaaactacttatttcaaacacaaactttattgttaattcttttattaatatgaaactattccgggcctggttccttaataagaaaaccacgattatctgaaaaaaaaacaaattttctttgtactagggttttttgtgcttaaataaaa

SEQ ID NO: 26424 - DNA, 391 bp, Glycine max
gggagtgaagaagattaacgaacgatggaatgtgggtctagcgaaggagaagaggtgcagcaacgcgtgccgatgagggagagagtggagtggtcagatgttactccggttcctcaaaacgacggccctaaccctgtcgttccgatccagtacactgaagagttttccgaagatatggattactttcgcgccgtttacctcaccgatgaacgctcccctcgcgccctcgctctcacagccgaagccgttcaattgaactccggcaactacactgtgtggcatttccgacggctgttacttgagtcgctaaaagtcgacttgaacgatgaactggagtttgtggagcgtatggccgctggaaattctaaaaattatcagatgtggcatcata

SEQ ID NO: 26425 - DNA, 404 bp, Glycine max
ggagagaaaaaatgaccaaatcaatcaaattctttgagttgaacacaggggccaagattccttctcttgggttagggacttggcaagctgaacctggtgttgtagctgaagctctcaccacagccattcaggttggatacaggcatattgactgtgctagtgcgtataagaatcaagcagagattggttctgctcttaagaagctttttgatgatggtgtggtgaagcgtgaggacttatggatcacttgcaaactctggtgttcagatcatgcaccagaagatgtgccaaaagcattggataaaacattacaggaattgcaacttgactatcttgacctctatctgatccactggccagtccgcatgaaaagtggaacatttggactcaataaagaatatctt

SEQ ID NO: 26426 - DNA, 387 bp, Glycine max
ggcagttcaaagcgaagaaagattcgaaacgaagaaagaaagcgttgtgaagaatggcggaagagggacaagtgatcggtgtccacagcgtagaggagtggaaggaacatctcaagaagggagaagagtccaagaaattgattgtggtggattttactgcttcttggtgcggtccatgccgtttcattgccccaattcttgcagagtttgctaaaaagttgccgaatgtcaccttcctcaaggtggatgtggatgaattggagactgtttccaaggagtggggaattgaggctatgccaaccttcctgttcttgaaagaaggcaagctggtggacaaggttgtgggtgccaagaaagaggagctgcaattgacaatagccaaacatg

SEQ ID NO: 26427 - DNA, 408 bp, Glycine max
ggaagaagaagaatcagttccgtcgtgagacactgtcataacataagagtcgtggacgcggttggctgttgctgtctacggttccaacttccaagttacaagcttcacccattttataaaagttacggttcggttccgctgcattcgtgcaacacaaaatgagcgccatctctttcagttccacccatttgcacagttggaaaaatcccaaggggtttggaaaggtgagaaagcaacgagatgggaagctacttgtcaagtgttccagcaagagtgggaacccaacttcattgcaaaatggggttcgtgttggtgttcttggagctagtggctacactggttctgaggttatgcgactcttggctaatcatccacagtttgggattgcactgatgactgctgatagga

SEQ ID NO: 26428 - DNA, 399 bp, Glycine max
  modified_base (378)..(378): a, c, g, t, unknown, or other
ggagagagagagaagaaaaaaaaaatggtgaacttcatgttgatgattactgcagagcttgagaacctcacgaatctgcaaccccaagatggctgcgacgaccccaacttctgctacctcttcaagttgaaatgcgggagatgcggagaactgagccagaaaaaaacctgcgtcgtcttaaacgacaccgttcctcttccccgtggcaagagcaccactcatctcattcaaaagtgcaaattttgtggcagggatggcactgtgaccatgattgaaggcaaaggtaaaccactcacccaggaaatcagtgaatcagggaagtacgccccattgatgttatttgactgtaggggctatgagccagtagattttgtattncgtgatggatggaaaagtgaa

SEQ ID NO: 26429 - DNA, 301 bp, Glycine max
aggggtactggctggggtgacaattataaaaacaaaggtgaaaggcatacttttagtttaaacctttttcacaagaacaaagaaaatttatgggactgtaaatccaggtgctttgatggtgaccatgaactaaatgccgagaaaattgccagcatgagaactgatcaattgcataatatgaacttagatgactctgtatgcttgactactgaccaaaagaagaaactgatgtggcgtggcaaaaagagtacacctactgaagactctggccatcgatgggatacctggatgtgttctgatc

SEQ ID NO: 26430 - DNA, 121 bp, Glycine max
ggaagcttgaaacaacaaagtattattgcacaattattgatgcgcctggacataaggatttcattaagaatatgattactgggacattccaagctgactgtgctggtcttatcattgattc

SEQ ID NO: 26431 - DNA, 418 bp, Glycine max
ggtgtgagttcattaacatatacaaattctgtgtgttgtgttgtgtacttgtgttaattgtgttgttgttgtaggaaatttaagtgaagagagaatgatgatgaagtctgctatgtgtgcattggtgcttgtggcactggttgtggttgaagtggggcccatggctgaggctgcggtgacttgcaacccaacacagttgactccttgtcttccggcaattaattcatgttctgcaccttcgagtgcttgttgccagaagctgaaggagcaaaagccatgcttctgtggctacctcaaaaaccctagcttgaagcagtatgttaactctcctaatgccaaaaaaaccgttagttcttgtggtattgcctatccaacttgttaagcacctgttatatatatatataaaatgtgtgaacaa

SEQ ID NO: 26432 - DNA, 184 bp, Glycine max
ctacatgcgaacacactacataaggaaaaatacgacactaaaaaaaaaacatacaatgggcggaaattcatactgtgttgactttcccataataacttcactttcaaaaaacctggtggtttttaacttccacaacatgaacatgatctaaacttcttctacagaagatgatcacaatcatatt

SEQ ID NO: 26433 - DNA, 280 bp, Glycine max
agggatagcatcctaagatacagagactatcaccatcgtcctgctcatttggcacatgcttctccccctgaatactttgtccgcctggagaacacaacttacaaagacgatctatatttaaggaagaagacaacgatgcgtcggtggctttgttgtacttgtcacgtggaagagtcttacccatcaaatgaaaatgaacacctcgaaagcccaaggaattatggagatggcgaccaaaaaggctcaaaggtgtcagcttctgtcaaacctgaaacacaaa

SEQ ID NO: 26434 - DNA, 286 bp, Glycine max
  modified_base (236)..(236): a, c, g, t, unknown, or other
ggagcgaaaaatgaagaaaatggcttccaagggtttaacctttcttgctggggtaatatgccgttcaacacttgcccttgagtcctcttgtggcgggggaaggccaaaataatggcctggttatgaccttttccaaggaatcatgccttcagcttgaagacatcatcacaaaacaggtcaagcttttctacaagcgccacaagaacactgctttctcctggctcaagaacatcttncatgactgtgctgttcaaagttgtgatgcttcactgttgctggactccac

SEQ ID NO: 26435 - DNA, 406 bp, Glycine max
  modified_base (375)..(375): a, c, g, t, unknown, or other
ggcacaagtgagtttgttgatcgagataactagaaacagtgtgatgaaaatgaaagtccttgttttcttcgttgctacaattttggtagcatggcaatgccatgcgtacgatatgttccctctccgaatgaacactggctatggtgcccgtactccggaagtgaaatgcgcaagttggaggcttgctgtggaagcacacaacatctttggctttgagaccattcctgaagagtgcgttgaagcaacaaaggaatacatgcatggcgaacaatatagatcagactccaaaacagttaaccaacaagcttacttttatgccagagacctcgaagtccatcccaaagacacatttgtgttcagtatagatggcaccgnactctctaatattccatactacaaaaaacat

SEQ ID NO: 26436 - DNA, 365 bp, Glycine max
  modified_base (339)..(339): a, c, g, t, unknown, or other
ggagagatgcgtgtttgaatctgtgtgtgtgaaagttgaacaagacccgaagcaatcgcaacccccaaaaacgcggcgttttgaacggtccacgacacgaacatggccgaaacgtcttctacagaagatgatcacaatcatattgccatcgaaattatcagcgacgacgaaatggctctaattgaagctgctttcgcttttgcttacactcgcactttctcttcacttcgttcttcttcttcttcaaaattacccctttgcacaaacgccttatgcatcacacctttgtccaaaagaaagttatcgagtgacattgaggatttacccacttgcaagaanaaacacactctttctgattcttttct

SEQ ID NO: 26437 - DNA, 417 bp, Glycine max
ggttctagtgtgtgattgtttgttgttgtaactcgttcttcttcttttgttgttctgtgtttgtgtttgttttttctctcacctgaaaatgtcttgctgcggtggtaactgtggttgcggaagctcctgcaagtgcggcaacggctgcggaggctgcaagatgtacccagacttgagctacactgagtcaaccaccaccgagaccttggtcatgggagtggcacctgttaaggctcaatttgagggtgctgaaatgggtgtgcccgctgagaacgatggctgcaaatgtggaccaaactgctcctgcaacccctgcacttgcaagtgaggtgttgggagagcaagcttcaagcagagatagcccttaattaggaataatgataaactattaatgtgtaactaaaaacttatgtatta

SEQ ID NO: 26438 - DNA, 286 bp, Glycine max
tattgggacacagagaaagaaacatggcgtcggagcttgctatttcatcgtcatcatgcacattgaggcacgttctcaccttacccaaaaccctaacttcaaaaccccaattacaagtcgatgcttgttcctcatggaacacacagcggcgctgggggaacttgaagtgctccatgacgacaacgccatcataccctaagccctctgagattccgtggcagaaggaggctctgcaacttcgccaacctaatctgcaatgttgcagcccccgtcgaaatcaaacacc

SEQ ID NO: 26439 - DNA, 407 bp, Glycine max
ggggaacagaaacaagaaaaaaaaactcccacaatagggatgaggagtgccgacaggattaattgaggtcagggactgaaagggggtgttctgttctgatcggatctgaaatcatcgggaaaatgtcgtcgtttctgcaccagagaagcagtctccagaacccattctcgaatccattcccggcatcaactccatcatcatcgaattcgaagaaatccctgtccatcatgggccccaccaccctcctagccctaatctccctcatagtcatactcggcgtcttctgcccctgggtgggctttccccagggctttcccttcactcccactcccacttccaaatgggctcactacactttagaacaagcgctctccttcgtcgccaaaaacggttcctccgtcatcgtc

SEQ ID NO: 26440 - DNA, 419 bp, Glycine max
gagagcgaacagtgaagagaatggctcccaagggtggggcctttctggctgtgttaatatgcctttcagcactgtcactgagtccttatgttgcggaggaagggcaaaataatggcctcgttatgaacttctacacggaatcatgccctcaggctgaatacatcatcacagaacaagttaagcttctctacaagcgccacaagaacactgctttctcctggctcaggaacatcttccatgactgtgctgttcacagttgtgatgcttcactgttgctggactccacaagaaggagcttgtctgagaaggaaacagatcgaagctttgggttgagaaatttcaggtacattgagaccatcaaagaagctttggaaagagaatgccctggagttgcttcatgtgctgatatcctcgttctc

SEQ ID NO: 26441 - DNA, 145 bp, Glycine max
gaaggtgcaagagtttgttgtgagctataagctagtttatcgggaagagaatatgaaggtggttggtttctttggtgcttgcataattttgggaaccatggcattgcattgggcaaggttaccaagggttccttttccgatggaa

SEQ ID NO: 26442 - DNA, 201 bp, Glycine max
ggactcaaaagctcaataaatgcacgggaccaagcgaacaaatcaaatctctctctcaatctagccttctttctttttttcaatttccaaatcacgaaactcaagaagatggagaaagcgatcaacagacagaagattttgcttcatcatctcaacccttcatcattcacccaccccaacgaatcatccttccttcatggc

SEQ ID NO: 26443 - DNA, 422 bp, Glycine max
  modified_base (395)..(395): a, c, g, t, unknown, or other
ggaaaagaaaaatgaaaaatagcacaaggccaaaaatatcacctgatctgaaacttggacacgaaagaaaggctcgtatgcgcgacttctctctcttgcattgattcaacgttgtccattctccgaaacatcacaaagaaacccaactgagagagtgaagaataagaagaataaaaagaagaagaagggacgacaacaatggggggtttcgcaatgggttctgccttcgattccaaatctgggcagattattatggctgctttgcttttgatgattatgtccttctatgctggcaacctttttggcaacaatgctcccctttacgtctctcagcttgcttctcattcttctcccaacaatgtctcctccaacggtgctaccaaatttactaacanagttgctctgacttactggaaaacccc

SEQ ID NO: 26444 - DNA, 321 bp, Glycine max
ggagggaaaaaagtagagtggtatgtgggttgctgcggcaacaaaaccattcatcaaattccaattccacagacacactacttctcttccgttcttctgagggaaaacaaacttcaattttcttttcttctttccgggcttctggtcaagcgccttttaagcgcctgggcacgcacaacggaagccttcattgcgaacaaggccttggctgcttcatgaatcgccttacgaacaaattcaacagcgccgaaatcggtcgcttccgagacccttagggggtggaaggtctcgatgctgttctcgatgttgggggagtgtatg

SEQ ID NO: 26445 - DNA, 422 bp, Glycine max
ggagcactgagcaggtgcaccaaacaaaaacaacgacaacttcacacacagctgacgcgtaaactaagattcaacgtctgcgctctgcagccaccatacaatagatccttcattctttctctgcaacgatcaaacaacaaaaaacactgcacctcttcttctggatttggtgaagaagaagaagaagaagaagaagaagaaagtgtgatttgatgattatgaattgaagtgtgagaggtgaagagatgaacgtgagccatgcttcggttcacccagttgaagaagctccaactactgaaggtggtggtgaccaaaacgtcaacgctcctagggtgaggatgaaggatgttcaaggcatgcctggcactgccggtggcctttctctgcgtgtttctcagtttgttttcgctgctgctgcactc

SEQ ID NO: 26446 - DNA, 425 bp, Glycine max
gcagctgagatgtcgtgacatggaatggtggatgaggaggaggcagttgccatcgcgattaagacagagagttcgccattttgaacgtcagagatgggcagcaatgggaggagaagatgagatggaaatgatcaaagacttgccagaggggctgaggagggacatcaagcgccatctttgcctcgatctcattagaaaggttcctctattccacaacttggatgatcttattcttgacaacatctgtgacagggtgaaacccctagtcttctctaaagatgaaaagataatcagagaaggtgatcctgtaccaaggatggtgttcatcgtccgagggcgcataaaacgcaaccaaagccttagcaaaggcatggtagcctcaagcatccttgagccaggagggtttttgggtgacgagctgcttt

SEQ ID NO: 26447 - DNA, 394 bp, Glycine max
gaatgtaaaaaatagaggttgaagaagcaagcaccaacgtgaataccctaattcggagggtttcagttttcgccctcttttctcatctccaacatcttcgtcgtcacggaggctagtcttcctgttatcacaaacaatgtctgacggtcaagaatcagacaagaatattgagatatggaagatcaagaaattgataaaggcattggaagctgctcgaggtaatggtaccagcatgatttctctgataatgcctccacgtgatcaaatatctcgggtcactaagatgttgggagatgaatttggaactgcttcaaacatcaaaagtagggtgaaccgacagtctgtgttgggagccattacttctgctcagcagaggttgaaactatataacaag

SEQ ID NO: 26448 - DNA, 261 bp, Glycine max
gactctaagatgaatgaattgctttccgctgatggacaagaatttttcacttcatatgatgaagtctatgatagttttgatgcaatgggccttcaagaaaatcttctcagaggcatatatgcttatggttttgagaggccttctgcaatacagcaaaggggaattgttcctttctgcaagggtctggatgtgattcagcaggctcagtctggaactggaaagacagcaacattctgttcggggattttgcaacagcttgac

SEQ ID NO: 26449 - DNA, 423 bp, Glycine max
  modified_base (344)..(344): a, c, g, t, unknown, or other
ggacgaaggtgataataatcggtgccggaacttggggtatcgccaccgccggttgcttaacgaagcaatcaataccttacataatgctcgagagagaagactgtttcgcttcgctgtggcagaaatacacctacgatcgtctccaccttcatttgaggaagcaagtttgcgagttaccgcacttaccgtttcccaagtcttaccctcactacgtgcctcggaagcagttcatagactacttgggaaactacgttaaccactttgagatcaagcctctgtaccagcgtgcagtggagttggtggagtatgatggatggaaagggatttggagagtgaaggctcanaatagaagatctggtgagcttgaggaatacgctggaaagtacctggtcgtggccagtggcgaaaccgccgagcctcgtt

SEQ ID NO: 26450 - DNA, 413 bp, Glycine max
ggaggacacggtgggtaaagtattgaagagaaacctacatcacttgaaccgcaactgatggagctgaagaagcagaagctactaatcatttgttgtgactgtgagtagcaaagtttagtttggagatgttagaggagaaggatgtttgtgtatatgtgaaagtgtagactctgacaatgaccccgccggagctccgtcacggccacttcgtgttcctgcaaccagccttcgccggaaattaaccgtcacagcgacttgagggttggatgaggtggctgttttggttcaaggtttggttcgaggaacttgactataccttgccaagcacaagaaaatggttgatcatggaggtgtgccagtagaagttggtggtgaggcgggctatgcagtacgtaatgctcgaaaaaccgagt

SEQ ID NO: 26451 - DNA, 418 bp, Glycine max
gggagagcgaggtggtgtccattgcagttttctaatgaaaacaacaaaatagacacctgttaagaaggaggacaacgatggtgctgccgctatttactgctttcattctctttgcttttattccgaatggattgttagcagttccttccaccgtcccggcattcctttggtcatcacattatgaactggcctctgaaaatatattgaaggaatctgtaaattaccaagtcatttctccgaaggatctagcaaaatctattttatctgaagcaggctggtcaaattttctgtgcaaaggaaagaaatttcatgagcctctggatctggcactcttattcgttggtagagagttacaatcttcagatttaagcatgaacaaacatgcaaactcagctcttttggacctgctcaagaactc

SEQ ID NO: 26452 - DNA, 276 bp, Glycine max
gggcaaaaaaggaggtaatatggagcatgatgggaaggcagaccccttgaccaaggggatgttcaaaatttaagggaggcattccacattggtgtaagaaagatcccaccggtggagatttgctacctggaacaccttaccatcaaccaattgcaaattggttcaaaagtggggtgcttaagttaatggtgccaggatcaacccaaggcagttctcacatttaaagacagtgttgatagactctggacccacatatagctctgtaaaagtcccaaa

SEQ ID NO: 26453 - DNA, 417 bp, Glycine max
ggcgcaagagaagagagagggagtaatggacagagacgaagcagaaaccatggagaatgtggaattcgatgcttctgagattgagtacgttagttacggtggcgagcatcacctccctctcgtaatgaacctggtggaccaagaactcagcgaaccttattccatcttcacgtaccgttacttcgtctatctctggcctcagctttcattcctggcgttccacaagggtaaatgcgtgggcaccgtggtatgtaagatgggggaacaccgtaacactttcagaggctacattgccatgctggttgtcatcaagccctacagaggaagaggcattgctacggagcttgttactaggtctatcaaggtgatgatggaatcaggttgcgaagaggttacattagaagcggaagtgacaaa

SEQ ID NO: 26454 - DNA, 398 bp, Glycine max
gggagaattaggcaaaatgtttgatatcccaatggatggctctaaatctagaaaatccggtcccataagtaatgctccttcaaggacaggatcatttgcaggtgctgcttcacactctggacctatcatgcaaaatgctgcagctcgttctgcttatatcacatctggtaatgtatctactggaggcatgtctgcttcagcctcaatgaaaaagaccaactctggtccattgaataagcatggggaaccagtcaagaagtcatctggccctcaatctggtggagttacacgccaaaactctggtccaattcctccagttcttcctacgactggtcttattacatctggcccattaaattcatctggagctccaaggaaagtgtctggtcaattagatt

SEQ ID NO: 26455 - DNA, 326 bp, Glycine max
  modified_base (270)..(270): a, c, g, t, unknown, or other
ggctaagcgaaaccaaaccaatctttttatctcgaccctttttatttgggaataataataataataagcacttcaaggttgtgaagccttgaaggtgcatcaacacttgtgtcaacacaagaatgaggctctctgttttacttctagtgttcctcgcagttctggctgccacaaggcctagcctcgtaaactgtatggtccttccttcaccaaaaaacacagagaaagcccctcatgagcctctcaaagtgattcgaattctcatcaatntagtgatggcagaaaacgccaacactagtgagggtaatataaacaacatggctttg

SEQ ID NO: 26456 - DNA, 428 bp, Glycine max
ggagcagaatgatagcgaaaaccaaaaaacaagtgtcatcaccttcttcttcttctttccctgattctgttggttccatctcttcattcataccttgatccgtgatctcccaatttctcacttgaaagtatgaagaaagaatagataagtaatggcaggagcagaagcaagggctctgtggcagagaactgctaatcgttgctttgtccaagaagatgcaaaaagagctcccaagttggcttgttgccaatcttcatgtgcaacatcaaaatcagttgatactggacctgccagtacagcagatgaatctgatcataatacagttaatgttacccattttaacaggaaatcgtcaatttctaatctatcatcagactgtatgtggtggttgcattcacaacctaattatgggtatcaaaagggtttaa

SEQ ID NO: 26457 - DNA, 68 bp, Glycine max
gcacaagtgacctcttgatcgggatggcgggtaacactgttatgaaaatgtaaatccttgtttccttt

SEQ ID NO: 26458 - DNA, 417 bp, Glycine max
gggttgaaagtgagcaatgtcgttcgcagtggcggtgtgtacaacgtcgtcgttcttcccttcccgttttgaaattcgcaatccaaagcagcttcagcttccacctctcctttcaatgtcactgtcgtcgaagctaccgttgcatttctccggcaatgccatattcaaccgcaaccacccaaccatgttcaaaattcgagcctcaaactcttcatccaaactcgtcttattgagctccactatcgtcgtcacaacagcggtagcgaatcgcgtgctctacaaattggcccttgttcccatgaaagagtaccccttttttctcgctcagttcataacttttgggtatgttgttatatatttctcgatcttgtatttccggtaccgggcgagaattgtgaccgatgagatgctggcaat

SEQ ID NO: 26459 - DNA, 407 bp, Glycine max
ggcccaagtgagttggttgatggagttaactagaaccagggggatgaaaatgaaggtcctggttttcttcgttgctacaattttggtagcatggcaatgccatgcgtacgatttgttccctctccgaatgaacactggctatggtgcccgtactccggaggtgaaatgcgcaagttggaggcttgctgtggaagcacacaacatctttggctttgagaccattcctgaagagtgcgttgaagcaacataggaatacatccatggcgaacaatatagatcggactccaaaacagttaaccaacaagcttacttttatgccagagacctcgaagtccatcccaaggacacatttgtgttcagtatagatggcaccgtactctctaatattccatactacaaaaaacatg

SEQ ID NO: 26460 - DNA, 406 bp, Glycine max
ggactggccagagggtgcaatctcacgagagagtattaaagctgttatgaagcttccccgactacagaaccttataatgcagcatgttgatcattcagctggagatcttatacatcttttgcaggggctacttagatatgacccctttgaaagacttacagctagggatgctttgaggcattccttctttatgagagatcatcttaggagatgatttttatgtgtttgtaaacgattggtctgcttttaggtgaaagatcactcgagggcaaatatggctgtaaggagcctatgtgccaatgtaaataaatatttaaatttaggcttgtgtggcaagtgaggatggttattcagcagcatttacacctcaacctcaaagcctgtgtttcaaacgttttattaaaaa

SEQ ID NO: 26461 - DNA, 427 bp, Glycine max
gaggaagaatttgatgaatcagacaagtcacatgataatgaagctccagaatatagacgtctaattgcaattcatgctgggaagcctaaaggtggattagcagaatgcctcaaagtggatcctgataaagtgagacgtctaagtttaagtgagcaacagcttgaaaaggctgccataaatcatggacaacaaattgtcaggtttactcagcggaatatactaagggtgtatccaaaaggtactcgcattgactcatcaaattataacccattaattgggtggatgcatggagctcagatggttgcatttaacatgcaggggtatgggagatctctttggttgatgcatggaatgttcagagccaatggagggtgtggttatgttaaaaaaccaaattttctattggagactggtccagatgacgagg

SEQ ID NO: 26462 - DNA, 426 bp, Glycine max
ggttcaaggaatgtagagagagcgggcggagactgctatgccctttgactcttcaagaactaagaagtacagagctgaatccaagtatggctttgcgtaacaccattgaagaatggactgccaggaatgaagctgcacagctggatatggctcgccggtcattgaatatggggagtccagaaaatgagactcttcaggccttaaagtatgtccagcacatctgccgaagaagtcgatcaaacaaatacactgtccgcaatgcagggcttatcccaatgattgttgacatgctgaagagtagcagccgtaaggttcgttgtagagctctggaaacccttagagttgtggtagaggaagatgatgagaataaggaattgttggctgaaggggatactgttcgcactgtagtaaaattcctttcacatg

SEQ ID NO: 26463 - DNA, 418 bp, Glycine max
gagagcgaagagcgaagagaatggctcccaaggggttaacctttctggctgtgttaatatgcgtttcagcactgtcactgagtccttctgttgcgggggaagggcaaaataatggccttgttatgaacttctacaaggaatcatgccctcaggctgaagacatcatcacagaacaagtcaagcttctctacaagcgccacaagaacactgctttctcctggctcaggaacatcttccatgactgtgctgttcagagttgtgatgcttcactgttgctggactccacaagaaggagcttgtctgagaaggaaacagatagaagctttgggttgagaaatttcaggtacattgagaccatcaaagaagctttggaaagagaatgccctggagttgtttcatgtgctgatatcctcgttct

SEQ ID NO: 26464 - DNA, 418 bp, Glycine max
ggcgagagttctgagaagaaaagagaagatcggtgagtgaggaagcaaatagcaatagcaccgccaccgtcaccactgccactgccactgccactagcaacagcagaatgggaaccttgggcagagttttctacgccgtcggattttggatccgcgagaccggccaagccatcgatcgcctcggctctcgtctccaaggcaactacctctttcaagaacagctgtctaggcatcgacctctgatgaatctgttcgacaaagctccctcggttcacagggatgcatttgtggcccctagtgcctccctcctcggcgatgtccacgttggccccgcttcctccatttggtatggatgcgttctcagaggtgatgttaacagcattactattggatctggaactaatatacaagacaattc

SEQ ID NO: 26465 - DNA, 387 bp, Glycine max
ggcacgttgttaaggatgttcctaacaatttgttgaggcacattaccctggataacaatgagaacaaacctgtcactaacagtagggatacacaagaggtaatgttggagcctggcctgaaattaatcaaaattttcaaggaatataccagcaagacatgcattctggatgattttggcttctatgaggcccgtcagaagactattttggagaagaaagcaaagcaacaattcccaaagcaggtatgggaagggaaacctgctgatgagaagattgagataaatggggaagtcaatactcaaaaatctgaagttagctcggaagtgctcaaggagtcccttgctgaggaggatagtgatgaccacaaagttcccgagaatggatgtg

SEQ ID NO: 26466 - DNA, 416 bp, Glycine max
ttggggggcaagagtgaagagcgaagagaatggctccgaagggtttaatctttttggctgcgttatgcttctcagcactggcactgagtcgttgtcttgcggatgataatggacttgttatgaacttgtacatggaatcatgccctcacgctgaagacataatcaaagaacacgtcaagcttatgtacaagcgccgcaagaacactgctttatcctggctcagaaacatcttccatgactgtgctgttcaaagatgtgatgcttaactggtgctggactccacaagaaggggcttgtctgataaggaaacatatagtatctctgggttgagaacattcaggtacattgagaccatctaagaagctttggaaaggggatgcccaggagtagtttccttggctgatattctcgttctc

SEQ ID NO: 26467 - DNA, 407 bp, Glycine max
gacgaaacaatggtagaactagtatctcaatacccgagaacgtgtgaacgaaaaatagcgtttattttaaactagaagactagaagattacgtatttgattatgcaaagcggtgcacaaattacataatccaaagtccagaactcacactatatatataagcaggacctaggcttcttctttgcactgcaaatcacttttctactttgagtcttcttgatccttctgtgtctccttgaactcaaacatggcagatgaggtggttctgctagatttctggccaagtccatttgggatgagggtcatgattgcacttgctgaaaagggtatgaaatatgagtacaaagaagaggacttgaggaacaagagtcctctactgctccaaatgaacccggttcacaagaagat

SEQ ID NO: 26468 - DNA, 399 bp, Glycine max
ggaagaggaaggggctagaaaaaaaagaactagggggctggaatctgagaactttaacatgtactagtactactactacattcatgcatattactttgtactatttttttttaaccatagcatcaagaacacaaagatggtgtgagctccttcgtgtgaaaagatacgcatgaagaaaggtccttgagctatcgaggaagatcaaatcctcacatcttacattgacaaacatggacatgggaattgtcctgccctcccatagcaagcaagcttggtaaggtgtgggaaaagctgtatactacactggattaactatgtgtggcccgatattctaagacggactctcacaattgaagaagaagaaactatcattaagctgcatgacatgctggagaacag

SEQ ID NO: 26469 - DNA, 249 bp, Glycine max
ggagggtgcattgtgtcaaacctggggggggtgaaaagacccagatcattgttatgggcaatgggctttgctcggagtaccagatccacaagaggtttgacgctgaaggctcttgtcatggtcaatgtacagataagcctagggcacaaattgataatactaccactctcaaagtccttgatcttaactttgactttggccttgaatagtattggtttcaagagcttatatgtcaacttggcatagatt

SEQ ID NO: 26470 - DNA, 425 bp, Glycine max
gacacacaacatttacatttctctctccagtatggcttctactcacaatgagttttatgcacttatgctagtggtggtggttggctccatggtggcttcctgtggtgctaacttcaaccaagactttgatctaacatggggtgatcaccgtgctaagatattcaatggtggtcagcttctatctctttctctggacaaagtctctggctccggcttccaatccaagaaagagtacctatttgggaggatcgatatgcaactcaagctcgttgctggcaactctgccggcactgtcactgcttactacttgtcgtctcaagggccaactcatgatgagattgattttgaattcttgggaaacgtgagcggtgacccttacattctccacacaaacgtgtttaccaaaggccaagggaacagagagc

SEQ ID NO: 26471 - DNA, 373 bp, Glycine max
gagggcgtcagagggagttaggctcttgggctagatctggattaacagctactagttgtgagatggggctttaatgctaagcctgatggaggcatgtctacatgcggttgctcattcatgcgaaatcgtgtaacgagtggatcactggtactgacactgtggactgatgtggaaggtgaggacatgaactacacgcaacagattgtcataggtgctagaccaaggagatggcgagccagggactacgagcccgtatagatgggggctaagaatatagtgaactcggcaacaaaggaacgtgagagcattacgattgagctccgataccacacggtagtgcggatggaagacagttgatacatgatgacagacg

SEQ ID NO: 26472 - DNA, 157 bp, Glycine max
catgccacaggttaaaatgatggtagtacttggggaacttggtgggcgtgatgagtattccttagtggaggccttaaaacagggaaaggtatccaaaccggttgttgcctgggtcagtggcacatgtgcacgactcttcaaatttgaagtccaattt

SEQ ID NO: 26473 - DNA, 384 bp, Glycine max
ggctgagttcagaacaaaacaagagaaaaaaaagggtttcacactttgtccaatctttcacactgaactcttcaattttcaattctctttttcatgcaccactcttctttttcttcagacaccttcatcatctgcataccgcttagctccaaaaactacacacacaagaattctgtttctttctgttgatttgatggatccgcaggtctaatggtttcacacactttcttcactacggatcattgtcttcttcatctggggcaccccaatagcttcttctaatcgatagtcaaattttgttggtttgtggtggatcatcttcgtcgttgtggtgactagtgaggagtgcaggactatacctatctatatagtgtatgaaaattc

SEQ ID NO: 26474 - DNA, 384 bp, Glycine max
gtggaacatggagacattgcaaacagaaagtactccggaggaacacagtcttattattactgatgttcgcttcagaccaaattcaactcagctggcaacatcttcgtttgatacaactgtgcggctgtgggatgctgcagatccaaccttccctttacatacatatagtggtcatacttcacatgtggtgtcccttgattttcacccaaagaaaactgagcttttctgttcttgtgacaataacaatgagattcgcttttggagtattagtcaatattcttccacacgtatttttaagggaggatctacacaggtgaggttttagccaaggcttggtcaacctctggctgcaacaagtggcaatgttgtgtcttcttttgatgt

SEQ ID NO: 26475 - DNA, 401 bp, Glycine max
ggaggaaggaagatgagtttgagggcatcagagatagcgaagaagttgaatctgcaacctcacccagaaggtgggttttacgtggagacattccgagaccattccgtccagctttcgacctctcagctcccccccgaatacaaagtggatcgccctgtatcgacctccatctattttctcgttccttctgggagtgtgtctcgcctccatcgcataccctgcgccgaaacctggcatcattacatcggcgaccctctcaccgtagtggaattgaatgagaaagatgggagcgtaaaattcacttgccttggatcagatctgactcagaatcaggtgccgcagtacacggtgcctcccaacgtctggtttggctcttttcctaccaaggactttacctactc

SEQ ID NO: 26476 - DNA, 424 bp, Glycine max
  modified_base (299)..(299): a, c, g, t, unknown, or other
gaactcaaacagggaggatcatttctgatcgattgattgcttacgatttggaatagtgacaagtaaagacaaatcacaactcacggtcatccaattccaagaatagagctttacgaggcagcggcttcaaaaggaggggaatattcagaggaaaagaaagagtagttgttgaacaacaagagctttcctcattcttagcttatctcacaaggaaggtacgtaagatccttaacacccttaccgcggttacttgccgcctcaatccattgctgaaatgaatgctcataaataaatatatntgcaggctacgaatctctgctcctagattttggtttcttaattatcaatctagtctctaaattatattaaaagatttaatttgattccaaatttttaaataatttaatttaatttctatattatt

SEQ ID NO: 26477 - DNA, 368 bp, Glycine max
  modified_base (250)..(250): a, c, g, t, unknown, or other
  modified_base (292)..(292): a, c, g, t, unknown, or other
ggggagatggagcggaagtggagcagtgaatctggtgggaatgtgatatcgtcgccatcacactcgcgtaatgggcattctcgctcctcttcgctcactatccccggaggaggaatttcaaccgtcaaaaggactcagaatgttgctgccaaagccgccgctcagcgcctcgcccaggtcatggcttctcagactgccgacgacgacgacgacgacgaagacgatctaggatttcgctacactgctcctncacctctctctctttccaggagctctgctagatctccatctnctgcgttagctcggaacctcgtagaagaatcatcaatgtatcttcgcccagcaccacctgctgctggtaataatag

SEQ ID NO: 26478 - DNA, 379 bp, Glycine max
ctccacgcgttctacatgcgagatgacgaccgagggggaggctgcattgtgtcaaacctgggggaggtaaaaagacccagtttattgtaatggtcaatgtgtgttgctcggagtaccatatccacaagaggtttgacctcatatgctcttctaatggtcaatctacagataaaccaagggaacaaattgatgagactaccactctcaaagaccttgatcttaactttgactatcgccttaaatagtcttgtcttcaagagcttatatggcatcttgttagacattgttagttcctggatgcaaagggattcatggattacagtcttttaattgtcctgcatttcgtgcattaatagcttcagagattaattgaaaagtt

SEQ ID NO: 26479 - DNA, 292 bp, Glycine max
ggttctagtgtgtgattgtttggtgttgtaactcgttcttcttcttttgttgttctgtgtttgtgtttgttttttctctcacctgaaaatgtcttgctgcggtggtaactgtggttgcggaagctcctgcaagtgcggcaacggctgctgaggctgcaagatgtacccagacttgagctacactgagtcaaccaccaccgagaccttggtcatgggagtggcacctgttaaggctcaatttgagggtgctgaaatgggtgtgcccgcttagaacgatggctgcaaatgtgga

SEQ ID NO: 26480 - DNA, 410 bp, Glycine max
gaccacttggataaacgaacttggacttatatctttggagcttgctgtgccacctctgtgttcataccttcttttcacaattaccgtatttggtcttttctgggacttggaatgaccacttacactgcttggtacttggcaatagcagcccttattcatggccaggcagaaaatgtgacacacacgggtccaacgaagctagtgctgtacttcacaggagccaccaacatactgtacacgtttggtggacatgcagttactgtagagattatgcacgccatgtggaagccacagaagttcaagtacatatacttgctggccactttgtacgttttcacactaacgattccttctgctgctgccgtttactgggcttttggtgatgaacttctcaatcattccaatgcatt

SEQ ID NO: 26481 - DNA, 429 bp, Glycine max
gagagaaaggatgcggaaagagatcttttggccaaactacttgtcagccttgtgaaatctcagcatggaaccttgaatcaagttcagctcattaaagggtttgaatctgctctcagtacattggaggatgctgttaatgatgctcccagagcagcagagtttcttggccgaatttttgcaaaagccataacagagaatgtagtttctttgaaggagattgggcagttaatacatgatggtggagaggagccaggtagtctcttagaagttggacttgcagctgatgttcttggaggcactttggaggtaattcaaagcgagaagggggacgtggttctaaacgagatgcgttcagactctaacttgaggttggaaactttccggcaacctaatgctaaaacatcaaggaagttggaaaaatttatttag

SEQ ID NO: 26482 - DNA, 415 bp, Glycine max
ggtggaaaaactgaagattatgatcatgaagatgaacaaagtggtgtcactttcttcagctgcagctcttaaatctgtgtgttccaaaactttttgaggtaaagtctcaaaactttctctcttttctcattaatcacattcttgcttaattagctcttcttttacaaattcttcttcattatattcagctgcagctcttaaatctgtgtgctccaaaactttttgaggtgaagtctcaaaactttctctcttttctcattaatcacattcttgcttaattagctcttcttttacaaattctccttcattatattcagctgcagctcttaaatctgtgtgttccaaaactttttgaggtaaagtctcaaaactttctctcttttctcattaatcacattcttgcttaattagctct

SEQ ID NO: 26483 - DNA, 306 bp, Glycine max
gggggaaggtcgagtagtgggccagataaatcctgccagcgttcctctcgcagcatgtctgtcagtcctgatcgtgttcgtgtgagggggcggtctccagcctttaatgctctagcagctaattttgagaaccctaattctaggaacctttcaaccccacctccagtaattagaaagctgtatcctaaatctgtgacaacagattctgcaatactggcgccaaaatcttctgccatagctgcacttagttcttcttttgaacaaccaccttcagcacgagaaaccatgatacctcgctcacttaaa

SEQ ID NO: 26484 - DNA, 322 bp, Glycine max
ggatgactgatgaagaatttgcaagagaaacgattgctggtttaaatccaaatgtcattaagattatagaggagttcccactaagtagcaagctagatactcaagcctatggtgatcatacctgtataatagcaaaagaacatttggagcctaacttaggtgggctcactgttgagcaggctatccaaaacaagaagttgttcatcttagatcaccatgactatctcattccttatttgaggaaaataaatgcaaataccacaaagacttatgctacaagaaccatatttttcttgaaagatgatggaactttgacaccatt

SEQ ID NO: 26485 - DNA, 402 bp, Glycine max
ggacccgaaggcctgaagaacattgcacaccgtgttcatggtcttgctggggcatttgctcttggattaaagaaacttggaactgtggaagttcaggaccttcccttctttgacactgtgaaggttaagacttctaatgcacatgcaattgctgatgctgctctcaagagtggaataaatttgcgagttgtagatggaaacactatcactgttgcttttgatgaaacaaccacattagaggatgttgataatcttttcaaagtttttgctggtggaaagccggtccccttcactgctgcatctcttgcaccagaagttcagagtgcgattccttctggattagttaggaagagcccttatctgacacactctatctttaacatgtaccaaactgagcatgag

SEQ ID NO: 26486 - DNA, 418 bp, Glycine max
ggtagtttaagtgtgaatccctttccctctctacgtcttctttcactttccatttccatttccattttttctggttcactttctcgatggcctccgagaaccccaccgccgacgacgccgtcaacggcttcaatcggccggaaatgttctcggaaaacctcgccggcaccgtcgacgcctacgaccgccacgtgttcctctgctacaagagtcacctgtcctggcccccgcgcatcgaggcctccgacgccgatcccttccccaagcgcgttgccaccaccttcaaagcccgcaagaacgacttgcccctcaagacgaaaatcaccgtgtgcgaggtgcgtgaggaggctggcttcctcgacggtgacgtgttgattttccccgacatgatcaaatacaggggtttggaggaatcaaa

SEQ ID NO: 26487 - DNA, 287 bp, Glycine max
ggagcctgagtgtgacaagctcataatggcttcacttaacaagaactacgttgacatggatgagtatcctgtcaccactgagctccagaaccggtgtgttaatatcatagcaaatctattccatgctcctataagtgatgatgagactgcagtaagtgtgggaacctgggggtcatcggaggcaataatgttggcaggtctaacttttaaaaggaaatggcagacaaagagaaaagcagaaggcaaaccatatgataagcccaacatagtaactggggctaatgtgc

SEQ ID NO: 26488 - DNA, 397 bp, Glycine max
gacacacagagacatttttctttcttagaagcgtccaccacacggaacctcgcaattccttcacacccaccataataataatatcttcattgttcttttcttctttgttaccattaaaaacacacacacacacacaacaacactctgaaactaacaacaacaattaaagaccatgtcggtgaaggagtgcgagcaccacaaggggaagaagaggaagatcttccggcaagtgttctggtgcttagtggtgttccttttcatcgtgctggtcacaattcttttgatatgggcaatccttagacccaccaaacccaccttcacgctccaagacgtcaccgtctacgccttcaacgccaccgtggcgaacttcctcacttcaattttcaggtcacgctca

SEQ ID NO: 26489 - DNA, 415 bp, Glycine max
ggagttagggtgagttgcaggcagtgtcatctctcctttgacgacaagatgagcatcccaattccccatcggcagttattcatagacggagactggaaagtccccgtcctcaagaatcggattcccatcatcaacccttccacccaacacatcatcggggatatcccagcagctactaaggaagacgttgatctcgctgtcgctgccgccaaagctgccctctcccgcaacaagggcgccgattgggcctccgcttccggctccgttcgggctcgctacctccgcgccatcgctgccaagatcaccgagaaaaagcctgaactagcaaaactcgaagctattgactgtggaaaaccgctcgatgaagccgcctgggacatcgacgatgttgctggttgctttgagttctatgctg

SEQ ID NO: 26490 - DNA, 331 bp, Glycine max
ggagaattgttctacgtcgtcaaagacaccgatttaggggttaaaaaatatcgattaacctctgatatttctcttagctgcagcctgcagtgagactaagaaaatctccgaacccgctacttcctattttctatcctttcaaaagagaaactggaaaagttagctaaacgtcatagctagatcgtcgaacaaaacgaaaagaaaagcgttgaaaatggctcaggagtcactctcagaaacccctgatatctcgcccccttcgtctactgcacaatcgctgccagatccatctctttcaaggaacgtttcttttagccggctcaacgcacag

SEQ ID NO: 26491 - DNA, 424 bp, Glycine max
ggtgagacgagggtaaggtcgcgttgtggcgcgtcgtgtcgcgcgctgtttctgtgtgtgtcgtttgtgtttacagaccaaactatatctgcgtatcgcaaccatgtagaccaagcaaggtggaaaagctaaccctgtgaagaaacccaagtgtgataagagggattacgacgagggtgacatgtctcacattcagaagaaaagggaagaagagaacgctctaagggagttgagagccaacgcgcaacagaggggaagctttagaggttctgctctcaagaagagtggagagatatagggtctctatatcatgagtgtacacatacaatagtgagccgtgtagtatattaccatgatcacttgtgtcatagtgtggtcttctatagcgctataatgatagctctgaactgatgtatttcgagat

SEQ ID NO: 26492 - DNA, 181 bp, Glycine max
gtatgttaaaagtgttcaaagaactgtcatttggatgggaaaaagacaggaaactgtggaagatgtcccctgtggtaacactgttgctatggttggtttggatcagttcataacaaagaatgctactttgactaatgaaaaggaagttgatgcccatcccattcgagctatgaagttttct

SEQ ID NO: 26493 - DNA, 289 bp, Glycine max
gtctgttacaagtgtgcaaagagctgtcatgtggcatggtaaaaagacaggaaactgtggaagatgtcccctgtaggaacactgatgctatggttggattggatcagttcataacatagaatgctactttgactaatgaaaaggaacttgatgcccatcccattcgatctatgaagttttctgcctcacctgttgttcgtgctgctgttcaatgtaaggttgcatcaaatcttcccaagcttgctgaatgtcttaagcggctggccaagtcagatcctaaagttgtttg

SEQ ID NO: 26494 - DNA, 412 bp, Glycine max
ggtcaacttaggctggagaaccgatatcaaaatgtaatgcacacacaacacaacacaacagcgtggaacgagacaactaagtacgaaaatcgttatccgccgcaacagccactaagatgttctttgagtcttggcacgccacgtgtcagaactgccaacagatagccccatctctttctccttctccctaaacctcgaactcagcacccccatccactggtgattgtttgattgagccttgaagaaatggaccacagcgctgatgcacatcgcacggacttgatgaccataacgcggttcgtgctgaacgagcaatccaagcaccccgagtcacgcggcgatttcaccatcttgctcagtcacattgttctcggttgcaagttcgtttgttccgctgtcagcaaggctggtc

SEQ ID NO: 26495 - DNA, 404 bp, Glycine max
gaagtacaagcagagagttacggcacatatttctttttcttttccctttttcctaggcacagcacacgccctctcaaatagaaactgagagatgaattctgatcagtttcagaagaacagcatgttcgtagaaacccctgaagatggtggcaaaaacttcgacgatgatggacgagtcagaagaacgggtacatggataactgcgagtgcccatatcataacggcagtgatagggtcaggagtgttgtcacttgcatgggcaattgcacaaatgggttgggtggctggccctgccgttctctttgccttctctttcatcacttacttcacttccactcttcttgccgactgttatcgttcacctgatcctgttcatggcaggcgaaactacacctattccgatg

SEQ ID NO: 26496 - DNA, 417 bp, Glycine max
ggtatcgcttcagagttgagaccaagacgacactcgttcatatatctctctgctcttctcttctcttctacctctcaagtttttgaagtataaagatggcagagacattcctattcacctcggagtccgtgaacgagggacaccctgataagctctgcgaccaaatctccgatgctgtcctcgacgcttgcctcgaacaggacccagacagcaaggttgcctgcgaaacatgcaccaagaccaacttggtcatggtcttcggagagatcaccaccaaggccaacgttgactacgagaagatcgtgcgtgacacctgcatgagcatcggcttcatctcaaacgatgtgggacttgatgctgacaactgcaaggtccttgtaaacattgagcaccagagccctgatattgcccagggcg

SEQ ID NO: 26497 - DNA, 420 bp, Glycine max
gacacaaaaacggctaaaaccataacaagaatggtgtttggctcaaaaaaaaagaagaagaagaaatgttagggttaggatgcttaaacctcaatcgattctctcacttcccatcccctccctctctaccatcctctcgttccgatttacttaaggttgcgtctcgtagattcgctttatcagtgactaaaacgcagcaatctccagtcactaagccacaatccaccttcaccgctataattgaaatagataacccggccagtgtcaaaaggcaattggcgcagctgtttgacttgtctctgagggcaactgtgcccgatgagccagatgttgtgccgttaattgatgcttgtgctgttaaaggtggcgtaaaatttggtgattatcaatgtaataatgcaatgggtatatggtctaaga

SEQ ID NO: 26498 - DNA, 404 bp, Glycine max
ggaatccagaaagtttgataaatgagtgattgtgtgactccaaaagtttatgcactttggaaaggaattttctgtctcataaactctgttcaaaggattttaataatttgtttctggcttagaccattccatgattgctctcctttcttgggggtccatttttttttctcagtttataattataataattgaagcttttgaaccctctcatgtttcattaaattctgtgccctcaaaggggtactgttgaaccattttttttaatctatttacttggctgcggattgtccactcataatctttacaaagctttatctccaatggatttgattaccactttgattgtcttcctttatgatgctctagcttctttccatgctaatccgagttatcaagaccaaatt

SEQ ID NO: 26499 - DNA, 428 bp, Glycine max
ggtccgttgcaatatcggcagaagagagacaccaacaaccttccattggttgatgacacatcggatggagcatttgtccagtttagggggcggtttaaggtcacgccggcagatctcagtccaatgggtccttcaaacagcacatctggcccacttgttagtcctaccagtccaccaaatccaaatttcctgtctgtagctattcttccatcactgcagtgcatcttgcaacagaacggcttgcagagggaagagattattaaattaataaaatatgcagagcaatcttctggcaagaatacagaatcaatggaggcagggatagttgatattttgcaggcaccacctgcaacaactagggagcgagagctgcattttcaggtgattcaactccagcagagcaatggaatcctttttgaggaattgca

SEQ ID NO: 26500 - DNA, 426 bp, Glycine max
ggaaaagaaggtagagaaggtgttgtgaaagggtgaagatcgagaaattagggtgaagtgaaggagaagctcttgagaaggtatagttcttgttcttgctcatgctcccttgtgttttgtgtgactcgttgttcttgttcttgctacatttttatctttaatttacgtgcttctaatcatgttaacattagtgttttgtttcaccttctacacatttacacatttatcgtctcaaatctcaaatacaaagcacctatactttctttctcccaaaataattgatcgtctcaaatctcaatttaataaatgtattataaagtcttttaacataagattcttttttaaaaaagacaaaacaaaacattaatataaaccaaaagatcgttatcacttatgttaattaataagtgataacgatttatattt

SEQ ID NO: 26501 - DNA, 403 bp, Glycine max
ggaagaaggcatggagcagtggtggatgtggtcgggtaggagcactagagatgggaagctgcccgggacccatagagacacccgctcttctcctatctactcgtaaagggcttcctcactttatctcccctgacctactcacttctctcccttcccccgattcccatctccttcaaatttctccactccactttttggaaggacttgcttcaaccactatatcaaaattaggagggcttcaccaaatgcttggtttgcaccaatatggaatggcggctgtagccagggattccattcaatgccttcctgagtctaagggagctaccaaactcggagcctcttttgaaactccttggggtcgtctgttgattaaacccaaagattatgttgaaatgatttcatg

SEQ ID NO: 26502 - DNA, 360 bp, Glycine max
gacatgaagaagaagaagaagaagaagaagaagggttggttggtcccattccataggaagagatcaaagagaagagaaaagatgtttgagccgcagcagctatacactcgagcgaagaccgaggaattcgacctcgaatcaggggaaaccctctacccagggctgagcgtctgcgagaaccagctccgatggggcttcattcgcaaggtctacggcatcctctgcgcccagatcgtcctcaccaccctcgtctctgtcaccaccgttttctatactccaatcaatgacctcctcaagggcaattccaccctcctgctcatcctgctcttgcttcctttcatctttttgattcccctgttg

SEQ ID NO: 26503 - DNA, 357 bp, Glycine max
ggtggttggcttgctttcgctctcttctctgcaaatgcttcattccaagatggttaggactctgtacgctgataaagacaacactcataccgttggaaagaaggatgctgctggccatgttgcttaatttagttcttgcttcctttgtcttcttgagttttatcagagacgggagtgcagggatcactagctctttcattcggtcagagtggccggcagttgacataccccttgatcatgaagcatttgcagatccaaagggttataatgcacctcaacaagtgcacatcacgcaaggtgactatgatcgaaaagcaggtatcatctcatgggtgaccacagaagagccaggggaca

SEQ ID NO: 26504 - DNA, 405 bp, Glycine max
  modified_base (233)..(233): a, c, g, t, unknown, or other
ggaggaagaggaggagtaacaaaacaagtatgtcagaatcaaacgcaattgcaaatggtttggctggtgcaggtggtggaattattgctcaaatcataacttatcctcttcaaacggtaaacacgcgccagcaaactgagagaacactcaagaggaacaagcaaagtttgccctccaactcaaccactgctcctggcactcttcttcagatctttcaggtcattggaactganggttggggtggactctatagtggcctcaagccttctcttcttggaactgctgcttctcagggaatttactactatttctatcaagtttttaagaacaaggcagttgccattgcagctgcacggatggtgaaagggcgtggagatggtacttgtgggatgtttggttggcttg

SEQ ID NO: 26505 - DNA, 415 bp, Glycine max
gagtgagagacggaaagtgcaaagccaccgtcttgtcttctcagagcttggctttgcttatcgattctctctcctctcatctttctcattcaaggtttgtaaaagatggccgatgctgaggatattcaaccccttgcttgtgacaatggaactggaatggtcaaggctggatttgctggtgatgatgctcccagggctgtctttcccagtattgttggccgacctcgacacactggcgttatggttgggatgggtcaaaaggatgcctatgttggtgatgaagcccaatcagaaagaggtattcttactctcaagtatcccattgagcatgggatagtcagcaactgggatgacatggaaaagatctggcatcacacattttataatgaacttcgtgttgctcctgaggagcacc

SEQ ID NO: 26506 - DNA, 405 bp, Glycine max
ggtacaagcagagagttacagcacatgtgactctgtctcttccctttttactatgctcagatcacgccctctcaaatagaaactgagagatgaattctgatcagcttcagaagaacagcatgttcgcagaaacccatgaggatggtggcaaaaacttcgacgatgatggacgactcagaggaacggttacatggataactgctagtgcccatattataacggcagtgatatggtcacgagcgctggcacttgcatgggcaattgcccacatgggctgagtggctggccctgccgttgactttgtcttctatgtcatcacttactgtacttacactcttcttgacgactgatatcgttcaccagatcctgtggatggctagcgaaactacacctattccgatgttg

SEQ ID NO: 26507 - DNA, 419 bp, Glycine max
gggatggagaaagtgaaggtgcttcggcgactcctcgagacaccaggggttcaccaggggtcagcctgtttcgacgctctgggtgcgaagctcatagaatccgctggcttcccctactgcatcaccagtggcttctccatcgccgcttccaggttggctctgcccgacaccggcttcatctcctacggcgaaatgctggagcagggccaactcatcacccaagccgtttccattcccgtcattggcgacgccgacaacggctacggcaatgccatgaacctcaagcgaaccgtcaagggtttcattgccgccggtttcgcaggaatcattctggaagaccagattgcgccgaaagcgtgtgggcacacgcgcgggaggaaagtgataccgagagaggagggcgttatgaagattagagc

SEQ ID NO: 26508 - DNA, 388 bp, Glycine max
ggaagagaatggctcccaagggtttaacctttctggctgtgttaatatgcgtttcagcactgtcactgagtccttctgttgcgggggaagggcaaaataatggccttgttatgaacttctacaaggaatcatgccctcaggctgaagacatcatcacagaacaagtcaagcttctctacaagcgccacaagaacactgctttctcctggctcaggaacatcttccatgactgtgctgttcagagttgtgatgcttcactgttgctggactccacaagaaggagcttgtctgagaaggaaacagatagaagctttgggttgagaaatttcaggtacattgagaccatcaaagaagctttggaaagagaatgccctggagtggtttcatg

SEQ ID NO: 26509 - DNA, 350 bp, Glycine max
gaagaaggaacggatgggatgcaagatcccccagcgcacgaattaacgatggcgtcttcaatcgaaaagctcctagaaagtggtcgtcccttccttcgcggtgatctggagtccatctacaagaacttacctcggctggttggcgtcctgcaaagtgtgggtgccggagagtgctgtcacaaacacggcagcttccttcaccacctcgtctacatatttcgcattctcaagctctggaaagcccctcactctgtctgtctttgtggccgctttcactcaggctactccaatccttacgttaacctcgccatcttctaccctttaacctgtcgagaagtggttcgagcact

SEQ ID NO: 26510 - DNA, 306 bp, Glycine max
gggtgagacagggacggaaataaatcgaaaacggataaagatgaacgtaaacaacgacttggtattgctaatgatgctacaaagggtgaattccgaccacctatgcaaggtgggctccatcttcaacatcacaccccgctgtagtctcagtctaaacatatggccttatcggatgagtgggtgtcaggcacggaatttctggacaccaacttgactacagatttggtgctgcatgtcgtgttagtatagggattgtcgtatggagtggggaaaggaattgctcaagctgacaacattatttccttt

SEQ ID NO: 26511 - DNA, 376 bp, Glycine max
gaactcaagctttcagacattttcccttttcagctttcattggtgtggcctagctgttttctcaatgagaaagccttcatctctgcaaagcgcacttttgcgctttggggttcccttgttgcttgttatcaccttctgttatgctacttctactgctgcagcaacaactcaagtttcagggaatgaagagctgccaaagacaaacctaaatgggcatgatgaagaagcaaaattcggattttttcatcataaaccaatattcaagaaacatattccaattccagtatataaacctgtaccaaagccatttccagtgtataaacctataccatagccagttccagttccagtgtacaagcctattccaaagccagtg

SEQ ID NO: 26512 - DNA, 433 bp, Glycine max
  modified_base (308)..(308): a, c, g, t, unknown, or other
ggcatccaaaatggcgcattcttctgttatagtcttcctctgcactctccttctcttcttttctccgtcaattcgtgcctccgacgatgacgtggcgctgcacgcgaagaagctcatcagagacctcaacttgttccccgacgctgacgtcaacatcgttcccgttgctaattgcaccctccaaccccgcaggatcgtcgagaagcgcctgaggttcccgaagctgctagcttcggattccgagccttcggttgaggatttgggtcaccacgctggctattaccccattcagcattcacatgccgcanggatgttctactttttcttcgaatcacgcaataggaaggaggatcctgtcgtaatttgggtgactgggggacctgggtgtagcagtgaattggctttgatttatgaaaatggccctttcaaaatt

SEQ ID NO: 26513 - DNA, 418 bp, Glycine max
ggcatacaaagtggcgcattcttctgttatagtcgtactctggactctgcttctattcttttctacgtcaattcgtgcctccgacgatgacgtggctctgcacgcgaagaagctcatcagagacctcaacttgttccccgacgctgacgtcaacatcggtcccgttgctaattgcacccttcaaccccgcaggatcgtcgagaagcgcctgaggttcccgaagctgctagcttcggattccgagccttcggttgaggatttgggtcaccacgctggctattaccccattcagcattcacatgccgcaaggatgttctactttttcttccaatcacgcgataggaaggaggatcctggcgtaattagggtgactgtgggacctgggtgtatcagtgaatgggctttgggctatgaaaat

SEQ ID NO: 26514 - DNA, 411 bp, Glycine max
ggaggatagataggcctcagaagaagaagagagaggtctctcaacaatggccactgccactgtttcaatttcaactttatgcgctactttcggaacccattgcgccatttcccacaacccaaaacctctattttctcaacctttcaatctcaatcactttccttctaactcttacaagctcgctttctcgcctcgctcacctgtttcaccccttcccaaggcctctgaatccgcggtagccgaaaccgaacccggttcggccgagcccgaaccggcccaaatttccccggcccaacctgcctcctgggaacccggtctcttcgctgtcgtaatgattggcggacgccaatatattgttcacccggggcgacatcttactgttcagaggttaaaaggtgctaatgttaatga

SEQ ID NO: 26515 - DNA, 413 bp, Glycine max
ggtgggattttgagagagagaaatagagagagaacttcaagtgagggtgagagtgacacaaatctagagagagcactagtactctaaaagtctattatattcttcaaaatatgaccatgcatcgcgagtcttgggcttttgtcttcggcgttatgggcaacatcatctcctttggagtgttccttgctccattgccaaccttttaccaaatctacaagaagaaatccactgaaggtttccagtcacttccttatgttgttgcactgttcagtgcaatgctttggatttactatgctttcgtgaaaagggaaactgccctgcttctcattaccattaacacatttggaattgttgtggagtcaatttacctttctatcttcctaatttatgccccaaggaagccaaggcttaca

SEQ ID NO: 26516 - DNA, 296 bp, Glycine max
gcgccagctggggagatgatggctacataccatgtgacctgcaggcatgagttaatctacccttgaccactaagacaggatccagacgatgctgacacaagggtctaggacatgtgaccaaggtggcctatgacgcagattcgcgcactcaagctcttcacctcagtacattccagcgatccggtttagtacgagcgctacatgaccactcattactctatgccttaggcacgattgccatgactgtaatgcgaacagggggtctgctaaaaagttactggtctaagcaacaacga

SEQ ID NO: 26517 - DNA, 419 bp, Glycine max
gagagcgaacagtgaagagaatggctcccaagggtttaacctttctggctgtgttaatatgcgtttcagcactgtcactgagtccttatgatgcggaggaagggcaaaataatggcctcgttatgaacttctacacggaatcatgccctcaggctgaagacatcatcacagaacaagtcaagcttctctacaagcgccacatgaacactgctttctcctggctcaggaacatcttccatgactgtgctggtcacagttgtgatgcttcactgttgctggactccacaagaaggagcttgtctgagaaggaaacagatcgaagctttgggttgagaaatttcaggtacattgagaccatcaaagaagctttggaaagagaatgccctggagttgcatcatgtgctgatatcctcggtctc

SEQ ID NO: 26518 - DNA, 428 bp, Glycine max
gggggccgtgtgtggaagagttgccagcgtcagaaagtcagaaacaacttgacttcttctccttcttcttcttcttcttctctttgaacagaacaacaactcaactcatctcacgattcattcagctttttaaataaataaaattcctttctccctcacaatcacaatgctcttctacccttcaaacccaacatcacacccctcttccttccttccttccctaatactataatttgttacgtcacggagcccaaatgtctgttacggagctcaaagagcgtcactccgctgccaccgacaccgtcaacaatctcagacaccgtttaaagcagaagcgcctttcgttgctcgacacagatgtttctgggtatgcaaggtctcagggtagaacacctgtgacctttggacctacggatctggtttgctgg

SEQ ID NO: 26519 - DNA, 409 bp, Glycine max
gggttgttaaaggagcagttgatgtagacattggtgcaaacccttctgctgagggtggaggagaagatgagggagttgatgatgcaactgttaaggttgttgacattgttgacacattcagacttcaggagcaacccgcattcgataagaagcagtttgttaccttcatgaagaggtttatcaagaatttgactcccaagctcgatgcagagcaacaggagttgtttaagaagcacatcgagggagcaactaaatacctgctctctaagattaaagatttccaattttttgttggtgagagcatgggtgatgatgcttgcttggtctttgcctactacaaggacggcgctgccgatccaacattcctgtactttgcatatgccttaaaggaggtcaagtgctaagtgac

SEQ ID NO: 26520 - DNA, 393 bp, Glycine max
  modified_base (329)..(329): a, c, g, t, unknown, or other
ggttctagtgtgtgattgtttgttgttgtaactcgttcttcttcttttgttgttctgtgtttgtgtttgttttttctctcacctgaaaatgtcttgctgcggtggtaactgtggttgcggaagctcctgcaagtgcggcaacggctgcggaggctgcaagatgtacccagacttgagctacactgagtcaaccaccaccgagaccttggtcatgggagtggcacctgttaaggctcaatttgagggtgctgaaatgggtgtgcccgctgagaacgatggctgcaaatgtggaccaaactgctcctgcaacccctgcacttgcaagtgangtgttgtgagagcaagcttcaagcagagatagcccttaattaggaataatgataaactattaat

SEQ ID NO: 26521 - DNA, 420 bp, Glycine max
gacggtgacggcgctcgacatggacggcactctggttcagcggtctaacttactggacacatgccaatcccctctgatttcgactggatcgagtaaggtcgacacagcaatcaagtgtgcactacacaaccacactcacttttcctgctaaactaaacaaaaatggtatgctccggtagaaattgctgcttcaaatatcctggcacctacttgacgagggggaatgcctcacatcatactaatactatactctgcacaaactcattttgccccaaatttgctgaccccaattacccttttggaaaagatgcacggagtgctcatttctttcaccatgcccacaaacttgacctccttttattccaaatcaacactagttacactcaactttccatcccatttgcaccctttaattctcac

SEQ ID NO: 26522 - DNA, 422 bp, Glycine max
  modified_base (388)..(388): a, c, g, t, unknown, or other
gacacagagaaggaaacatggcgtcggagcaagcagtatgatggtcatcaagcacattgaggaacgttctcaccttccccaaaaccctaatttcaaaaccccaattccaagtcgctgcttctccctcatggaaaacacagcggcgttgggggaacttgaagtgctccatgacgacaacgccatcataccctaagccctcggagattccgtggcagaaggagctctgcaactccgtcaacctcatcggcaatgtcgcggcccccgtcgaaatcaaacacctcccctccggcaaggtcgtcgcctggacccgcctctgcgtcaagaaaagcgccacgcaatcatcgtccataagcctcacattctgggacgacctcgctcatgtcgcgtnccagcatctccagaaaggttaccaaattcatgtc

SEQ ID NO: 26523 - DNA, 412 bp, Glycine max
ggggaacagaaacaagaaaaaaaaactcgcgacaatagggatgaggagtgccgacaggattaattgaggtcagggactgaaagggggtgttctgttctgatcggatctgaaatcatcgggaaaatgtcgtcgtttctgcaccagagaagcagtctccagaacccattctcgaatccattcccggcatcaactccatcatcatcgaattcgaagaaatccctgtccatcatgggccccaccaccctcctagccctaatctccctcatagtcatactcggcgtcttctgcccctgggtgggctttccccagggctttcccttcactcccactcccacttccaaatgggctcactacactttagaacaagcgctctccttcgtcgccaaaaacggatcctccgtcatcgtctgca

SEQ ID NO: 26524 - DNA, 408 bp, Glycine max
gaaggtgcaagagtttgttgtgagctataagctagtttatcgtgaggagaatatgaagttgtttgttttctttgttgctgcagtagttttggtagcatggccatgccatggcgcaggctaccaaaggttccctctccgaatgaaaactggctatggtgagcgttcttcggaggtaaaatgcgcaagttttaggcttgctgtggaagcacacatcatccgagcctttaaaaccattcctgaagagtgcgttgaaccaacaaaggactacattaatggcgaacaatttagatcagactctaaaacagttaaccaacaagctttcttttatgctagtgaacgcgaagtccatcacaacgacatatttatattcggcatagataacaccgtactctctaatatcccatacta

SEQ ID NO: 26525 - DNA, 240 bp, Glycine max
ggacccaaaagcgcaagacaagcacggggccaagcgaacaaagcaaaacgcgcgctcaaaggagccggcgcggcccggagcaacgggcaaagcacgaaacgcaagaagacggagaaagcgagcaacagacagaagacgaagcgggagcagcggaaccctgcagcagacgcccaccccaacgaagcagcctccctacaagctcgagcacgcggggcgggggacagcgctgcggagcaaagg

SEQ ID NO: 26526 - DNA, 413 bp, Glycine max
ggaaaagaaaaatgaaaaatagcacatggccaaaaatatcacctgatctgaaacttggacacgaaagaaaggctcgtatgcgcgacttctctctcttgcattgattcaacgttgtccattctccgaaacatcacaaagaaacccaactgagagagtgaagaataagaagaataaaaagaagaagaagggacgacaacaatggggggtttcgcaatgggttctgccttcgattccaaatctgggcagattattatggctgctttgcttttgatgattatgtccttctatgctggcaacctttttggcaacaatgctcccctttacgtctctcagcttggttctcattcttctcccaacaatgtctcctccaacggtgctaccaaatttactaacaaagttgctctgacttactg

SEQ ID NO: 26527 - DNA, 358 bp, Glycine max
ggagggaaaaaagtagagtggtatgtgggttgctgcggcaacaaaaccattcatcaaattccaattccacagacacactacttctcttccgcttcttctgatggcaaaccaagcttcactctccttttcttcttccgtgtctcctgttcacgcgcctctcaagcgcgtgggcacgcacaacggaagctttcattgcgacgaggccctcggctgcttcatgattcgcctcacgaacaaattcaacagcgccgaaatcgttcgctcccgagaccctcacgtgttggaggttctcgatgctgttctcgatgttgggggagtgtatgaccctgcccgagatcggtatgatcattatcaaaag

SEQ ID NO: 26528 - DNA, 363 bp, Glycine max
ggagcactgagcaggtgcaccaaacaaaaacagcgacaacttcacacacagctgacgcgtaaactaagattcaacgtctgcgctctgcagccaccatacaatagatccttcattctttctctgcaacgatcaaacaacaaaaaacactgcacctcttcttctggatttggtgaagaagaagaagaagaagaagaagaagaaagtgtgatttgatgattatgaattgaagtgtgagaggtgaagagatgaacgtgagccatgcttcgggtcacccaggtgaagaagctccaactactgaagggggtggggaccaaaacgtgaacgctcctaaggtgaggatgaaggatgttcaagggatgcctg

SEQ ID NO: 26529 - DNA, 299 bp, Glycine max
gcatctgacatgtcgtgacatggaacgttggatgattgtggggcaggtggcatcgcgattaacacatacacatcgccattttgaacgtgaaagatgggcatcaatgggaggagaagatgagatggaaatgatcaaagacttgccacaggcgctgaggagggacatgaagcgccatcttcgcctctatctcattagaaaggttactgtattccacatcttggatgatcttattcttgacaacatctgcgacagggtgaaaccgctagccttctctatagatgaaaagataatcagagaag

SEQ ID NO: 26530 - DNA, 342 bp, Glycine max
gaatgtaaaaaatagaggttgaagaagcaagcaccaacgtgaataccctaattcggagggtttcagttttcgccctcttttctcatctccaacatcttcgtcgtcacggaggctagtcttcctgttatcacaaacaatgtctgacggtcaagaatcagacaagaatattgagatatggaagatcaagaaattgataaaggcattggaagctgctcgaggtaatggtaccagcatgatttctctgataatgcctccacgtgatcaaatatctcgggtcactaagatgttgggagatgaatttggaactgcttcaaacatcaaaagtagggtgaaccgacagtc

SEQ ID NO: 26531 - DNA, 418 bp, Glycine max
ggacgaaggtgataataatcggtgccggaacttctggtatcgccaccgccggttgcttaacgaagcaatcaataccttacataatgctcgagagagaagactgtttcgcttcgctgtggcagaaatacacctacgatcgtctccaccttcatttgaggaagcaagtttgcgagttaccgcacttaccgtttcccaagtcttaccctcactacgtgcctcggaagcagttcatagactacttgggaaactacgttaaccactttgagatcaagcctctgtaccagcgtgcagtggagttggtggagtatgatggatggaaagggatttggagagtgaaggctcagaatagaagatctggtgagcttgaggaatacgctggaaagtacctggtcgtggccagtggcgaaaccgccgagcc

SEQ ID NO: 26532 - DNA, 413 bp, Glycine max
gggagagcgaggtggtgtccattgcagttttctaatgaaaacaacaaaatagacacctgttaagaaggaggacaacgatggtgctgccgctatttactgctttcattctctttgcttttattccgaatggattgttagcagttccttccaccgtcccggcattcctttggtcatcacattatgaactggcctctgaaaatatattgaaggaatctgtaaattaccaagtcatttctccgaaggatctagcaaaatctattttatctgaagcaggctggtcaaattttctgtgcaaaggaaagaaatttcatgagcctctggatctggcactcttattcgttggtagagagttacaatcttcagatttaagcatgaacaaacatgcaaactcagctcttttggacctgctcaag

SEQ ID NO: 26533 - DNA, 353 bp, Glycine max
gggcaaaaaaggaggtaatatggagcatgatgggagggcagaccactgaacaaggggattgttcaaaatttaagggaggcattccacattgctgtaagaaagatccgacggttgtagatttgctacctggaacaccttacaatcaacaaattgcaaattgctgcaaaggtggggtgctcagttcatgggtgcaggatccaaccaatgcagtttcctcatttcaagtcagtgttggtagagctggaaccacaaatagaactgtcaaagtcccaaaaaacttcaccttgaaagcaccaggaccaggttatacttgtgggccagctaagattgtggcacccactaaattcattact

SEQ ID NO: 26534 - DNA, 406 bp, Glycine max
ggcgcaagagaagagagagggagtaatggacagagacgaagcagaaaccatggagaatgtggaattcgatgcttctgagattgagtacgttagttacggtggcgagcatcacctccctctcgtaatgaacctggtggaccaagaactcagcgaaccttattccatcttcacgtaccgttacttcgtctatctctggcctcagctttcattcctggcgttccacaagggtaaatgcgtgggcaccgtggtatgtaagatgggggaacaccgtaacactttcagaggctacattgccatgctggttgtcatcaagccctacagaggaagaggcattgctacggagcttgttactaggtctatcaaggtgatgatggaatcaggttgcgaagaggttacattagaagcg

SEQ ID NO: 26535 - DNA, 383 bp, Glycine max
gggagaattaggcaaaatgtttgatatcccaatggatggctctaaatctagaaaatccggtcccataagtaatgctccttcaaggacaggatcatttgcaggtgctgcttcacactctggacctatcatgcaaaatgctgcagctcgttctgcttatatcacatctggtaatgtatctactggaggcatgtctgcttcagcctcaatgaaaaagaccaactctggtccattgaataagcatggggaaccagtcaagaagtcatctggccctcaatctggtggagttacacgccaaaactctggtccaattcctccagttcttcctacgactggtcttattacatctggcccattaaattcatctggagctccaaggaaagtgt

SEQ ID NO: 26536 - DNA, 398 bp, Glycine max
ggctttgcgaaaccaaaccaatctttttatctccaccctttttatttgggaataataataataataagcacttcaaggttgtgaagccttgaaggtgcatcaacacttgtgtcaacacaagaatgaggctctctgttttacttctagtgttcctcgcagttctggctgccacaaggcctagccttgtagactgtagggtccttccttcaccaaaaaacacagagaaagcccctcatgagcctctcaaagtgattcgatttctcatcaatttagtgatggcagaaaaggccaacactagtgagggtaatataagcaacaggggtttgactgagaacaaattccaaaccatgccttcagggccaagcagaagaggttcgggtcactagcaccatgtttca

SEQ ID NO: 26537 - DNA, 421 bp, Glycine max
ggagcagaatgatagcgaataccaaaaaacaagtgtcatcaccttcttcttcttctttccctgattctgttggttccatctcttcattcataccttgatccgtgatctcccaatttctcacttgaaagtatgaagaaagaatagataagtaatggcaggagcagaagctagggctctgtggcagagaactgctaatcgttgctttgtccaagaagatgcataaagagctcccaagttggcttgttgccaatcttcatgtgcaacatccaaatcaggtgatactggacctgccagtacagcagatgaatctgatcataatacaagtaatgttacccattttaacaggaaatcgtcaatttctaatctatcatcagactgtaggtggtggttgcattcacaacctaattatgggtatcaaaag

SEQ ID NO: 26538 - DNA, 324 bp, Glycine max
gggttgaaagtgagcaatgtcgttcgcagtggcattgtgtacaacgtcatcgttcttcccttcccgttttgaaattcgcaatccaaagcagcttcagcttccacctctcctttcaatgtcactgtcgccgaagctaccgttgcatttctccggcaatgccatattcaaccgcaaccacccaaccatgttcaaaattcgagcctgaaactcttcatccaaactcgtcttattgagctccactatcgccgtcacaacagcggtagcgaatcgcgtgctctacaaaatgagcactggccccatgaaagaggacaccttttttatcgc

SEQ ID NO: 26539 - DNA, 412 bp, Glycine max
ggcacaagtgagtttgttgatcgagataactagaaacagtgtgatgaaaatgaaggtccttgttttcttcgttgctacaattttggtagcatggcaatgccatgcgtacgatatgttccctctccgaatgaacactggctatggtgcccgtactccggaggtgaaatgcgcaagttggaggcttgctgtggaagcacacaacatctttggctttgagaccattcctgaagagtgcgttgtagcaacaaaggaatacatccatggcgaacaatatagatcggactccaaaacagttaaccaacaagcttacttttatgccagagacctcgaagtccattccaaggacacatttgtgttcagtatagatggcaccggactctctaatattccatactacaaaaaacatggatat

SEQ ID NO: 26540 - DNA, 401 bp, Glycine max
ggactggccagagggtgcaatctcacgagagagtattaaagctgggatgaagcttccccgactacagaaccttataatgcagcatgttgatcattcagctggagatcttatacatcttttgcaggggctacttagatatgacccctttgaaagacttacagctagggatgctttgaggcattccttctttatgagagatcatcttaggagatgatttttatgtgtttgtaaacgattggtctgcttttaggtgaaagatcactcgagggcaaatatggctgtaaggagcctatgtgccaatgtaaataaatatttaaatttaggcttgtgtggcaagtgaggatgggtattcagcagcatttacacctcaaccttcaagcctgtggttcaaaacgtttatt

SEQ ID NO: 26541 - DNA, 422 bp, Glycine max
gaggaagaatttgatgaatcagacaagtcacatcataatgaagctccagaatatagacgtctaattgcaattcatgctgggaagcctaaaggtggattagcagaatgcctcaaagtggatcctgataaagtgagacgtctaagtttaagtgagcaacagcttgaaaaggctgccataaatcatggacaacaaattgtcaggtttactcagcggaatatactaagggtgtatccaaaaggtactcgcattgactcatcaaattataacccattaattgggtggatgcatggagctcagatggttgcatttaacatgcaggggtatgggagatctctttggttgatgcatggaatgttcagagccaatggagggtgtggttatgttaaaaaaccaaattttctattggagactggtccagatga

SEQ ID NO: 26542 - DNA, 405 bp, Glycine max
ggttcaaggaatgtagagagagcggtcggagactgctatggcgctttgactcttcaagaactaagaagtacagagctgaatccaagtatggctttgcgtaacaccattgaagaatggactgccaggaatgaagctgcacagctggatatggctcgccggtcattgaatatggggagtccagaaaatgagactcttcaggccttaaagtatgtccagcacatctgccgaagaagtcgatcaaacaaatacactgtccgcaatgcaaggcttatcccaatgattgttgacatgctgaagagtagcagccgtaaggttcgttgtagagctctggaaacccttataggtgtggtagaggaagatgacgagaataaggaattgttggctgaaggggatactggtcgcact

SEQ ID NO: 26543 - DNA, 409 bp, Glycine max
gagagcgaagagcgaagagaatggctcccaagggtttaacctttctggctgtgttaatatgcgtttcagcactgtcactgagtccttctgttgcgggggaagggcaaaataatggccttgttatgaacttctacaaggaatcatgccctcaggctgaagacatcatcacagaacaagtcaagcttctctacaagcgccacaagaacactgctttctcctggctcaggaacatcttccatgactgtgctgttcagagttgtgatgcttcactgttgctggactccacaagaaggagcttgtctgagaaggaaacagatagaagctttgggttgagaaatttcaggtacattgagaccatcaaagaagctttggaaagagaatgccctggagttgtttcatgtgctgatat

SEQ ID NO: 26544 - DNA, 418 bp, Glycine max; identical to SEQ ID NO: 26464

SEQ ID NO: 26545 - DNA, 365 bp, Glycine max
ggcacgttgttaaggatgttcctaacaatttgttgaggcacattaccctggataacaatgagaacaaacctgtcactaacagtagggatacacaagaggtaatgttggagcctggcctgaaattaatcaaaattttcaaggaatataccagcaagacatgcattctggatgattttggcttctatgaggcccgtcagaagactattttggagaagaaagcaaagcaacaattcccaaagcaagtatgggaagggaaacctgctgatgagaagattgagataaatggggaagtcaatactcaaaaatctgaagttagcttcgaagtgctcaaggagtcccttgctgaggaggatagtgatgaccac

SEQ ID NO: 26546 - DNA, 347 bp, Glycine max
ggttcgagagtgaagagcgaagagaatggctcccgttgtggaatctttttggctgcgttatgcttctaagcactggcactgagtcgttgtcttgcggaggataatggacttgttatgaacttctacatggaatcatgccctgaggctgaagacatcatcaaagaacaagtcatgcttctctacaagcgccgcatgaacactgctttctcctggctcagaaacatattacatgactgtgctgttcagagttgtgatgcttcactgtcgctggactccacaagaaggagcttgtctgataaggaaacagatagaaactttgggttgagatatttcaggttcattgagac

SEQ ID NO: 26547 - DNA, 162 bp, Glycine max
gacgaaacaatagtagaactagcatctcaatacccgagaacgtgtgaacgaaaaatagcgtttattttaaactagaagactagaagattacgtatttgattatgcatagcggtgcacatattacataatccagagtccagaactcacactatatatataagc

SEQ ID NO: 26548 - DNA, 403 bp, Glycine max
ggaagaggaaggggcaagagaaaaaagaactagcgggcggggggctgagaaccctaacatgtactagtactactactacattcctgcatattactttgtactatttttttttaaccatagaatcaagagcacaaagatggtgagagctccttcttgtgaaaagatgcgcctgaagaaagagccctgagctacccaggaagatcaaatcctcacatcttacattgacaaacatggacatgggaattgtcccgcccttccataacaagcaagcttgttaaggtgtgggaaaagctgtatactacactggattaactatgcgaggcccgatattaaaagacggactctcacaattgaagaagaagaaactatcattaagctgcatgacatgctgaagaacaggtgg

SEQ ID NO: 26549 - DNA, 403 bp, Glycine max
gacacacaacatttacatttctctctccagtatggcttctactcacaatgagttttatgcacttatgctagtggtggtggttggctccatggtggcttcctgtggtgctaacttcaaccaagactttgatctaacatggggtgatcaccgtgctaagatattcaatggtggtcagcttctatctctttctctggacaaagtctctggctccggcttccaatccaagaaagagtacctatttgggaggatcgatatgcaactcaagctcgttgctggcaactctgccggcactgtcactgcttactacttgtcgtctcaagggccaactcatgatgagattgattttgaattcttgggaaacgtgagcggtgacccttacattctccacacaaacgtgtttacc

SEQ ID NO: 26550 - DNA, 369 bp, Glycine max
gagggcgtcagagggagagaagctcttgggctagatatggatgaacagctactagttgtgagatggggctttaatgctaagccttgatgaagcatgtacagattgcggttgctcattcatgcgaagagtcataacgagtggatccctggtactgacactgtggactgatgtggaaggtgaggacatgaactacacggaacagattgtcgtaggtgctataccaaggggatggcgagtcagggactacgagcgcgtatagatgggggctatgaagatagtgaaccctgacacttaggatcgtgagagcgttacgatcgagctccgatacctcacggtactgcggatggaagatcagccgctacatgatga

SEQ ID NO: 26551 - DNA, 415 bp, Glycine max
catgccacaggttaaaatgatggtagtacttggggaacttggtgggcgtgatgagtattccttagtggaggccttaaaacaaggaaaggtatccaaaccggttgttgcctgggtcagtggcacatgtgcacgactcttcaaatctgaagtacaatttggtcatgcaggagccaaaagtggtggtgagttagagtctgctcaagcaaagaatcaggcactaagggacgctggagctgttgttcccacatcatatgaagcttttgaagctgcaattagggaaacatttgataaattggttgaagaagggaagatcacaccaatcaaggaaatcacaccttcaccaatccctgaagaccttagtactgcaattaagagtggaaaagtccgtgctccaactcatattattttcaccatt

SEQ ID NO: 26552 - DNA, 406 bp, Glycine max
ggctgagttcagaacaaaacaagagaaaaaaaagggtttcacactttgtccaatctttcacactgaactcttcaattttcaattctctttttcatgcaccactcttctttttcttcagacaccttcatcatctgcataccgcttagctccaaaaactacacacacaagaattctgtttctttctgttgatttgatggatccgcaggtctaatggtttcacacactttcttcactacggatcattgtcttcttcatctggggcaccccaatagcttcttctaatcgatagtcaaattttgttggtttgtggtggatcatcttcgtcgttgtggtgactagtgaggagtgcaggactatacctatctatatagtgtatgaaaattctggggggtgaagtcgtttttgg

SEQ ID NO: 26553 - DNA, 409 bp, Glycine max
gtggaacatggagacattgcaaacagaaagtactccggaggaacacagtcttattattactgatgttcgcttcagaccaaattcaactcagctggcaacatcttcgtttgatacaactgtgctgctgtgggatgctgcagatccaaccttccctttacatacatatagtggtcatacttcacatgtggtgtcccttgatttccacccaaagaaaactgagcttttctgttcttgggacaataacaatgagattcgcttctggagtattagtcaatattcttccacacgtatttttaagggaggatctacacaggtgaggttttagccaaggcttggtcaccttctggcttcagcaagtggcagttgtgtgtctctccttgatgttgagactgacaggcataatcacaca

SEQ ID NO: 26554 - DNA, 353 bp, Glycine max
ggaggaaggaagatgagtttgagggcatcagagatagcgaagaagttgaatctgcaacctcacccataaggtgggttttacgtggagacattccgagaccattccgtccagctttcgacctctcagctcccccccgaatacatattggatcgccctgtatcgacctccatctattttgtcgttccttatgggagtgtgtcttgccttcatcgcataccctgcgccgaaacctggcatcattacattggcgacactttcacccgattggaattgaatgagaaagatgggagcgtataatttacttgccttggatcagatctgactcagaatcatgggtccgattacacggtgcc

SEQ ID NO: 26555 - DNA, 384 bp, Glycine max
gaactcaaacagggaggatcatttctgatcgatttattgctgacgatttggaatagtgacaagtaaagacaaatcacaactcacggtcatccaattccaagaatagagctttacgaggcagcggcttcaaaaggaggggaatattcagaggaaaagaaagagtagttgttgaacaacaagagctttcctcattcttagcttatctcacaaggaaggtacgtaagatccttaacacccttaccgcggttacttgccgcctcaatccattgctgaaatgaatgctcataaataaatatatttgcaggctacgaatctccgctcctagattcttgcttcttaattatcaatctagtgtctaaattatattaaaagacttaatttgat

SEQ ID NO: 26556 - DNA, 374 bp, Glycine max
ggggagatggagcggaagtggagcagtgaatctggtgggaatgtgatatcgtcgccatcacactcgcgtaatgggcattctcgctcctcttcgctcactatccccggaggaggaatttcaaccgtcaaaaggactcagaatgttgctgccaaagccgccgctcagcgcctcgcccaggtcatggcttctcagactgccgacgacgacgacgacgacgaagacgatctaggatttcgctacactgctcctccacctctctctctttccaagagctctgctagatctccatctcctgcgttagctcggaacctcgtagaagaatcatcaatgtatcttcgcccagcaccacctgctgctggtaataatagaccacc

SEQ ID NO: 26557 - DNA, 414 bp, Glycine max
ggagggtgcattgtgtcaaacctgttggaggtaaaaagacccagtttattgtaatgggcaatgtgttttgctcggagtaccagatccacaagaggtttgacctcaaaggctcttctcatggtcaatctacagataagccaagggaacaaattgatgagactaccactctcaaagaccttgatcttaactttgtctttcgccttgaatagtcttggtttcaagagcttatatggcaacttggtagagattgtgagttcctggaagcaaagggaatcatggattacagtcttctaattggcctgcatttctgtgatgatagctcagttgatgaaatgaaaagttcacctcgcagttctcattcatgcaagagagacatgcttgataatgagatgctcacatgctggtaagttcttt

SEQ ID NO: 26558 - DNA, 346 bp, Glycine max
ggatagagagaggtgaaaagaaacgtcgcataaaaaatcagataatgcgtgcggctctgactcaacccacctgggacctggctcggaagcgctaagaaagttacaaagctatcttctactttcttctctgtggtgtgtgtggtgatggtggttgtggcgccggacgggaataaaatttgctgtttgaaccgcccagagcagagacttatttgtatggtaccccctattctatttaatggactgtgttctggagcgcatcaagggagagtgagctcatacctagcactgaataggcctggcacgtgcatgctgtatctgatgcacatcgtggggcatagttacagag

SEQ ID NO: 26559 - DNA, 136 bp, Glycine max
gaccacttggataaacgaacttggacttatatctttggagcttgctgtgccacctctgtgttcataccttcttttcacaattaccgtatttggtcttttctgggacttggaatgaccacttacactggttgggact

SEQ ID NO: 26560 - DNA, 418 bp, Glycine max
gagagaaaggatgcggaaagagatcttttggccaaactacttgtgggccttgtgaaatctcatcatggaaccttgaatcaagttcagctcattaaagggtttgaatctgctctcagtacattggaggatgctgttaatgatgctcccagagcagcagagtttcttggccgaatttttgcaaaagccataacagagaatgtagtttcttcgaaggagattggtcagttaatacatgatggttgagaggagccaggtagtctcttagaagttggacttgcagctgatgctcttggatgcacttttgaggtaattcaaagcgagtatggggacgtggttctaaacgagatgcgttcaaactctaacttgaggttggaaactttccggcaacctaatgctaatacatcaaggtagttggaaa

SEQ ID NO: 26561 - DNA, 400 bp, Glycine max
ggtggaaaaactgaagattatgatcatgaagataaacaaagtggtgtcactttcttcagctgcagctcttaaatctgtgtgttccaaaactttttgaggtaaagtctcaaaactttctctcttttctcattaatcacattcttgcttaattagctcttcttttacaaattcttcttcattatattcagctgcagctcttaaatctgcgtgctccaaaactttttgaggtgaagtctcaaaactttctctcttttctcattaatcacattcttgcttaattagctcttcttttacaaattctccttcattatattcagctgcagctcttaaatctgtgtgttccaaaactttttgaggtaaagtctcaaaactttctctcttttctcattaatcacattct

SEQ ID NO: 26562 - DNA, 399 bp, Glycine max
gggggaaggtcgagtagtgtgccagataaatcctgccagcgttcctctcgcagcatgtctgtcagtcctgatcgtgttcgtgtgagggggcggtctccagcctttaatgctctagcagctaattttgagaaccctaattctaggaacctttcaaccccacctccagtaattagaaagctgtatcctaaatctgtgacaacagattctgcaatactggcgccaaaatcttctgccatagctgcacttagttcttcttttgaacaaccaccttcagcacgagaaaccatgatacctcgctcacttaaagtgagtccagtaatgcccaaatcataccctgagaaaaatgacaaggagaattctgtgagcaccagagtggaatctcttaccatacaggaagat

SEQ ID NO: 26563 - DNA, 417 bp, Glycine max
ggatgactgatgaagaatttgcaagagaaacgattgctggtttaaatccaaatgtcattaagattatagaggagttcccactaagtagcaagctagatactcaagcctatggtgatcatacctgtataatagcaaaagaacatttggagcctaacttaggtgggctcactgttgagcaggctatccaaaacaagaagttgttcatcttagatcaccatgactatctcattccttatttgaggaaaataaatgcaaataccacaaagacttatgctacaagaaccatatttttcttgaaagatgatggaactttgacaccattggccattgagttaagtaagccacatcctcagggtgaagaatatggtcctgttagcgaagtctacgtgcctgccagcgaaggagtggaagcttata

SEQ ID NO: 26564 - DNA, 402 bp, Glycine max; identical to SEQ ID NO: 26485

SEQ ID NO: 26565 - DNA, 364 bp, Glycine max
ggtctgtttaagtgtgaatccctttccctctctacttttttgtggactttccatttccattctcattttttctggttcactttctcgatggcctccgataaccccaccgtctacgacgccgtctacgtgcttcaagcggccggtaatgttctcggaaaacctagccgtcgccgtctacgcctacgtccgccacgtgttcctttgcttcaatagaaacctgctctggtccccgatcatcgtgaccttcgactcctatcccttttccttgtgcgttttcaccatcttcatagcccgttagatctactttgcccttatgtcgtatattacctttatctaagttcattatggaggctgtcttcctctt

SEQ ID NO: 26566 - DNA, 409 bp, Glycine max
ggagcctgagtgtgacaagctcataatggcttcacttaacaagaactacgttgacatggatgagtatcctgtcaccactgagctccagaaccggtgtgttaatatcatagcaaatctattccatgctcctataagtgatgatgagactgcagtaggtgtgggaactgtggggtcatcggaggcaataatgttggcaggtctagcttttaaaaggaaatggcagacaaagagaaaagcagaaggcaaaccatatgataagcccaacatagtaactggggctaatgtgcacgtttgttgggaaaaatttgcaaggtactttgaggtagagctcaaggaagtgaaactcatagaaggatactatgtgatggacccttgcaaagcagttgaaatggtagatgagaacaccatc

SEQ ID NO: 26567 - DNA, 416 bp, Glycine max
gacacacagagacatttttctttcttagaagcgtgcaccacacggaacctcgcaattccttcacacccaccataataataatatcttcattgttcttttcttctttgttaccattaaaaacacacacacacacacaacaacactctgaaactaacaacaacaataaaagaccatgtcggtgaaggagtgcgagcaccacaaggggaagaagaggaagatcttccggcaagtgttctggtgcttagtggtgttccttttcatcgtgctggtcacaattcttttgatatgggcaatccttagacccaccaaacccaccttcacgctccaagacgtcaccgtctacgccttcaacgccaccgtggcgaacttcctcacttcgaattttcaggtcacgctcatctcgcgtaacccgaacg

SEQ ID NO: 26568 - DNA, 248 bp, Glycine max
ggagttagggtgcgttgcaagcagtgacatctggcctttggcgactagatgaccatgccacttccccatcggccgttattcatagacagatactggaaagtgcccgtcctcaagaatcggatttcgattatcaacccttacaccctacacctaatcatggatatcccatttcctactaatgaagacgtagatctcgctgtcgctgtcgccaaagctgaactttccctcttcaaggacacgggttgggc

SEQ ID NO: 26569 - DNA, 245 bp, Glycine max
ggagaattgttctacgtcgtcaaagaccccgatttagggggtaaaaaatatcgattaacctctgatatttctcttaactgcagcctgcagtgagactaagaaaatcttcgaacccgctacttcctattttctatcctttcaaaagagaaaccggaaaagttagcttaacgtcatatcttgatcgtcgaacaaaacgaaaagaaaagcggtgaaaatggctcaagagtcactctcagaaacccctg

SEQ ID NO: 26570 - DNA, 364 bp, Glycine max
ggtgagacgagggtaatgtcgcgttgtggtgccgcgtgtcgggctctgcctctgtgtgtggcgtttgtgtttagagaccacactctatctgcgtatcggacccatgtagaccaaacagggtggaagatctgactctttgaagacacccaagtgtgataacagggatcacgacgagggtgacatggctaacattcaaaagaaacaggaagaggagagcgctctaagagacttgagcgccagggcacaacaaaagggaatctttagaggctgtgggctcaaaaaaagtggagagatataggggctctatatcaagagtgtatacatactatattgacccctggagtatattaccatgatcacttgt

SEQ ID NO: 26571 - DNA, 335 bp, Glycine max
gtatgttaaaagtgttcaaagaactgtcatttggatgggaaaaagacaggaaactgtggaagatgtcccctgtggtaacactgttgctatggttggtttggatcagttcataacaaagaatgctactttgactaatgaaaaggaagttgatgcccatcccattcgagctatgaagttttctgtctcacctgttgttcgtgttgctgttcaatgtaaggttgcatcagatcttcccaagcttgttgaaggtcttaagcggttggccaagtcagatcctatggtcgtttgtaccattgaggagtctgttgaacacattgttgctgatgcttgagagc

SEQ ID NO: 26572 - DNA, 417 bp, Glycine max
ggtcaacttaggctggagaaccgatatcaaaatgtaatgcacacacaacacaacacaacagcgtggaacgagacaactaagtacgaaaatcgttatccgccgcaacagccactaagatgttctttgagtcttggcacgccacgtgtcagaactgccaacagatagccccatctctttctccttctccctaaacctcgaactcagcacccccatccactggtgattgtttgattgagccttgaagaaatggaccacagcgctgatgcacatcgcacggacttgatgaccataacgcggttcgtgctgaacgagcaatccaagcaccccgagtcacgcggcgatttcaccatcttgctcagtcacattgttctcggttgcaagttcgtttgttccgctgtcagcaaggctggtcttgct

SEQ ID NO: 26573 - DNA, 396 bp, Glycine max
gaagtacaagcagagagttacagcacatatttctttttcttttccctttttcctaggcacagcacacgccctctcaaatagaaactgagagatgaattctgatcagtttcagaagaacagcatgttcgtagaaacccctgaagatggtggcaaaaacttcgacgatgatggacgagtcagaagaacgggtacatggataactgcgagtgcccatatcataacggcagtgatagggtcaggagtgttgtcacttgcatgggcaattgcacaaatgggttgggtggctggccctgccgttctctttgccttctctttcatcacttacttcacttccactcttcttgccgactgttatcgttcacctgatcctgttcatggcaggcgaaactacaccta

SEQ ID NO: 26574 - DNA, 364 bp, Glycine max
ggtatcgcttcagagttgagaccaagacacactcgttcatatatctctctgctcttctcttctcttctacctctcaagtgtttgaagtataaagatggcagagacattcctattcacctcggagtccgtgaactagggacaccctgataagctctgcgaccaaatctcctatgctgtcctcgacgcttgcctcgaacaggacccagacagctaggtttgctgctattcatgcaccaagaccaacttggtcatggtcttcggagagatcaccatcaaggccaacggtgactactagtagatcgtgcgtgacacctgcaggagcatcgtcttcatctcatacgatgcgggacttggttcttgtcaa

SEQ ID NO: 26575 - DNA, 256 bp, Glycine max
gacacaaaaacggctaaaaccataacaagaatggggtttggctcaaaaaaaaagaagaagaagaaatgttagggttaggatgcttaaacctcaatcgattctctcacttcccatccccttcctctctaccatcctctcgttccgatttacttaaggttgcgtctcgtagattcgctttatcagtgactaaaacgcaacaatctccagtcactaagccacaatccaccttcaccgctataattgaaatagattaccc

SEQ ID NO: 26576 - DNA, 423 bp, Glycine max
ggattccagaaagtttgataaatgagtgattgtgtgtctccaaaagtttatgcactttggaaaggaattttctgtctcataaactctgttcaaaggattttaataatttgtttctggcttagaccattccatgattgctctcctttcttgggggtccatttttttttctcagtttataattataataattgaagcttttgaaccctctcatgtttcattaaattctgtgccctcaaaggggtactgttgaaccattttttttaatctatatacttggctgcggattgtccactcaaaatctttacaaagctttatctccaatggatttgattaccacttttattgtcttcctttatgatgctttaacttctttcatgtcttatccgagttaacaagaccaaattctaaaattaaaatattgga

SEQ ID NO: 26577 - DNA, 422 bp, Glycine max
ggtccgttgcaatatcggcagaagagagacaccaacaaccttccattggttgatgacacatcggatggagcatttgtccagtttagggggcggtttaaggtcacgccggcagatctcagtccaatgggtccttcaaacagcacatctggcccacttgttagtcctaccagtccaccaaatccaaatttcctgtctgtagctattcttccatcactgcagtgcatcttgcaacagaacggtttgcagagggaagagattattaaattaataaaatatgcagagcaatcttctggcaagaatacagaatcaatggaggcagggatagttgatattttgcaggcaccacctgcatcaactagggagcgagagctgcattttcaggtgattcaactccagcagagcaatggaatcctttttgagga

SEQ ID NO: 26578 - DNA, 427 bp, Glycine max
ggaaaagaaggtagagaaggtgttgtgaaaggttaagatcgagaaattagggtgaagtgaaggagaagctcttgagaaggtatagttcttgttcttgctcatgctcccttgtgttttgtgtgactcgttgttcttgttcttgctacatttttatctttaatttacgtgcttctaatcatgttaacattagtgttttgtttcaccttctacacatttacacatttatcgtctcaaatctcaaatacaaagcacctatactttctttctcccaaaataattgatcgtctcaaatctcaatttaataaatgtattataaagtcttttaacataagattcttttttaaaaaagacaaaacaaaacattaatataaaccagaagatcgttatcacttatggtaattaataagtgataacgatttatatttct

SEQ ID NO: 26579 - DNA, 391 bp, Glycine max
ggaagaaggcatggagcagtggtggatgtgggggggtaggagcactagagatgggaagctgcccgggacccatagagacacccgctcttctcctatctactcgtaaagggcttcctcactttatctcccctgacctactcacttctctcccttcccccgattcccatctccttcaaatttctccactccactttttggaaggacttgcttcaaccactatatcaaaattaggagggcttcaccaaatgcttggtttgcaccaatatggaatggcggctgtagccagggattccattcaatgccttcctgagtctaagggagctaccaaactcggagcctcttttgaaactccttgtggtcggcttgtgtttaaacccaaagattatgttga

SEQ ID NO: 26580 - DNA, 367 bp, Glycine max
gacaagaagaagaagaagaagaagaagaagaagggttggttggtcccattccataggaagagatcaaagagaagagaaaagatgtttgagccgcagcagctatacactcgagcgaagaccgaggaattcgacctcgaatcaggggaaaccctctacccagggctgagcgtcggcgagaaccagctccgatggggcttcatccgcaaggtctacggcattctcttcgcccagatcgtcctcaccaccctcgtctctgtcaccaccgttttctatactccaatcaatgacctcctcaagggcaatttcaccctcctcctcatccttctcttccttcctttcatccttttgattcccctgttgaagtacc

SEQ ID NO: 26581 - DNA, 289 bp, Glycine max
ggtggttggcttgctttcactctcttctctgcaaatgcttcattccaagatgcttaggactctgtatgctgatgaagacaacactcataccgtgggaaagaaagatgctgctggccatgtggcttaatttagttcgtgcttcctttgtcttcttgagttttatcagatacaggagtgcagggatcactagctctttcattgggtcagagtggtcggcagtagacattccccttgatcatgaagcatgttgctgaccaaagggttataatgcaccttattcaagtgcaca

SEQ ID NO: 26582 - DNA, 326 bp, Glycine max
ggaggaagaggaggagtaacaaaacaagtatgtcagaatcaaacgcaattgcaaatggtttggctggtgcaggtggtggaattattgctcaaatcataacttatcctcttcaaacggtaaacacgcgccagcaaactgagagaacactcaagaggaacaagcaaagtttgcccttcaactcaaccactggtcctggcactcttcttcagatctttcaggtcattggaactgaaggttggggtggactctatagtggcctcaagccttctcttcttggaactgctgcttctcagggaatttactactatttctatcaaggttttaag

SEQ ID NO: 26583 - DNA, 396 bp, Glycine max
gagtgagagacggaaagtgcaaagccaccgtcttctcttctcagagcttggctttgcttatcgattctctctcctctcatctttctcattcaaggtttgtaaaagatggccgatgctgaggatattcaaccccttgcttgtgacaatggaactggaatggtcaaggctggatttgctggtgatgatgctcccagggctgtctttcccagtattgttggccgacctcgacacactggtgttatggttgggatgggtcaaaaggatgcctatgttgctgatgaagcccaatcaaaaagaggtattcttactctcaagtatcccattgagcatggtatagtcagcaactgggatgacatggaaaacatctggcatcacacattttataatgaacttcgt

SEQ ID NO: 26584 - DNA, 290 bp, Glycine max
ggtacaagcagagagttacagcacatatgtctctgtctcttccctttttactatgctctgaacacgccctctcaaatagaaactgagagatgaattctgatcagcttcagaagaacagcatgttcgtagaaacccctgaagatggtggcaaaaacttcgacgatgacggacgacgtaaaagaacgggtacatggataactgctagtgcccatatcatatcggcagcgatatggtcacgaacgctggcacttgcattggccatttgccacatgggctgggtggctggccct

SEQ ID NO: 26585 - DNA, 261 bp, Glycine max
gggatggagaaagtgaaggtgctccggggactcctggagacaccaggggctcaccaggggtcagcctgttttgacgctgtgggtgcgaagctcatagtattcgctggctttctctactgcgtcaccagtggcttgtccatcgccgcttccaggttggctatgacggacaccgtgttcttctactacggcgatgtgctggagcatgttctactcatctctcaagccgtttgcattgacgtcattggcgacgcctacaacggc

SEQ ID NO: 26586 - DNA, 393 bp, Glycine max
ggaagagaatggctcccaagggtttaacctttctggctgtgttaatatgcgtttcagcactgtcactgagtccttctgttgcgggggaagggcaaaataatggccttgttatgaacttctacaaggaatcatgccctcaggctgaagacatcatcacagaacaagtcaagcttctctacaagcgccacaagaacactgctttctcctggctcatgaacatcttccatgactgtgctgttcagagttgtgatgcttcactgttgctggactccacaagaaggagcttgtctgataaggaaacagatagaagctttgggttgagaaatttcaggtacattgagaccatcaaagaaactttggaaagagaatgccctggagttgtttcatgtgctg

SEQ ID NO: 26587 - DNA, 418 bp, Glycine max
gacacagagtgagatatagaatcactgaagagcttccttcaatggcggtttcttctctctctgttactcctctttcgctctcaaattcttccccctctctatcttccaagccaaagtttccatctttgtgttttctctctggcaacaacaccacattgagggtaacatgcccaaaacctctgcactcatccactgttgttcatgttgctaccgaagcgttggattcatcccctgatcccttggacccacctccagaaacccttgatgatgactctgacgccaccacctttgaggttggtgacttggggactcctagcacttcagcaattagcattggtggcgatgcagatacaatggcaccaaagcagaagattagaatcaagcttaggtcttactgggtgcccttgatagaggattc

SEQ ID NO: 26588 - DNA, 368 bp, Glycine max
gaagaaggaaaggatgggatgcaagattccccaccacacgggttaacgatggcctcttctatcgaaaagctcctagaaagtggtcgtcccttccttcgcggtgatctggagtccatcgtcaagaacttacctcggctggttgccgtcctgcatagtgtgcgtgccggagagtgctgtcacaaacacggtagttttcgtcaccacctcgtcgacgtatttggcattctcaagctctggaaagcccgtcactctgtctgtctctgtggactcttccactcaggctactccaatgcttacgttaacctcgccatcttctaccctttaaccgaacgagaagaggttcgtgcactccttttctaggaagctga

SEQ ID NO: 26589 - DNA, 52 bp, Glycine max
aaactccacttagggtgagacaggaaccgaaataaagctagatcacacaacg

SEQ ID NO: 26590 - DNA, 195 bp, Glycine max
aactcagctttcaacattttccttttcactttatgtgtgagcctactcgtttctcaatgagaagcacttatccctgcaaagcgcacttttgctctttggcgtcccttgctccttgttatcaccttctgctatgctacttctactgctgctgcaacaactcaagctttagtgaatgagaatctgccactgacaaac

SEQ ID NO: 26591 - DNA, 402 bp, Glycine max
ggcatccaaaatggcgcattcttctgttatagtcttcctctgcactctccttctcttcttttctccgtcaattcgtgcctccgacgatgacgtggcgctgcacgcgaagaagctcatcagagacctcaacttgttccccgacgctgacgtcaacatcgttcccgttgctaattgcacccttcaaccccgcaggatcgtcgagaagcgcctgaggttcccgaagctgctagcttcggattccgagccttcggttgaggatttgggtcaccacgctggctattaccccattcagcattcacatgccgcaaggatgttctactttttcttcgaatcacgcaataggaaggaggatcctgtcgtaatttggctgactgtgggacctgggtgtagcagtgaattggc

SEQ ID NO: 26592 - DNA, 404 bp, Glycine max
tccgaggggggcatccaaagtggcgcattcttctgttatagtcttactctggactgtgcttctattcttttctccgtcaattcgtgcctccgacgatgacgtggctctgcacgcgaagaagctcatcagagacctcaacttgttccccgacgctgacgtcaacatcgttcccgttgctaattgcacccttcaaccccgcaggatcgtcgagatgcgcctgaggttcccgaagctgctagcttcggattccgagccttcggttgaggatttgggtcaccacgctggctattaccccattcagcattcacatgccgcaaggatgttctactttctcttcgaatcacgcgataggaaggaggatcctgtccgaatttgggtgactgtgggacctgggtgtatcagtg

SEQ ID NO: 26593 - DNA, 259 bp, Glycine max
agtggaggattgataggcctcagaagaacaagggagtggtctttaaacaatggcctctgccactgtttcaatttcaactttatgcgctacttttcgaacccattgcgccatttgccacatcccagatcctctattctctcaacctttcaatctcaatcacttttcttataactcttactagctcgctttttcggctgggtcacctgtttcaccctttgctaaggcctttgaatgcgccgtagccgaaacctaacccggt

SEQ ID NO: 26594 - DNA, 81 bp, Glycine max
ggtgcaattcatgagagatgcgaaacatggggctatcttcatgccagcgtgactatgccccaaacatatcactgatcacta

SEQ ID NO: 26595 - DNA, 201 bp, Glycine max
atgcgcgagtacacctgagagggggcgccacctgaggagatgatggctacataccatgtaaccttcatgcatgtgttgatctcccctagaccactgagacaggatcctgacgatgctgaccatgcgtataggaagttaccatggtggcctttgacgcagattcgctcagtcacgctcttcacctcagcacattccgcgatc

SEQ ID NO: 26596 - DNA, 411 bp, Glycine max
agggagagcgaacagtgaagagaatggctcccaagggtttaacctttctggctgtgttaatatgcgtttcagcactggcactgagtccttatgttgcggagcaagggcataataatggccttgctatgaacttctacaaggaatcatgccctcaggctgaagacatcatcacagaacacgtcaagcttctctacaagcgccacaagaacactgctttctcctggctcaggaacatcttccatgactgtgctgttaagagttgggatgcttcactgttgctggactccacaagaaggagcttgtctgagaaggatacagatagaagctttgggttgagacatttcaggtacattgagaccatcatagaagctttggaaagagaatgccctgcagttgcttcatgtgctgata

SEQ ID NO: 26597 - DNA, 258 bp, Glycine max
gggggccgtgtgtggaagagttgccagcgtcagaaagtcagaaacaacttgacttcttctccttcttcttcttcttcttctctttgaacagaacaacaactcaactcatctcacgattcattcagctttttaaataaataaaattcctttcttcctcacaatcacaatgctcttctacccttcaaacccaacatcacacccctctttcttccttccttccctaatactataatttggtacgtcacggagcccaaatgt

SEQ ID NO: 26598 - DNA, 410 bp, Glycine max
gggttgttaaaggagcagttgatgtagacattggtgcaaacccttctgctgagggtggaggagaagatgagggagttgatgatgcaactgttaaggttgttgacattgttgacacattcagacttcaggagcaacccgcattcgataagaagcagtttgttaccttcatgaagaggtttatcaagaatttgactcccaagctcgatgcagagcatcaggagttgtttaagaagcacatcgagggagcaactaaatacctgctctctaagattaaagatttccaattttttgttggtgagagcatgggtgatgatgcttgcttggtctttgcctactacaaggacggagctagcgatccaacattcctgtactttgcatatgccttaaaggaggtcaagtgctaagtgact

SEQ ID NO: 26599 - DNA, 335 bp, Glycine max
ggaattgagatggtgaccgaggagggacaaagagagttatcagctaaagatactgctttgtgcacttcctgtcagatgcttgtggtttggattcagaatcaactaaaacaaaagaagaccaaggagatagtattcaactatgtaaatcagctgtgcgagagcttgccaagtccaaatggagagtcagtagtagactgtaatagcatttatggattgccaaacatcacgtttactgttggagacaaacctttcaccctcacccctgagcagtatattctgaaaactggagaaggcattgcagaagtttgccttagtgggtttattgcttttgacat

SEQ ID NO: 26600 - DNA, 199 bp, Glycine max
  modified_base (120)..(120): a, c, g, t, unknown, or other
  modified_base (141)..(141): a, c, g, t, unknown, or other
gatctcaaagaaaataaaatcctcaattttctgagcagccatacgctctctctctggctctcgaaaattctcattttgcatagaaaatctgaatcatgttttggcaagcgtatgtctacnatcaccttctgtgtgacatcnaaggtaaccacctttctctttctgctatcatcggccaagacggcatcttttgtgctca

SEQ ID NO: 26601 - DNA, 128 bp, Glycine max
  modified_base (92)..(92): a, c, g, t, unknown, or other
atcttctaaaagactacttaatgaatattcaagacatcaattctaaaggggcctattggatctttctatggctctccaaaaaactaaatttncacagaaaatctaaatcatattttatcaagcttatt

SEQ ID NO: 26602 - DNA, 241 bp, Glycine max
  modified_base (67)..(67): a, c, g, t, unknown, or other
  modified_base (158)..(158): a, c, g, t, unknown, or other
  modified_base (160)..(160): a, c, g, t, unknown, or other
  modified_base (236)..(236): a, c, g, t, unknown, or other
tacttaatggggtaagacgaagatctaaaacccgatttattcggcgatcgatctggtgtggaaggtntcaattgtcaatttgtgattgtgggaaaaagatgccgcataggcactcgatgaacaacaacgatcttgcgttcttcacgtactatgagaancnaaaactatgttatgggacccagaaggagaggttgtgcaaggactccattaagcccttcgatgcttgctctctctgnctcaa

SEQ ID NO: 26603 - DNA, 296 bp, Glycine max
gggaagttgaagatctgaaacccgaattatccagtcgatcgatctggtgtggagggtgtgaattgtgaatttgtgattgtgggaaaaagatgccgcagaggcactcgaagaacaacaacgatcttgcgttcttcacgtacgatgagaagcgaaaactaggttatgggacccagaaggagaggttgggcaaggactccattaagcccttcgatgcttgctctctctgtctcaaatccctaattgatcctatgagctgccagaaaggccatctcttttgcaaagagtgcattcttcag

SEQ ID NO: 26604 - DNA, 407 bp, Glycine max
gggtgtgctgatgtaacaacgaggcagaattgggaaattcgtggtgtggtgctacctgatgtgccagaaattctcaagggcctcgatgaggttggattgactagtcttcagagtggaatggacaatgtgagaaaccctgttggtaaccctcttgcaggcattgacccagatgagattgttgatacacgaccttacaacaacttgttatctcaattcatcactgccaattcacgcggcaacccagccatgtcaaacttgcctaggaagtggaatgtgtgcgtggttggatcccatgatctgtttgagcatccccacattaatgatctggcttacatgcctgcaaacaaggatgggcgttttggattcaacttacttgttggtggtttcttcagtgccgagagatgtgc

SEQ ID NO: 26605 - DNA, 407 bp, Glycine max
gggtgtgcaaaagtaaaaatgtgggttcttgggtggaaaggggcatcagggttctcagcctcttccacagccgaacaagtcactcaagggattgatggaaccgccctcaccgccatcgtcacaggagcaacaagtggccttggtctggagaccacccgggttcttgcattgcgcggtgtccatgttgttatggcagtaaggagtctggacagtggtaaaaatgtcaaaaaaaccatacttaagggaatcccctccgctaaaaatgatgtcatggaattagatctaaactctatggcatccgtaaagaaatttgcaacaaattttaattcttctggtcttccactcaatattctaatgttagaacctttaactctatctggtttagatatcttaagtgatattttttg

SEQ ID NO: 26606 - DNA, 144 bp, Glycine max
  modified_base (20)..(20): a, c, g, t, unknown, or other
  modified_base (29)..(29): a, c, g, t, unknown, or other
  modified_base (59)..(59): a, c, g, t, unknown, or other
  modified_base (75)..(76): a, c, g, t, unknown, or other
  modified_base (87)..(87): a, c, g, t, unknown, or other
ggttaaagagatttacagangtactcctnctctgtcttattgttaagatttcaattcancattacaacccttatnncattatcttanctgtttcatatttaagatagaatcctacttataatctgcatcttagatttctacatc

SEQ ID NO: 26607 - DNA, 199 bp, Glycine max
  modified_base (175)..(175): a, c, g, t, unknown, or other
cccacgcgtccgaccactccttctgcgagtttaccacataaggaaatggaagggctctttggtgaatactcatcgatccacccacacataaacacaccaccacaaataactcaacttatacatgcaaccgtccttaccgtcatcttcacatgaacaacaagtggcactttttctngttaccacctcaattcttgcattg

SEQ ID NO: 26608 - DNA, 325 bp, Glycine max
  modified_base (7)..(7): a, c, g, t, unknown, or other
  modified_base (45)..(45): a, c, g, t, unknown, or other
ggcgtanttcggggaagtgagaagccaagcatatttgtcccggcnaatgaccctgggtcttcccagtggttctatgttgatgttcctggcatagctcgtgcttgtggccttccagaaaataccatctattttgaagatactaacgaaaatgtgaatccaagtaatccttaccctgtgcccaaggatgtgaataccttgattcgaagttcagtcatgcctagggaccacctaaactatacattgacatggtattctctttctgcagcagttacatttatggcttttaagagacttagacagaaaaataagcggagatggcaaagtc

SEQ ID NO: 26609 - DNA, 345 bp, Glycine max
ggaccatgtcggggttttttcttggctagtacgggttcccaaagcgtctgtcctccttatgttgaaccggtgatgatgttggttcagggtctttgtcatgctctacaggagtggaatcctgtaacaagggaaaacataacaactcagggatctcagcttctagactactctccctctgaagcggaggactagtgaagaaagactctgtttcatgaaaagtgacatccttggaaacatagacacgacgactttgagggtgataacatttgtacccctttttgtttgaggcataacctatgaagacacatttgatagcccgaggatctaactttccctgatggggac

SEQ ID NO: 26610 - DNA, 399 bp, Glycine max
gactaaggaatggtacaagaaaacgacctggatgtatctggctattcccatcaccatttatgcattggaaagactggttagagcattcagatcgagcattaagtccgtcaaaatattgaaggtgactctttatcctggaaacgtgttatcacttaaaatgtcaaagccgcaggggtttagctacaaaagtggacaatacatgtttgtgaattgtgctgctgtgtctccatttgaatggcatccattttccataacttccgcccctgatgatgattaccttaccgttcacataaaaatacttggtgactggactcgaagtctgaaagccaaattcacacaggcttgccagcaacccttaaatggacagagtggacttctaagacctgaatgcttgaaagg

SEQ ID NO: 26611 - DNA, 161 bp, Glycine max
tgacgaataagggtatcacatcgcttaatcaggaacatgtttacgcgaatttttgttaaacctaaacaggaagccgatactctaaccactttggataagttaaatgagacacttgaaatgttgaaaaaaaagaagaaggcactcctaaaaatggcttctgc

SEQ ID NO: 26612 - DNA, 203 bp, Glycine max
  modified_base (60)..(60): a, c, g, t, unknown, or other
gagtgggacacgaactcaaaccgtttaagcttcgccgattttggacctacaacactctcnaatcccctcttgtgtgttgtaaaccccccgtgactatcaatggcggaaactgctgtcgacaaatcccaatctctcgctgaggaatattatgtgaaggataagcaaacagctgtagttgaaaaaacctgttgaggtcaaagaag

SEQ ID NO: 26613 - DNA, 370 bp, Glycine max
cccacgcgtccgcccacgcgttcgcggactctagaagacgacagaaggggggattagcatgtatccataccgcactgggagtttgccatagggatgtgaagcctcaaaatcttttggttcatcctcttactcaccaagttaagctatgtgattttgggagtgccaaagttctggtcaagggtgaatcaaacatttcatacatatgttcacgttactatcgggctccagaactaatatttggtgcaacagaatacacagcttctattgatatctggtcagctggttgtgttcttgctgaacttcttctaggacagccattatttcctggagaaaaccaagtggaccaacttgtggaaattatcaaggttct

SEQ ID NO: 26614 - DNA, 224 bp, Glycine max
  modified_base (125)..(125): a, c, g, t, unknown, or other
gactttccagtggacattatgcgcttgttacagaacaaccagttagaggaagggccaagcagggaggacaactgttaggcgaaatggaggtttgggccttggaaggatttggtgttgctcatatnttacaagagatgcttacttataaatctgatcatattaaaactcgtcaagaagtactcgggactactatcattgtaggaacaatacctaatcctacagat

SEQ ID NO: 26615 - DNA, 251 bp, Glycine max
gagacatagtctgaggaatctgcggcataacagaatcagcaacaaatatccataaaaaagggaaaaataaagaaggagaaggagaaggagaaggagatttctgttgaatgatgaggaacctaccctcttgtgctgattgaggagaagaagatgaatcacactcgcttggagtcttgtcatgaatctccccttaaagtatacaaattctgttttgtcccagaaaaaactggtgatatggttatactcttaat

SEQ ID NO: 26616 - DNA, 420 bp, Glycine max
taatgagattgatcctaaaacaaatccaacagaagatcagcgacttgcttttatagcaactttttttgctgggattactcaagcaacacttggtgttcttaggttaggattcttgattgacttcctatcacatgctgctattgttggttttatggggggagctgctatcacaattgccctccaacagcttaagggtttccttggcattaaaactgcacacttcacaacggacactgatattgtccatgtgatgcgttcagtattctcagaagcccatcatggatggaactggcaaactatactcatcggagctagctttttgggttttcttctggttgccaaatatattggaaagaaaaacaagaaattcttctgggtgccagcaattgctccattgatatccggtaatttatccacttt

SEQ ID NO: 26617 - DNA, 161 bp, Glycine max
  modified_base (59)..(59): a, c, g, t, unknown, or other
gattgtgagagagaattatcaaaggtgaaacgagagaaccctaactacgcacgcattcntgagaaaactcaatattcgtcgctcatggcactctcttctcgtctctttttcaaattcaaattgatctatggcagtcaaatacttctacaaaaggagcatgc

SEQ ID NO: 26618 - DNA, 297 bp, Glycine max
ggaaagaaagaaggaaagcaaagtagacgagtgagtgcgttgcgattgacgacgacgaggaatcatgtcttccggcggcggcggtggtaagccgttcttctgccacgtgtgcagtcagaggattacgtgctccgatgagtcggaaccattctgcccgatgtgtatggaaagtttcgtagaataatgcaaccctaacaataccaaccctaatctcttgcccgacagtgatgaatctttagatcccgaactacacttgcaccgcttctcacttgtccctctctagctctcatgagtctc

SEQ ID NO: 26619 - DNA, 296 bp, Glycine max
ggcacacccaacccttcaccagatctcactttgttgcgttcagtgcagagaagaaaatggcggtgatggccgttcaccaattcgcgcaatgcatcacttgccacgcttggagccccgatcaatccatggtggctttatgtccaaacaataatgaagtgcacatctataggttggttgaagacaaatgggaaaaggtgcatgttcttcaaaagcatgaccaggtaatttctgggatagactggagcacaagatcaaatagaatagttactgcatcccatgatcggaattcatatgtc

SEQ ID NO: 26620 - DNA, 221 bp, Glycine max
ggttatcggtggaggtgatggaggggtcatggcgaggagtgcacaccattcttgagttggaaagatagacatttgtgaaattgacaagatggttgttgatgtctccaaacaatacttccctgatgtagctgctgggtatgatgatcctcgtgtgacacttcatattggtgattgagttgcattttctgaaagaagttccttgaagaacttatgatgctgtt

SEQ ID NO: 26621 - DNA, 397 bp, Glycine max
gatgggtaggagtactgaaatgggaatccgggaagaagaaaaagaagaagagcttctgaagaagatagaacggctagaagctggtcacgctcacctcaagcaagaaatgtccaacttcaagctcttccaaaacaacaagtctcgttccaggttcggtgctgccacgtgtaacaaaccctcttcttctctgcatcaaaatggaaacaagtatctcaatatcttgcagtcaatgggccacgctgttcatgtgttggatcttcaatgtcgtatcatgtactggaaccctagtgcggagagtatgtatggttatgccgctgaagaagttctagggcaggatgggattgagatgcttgtggatcccagtgatttggcttagccaatgatgtgttcaaccatg

SEQ ID NO: 26622 - DNA, 487 bp, Glycine max
  modified_base (14)..(14): a, c, g, t, unknown, or other
accgggtaggaacngccgggacgacccattcgttccggttgcaaaagaacaacaaagggggaaatcaaaagagttaagtgaattaaaaacccaagggaggttcatggccaaaggtggagatatccgagtaattgttattttggaatgtaccggttgtgataaaaagagtgttaataaggaatcaacgggtatttctagatatataactaaaaagaatcgacagaatacgcctagtcgattggaattgagaaaattttgtccccgttgttgcaaacatacaattcacgcagaaataaagaaatagatcaaattgatcgcttgtgtgttacccttcgaaccaaagaacttaacatgtaaaatgatctatttttcttatctatatagatagatctatctgtattctatcatttacagttgaatatatacaaatatcagtatataacaacatatattaaaaaaataacaacatatattaaaaagtcagaat

SEQ ID NO: 26623 - DNA, 420 bp, Glycine max
gggaatggggagacatgactttgacaaccgcgttttgtggttcgctcgccgctgcttctctctccaccgccgccagtttccgccggaataaatgcaccaccagcaagatttttcattcctcttccacgtgcatgccctctttcttgcatgatcatcactaccactctttcttattgcgagttgccaatgatgctgatagaagtgaagtgtcatctgatactgcaatcaagacatcgtattcagaagccgataagatggttgatggtatggactttggtgagctttgcaatgagtttgagtgcatcagcagtcccttggtagaatccactgcaagacaacttgcacgagatatacttgagctaaaggagggaaatcgagcacttggaatctttgcttgttctgtcgcatacaaggatccta

SEQ ID NO: 26624 - DNA, 399 bp, Glycine max
gttcaaagcaaggagcttttcgagacgatggtgaggcacccttgcttcaaagacacccctttggtgctagtccttaacaagtatgatatctttgaggaaaagattagcagggtgtccctaaatacatgtgaatggttcagcgatttttgtccagttcgtgcacaccataataaccaatcactggcccatcaagcctacttctatgttgccatgaaattcaaggacctttatgcatccctcacagggaaaaaactctttgtggcacaagccatggcaagggaccgagtaactggtgatgaggcattcaagtacataaaagagatcctgaaatgggatgaaaagaaggaggagaatttctatggtccacctgaggattcattttacagcacagacataagc

SEQ ID NO: 26625 - DNA, 412 bp, Glycine max
tgggtaagttggaaagcaaacctatttggagaaagatcttccttcattaccagccttgggagacaggcaagatgcattcagcgtttattttgaatgggataatgattttggaattccaggagcattttacatcaaaaattttatgcaatctgaatttttcctcgtgagtgtcactcttgaagacattccaaatcatggaaccattcactttgtttgcaactcatgggtttacaatgcaaaaagttacaaaagggatcgcattttctttgctaataagacatatcttccaaatgaaactccaactccactagtgaagtacagaaaagaagaattggaaaatctaaaaggagatggaaaaggagagcgcaaggaatatgataggatctatgattatgatgtctataatgatttg

SEQ ID NO: 26626 - DNA, 225 bp, Glycine max
gtgggatgacaaaactattaggaaacagtggtttattaaatagcggggtgagaaaacaagcaagatacatacagcgaggattggattggttatcttcttcctttactctaaagagacatctaatctcaatcctcattacacatttcttcattcctctctcaagctttactcttttcccccttccacatcctcgatccctccactacaaaaacaactaatattttt

SEQ ID NO: 26627 - DNA, 405 bp, Glycine max
  modified_base (274)..(274): a, c, g, t, unknown, or other
  modified_base (371)..(371): a, c, g, t, unknown, or other
ggggggaaaaaaaaccacaaagggggaaaaaaagggttaaaaatttaaaatttcggtgggaggtgtgagtgttctgcgcgcaccgattcaccattattttttcaaccagggttgtaaaagaaccacattagattaggcaattacctatggctggccattctgattcggttcattccgagaagaaatcaaccattggagtgaatgagttgctgatttttaatgctgagaacattgcaagcaacatgtaaaattatctattacagccgaacatttntatctataattggtggagttggtgctggtattttgggatttacaggcttgaaaggatttgtgttttacttacttctcatggcatttacttcacttgngctcgttgccaaagcaagttttcaccacacatac

SEQ ID NO: 26628 - DNA, 361 bp, Glycine max
ggagattggcagaataaggtcggaggattgagtgagaatcgttcgagactgcaaaatccaaaaccaaacacaacgcacaacattcgtcattcaccgccttgtcttgtcttcttctgtctccgaatcacggaatctctctgaatcgcgggattaagagaggaatatgcaacagaggctaaagttgcagcaacaacaggccctcatgcagcaagctttgcttcaacagcagcagatgtaccaccctggcatgctcgccgctgctatgtctcagatggagcctgttccaagtggaaatgtgcctcctggttttgatacgtctgcatgccgtagtgtttatgtaagaaatattcatgtaaatgtc

SEQ ID NO: 26629 - DNA, 384 bp, Glycine max
gacacaccatccgttctagtctcaacttctggggttccaactcctacaacgcttttctctgcactcatgggcaaggtcaagatcggaatcaacggatttggaagaattggccgtttggttgccagagtcgctctgcaaagagacgatgttgaactcgttgccgttaacgaccctttcattaccaccgattacatgacatacatgtttaaatacgacagtgttcacggacactggaagcatcacgatgtcaccgttaaagacgagaagacccttctcttcggtgacaaggcagtcactgtttttggacacagaaaccctgaagagatcccatgggggtcaactggagctgacatcattgttgagtccaccggagttttcaccgat

SEQ ID NO: 26630 - DNA, 405 bp, Glycine max
gagcaaagagtgaagagcgaacagaatggctcccaagggtataatctttatggctgtgttatgcttttcagcactgtcactgaatctatgacttgcagaggataatggactctttatgaacttctacaaggaatcatgccctcatgctgaagacatcatcaaagaacatgtcaagcttctctacaagcgccacaagaacactgctttctcctggctcagaaacatcttccatgactgtgctgctcagagatgcgatgcttcactgttgctggactccacaagaaggagcttgtctgataaggaaacagatagaagctttgggttgagaaatttcatgtacattgagaccatcaaagaagctttggaaagggaatgcccaggagttggttcctgtgctgatattct

SEQ ID NO: 26631 - DNA, 319 bp, Glycine max
gagaacagagtgtgataatagtaagacagagcacctgctcactcgtaaatggcgaggaagaagatcagagagtaccactccaagaggcttctcaaggagcatctcaaacgtctcgcctctatcgacctccaaatcctctcagctcaggtgacagaatctacggatttcactgagctgacagaccagcatccatggctttcgtcaaccagattggtcgtcaagccagacatgctgttcgggaagcgcggcaagagtggcttagttgctctcaatttagacatagctcatgtcgccgagttcgtcaaagcacgcctcggcg

SEQ ID NO: 26632 - DNA, 363 bp, Glycine max
gacaccataaatcacacttaactaccaactacgtaagaaactaacaaaagtgttagtggttgtgataacatggctcttacacttcaacgtgcattatctgaactactcaccctaatagctattctctcaatattcctagtgatcccttccttttgtttcaaccccaaaaagctttataatgcttcatattattctccatctagttcagattggtcacctgcagtggccacttggtatggacctgccaatggagatggaagtgaaggtggagcttgtggatatggtaacgctgttgggcaacctccattttcttctttaatatccgcgggaagccctcttatatatgactctggcaaaggatgt

SEQ ID NO: 26633 - DNA, 372 bp, Glycine max
  modified_base (3)..(3): a, c, g, t, unknown, or other
gcnacacacaaataccatctgcggttttttaaaaaaactaggtcactacacaacatatcatcattctcacactaatacctcctttattcttactactcaccctaatatcaaattcctcaatatatcttatctaccatttcctttgcaaaaaccccaatacaccttattctccaaactattccttatcatctaaattcattaccacacccccatttttcctctccaatctccctcaccacctacacttattttaagtgaacctttctcttctttttcaccctttttaccaacctcctcattttatttaatctatacaacacaacctctcttattaaaatacctcttctctacaaaattatttcatttttcctt

SEQ ID NO: 26634 - DNA, 436 bp, Glycine max
aaacaccacagagggggtttcgggtttgggcccagaaaatccctccttggaatctgccttaaaaagtttggggtaaagtggccattgtcaatcttcgacctgaccctgaaccagatgaagtatatccacaaataactttgcttcctgaagcaaatcaaagtgaggtgacaagccctgatgatcccctgcctgaatctccaaggtgtacagtccattcattttgcaagacactcactgcttctgacactagcactcatggaggtttctctgttcttcgaagacatgcagatgattgtttgccaccactggatatgactcagcagcccccatggcaagaattagttgcaactgatctgcatgggaatgaatggcattttagacatatttttcgagggcaacccaggcgccacttactgaccacttgggtgagtgtctt

SEQ ID NO: 26635 - DNA, 398 bp, Glycine max
gtccgcccgcccgtccgaacggatccaagaggacaacataaggggtacccaaagtcattgaaacggtgataacattttaaggagcggtggttatgactctgtacaaaggccctgccttccaaatcataaagggtggaggagccatcagcaaccatagcaactctagcagtactagtaccaccgaaccctctgaccagcactggatagttggaactgtttatctcatatcaagttgtgctagttgggctggcttcttcattttgcaatcattcactttgaagaagtacccggcagagctctcactgacagctcggatttgtgtgatgggtattattgaaggttcaatcgcatcccttatatttgaacgagacttcagtgtatgggccataggctgggac

SEQ ID NO: 26636 - DNA, 419 bp, Glycine max
  modified_base (364)..(364): a, c, g, t, unknown, or other
ggtggactagatagtagaaacacaaagagaagacgagtcctcgagaggcctaggccaactttgcaatcgcacctcgaatcaatcgacactcagcggaaaccctagaaagtaataataataataataacaatagaatgcgaatttattagagattgcaaaaggtgggaagaggaatggcgaagcattcggtggcaatggcgaagaagcggtggctgataatgttggcggcattcctgtccgtctcaacagtgacggtgctcttaatgagatccaacaactccgattcctgcaacaccaaccattttactattgcacaagataataaccagattcgttcccctgtccaactcactaatgccgcttncagcccccttaatttcatgaagtccaagctagttctcatgggttcgcacgagctt

SEQ ID NO: 26637 - DNA, 78 bp, Glycine max
ggacccgtggacggtcaaggcactgatgggggggatgctgtaaaagggatggcacgacaaccggcggccgatgtaaaa

SEQ ID NO: 26638 - DNA, 330 bp, Glycine max
ggaggagaggaagaggggtgagttgttcattatcatcatttcattgtttcttttcttttccagacatcaaaccaaacactagctacgcttctctctctttccttcccagagcttcctgtggctgtggaatcatcgtatcttcttacgtccgaagcaagcctttgtcttgcgtgtgttcttcccccttccgtcaggttcgcttttcttcatttacatttccacaatatcaaaatacccttacctctgtttcttttattatttgatctatttgttgtcaagaaatactttcgatgcatatgtctctgtgatttaattcgaaatagtggacag

SEQ ID NO: 26639 - DNA, 372 bp, Glycine max
agccgtccgaacacctccgaaaggacttctcaaagctctttacagacacatggccgggtttaataatataaacacctgatattatttccaactatacacacatcacacccttcactatctacatatctttataccaccattccatacctatctgtatctcttttatcaccttactttcgtacatacctttgcaacctcacttttgacattgatctttgctctgctaacacattcgcattcatataatcacatatgtatcatgacaactcacccttacctctgattctttaatgacttattctatggatactccacaactacttaccacacatatttctctgacatctaattgaaaatgttcaacttacaaac

SEQ ID NO: 26640 - DNA, 344 bp, Glycine max
ttttaacgaagcgaaatttccacctacatcgtgggcttatctaagctggtggtggaccgatttgtactgatttgttagtgaagcacatctagtgcaaactgtctaacaggcatggtaagcctgttgacaacatcagccattacctattctcctctcaacaatggttccaaggatttcagaaagtcaggtaattcttctaaaggaaggtgttgcataaaatcaatggtgatagagaaatccttggaggaattgtacaatgtgaatgtggaaagaaatgttttttctgagaaactagctgatcttggagttttaaaatggtctgtttttaagactggtaaaagcaa

SEQ ID NO: 26641 - DNA, 311 bp, Glycine max
gggcgcctccgagaaggctacaaacgctgatgctggggatgttttacattggagcgctctacttcacttttcggtaaatgtatcacttcgttcactttcatccaactcaacatatatggaattttttcaccgataactactgtcttgatcatgtgtgcaaagactacttcatattatcttattctcagtaaaactatgtggttcacattcttaggcatgtccaccaccatgaatgtaacatcacccatgaaatgactcactactactaactggctcatatttttttttattctaaatcacgcaaattcatt

SEQ ID NO: 26642 - DNA, 247 bp, Glycine max
ggtactgagagaggtacatatgagtttgcaggggctgtctgacaagaaagtcggataaataaagcaaagctaatcaacatgcttgatgaggtggcgcaaaggttcacgcatatccacaaccagatgaatatagtgatatcatcatttgatcaagctgctgtaatatgctcagcaagaacttacactgcgcttgcactgtaaacaatcttgaaccaatatacgtgtttgaaggatgcaataacagtgc

SEQ ID NO: 26643 - DNA, 126 bp, Glycine max
  modified_base (30)..(30): a, c, g, t, unknown, or other
cttccgaccggttgcaaaagacacccaaangggcccctaagccaggtttatttaccttttaattggggggcgttttttaaggttgggggggcttaccttcatatccttttaaacattgggggtttt

SEQ ID NO: 26644 - DNA, 368 bp, Glycine max
ggggcaaaaaaaaaaaaatgcacgaggggtcaaaaaaatccgaatcctcttggcctctttgtgtctgaagcttcactcgaaagtggaaacactgctctcatcgactcgaaagcggtttgcggtttccgtcatcggcgagacgccgccgccgtctggaattggaagaccgtcgcagtagtcgcaccatcgcagcacgcattggaaacggaaatgggttcttgtgctacatcatctgttctgactaatcaatttattccgtggtctacaaccaatactgaatctcccttggactccaaattgggcgtcatattttataaaatgtacagaaatacaaacaaaagacaactcagtctttcttttgcttggga

SEQ ID NO: 26645 - DNA, 287 bp, Glycine max
  modified_base (11)..(11): a, c, g, t, unknown, or other
aaaaaccgggncgaacgacaggcttcctgaccgacgggcttgaaagaagctctacggaggggctttaacgaagcgataatttccacctgcatgagggtcaaacctgcgcttcgtttgaaccgatttgtgctgttttgtaagtgaagcacatcgagtgcaaactgtcgaacaggcatggtaagcctgttgacaacatcagccataacctattctcctctaacaatggttccaaggttttcaaaaagtcagggaattcttcttaaggaaggtgtttcataaaaacaatg

SEQ ID NO: 26646 - DNA, 389 bp, Glycine max
ggttctagtgtgtgattgtttgttgttgtaactcggtcttcttcttttgttgggctgtgtttgtgtttgttttttctctcacctgaaaatgtcttgctgcggtggtaactgtggttgcggaagctcctgcaagtgcggcaacggctgcggaggctgcaagatgtacccagacttgagctacactgagtcaaccaccaccgagaccttggtcatgggagtggcacctgttaaggctcaatttgagggtgctgaaatgggtgtgcccgctgagaacgatggctgcaaatgtggaccaaactgctcctgcaacccctgcacttgcaagtgaggtgttgggagagcaagcttcaagcagagatagcccttaattaggaataatgattaactat

SEQ ID NO: 26647 - DNA, 218 bp, Glycine max
gattgagagtggcgtcattgagcttgatgataagcagagtgaaagcaagtgtgctcttgtgtatggcaaaataaataacccccttgtgcccctgcccctggttggcctaactggcctaactggggttaaccacttccgggatgttaaaggccagaagctgttttttttcgtaaccacatttttcggtttaaccaaggttaattaaaaggttttggttt

SEQ ID NO: 26648 - DNA, 182 bp, Glycine max
gaggactacaaaaagatatccacactctcctgagtggggtttctaataaggaccgttgataactctaaatactacacttagaccacatcaatccccttcttataacctttaaacttgtcatcctgatctttctatattgctttcataccataatttgtgttcactttcttgatcctctacat

SEQ ID NO: 26649 - DNA, 370 bp, Glycine max
aaggtcaggaggtggagtactagaacatggatggggtgccttcgaattcgcatggaaacctcgatgagcagatttctcagctcatgcagtgcaaacccttgtccgagcaagaggtaagggtcttgtgtgataaggcaaaagaaattttgatggaagagagcaatgtccagcctgtgaaaagtcctgttacaatttgtggtgatattcatgggcaattccatgatcttgcagagctttttcgcattggagggaagtgtccagatacaaattacttgtttatgggagattatgttgatcgtggctattattctgttgaaactgttacgcttttggttgcccttaaagtgcgttatcgtcagcgtattactat

SEQ ID NO: 26650 - DNA, 100 bp, Glycine max
cgaaatacccggccgaccacacccttccttccggttgcaaaaaaacaccaaagggggctttaaaacaagtccaaaaaccctaacaatggggggcattctt

SEQ ID NO: 26651 - DNA, 409 bp, Glycine max
gttgcttgaaaatgataactttgaagatcaatcttggcatgattttgatcccgctgcttttagtatccatgctgattctgatcctgttagtttggatgaatctctggatgaagctcatttcagttcaccagcttttggcaagagagatcaattacaaactggtacatttgatgctgcacaagcaaaggaaactggcagattaggtgaatttcttgcatgcaaatactttgtcgataaagttggcaatactgcagtaaggtgggttaataaagataatgaaactggacttccatatgatttagtcattggggaggataacagccaagaattcatagaagttaaagcaaccagatctccaagaaaagactggttcaacatatcagcgagagagtggcagtttgcaaatgaa

SEQ ID NO: 26652 - DNA, 316 bp, Glycine max
aaaaagccttcgaaagggctttctaaagggggaaccttgttgaaaaaccgggtggattttttaaaaaatctggggttttgcaccaaaaagaaaaggaagaaaatgacccatgtccatgaccatcctcctcactattgctgcagctgctattgatcctcatacatccaaccatcatctgcacccttaccttcatcctcatgcctagattttgaatacagcaactatggaacattcttaccaaccccggagccggagccggagccggaaccgccaccacaagagattgccagcctaaactcatcgtatcatcaatata

SEQ ID NO: 26653 - DNA, 358 bp, Glycine max
ggagacacagtgaggaaactgaacccttttgtttgttttttcagctgaaaattcagaccaatatatattttgagtattttttttcctttgatttcgtggaaagttattatcacagaatctgagggttttgtagacagaacttcacgtttaacaatgaagaaggttcccaagaacagctgcaagtctgcatcacacaggctctttaaggacaaggcaaagaaccgtgtggatgacttgcagctgatgttcctggatctgcagtttgctaggaaagagagccgcacggttgatgccgtggtgcttgaggagcaagtccatcaaatgcttcgcgaagtgaaggccgagctcaatgagccct

SEQ ID NO: 26654 - DNA, 211 bp, Glycine max
gacacacaactggtttcaaagaaacaggctcgggttggattacctctgggactggtgttaatggtcactcatgtcaaggcatatcggtttggaagatggaccaatgcacatgccaccttatatcgacgtagagatccttctgtcacaatggatggagcatgtcattatggaaatctacatagccaacgatatggaactgatacatcagaac

SEQ ID NO: 26655 - DNA, 447 bp, Glycine max
gcgagaagacgacagaggggggagataaagcaccacacaccgtttcactccatttcccagtctttctagggtttccctgctatcttcctcaattcgaacccttcgcctttccacccttcgatttcttatcttccaattcgtcaagcgtatccgcgagtctcgatttccttctctgcaagcggattggtcgcttgtgaaggaggaacatgtattcaagagggagcggcggttacggccaatcgtacactggtcaatccgcatatggccagaacctgggtggcaattattctgggagttctgttggagggcatgatgtgggtcagcattctgtggcttctaggcattcaacaattttaggtggttctcaagacgttgatgttggtgggtataggccttcggctgcgacccagtatgggggacagtataggtcttgttatggctctgctg

SEQ ID NO: 26656 - DNA, 422 bp, Glycine max
gacccgaaaagagaagaggtgtgggaaaggaggaggaagaagagcgagatggcgtcagtggtgaagaacgtactcaaatcggtcagagaaaagggtttcggcgctttcctcagggagctcaaggatgaaggctacctgagatgccttccggatggaaatctcttgcaaaccaagatccacaatattggggcaacacttgttggtgttgataaatttggtaacaagtattatgagaagcttggagacacacagtttggaaggcacaggtgggttgaatatgcagagaagactagatataatgcctctcaggttccagctgaatggcgtggttggctccacttcatcactggtcacacaggagatgagcttcttttactgaaaccgaaaaggtatggtattgaacacaaagaaaatttgtctgg

SEQ ID NO: 26657 - DNA, 359 bp, Glycine max
accggttgtaaaaaaacaccggagggggctgaataaagagagtgagagatggatcagtgggtgtggaaggagttgcctttgcttacaatccttgtttcctttggagcgttcttatacttgcatgattattacacaacacagatatttactatcataaagttactgcatgataagtgcattcttctttcccatcgacacttatggatatatcagcaaacgtattgtgaccccacaagggatcatttctggttcagttcgagactaaatgatgggacaatcatatctgtcgttgaaggacatgctattcagtggatgcctaagcatgaaaaacttattgattatggagatgctggtatcat

SEQ ID NO: 26658 - DNA, 329 bp, Glycine max
gtctgaaagagggtgcatcaccccttgacaatggcaatggtggcggaatcaccggaatctgacagtgacaacaactcctcaaaaaccaacaatactcaaaccctcaatgaaacggcgccgtttcttgactacgctcttgcgcaggcccagctttaccacaaggccttcaacgacgccgtcgattcgacaatcgatactgcaaaatcccgtttctcccaaatccgctcaacttcttccgcccactttcaccagaccttggattctttggatgatctcaaatctcagtacactgcttatgaaggtcttttgtttggaaagatcaaacaagg

SEQ ID NO: 26659 - DNA, 280 bp, Glycine max
gatcgtaagtggggtcctcgcttgacaaaaccggggggggttcctccagtggctggaaaatttgaagtcattgaccaatattgcattgtacctgatgaggaggatgtgcgaaggaagatgagggtttcattacctgatgactatgctgagaaactgagtgcacaaaagaatggcactgacgagtcagatatggaacttcctgaagtaaaagattacaaacctagaaagcagctaggaaatgaggttatcgagcaagaagtttatggaattgatccttata

SEQ ID NO: 26660 - DNA, 408 bp, Glycine max
ggaggaagaggaggagtaacaaaacaagtatgtgaggatcaaacgcaattgcggatggtttggctggtgcaggtggtggaattattgctcaaatcataacttatcctcttcaaacggtaaacacgcgccagcaaactgagagaacactcaagaggaacaagcaaagtttgccctccaactcaaccactgctcctggcactcttcttcagatctttcaggtcattggaactgagggttggggtggactctatagtggcctcaagccttctcttcttggaactgctgcttctcagggaatttactactatttctatcaagtttttaagaacaaggcagttgccattgcagctgcacggatggtgaaagggcgtggagatggtactgttgggatgtttggttggcttgttg

SEQ ID NO: 26661 - DNA, 347 bp, Glycine max
ggagataaagagggaggagagaatcacaaagggtgggctaacacgaatacgcgggcggatcaaaccctctatttctctccaaaactgcgtataatatcttactcgccttacataggtcttatatttcattatactgtgctctttcccatttgagggaacagcacaagagtgcgaggatcggataacccaactgcacaagttgtcactaaaattatggatcctcacgactagactggatgccaggctcctgaacgccccattctttgcattaataattgctgcttctttggaagagcagctaccatgaacatgtgttccaagtgctacaaggacatgctgctttagca

SEQ ID NO: 26662 - DNA, 114 bp, Glycine max
gtgggggaattccattgccatgccactgtctgctgcactatggctattgttcgacagctttccagcaggcctatacaaactatgacactatgggaaatgcagatggatgtcctc

SEQ ID NO: 26663 - DNA, 324 bp, Glycine max
gatccaagggaggcacgacctggtatcagggaggtccactttcttccattcaatcctgtggacaagaggactgctctaacttacattgattctgatggaaattggcatcgatctagcaaaggtgctcctgagcagatattgaacctctgcaactgcaaagaggatgtaaggaaaagggttcatggaacgattgacaagtttgctgagcgtggactccgttctttaggtgttgctagacaggaagtacctgagaaaaacaaggatagtcctggtgcaccatggcaatttgttggtctgctaccactttttgatcctccaggcatg

SEQ ID NO: 26664 - DNA, 299 bp, Glycine max
cagggggaagtgggggatgaaagggagaaggggaagaagtaggaggaagaaaaggggaaaacgcaaagaaaaaaagaggaagattgatcaagatctcccttgcgtttgtctcaattgaagaaattcaagagcagaacgagactaactcaacggtatcagacgtttcaaggtttcagcactttcatttttttttttttcccgatttgagttggaagaagatcaaagaggttcctagttgcttggattgttcctctgggtggtggagactttgtgtatttttaaaatattgacaattcaaa

SEQ ID NO: 26665 - DNA, 331 bp, Glycine max
accgcttgtacaagaacaccgaagggggtgttcgagtagaaaacgtacggtcaagggcgggctatgtgagactcaagccgaaaggtttattgctattaatatttggctctctttttcaatgtcaaattgcattattgcaataatcaaaggcactaaccacacttcatcacccccatatataccccttctcctttcacactaattaacacactcatcaaaaaacccttctttctttcaggttcattacttgatcagtgtcagaagggtagttacaaattgcaatggctaaacatgacgtttagggtggtgacttctcagccaatgactacca

SEQ ID NO: 26666 - DNA, 326 bp, Glycine max
ggcgcattgaacgaaaattacggtttgtagtggggcatgaagaagcagcgatggcgcctaagataacacgtaaggttagcagaaaccctgaattgataaggggaatcggaaagtactcgaggtcgcagatgtaccacaagaggggcatttgggctatcaaggccaaaaacggtggcgttttacctcgccacgaccctaaacccaagcctgaagctcctgctgaaaaaccacccaaattttaccctgctgatgatatcaagaagcccctttgtcaacaagcacaaaccgaaaccaccttaactcaagggttagcattacttcccgga

SEQ ID NO: 26667 - DNA, 285 bp, Glycine max
gatgatgaagtacttcttgcaatggcagaagagttgggagtgttcattccttgtgttgggggagtggaacatgctagtgtgttgctgccaccgctggagacactttgcactgttgaggaaacctgtgtgagagataaagctgcggagtcactttgtagaattggatctcaaatgagggagagtgatttggttgaatattacatcccgttggtgaagagattggcagcaggtgaatggtttactgctcgagtctctgcatgtggactatttcatattgcataccct

SEQ ID NO: 26668 - DNA, 240 bp, Glycine max
cgatgcacctcgtgacttaacatacttgcactaggaaatgtatttccagataattttcagagattcaaatcttagataatctattgcatgaacagttgaatgctaaactatcagactttgggttatcaaggttgggaccattttattgactgactcatgtcttaccagacggtgtatgaacaatgagatattcagctactgaatatgttcacactggacgtctaacattaaagaatgatg

SEQ ID NO: 26669 - DNA, 305 bp, Glycine max
aaaaacaccacaaaggggttttgaaattacatttattgtcccacacatacggtgcttttctgtgaagtggagggcccaaaactttttgcccccaccaaatatttcctttatatttataacagattccattttgaaaatccaactgttaggcctggtctctgaaccacattgccaaagtttggtcctgctgttgatgaataaaagccccgcatattcatactgctaaggcggtgtctttttgatagtgatgatgaggttcgagacagagcaacgctttatctgaacacacttggaggtgatggttc

SEQ ID NO: 26670 - DNA, 400 bp, Glycine max
acatatgaacagtaaaaactagtagtttaattgagactagaactcatagggaagaaaatagatttatgaatggaataaaatatgcagtatttacagacaaaagtattcggttattggggaaaaatcaatatacttttaatgtcgaatcgggattaactaggacagaaatcaagcattgggtcgaactcttctttgatgtcaaagtaatagctatgaatagtcatcgactcccggtaaagggtagaagagtacgacctattatgggacatacaatgcattacagacgtatgattattacgcttcaaccgggttattctattccacctcttagaaagaaaaaaacttaaatcaaaatacttaatagcatggcgatacatttatacaaaacttttaccccaag

SEQ ID NO: 26671 - DNA, 390 bp, Glycine max
cgagaagacgaccgacgggggagatgggacttgtaataatgggcagttctatgaatgcctgaacatggcagctctgtggaaattgccaattgtgtttgtggtggagaataatttgtgggctattgggatgtcgcatctcagagcaacctcagatcctcagatatggaagaaagggccagcatttggaatgccaggggttcatgtagatgggatggatgttttgaaggtcagagaggtggcaaatgatgcagatggaagggctagaagaggtgagggaccaactctagtggaatgcgagacctatagatttagagggcattcattggctgatcctgatgagcttcgtgaccctgctgaaaatgaacactatgccggtagggaccccatcac

SEQ ID NO: 26672 - DNA, 382 bp, Glycine max
ggctgcaaatgtggaccaaactgctcctggggggcctgcacttgcaagtgaggtgttgggagagcaagcttcaagcagagatagcccttaattaggaataatgataaactattaatgtgtagctaaaaacttatgtattatgtctgtgatggttttcgtgcactctggtgttttgtgttaaacaaacatccttagaataaagtggtcatgtcttgcctttcagcaagttcaagtgttttggacttgtgatgggtgtgttaagctcatggttgcttcttttttttttttttttaatgtctggtaattggtcgcttctgtataaagttcggctaatctgaattatgaatctctgcttataatattaaatactatttcacaaaaa

SEQ ID NO: 26673 - DNA, 278 bp, Glycine max
gggcgcgggtgaggtacaacccttccactgtggtgactctgcgatgggtgcctacaagtatgtttcagagctatggcgcaagaagcagtctgatgtcatgcgcttcttgcagcgggtgaggtgctgggagtataggcagcaaccttccattgttcgtttgacaaggtctacccgccctgacaaggctcgtcgcttgggcttcaaggctaagcatggctatgtgatttaccgtgttcgtgttacgaggggtggccgaaagaaaccagttcccaaaggta

SEQ ID NO: 26674 - DNA, 270 bp, Glycine max
ggagacagagagaatgagtacggtgggagaagggaaggttagtagtaatggtcatggatgttgcaaatcagggccaggctatgcttccccactggaagccatttctggtcccagagagtctctcatttatgtaacctctgtctacacagggaccggaatagagaagccagactatttggcgacagtggatgtggatccaaactctccaacttattccaaagtcatccataggcgttctgttccttatttaggtgaacaattgcatcacac

SEQ ID NO: 26675 - DNA, 378 bp, Glycine max
ggtggccaaatcatggacaatgatgatgccatcacctgtgcagcatataccattaccatcttctctaatgaataatatttccactcacaattcaatcttgtgttgtgactttaactatgtgaatttgagcaaccaaagaggtacaaggcttttgtgttcagcaaggaggcaaattagataccaagatgatggggatgataaagatagtgatgaagagtatgggcacaatgaggagattgccaagttggagtcttatagtcaatcagcagaaggagaagtactccttgtgcatgcacttgtggaccaggaggaagttgatgtgcttatcttcaaggggttctcttcatgcttgagctacagtacctcccctgacccaac

SEQ ID NO: 26676 - DNA, 145 bp, Glycine max
tcaaatatataacatacactcacttacaacatttgattttctagaaataatcactatactcctacattgtaattatgacaaactctaccctacatcacaaatttcttcgatctttctttaaatctcatcagaactattttaaata

SEQ ID NO: 26677 - DNA, 239 bp, Glycine max
atgagaacaaccgacgggggaaggaagagagtggtgtacgacactgctgctgcgcactcgatccgatacgtgctgcccgaacatagcagaaccaaacgacgcccaggtttcggaattgtgttctacgtttttgagtttcgattccgatcgaccgacgatgctggccaatcatttgcaaaacggcatcgaaacggcgaggctcgtttggtcgcggattcctaattcggaagaatcgcagc

SEQ ID NO: 26678 - DNA, 354 bp, Glycine max
gggaaagtttaatgggcggctttccttttccataaaaccctccgctagctagctgcgtttaaagtataaactttaaaggggaaaaaaaaaccgagaaaccagggccatattataattccttccttctcactgagtctggtgcataaacctcatcaacacacttctctaaatttctagggtttgagttttgctcacttatttctcgacttctgcaatggccgcttcctcgctcctgaagatcgcgcttttcgctccttcctcctgcgatcgccccaaggtatataccaatgcctcaagttctaatttaaaatcccagggattacataagcacatttttggtacttcaattcaatg

SEQ ID NO: 26679 - DNA, 335 bp, Glycine max
gggcgaggatggcgtcaagcagcaggcatacagcaaggcaggactgtgtttgaaaatgtgcatcttttcttgggcccaaatgcaataattgtggtcctgtttactaccgttgaggcttctttctatcagctaagctaagcagtccaaagggcacaccacaacagagaaagaaaagagtaagagtatgggaggctcatggtcatggcagctcacatgtgccctcttgctactcttcttcgtcgtagtcaccgacactgaccacattgtgggtgcgaatcgaggctggaaccctggctttaactacactctttgggccaacaaccacactttttatg

SEQ ID NO: 26680 - DNA, 349 bp, Glycine max
gatgggtggtggtactgaaatgggaatcccagaagaagaaaaagaagaagagcttctgaagaagatagaacggctagaagctggtcacgctcacctcaagcaagaaatgtccaacttcaagctcttccaaaacaacaagtctcgttccaggttcggtgctgccacgtgtaacaaaccctcttcttctctgcatcaaaatggaaacaagtatctcaatatcttgcagtcaatgggccacgctgttcatgtgttggatcttcaatgtcgtatcatgtactggaaccctagtgcggaaagtatgtatggttatgccgctgaagaagttctagggcaggatgggattgagatg

SEQ ID NO: 26681 - DNA, 436 bp, Glycine max
ggcacacccaacccttcaccagatctcactttgttccgttcagtgcagagaagaaaatggcggtgatggccgttcaccaattcgcgcaatgcatcacttgccacgcttggagccccgatcaatccatggtggctttatgtccaaacaataatgaagtgcacatctataggttggttgaagacaaatgggaaaaggtgcatgttcttcaaaagcatgaccaggtaatttctgggatagactggagcacaagatcaaatagaatagttactgcatcccatgatcggaattcatatgtctggaaccttgaaggatcagaatgggtgcctactcttgttatccttagactaaaccgtgctgctctttgtgttcaatggagtccaaaagaaaacaaatttgcagtgggaagtggagccaaaacttgttgtatatgctacta

SEQ ID NO: 26682 - DNA, 415 bp, Glycine max
  modified_base (394)..(394): a, c, g, t, unknown, or other
ggaggtgaaggggaaaaaaaaagagtagagtggataatggctgcgttatcgctttgcatagccatgagagcacccactccctcagcttctctcattctcactaccccaaaaccatcttcactctctttgaaccttacccgcacttgctccagcgctcgctctccgctcctccattgctccttcctctcttctccttcccatctctcttccccttcctccgtttcaggcttgtcacttggattggatttgacatctaatgttgggaccagaagaggaaaaggttctggcctagttgtgagggcaggcaaggctgctctttgtctgactaagagaagcagatcaagaaaatcattggcacgcactcatggtttccgcaaaagaatgagcacaccangtggaagagctgttttaaggc

SEQ ID NO: 26683 - DNA, 441 bp, Glycine max
  modified_base (13)..(13): a, c, g, t, unknown, or other
  modified_base (16)..(16): a, c, g, t, unknown, or other
  modified_base (25)..(25): a, c, g, t, unknown, or other
  modified_base (49)..(49): a, c, g, t, unknown, or other
  modified_base (99)..(99): a, c, g, t, unknown, or other
gcggccacgcgtncgnccacgcgtncggccacgcgtgccttcacgcctnccgccaaaaaacgacagaaggggaaaaaaggatgaaggtagaagagaaangtgggaagtggccagaaaagaagattacaaagaaatggggagatgggtgaattgtaagggcaatatattcccattcctggggatggtgatggctatgctagctcaaagtggaagcatggtggtaatcaaagttgccatgactgatggaataaacaaatatgtcatggttgtgtactctttggcactctccaccatcttgcttcttccctttgccttgtttcttcacaggtcagagcgtcctcctcttacattctctgcactttgcagtttcttcttgcttgcatttctttgcgagtcaggacagataatggcttatgttggcatagatctaagctcttctac

SEQ ID NO: 26684 - DNA, 435 bp, Glycine max
  modified_base (426)..(426): a, c, g, t, unknown, or other
  modified_base (428)..(428): a, c, g, t, unknown, or other
ggttatcggtggaggtgatggaggggtcatacgagaagtagcacaccattcttcagttgaaaagatagacatttgtgaaattgacaagatggttgttgatgtctccaaacaatacttccctgatgtagctgttgggtatgatgatcctcgtgtgacacttcatattggtgatggagttgcatttctgaaggaagttcctgaaggaacttatgatgctgttatagtggattcatccgatcctattggtcctgcccaagagctttttgaaaagcccttcttttcgtcagttgcaaaggctcttcgtccaggtggagttgtgtgcactcaggcagaaagcatatggcttcatatggatataattgaggacattgtggctaattgtcgccagaattttaaaggctctgtcaactatgcttggactactgntnctacata

SEQ ID NO: 26685 - DNA, 417 bp, Glycine max
ggcagagtgaggaattgaagcatgggaagagggaagggggttctggagagaatacagaacaagatcaatcgccaagtaaccttctcaaagcgcagaaatggtttgctcaagaaagctttcgagctatctgttctatgcgatgctgaaatcgctctcgtcatcttctccagccgtggcaagctttttcagtatagtagcactgaaatcattgagaagtatcgtcaatgctgcttcaacatgtctcagactggcgatgtagctgaacatcaatcggagcagtgcttataccaggagcttttggtattaagagtcaagcatgagtcactccagcggactcaaaagaatcttctgggagaagaactagagccacttagcatgaaagaaatgcatagtttagagaaacaaactgatagaacg

SEQ ID NO: 26686 - DNA, 351 bp, Glycine max
aatctccaagttaccttctcaaagcgcataaatggtttgctcaagaaagctttcgagctatctgttctatgcgatgctgaaatcgctctcgtcatcttctccagccgtggcaagctttttcagtatagtagcactgaaatcattgataagtatcgtcaatgctgcttcaacatgtctcacactggcgatgtagctgaacatcaatcggagcagtgcttataccaggagcttttggtattaacagtcaagcatgagtcactccagcggactcaaatgaatcttctgggagaagaactagagccacttagcatgaaagaattgcatagtttagagaaacaactggatagaacg

SEQ ID NO: 26687 - DNA, 436 bp, Glycine max
gataccaaaaaagttaagtgaattaaaaacccaagggaggttcatggccaaaggtaaagatatccgagtaattgttattttggaatgtaccggttgtgataaaaagagtgttaataaggaatcaacgggtatttctagatatataactaaaaagaatcgacagaatacgcctagtcgattggaattgagaaaattttgtccccgttgttgcaaacatacaattcacgcagaaataaagaaatagatcaaattgatcgcttgtgtgttacccttcgaaccaaagaacttaacatgtaaaatgatctatttttcttatctatatagatagatctatctgtattctatcatttacagttgaatatatacaaatatcagtatataacaacatatattaaaaaaataacaacatatattaaaaagtcagataaaaaaacaa

SEQ ID NO: 26688 - DNA, 199 bp, Glycine max
ggcaaaaatattctactaattattattttacaatgcaccatttgttatctaaagaatgctaataagcaatctacgctattctatacatatataactaaaaataatttatacaatactcctaatctatttcaatttagaaacttttaactcatttataacaaacatacattctactcaaacatatataaatctatcaaat

SEQ ID NO: 26689 - DNA, 410 bp, Glycine max
  modified_base (67)..(67): a, c, g, t, unknown, or other
ggtgataagaattagcaaaagacaatgattcttcagaggagaaaaatcaagttcaaccagggcttantggtcctctgaaaaagagaattcagcagcttgttgactctaatcctgtcatgctcttcatgaaaggaactcctgaagagccaaaatgtggatttagcaggaaagttgttgttgtgttgaacgaagagagagtcaagtttggaagttttgatgtcctatcagactcagaggttcgtgaaggcttgaagaagttttccaattggcccacatttcctcagctttactgtaaaggagaacttcttggtgggtgtgacatagcaattgctatgcatgagagtggggaactgaaggaagtttttaaagatcatggaattgatactactaattgaagcaaagagaaagaa

SEQ ID NO: 26690 - DNA, 412 bp, Glycine max
caatgtcggtggatgtaattcgcaaggcactccaagcaacagaagaggggtttatttcagtggttgccagacagttttctctgtcaccacaaattgcggctgttgggtcatgctgtcttgttggtgttatttgtaatggaaccctttacatagcaaaccttggggattcccgggctgttttgggaagagcagtcaaggcaactggcgaggttttagccatgcaattatcagcagagcacaatgcatcgatagagtctgtaagacaggagctgcatgcttcgcatcctgatgacccaaatattgtggttttaaagcataatgtatggcgtgtgaaaggtcttattcaagtttctagatctattggtgatgtatatttgaaaaaggccgagttcaatagagaaccactatatgc

SEQ ID NO: 26691 - DNA, 309 bp, Glycine max
  modified_base (102)..(102): a, c, g, t, unknown, or other
  modified_base (275)..(275): a, c, g, t, unknown, or other
ccgccgccagtttccgccggaataaatgcaccaccagcaagatttttcattcctctttcacgtgcatgccctctttcttgcatgatcatcactaccactctntcttattgcgagttgccaatgatgctgatagaagtgaagtgtcatctgatactgcaatcaagacatcgtattcagaagccgataagatggttgatggtatggactttggtgagctttgcaatgaagttgagtgcatcagcagtccctttgtagaaatcactgcaagacaactngcacgagatatacttgagctaaaggagggaaatc

SEQ ID NO: 26692 - DNA, 412 bp, Glycine max
gtacaaagcaaggagcttttcgagacgatggtgaggcacccttgcttcaaagacacccctttggtgctagtccttaacaagtatgatatctttgaggaaaagattagcagggtgtccctaaatacatgtgaatggttcagcgatttttgtccagttcgtgcacaccataataaccaatcactggcccatcaagcctacttctatgttgccatgaaattcaaggacctttatgcatccctcacagggaaaaaactctttgtggcacaagccatggcaagggaccgagtaactgttgatgaggcattcaagtacataaaagagatcctgaaatgggatgaagagaaggaggagaatttctatggtccacctgaggattcattttacagcacagacataagctcctcttccttta

SEQ ID NO: 26693 - DNA, 424 bp, Glycine max
  modified_base (366)..(366): a, c, g, t, unknown, or other
tgggaaagttggaaagcaaacctatttggagaaacatcttccttcgttaccaaccttgggagacaggcaagatgcattcagcgtttattttgaatgggataatgattttggaattccaggagcattttacatcaaaaattttatgcaatctgaatttttcctcgtgagtgtcactcttgaagacattccaaatcatggaaccattcactttgtttgcaactcatgggtttacaatgcaaaaagttacaaaagggatcgcattttctttgctaataagacatatcttccaaatgaaactccaactccactagtgaagtacagaaaagaagaattggaaaatctaagaggagatggaaaaggagagcngcaggaatatgataggatctatgattatgatgtctataatgattggggtaacccagac

SEQ ID NO: 26694 - DNA, 410 bp, Glycine max
ggtgtgtgggatgagaagatgatgaggaaacattggtagaagaaattgaagagagagagagagagagagagagagagagagagggttggattggttttcttcttccttttctctaaagagaatctaatctcaatcctcattacagatttcttcattcctctctcagtcttttctgttttccccctttgacatcctcgttttcgccgaaacaaaaacaactaagattttttgtttgttttgtttttcttctccttgttgttatttgactcggttgtctgaataggttgttgcagcagggtcgggagccacagctatgcagagccaagttgtgtgcaatggttgtaggagccttctgctttacccaagaggggcaaccaatgtttgttgtgcattgtgcaacacaaatacct

SEQ ID NO: 26695 - DNA, 364 bp, Glycine max
agaggggtataaatgttatgggtgcaagggttatgtgaaggcatggaaacgtctcacagtgaaacgagctccaaatattctcacaattgcgttgaaaagatttcagagtgggaggtttggaaaacttaacaagagagtaactttccctgagactgtagatcttagcccttacatgagtgaagctggagatggatctgatatttataagctatatgctgttgtagtacatattgatatgctgaatgcttcattttttggccattacatatgcttcatcaaagatttatgtggaaactggtatagaattgatgattggaaggtctcgagtgtggaattagaagaggtgctttcccagggtgcatac

SEQ ID NO: 26696 - DNA, 406 bp, Glycine max
gagaaaaaagggttaagaagtaaaagtttggtgtgaggtgtgagtgttctgcacgcaccgaatcaacaataatttctcaaacagcgttgtaaaagaaacacattagactaggcagataactatggctgtacattctgattcggcttcatccgagaagaaatcaagcaatggagtgaatgagttgctgacttttaatgctgagaacatgcaaagcaacatgaaaattatctattacagccgaacatttttatctataattggtggagttgttgctggtattttgggatttacaggcttgaaaggatttgtgttttacttacttctcatggcatttacttcacttgggctcgtggccaaagcaaagttttccacccacacatactttgactcctggaatcgagtgcta

SEQ ID NO: 26697 - DNA, 398 bp, Glycine max
  modified_base (16)..(16): a, c, g, t, unknown, or other
  modified_base (331)..(331): a, c, g, t, unknown, or other
  modified_base (352)..(352): a, c, g, t, unknown, or other
ggaagcagtggaacanagcaaggaagagaaagagatttgtttctctctaaagagtctccgctgaactttttggtttcttgaagatgtcgttactctccgatcttatcaaccttaacctctccgacatcaccgataaggtgatcgccgagtacatatgggttggtggatctggcatggatatgaggagcaaagcaaggactctctcgggactggttaatgacccttccaagcttcccaagtggaactatgatggttccagcactggtcaagctcctggacaagatagtgaagtgatcttatatccacaagcaatttttcgggatccattcangaggggtaacaatatcctggntatgtgtgatgcttacactcctgctggggaacccattcctaccaac

SEQ ID NO: 26698 - DNA, 153 bp, Glycine max
atcgattcacggggaggtaccaggggacaacgagttgcaactcgagcgagtcaacgtctattacaatgaaacgagttgcggaaggttcgtgccgagggcggtgctcatggatctagagccagggaccatggacagggtcagatctggccctac

SEQ ID NO: 26699 - DNA, 345 bp, Glycine max
ggcagccaaagaaaagaaaatcctcaattttctgagcagccaaacactctctctctgtctctcgaaaattctcagtttgcagagaaaatctgaatcatgtcgtggcaagcgtatgtcgacgatcaccttctgtgtgacatcgaaggtaaccacctcactcacgctgctatcatcggccaagacggcagcgtttgggctcagagtaccgacttccctcagttcaaacctgaggagataactgccatcatgaatgactttaatgagcctggatcacttgctccaactggattgtatctcggtggcaccaaatatatggtcatccagggtgaaccccgtgctgtcatt

SEQ ID NO: 26700 - DNA, 422 bp, Glycine max
ggagattggcagaataaggtcggaggattgagggagaatcgttcgagactgcaaaatccaaaaccaaacacaacgcacaacattcgtcattcaccgccttgtcttgtcttcttctgtctccgaatcacggaatctctctgaatcgcgggattaagagaggaatatgcaacagaggctaaagttgcagcaacaacaggccctcatgcagcaagctttgcttcaacagcagcagatgtaccaccctggcatgctcgccgctgctatgtctcagatggagcctgttccaagtggaaatgtgcctcctggttttgatacgtctgcatgccgtagtgtttatgtaggaaatattcatgtaaatgtcaccgataaacttcttgcagaagtttttcagagtgctggtcctcttgctggctgcaagctca

SEQ ID NO: 26701 - DNA, 369 bp, Glycine max
gacacaccatccgttctagtctcaacttctgctcttccaactcctacaacgctgttctctgcactcatgggcaaggtcaagatcggaatcaacggatttggaagaattggccgtttggttgccagagtcgctctgcaaagagacgatgttgaactcgttgccgttaacgaccctttcattaccaccgattacatgacatacatgtttaaatacgacagtgttcacggacactggaagcatcacgatgtcaccgttaaggacgagaagacccttctcttcggtgacaaggcagtcactgtttttggacacagaaaccctgaagagatcccatgggggtcaactggagctgacatcattgttgagtccacc

SEQ ID NO: 26702 - DNA, 407 bp, Glycine max
  modified_base (349)..(349): a, c, g, t, unknown, or other
ggaggtaaagagaaggagtgaccgaagcgaagatgttacccacagcttccaaaggacgttcttcttcctcctcctcttcctctcgacctaacaatcccatgctgcttccctacctccgcagaatcatcaagtggcaacaaatggatattgaatatactttttggcaaatgcttcatctatgtacgtccccgaaagttgtctatcagcatactaaatatcacaaacaaaccaagaatcaatgggcacgtgatgatcctgcatttgttgtgatctgcagtcttcttttggcagttgcaactttggcttattgtgcggcgtatgaccatagtactgcacatacacttcttgntatcttctcagtgttggttttccactttatattgactggtgtatttcttgcaacattt

SEQ ID NO: 26703 - DNA, 338 bp, Glycine max
gtttaatctttttggctgtgttatgcttctcagcactgtcactgagtcgttgtcttgcggaggataatggacttgttatgaacttctacaaggaatcatgccctcaggctgaagacatcatcaaagaacaagtcaagcttctctacaagcgccacaagaacactgctttctcctggctcagaaacatcttccatgactgtgctgttcagagttgtgatgcttcacttgtgctggactccacaagaaggagcttgtctgagaaggaaacagatagaagctttgggttgagaaatttcaggtacattgagacccatcaaagaagctttggaaagggaatg

SEQ ID NO: 26704 - DNA, 436 bp, Glycine max
  modified_base (400)..(400): a, c, g, t, unknown, or other
gttagaagtggcttcagagttagagcagcttaggttgagtaggtggactacattgggagacaacaattgtgcaacctcgacggaattgtcctcctgttcttcctcgtcaagtgaatgtgagaaaccactaagcattgcaacgaggaattttggggcaaagggtaaaggccacctcaagctccaaactgggcctattaatttaaagtcattacaaaggcccaatagtaactcaccagtctcggtgcaagaccaagacttgtggttgagtgagcagagctctccttcgtcaagtagttttccaagcaagtcatttgattgatccaatacaactatcttttttatggaatagtttgtttgtaaatcatttgaattacctcgaaggaggcaaacaaacaaacangcaaacatgaattaatttctcactaaggtgttcggg

SEQ ID NO: 26705 - DNA, 418 bp, Glycine max
gaatcaagtattggagcaacaaatgccttcctttaatcggccttctaaaattgtatgtagagtggtcaatgttcatcttcgagctgaacctgaaacagatgaagtatatgcacaaataactttgcttcctgaagcagatcaaagtgaggtgacaagccctgatgatcccctgcctgaatctccaaggtgtacagtccattcattttgcaagacactcactgcttctgacactagcactcatggaggtttctctgttcttcgaagacatgcagatgattgtttgccaccactggatatgactcagcagcccccatggcaagaattagttgcaactgatctgcatgggaatgaatggcattttagacattattttcgagggcaacccaggcgccacttacttgacacttggtggagtgtc

SEQ ID NO: 26706 - DNA, 296 bp, Glycine max
  modified_base (11)..(12): a, c, g, t, unknown, or other
  modified_base (80)..(80): a, c, g, t, unknown, or other
  modified_base (98)..(98): a, c, g, t, unknown, or other
  modified_base (270)..(270): a, c, g, t, unknown, or other
tgaccagcacnntggataagttggaacctgtttaatctcataatcaaagttgtgcctagattgggctggctttcttcatntttgcaatcattcacttntgaaagaagatactccggcagagcttctcaacttgacagcttcggaattttgtgtgaaatgggtattatttgaagggttcaaatcgcattcccttaatatttgaaccgagactttcagtgtatggggccataggcttgggactcaagacttcttgcttggtgttactcttgngtgatttgttcttggatggcatacta

SEQ ID NO: 26707 - DNA, 352 bp, Glycine max
gacactaaacaagttaaaagaagagcatcactggactaacaaagcagccctatgtcgaatgtggtttgtgtcaccggagccagcggctccatcggatcatgggtggtcctactcctcctccagcgtggttacaccgtccatgccaccgtccaagatatcaaggatgaaaatgagacgaaacatttggaggaaatggaaggagcaaagagtcatctccatttttttgaaatggatcttcttgacatcgactacattgccgctgccataaagggttgttccggcgtaatccaccttgcatgtcctaacatcatgggtcatgtcgaagatcccgagaaacagatattggaaccgg

SEQ ID NO: 26708 - DNA, 328 bp, Glycine max
tctataacaccacatattgggatactaaacaagttaaaaaaacaacgtcactgttctatctaaacagcgcctacgtcaaaattaattttaatcacctaaaccatcttctccatcatatcatacctagtactactcctcctccatcttttttacacctttcataccaccttccaacatatcatctattaaaattaaactaatcactttgatctaatataatgatcatacatttatcttcatttttttcaaatgtatcttctttacatctactatatttccacttccataaaagtttattccttcctaattcaccattcatatcctaaca

SEQ ID NO: 26709 - DNA, 326 bp, Glycine max
actgctgagagcgctttacagagacatggccgggtataatcagatggaaacccgatatgaggcccaagaagaaacagggcggaaacttgatcatggagatatctttaggccaccagtccatacatatctgttttgcgtttatgaccgtactggtgttcagatctttgcaacgacacttgtgacattgatatttgctctgctagggcatttgtattcatataatcgtggaggtctcatgactgctaccgctcagctgtgggtctataaggacttattaactggctactcctcaacacgtttgtacacgatgttcactgacacagaat

SEQ ID NO: 26710 - DNA, 432 bp, Glycine max
ggaaacgaagcgaaatttccacctgcatcatgttcaaacctgcgcttcttttgaaccgatttgtgctgttttgttagtgaagcacatcgagtgcaaactgtcgaacaggcatggcaagcctgttgacaacatcagccatcacctattctcctctcaacaatggttccaaggatttcagaaagtcagggaattcttctaaaggaaggtgttgcataaaagcaatggggatagagaaatccttggaggaattgtacaatgtgaaggtggaaagaaaagtgtctcctgagaaactagctgagcttggagtttcaaaatggtcggtgtggaagactgggaaaagcaagttgccctgggactggcaggtagaccaactggtgtacattgaagaaggcgaagtgagagttgtgcctgaagggagcaaccgtttcatgc

SEQ ID NO: 26711 - DNA, 162 bp, Glycine max
gcttcacgttgggtgcaaatatctcaataatgggactgggtatttctgtaagtggggttgagctactcacactctttcaatacaattgtcccaaatttagaatctgttacttttaaataaatcgtctgctcatatttctccactttttacaaattaaatgct

SEQ ID NO: 26712 - DNA, 432 bp, Glycine max
  modified_base (329)..(329): a, c, g, t, unknown, or other
aaaaggacaacaaatgggggggaaaaaaaaaaaaaatacagcgggggtcaagaaaatcctaatcctcttgggctctttgtgtctgaagcttcactcgaaagtggaaacactgctctcatcgactcgaaagcggtttgcggtttccgtcatcggcgagacgccgccgccgtctggaattggaagaccgtcgcagtagtcgcaccatcgcagcacgcattggaaacggaaatgggttcttgtgctacatcatctgttctgactaatcaatttattccgtggtctacaaccaatactgaatctcccttggactccaaattgggcgtcatatnttataaaatgtacagaaatacaaacaaaagacaactcagtctctcttttgcttgggatagttataaaatcaggagtattggtgcgataaatcatacaaagatg

SEQ ID NO: 26713 - DNA, 431 bp, Glycine max
ggacctggggttggtcaaggcactgctgcagggcaagctgtagaagggattgcacgacaaccggaggcagagggaaaaatacgaggtactttattgcttagtttggcttttatggaagctttaacaatttatggactggttgtagcattagcacttttatttgctaatccttttgtttaatcctaaaaaaatagaaatacatatccttttttccgtggacttgctttaccggtcttgctttttcgaattctatttatattaatatttcactcctataattctttatccgttcggacaagaacacaggggaaggactaattgaaaggtgaagaattcacatactgattcgccctctttcttctcttttttagtccaatgacccccccttttttttaagataatttttctcaagtttaaaactagagagattt

SEQ ID NO: 26714 - DNA, 348 bp, Glycine max
ggttctgaaaaacgtaaatacgagttggcaagggctgactgacaagaaattcggataaataaagcaaagctaatcaacatgcttgatgaggtggcgcaaaggttcacgcattaccacaaccagatgaaaatagtgatatcatcatttgagcaagctgctggaatatgctcagcaagaacttacactgcgcttgcactggaaacaatcacgaagcaatatacgtgtttgaaggatgcaataacagtgcagattagagctgcaaacaagagtttgggagaagaggattgttttggtgctaaaactgaaggatctaggctcaaatatgaggaccatcatctaatgcaacag

SEQ ID NO: 26715 - DNA, 435 bp, Glycine max
  modified_base (404)..(404): a, c, g, t, unknown, or other
ggttctattgtgggatggttggtggttgaaactcgtggttcttctttggtggttctgggtttgcgtttgttttttctctcacctgaaaatgtcttgctgcggtggtaactgtggttgcggaagctcctgcaagtgcggcaacggctgcggaggctgcaagatgtacccagacttgagctacactgagtcaaccaccaccgagaccttggtcatgggagtggcacctgttaaggctcaatttgagggtgctgaaatgggtgtgcccgctgagaacgatggctgcaaatgtggaccaaactgctcctgcaacccctgcacttgcaagtgaggtgttgggagagcaagcttctagcagagatagcccttaattaggaataatgattaactattaatgtgtagctaanaacttatgtattatgtctgtgatggttttcg

SEQ ID NO: 26716 - DNA, 239 bp, Glycine max
acccgtccgaacacgtccgagaggactacaaaaggggaaccacaagctacggagaggggtatctaatagggaccgctgataactctaaatactacaaatagaccacatcaatccccttcttctaacctttagagatgtcatcctgatctttctatatcgctggcataacataatttgtgtccactttcttgaacctttacataaaacttctcaactatgatgcgtcatattcaaatcta

SEQ ID NO: 26717 - DNA, 373 bp, Glycine max
gccgccagaaaatattaaaatcctaggggctgggttggatttggtgaatggtttaatgcaaatgaaaccaccattctcacattctacttcccttctaagaggcaaagcacgcctctctccctacctttttaccctcatagatttcatcctctttgtcgctatcctctatggcgaagacttcatgtgcatcttcggtcaacagatccaaaactactataattaccctcacaaactcttctccacaaccggtgagttcatagttcactcactttttttcatttgaattactcagactcagttacatttctagttcatatgattatcatcatgcgattatgtatgctaattcaattcgtcaagcttttgtctcatt

SEQ ID NO: 26718 - DNA, 355 bp, Glycine max
ccgggcgaccacgcgtcgtacggtgtaagaaagcttcgaaggggcctccaaatgggggaacctgtaaaaaagggtcggtgttttagaaacgtgggtgttacaaaagaaaggaggaaaagacccatggtcatgagcatgctactcactattgctgcagctgctattgttgctcatacatccaaccatcatctgcacccttacctgtatgctgacgcattgattttgaatacagcagctatcgaacattcttaccaaccccggagccggagcctgagccggaaccgcaaccacaagagattgccagcctaaactcatcgtatcagcaatatatcgtatcagttatcgaacctgttta

SEQ ID NO: 26719 - DNA, 344 bp, Glycine max
gctgccgaaaaggtcaatgaactttttaatcgggttgaggccactctggaaactctgcttcttatactcatctcactggggattcctttgcgaattatggataagctctcgtgcagatatgtgttataatcaataacatcggcgttctgattgtttacatgattataattggtgatgtgctctctggaacatctgtcagtggagatcatcactatggaatccttgaatgattgtttggtgtgcaatggtggacaggccggacatttagtgaactttttactacacttgccatatgtgtacctcttgcgagcagtaagctaattgattcattgagattcacgttc

SEQ ID NO: 26720 - DNA, 298 bp, Glycine max
cccttccgaccggttgctttagacaacagaaggggaaaacacagtgaggaaactgaaccctgttgtttgttttttcacctgaaaattcaaaccaatatatattttgagtattttttttcctttgatttcgtggaaagttattatcacagaatctgagggttttgtagacagaacttcaggtttaacaatgaagaaggttcccaagaacagctgcaagtctgcatcacacaggctctttaaggacaaggcaaagaaccgtgtggatgacttgcagctgatgttcctggatctgcagttt

SEQ ID NO: 26721 - DNA, 406 bp, Glycine max
  modified_base (257)..(257): a, c, g, t, unknown, or other
ggagataattcaccacacaccgtttcactccatttcccacgtctttctagggtttccctgctatcttcctcaattcgaacccttcgcctttccacccttcgatttcttatcttccaattcgtcaagcgtatccgcgagtctcgatttccttctctgcaagcggattggtcgcttgtgaaggaggaacatgtattcaagagggagcggcggttacggccaatcgtacactggtcaatccgcatatggccagaacctgngtggcaattattctgggagttctgttggagggcatgatgtgggtcagcattctgtggcttctaggcattcaacaattttaggtggttctcacgacgttgatgttggtgggtataggccttcggctgcgacccagtatgggggacagtat

SEQ ID NO: 26722 - DNA, 348 bp, Glycine max
ggctgcatagtgagagtgagagatggagcagtggttgtggagggtgttgcctttgcttacaatccttgcttcctttggagcgttcttctacttgcatgattcttacacagcacagttatttcctctcataaagttaccgcgggataagtgcagccttcttccccatcgccacttatggatatccagcaaacgtattgcgaccccacaagggatcatttctggttcagtggagataaatgatgggaaaataatatctgtcgttgagggacatgctattcatgggaagcctcagcatgaagaacttattgattatggagatgctgttatcatgcctggcttgattgattt

SEQ ID NO: 26723 - DNA, 171 bp, Glycine max
aaaattcataccaatttatatttttattatattttttcctttaatttcttttaaagttattatcacataatctcatctttttctacacataacttcacctttaacaattaacaattttttcttatacattttttaattctcttttacacattctttttaattttcaattct

SEQ ID NO: 26724 - DNA, 408 bp, Glycine max
gacacacaacttgtttcaaggaaaatggctcgggttggatttcttctgggacttttcttaatggtcactcatgtcaaggggtatggttttggaggttggaccaatgcacatgccaccttctatggaggtggtgatgcttctgggacaatgggtggagcttgtggttatggaaatctgtatagccaaggttatggaactgatacaacagcactgagcactgctctgttcaacaatggcttgagctgtggtgcatgctatcaaattaaatgtgtgaatgatccacagtggtgcctttctggctccatcatagtcactgccacaaacttctgtccacctggtggttggagcgaccctgccaatcaccactttgatctgtctcaaccttgtttccagcacattgcttaatac

SEQ ID NO: 26725 - DNA, 305 bp, Glycine max
ggttgtggtgtaataaaagtaaggtcaaggtcggtcaaagcgagactcaaaccaaaaggtttattgctattaatatttggctctgtttttcagtgtcaaattgcattattgcaataatcaaatgcactaaccacactccatcacccccatatataccccttctcctctcacactaattaacacactcatcaaaaaacccttctttctttcaggttcattacttgatcagtgtcagaagggtagttgcaaattgcaatggctaagcatgatgttgaaggtggttccttctcaacaaaagactacca

SEQ ID NO: 26726 - DNA, 355 bp, Glycine max
  modified_base (285)..(286): a, c, g, t, unknown, or other
  modified_base (298)..(298): a, c, g, t, unknown, or other
  modified_base (318)..(318): a, c, g, t, unknown, or other
  modified_base (322)..(322): a, c, g, t, unknown, or other
cttgacgagtctctggcttgaaagggttccatccctcagttatcaggcactgtcttgcaaaacttgggcaaattatttgtagtcctctgcaagattaataatagtttggatgggaaacagttccctaacctctctgagctcactcttgatcactgtgttgatctaactcaatttccctcaagcatttgtggaataaagtcactacaaaacttgagtctcaccaactgccacagtttgagtcaactacctgttgaatttggcaaactaagatcactagagatcctnncgttatatgctngtccatatctagaaacactnactnctagcatgtgtgacatgaagagattgaagtata

SEQ ID NO: 26727 - DNA, 369 bp, Glycine max
  modified_base (57)..(57): a, c, g, t, unknown, or other
ccggaggggcattccaattggggaacaaccatttatctaacggatgagagactcctntccctgggggtacgagattaacaatacctcgcgatgcacctagtggcttaacatacctgcactaggaaatggatttccagataattttcagagatttcaaatcttcaaatattctattgcatgaacagtggaatgctaaactatcagactttgggttagcaaggttgggaccatcatattgactgactcatgtcttaccagcgggtgtaggaacaatgagatatgcagctactgaatatgtgcaaactggacgtctaacaataaagaatgatgtatggagctaccgtgtcttccttttatgaactcataact

SEQ ID NO: 26728 - DNA, 382 bp, Glycine max
  modified_base (286)..(287): a, c, g, t, unknown, or other
gatccaaaggaggcacgagctggtatcagggaggtccactttcttccattcaatcctgtggacaagaggactgctctaacttacattgattctgatggaaattggcatcgatctagcaaaggtgctcctgagcagatattgaacctctgcaactgcaaagaggatgtaaggaaaagggttcatggaacgattgacaagtttgctgagcgtggactccgttctttaggtgttgctagacaggaagtacctgagaaaaacaaggatagtcctggtgcaccatggcaannttgtggtctgctaccactttttgatccttcaaggcatgacagtgcggaaaccatcacaagagctctgaaccttggtgtgaatgtaagatgatcac

SEQ ID NO: 26729 - DNA, 214 bp, Glycine max
  modified_base (34)..(34): a, c, g, t, unknown, or other
tgtggaccaagaaggacctgcatctatacttacnacttgattctgtatggaatattggcatctgatcttagctaaaggtgctttccttgagcatgatattgaactctctgcaacttgcaaacgaggatgtataggataaagggttcaatggaaccgattgacacagtttgcttgagtcgtggacttccgttactttaaggtgtttgcttagaca

SEQ ID NO: 26730 - DNA, 380 bp, Glycine max
  modified_base (325)..(325): a, c, g, t, unknown, or other
ggttgcaaaagacaacggatggccatatgaccagtaaaacctggtatgttaattgaaactggacctcatagggaagaaaatagatttatgaatggaataaaatatgcagtatttacagacaaaagtattcggttattggggaaaaatcaatatacttttaatgtcgaatcgggattaactaggacagaaatcaagcattgggtcgaactcttctttgatgtcaaagtaatagctatgaatagtcatcgactcccggtaaagggtagaagagtacgaccctatatgggacatacaatgcattacagacgtatgattattacgcttncaaccggttattctattccacctcttagaaagaaaaaacttaatcaaatacttat

SEQ ID NO: 26731 - DNA, 376 bp, Glycine max
ggctgcaaatgtggaccaaactgctcctgcaacccctgcacttgcaagtgaggtgttgggagagcaagcttcaagcagagatagcccttaattaggaataatgataaactattaatgtgtagctaaaaacttatgtattatgtctgtgatggttttcgtgcactctggtgttttgtgttaaacaaacatccttagaataaagtggtcatgtcttgcctttcagcaagttcaagtgttttggacttgtgatgggtgtgttaagctcatggttgcttcttttttttttttttttaatggttggtaattggtcgcttctgtataaagttcggctaatctgaattatgaatctctgcttataatattaaatactattacc

SEQ ID NO: 26732 - DNA, 344 bp, Glycine max
ggggctgcgaggtgaggtcacaacaccttccgactgtggtgactcatgcggaggggtgccgtagcaagtatgatttcagcagctatgcgcgcaatgaagcagtcttgatgtcatagcgcttcattgcatcaggggtgaggtgctagggagtaataggcatgcagaccttccattggttcgtttgaccaaggtctacctcggcctgacaaaggctcgtcgcttgggcttcaaggctaagcatggctatgtgatttaccgtgttcgtgttacgaggggtggccgaaagaaaccagttcccaaaggtattgtttatgggaagcccacaaaccaatggagtacccaac

SEQ ID NO: 26733 - DNA, 424 bp, Glycine max
atgccagaagacggcggaagggggagacagagagactgaactccgtggtagaagcgtaaggtgagtagtaatggtcatggatgttgcaaatcaacgccaggctatgcttccacactggaagccatttctggtcccagagagtctctcatttatgtaacctctgtctacacagggaccggaatagagaagccagactatttggcgacagtggatgtggatccaaactctccaacttattccaaagtcatccataggcttcctgttccttatttaggtgacgaattgcatcacacaggctggaattcatgcagctcttgccatggagacccctcagcagaccgacgatttctcatcgtacctgcactcgtatcaggtcgagtatatgtggttgatgtgaaaacaaatccaagggctccatctttgc

SEQ ID NO: 26734 - DNA, 353 bp, Glycine max
  modified_base (72)..(72): a, c, g, t, unknown, or other
ggggaaggaaaagagtggtgtacgacactgctgcttcgcactcgatccgttacccctgcccgaacatagcanaaccaaacgacgcccaggtttcggaattgtgttctaggtttttgagtttcgattccgatcgaccgacgatgctggccaatcatttccaaaacggcatcgaaacggcgaggctcgtttggtcgcggattcctaattcggaagaatcgcagctcctcgacgacgccgttggcatccttaagaagaacgacggaggcggtgtcgagagccttgactatgaagtcattgagaattttgcttatcgtgaggaacaggcgcagagagggaagctgtatgtgagctat

SEQ ID NO: 26735 - DNA, 414 bp, Glycine max
ggagatgggacttgtaataatgggcagttctatgaatgcctgaacatggcagctctgtggaaattgccaattgtgtttgtggtggagaataatttgtgggctattgggatgtcgcatctcagagcaacctcagatcctcagatatggaagaaagggccagcatttggaatgccaggggttcatgtagatgggatggatgttttgaaggtcagagaggtggcaaaggaggcagttggaagggctagaagaggtgagggaccaactctagtggaatgcgagacctatagatttagagggcattcattggctgatcctgatgagcttcgtgaccctgctgagaaggaacactatgctcgtagggaccccatcactgcattgagaaataccttttgagaacaattagccaatgagcaa

SEQ ID NO: 26736 - DNA, 410 bp, Glycine max
ggtggccaaatcatggacaatgatgatgccatcacctatgcagcatataccattaccatcttctctaatgaataatatttccactcacaattcaatcttgtgttgtgactttaactatgtgaatttgagcaaccaaagaggtacaaggcttttgtgttcagcaaggaggcaaattagataccaagatgatggggatgataaagatagtgatgaagagtatgggcacaatgaggagattgccaagttggagtcttatagtcaatcagcaaaaggagaagtactccttgtgcatgcacttgtggaccaggaggaagttgatgtgcttatcttcaaggggttctcttcatgcttgagctacagtacctcccctgacccaacaagaagcattcttccagctagggcagtgatag

SEQ ID NO: 26737 - DNA, 217 bp, Glycine max
gcacgcgtcgacgtggaagcacaagggagatgggtagcacattatacagaggacatggtgaaatgcatttttttgacccaaagctaatgtgcctgttttaccgtaggctttttctatactaactacatcaagccacacacaaaagaaagataatatggagtatggcatgcactacatggccctctgtacttctcgcgagcaccgcatgaccaatggg

SEQ ID NO: 26738 - DNA, 307 bp, Glycine max
ggtaagatcagaggaaagcaaagtagacgagtgattgcgttgcgattgacgacgacgaggaatcatgtcttccggcggcggcggtggtaagccgttcttctgccacgtgtgcagtcagaggattacgtgctccgatgagtcggaaccattctgcccgatgtgtatggaaagtttcgtagaagaatgcaaccctaacaatgccaaccctaatctcttgcccgacagtgatgaatcttcagatcccgaactacccttgcaccgcttctcacttgtccctctcttgctctcatcagtctctatgtcccga

SEQ ID NO: 26739 - DNA, 304 bp, Glycine max
  modified_base (23)..(23): a, c, g, t, unknown, or other
ggttatcggtggaggtgatggangggtcatacgagaagtagcacaccattcttcagttgaaaagatagacatttgtgaaattgacaagatggttgttgatgtctccaaacaatacttccctgatgtagctgttgggtatgatgatcctcgtgtgacacttcatattggtgatggagttgcatttctgaaggaagttcctgaaggaacttatgatgctgttatagtggattcatccgatcctattggtcctgcccaagagctttttgaaaagcccttcttttcgtcagttgcaaaggctcttcgt

SEQ ID NO: 26740 - DNA, 407 bp, Glycine max
  modified_base (296)..(296): a, c, g, t, unknown, or other
ggcagagttaggaattgaagcatgggaagagggaaggtggtgctggagagaatacagagcaagatcaatcgccaagtaaccttctcaaagcgcagaaatggtttgctcaagaaagctttcgagctatctgttctatgcgatgctgaaatcgctctcgtcatcttctccagccgtggcaagctttttcagtatagtagcactgaaatcattgagaagtatcgtcaatgctgcttcaacatgtctcagactggcgatgtagctgaacatcaatcggagcagtgcttataccaggagcntttggtattaagagtcaagcatgagtcactccagcggactcaaaggaatcttctgggagaagaactagagccacttagcatgaaagaattgcatagtttagagaaacaact

SEQ ID NO: 26741 - DNA, 393 bp, Glycine max
gataacaaaagagttaagtgaattaaaaacccaggggaggttcatggccaaaggtaaagatatccgagtaattgttattttggaatgtaccggttgtgataaaaagagtgttaataaggaatcaacgggtatttctagatatataactaaaaagaatcgacagaatacgcctagtcgattggaattgagaaaattttgtccccgttgttgcaaacatacaattcacgcagaaataaagaaatagatcaaattgatcgcttgtgtgttacccttcgaaccaaagaacttaacatgtaaaatgatctatttttcttatctatatagatagatctatctgtattctatcatttacagttgaatatatacaaatatcagtatataacaacatatatt

SEQ ID NO: 26742 - DNA, 403 bp, Glycine max
  modified_base (379)..(379): a, c, g, t, unknown, or other
ggtgtaagaattagcaaaagacaatgattcttcaggggagaaaaatcaagttcaaccagggcttagtggtcctctgaaaaagagaattcagcagcttgttgactctaatcctgtcatgctcttcatgaaaggaactcctgaagagccaaaatgtggatttagcaggaaagttgttgttgtgttgaacgaagagagagtcaagtttggaagttttgatgtcctatcagactcagaggttcgtgaaggcttgaagaagttttccaattggcccacatttcctcagctttactgtaaaggagaacttcttggtgggtgtgacatagcaattgctatgcatgagagtggggaactgaaggaaagttttaaagatcatggaatngatactactaatgaagcaaaagag

SEQ ID NO: 26743 - DNA, 388 bp, Glycine max
gggaatgttgagacatgactttgacaaccgcgtgttggtgttcgctcgccgctgcttctctctccaccgccgccagtttccgccggaataaatgcaccaccagcaagatttttcattcctcttccacgtgcatgccctctttcttgcatgatcatcactaccactctttcttattgcgagttgccaatgatgctgatagaagtgaagtgtcatctgatactgcaatcaagacatcgtattcagaagccgataagatggttgatggtatggactttggtgagctttgcaatgagtttgagtgcatcagcaatcccttggtagaatcactgcaagacacttgcacgagatatacttgagctaatggagggaaatcaagcacttggaatct

SEQ ID NO: 26744 - DNA, 377 bp, Glycine max
  modified_base (265)..(265): a, c, g, t, unknown, or other
  modified_base (367)..(367): a, c, g, t, unknown, or other
aaaaggacaccggagggggtttaaatggaatgggtccaggggttatgtaaaggcttggaaccgtttaacagggaaacgagctccaaatattctcacaattgcgttgaaaagatttcagagtgggaggtttggaaaacttaacaagagagtaactttccctgagactttagatcttagcccttacatgagtgaagctggagatggatctgatatttataagctatatgctgttgtagtacatattgatatgctgaatgcttcattntttggccattacatatgcttcatcaaagatttatgtggaaactggtatagaattgatgattggaaagtctcgagtgtggaattagaagaggtgctttccagngtgcatacat

SEQ ID NO: 26745 - DNA, 406 bp, Glycine max
  modified_base (362)..(362): a, c, g, t, unknown, or other
gagaaaaaagggttaagaagtaaaagtttggtgtgaggtgtgagtgttctgcacgcaccgaatcaacaataatttctcaaacagcgttgtaaaagaaacacattagactaggcagataactatggctgtacattctgattcggcttcatccgagaagaaatcaagcaatggagtgaatgagttgctgacttttaatgctgagaacatgcaaagcaacatgaaaattatctattacagccgaacatttttatctataattggtggagttgttgctggtattttgggatttacaggcttgaaaggatttgtgttttacttacttctcatggcatttacttcacttgggctcgtggccaaagcanagttttccacccacacatactttgactcctggaatcgagtgcta

SEQ ID NO: 26746 - DNA, 433 bp, Glycine max
  modified_base (332)..(332): a, c, g, t, unknown, or other
  modified_base (373)..(373): a, c, g, t, unknown, or other
  modified_base (401)..(402): a, c, g, t, unknown, or other
ggaagcagtggaacaaagcaaggaagagaaagaaatgggtttctctctaaagagtctccgctgaactttttggtttcttgaagatgtcgttactctccgatcttatcaaccttaacctctccgacatcaccgataaggtgatcgccgagtacatatgggttggtggatctggcatggatatgaggagcaaagcaaggactctctcgggactggttaatgacccttccaagcttcccaagtggaactatgatggttccagcactggtcaagctcctggacaagatagtgaagtgatcttatatccacaagcaattttttcgggatccattcangaagggtaacaatatcctggttatgtgtgatgctaacactnctgctggggaacccatttctaccaacanngagaataaagctgcaaagatattcagtaatc

SEQ ID NO: 26747 - DNA, 401 bp, Glycine max
gacggacgagggtttcgtttcgggtttgacgttgttcacaatcactttctgcgcttcactcactcccttcgtgcggttttctttctttgtcgaactcgtgcgaaaatgcgtgagattcttcacatacagggagggcaatgcggaaaccagatcggagcgaagttctgggaggtggtgtgcgcggagcacgggatcgattccacggggaggtaccagggggacaacgagttgcaactcgagcgagtcaacgtctattacaatgaagcgagttgcggaaggttcgtgccgagggcggtgctcatggatctagagccagggaccatggacagcgtcagatctggtccctacggtcagattttccgacctgataacttcgtttctgccagtccggcgccggaaac

SEQ ID NO: 26748 - DNA, 427 bp, Glycine max
ggcagccaaagaaaagaaaatcctcaattttctgagcaaccaaacactctctctctgtctctcgaaaattctcagtttgcagagaaaatctgaatcatgtcgtggcaagcgtatgtcgacgatcaccttctgtgtgacatcgaaggtaaccacctcactcacgctgctatcatcggccaagacggcagcgtttgggctcagagtaccgacttccctcagttcaaacctgaggagataactgccatcatgaatgactttaatgagcctggatcacttgctccaactggattgtatctcggtggcaccaaatatatggtcatccagggtgaacccggtgctgtcattcgagggaagaagggtcctggtggtgttactgtgaagaagaaccgtgcggccttgaccatggcatttatgatgaccaatgact

SEQ ID NO: 26749 - DNA, 414 bp, Glycine max
ggagattggcagaataaggtcggaggattgatgtgagaatcgttcgagactgcaaaatccaaaaccaaacacaacgcacaacattcgtcattcaccgccttgtcttgtcttcttctgtctccgaatcacggaatctctctgaatcgcgggattaagagaggaatatgcaacagaggctaaagttgcagcaacaacaggccctcatgcagcaagctttgcttcaacagcagcagatgtaccaccctggcatgctcgccgctgctatgtctcagatggagcctgttccaagtggaaatgtgcctcctggttttgatacgtctgcatgccgtagtgtttatgtaggaaatattcatgtaaatgtcaccgataaacttcttgcagaagtttttcagagtgctggtcctcttgctggct

SEQ ID NO: 26750 - DNA, 383 bp, Glycine max
gacacaccatccgttctagtctcaacttctgcggttccaactcctacaacgcttgtctctgcactcatgggcaaggtcaagatcggaatcaacggatttggaagaattggccgtttggttgccagagtcgctctgcaaagagacgatgttgaactcgttgccgttaacgaccctttcattaccaccgattacatgacatacatgtttaaatacgacagtgttcacggacactggaagcatcacgatgtcaccgttaaggacgagaagacccttctcttcggtgacaaggcagtcactggttttggacacagaaaccctgaagagatcccatgggggtcaactggagctgacatcattgttgagtccaccggagtttcaccgat

SEQ ID NO: 26751 - DNA, 378 bp, Glycine max
gtagtgtgcaagagtgaagagcgaagagaatggctcggaagggtttaatctttgtggctgtgttatgcttctcagcactgtcactgagtcgttgtcttgcggaggataatggacttgttatgaacttctacaaggaatcatgccctcaggctgaagacatcatcaaagaacaagtcaagcttctctacaagcgccacaagaacactgctttctcctggctcagaaacatcttccatgactgtgctgttcagagttgtgatgcttcactgttgctggactccacaagaaggagcttgtctgagaaggaaacagatagaagctttgggtgagaaatttcaggtacattgagaccatcaaagaagctttggaaaaggaatg

SEQ ID NO: 26752 - DNA, 416 bp, Glycine max
  modified_base (317)..(317): a, c, g, t, unknown, or other
gtagccaaagtcattggaacggttataacagtttcaggagctatggttatgactctgtacaaaggccctgccttccaaatcataaagggtggaggagccatcagcaaccatagcaactctagcagtactagtaccaccgaaccctctgaccagcactggatagttggaactgtttatctcatatcaagttgtgctagttgggctggcttcttcattttgcaatcattcactttgaagaagtacccggcagagctctcactgacagcttggatttgtgtgatgggtattattgaaggttcaatcgcatccctgatatntgaacgagacttcagtgtatgggccataggctgggactcaagacttcttgcttgtgtttactctgaggtgatttgttcttgaatggcatactatgtaca

SEQ ID NO: 26753 - DNA, 119 bp, Glycine max
actacagaaggggtagataatgcaataggatcggacataagagagtcatgtgctatagatctgaatgtatacatatgtgatgcataatatgtgagtatatagagtgggatccttaactg

SEQ ID NO: 26754 - DNA, 417 bp, Glycine max
  modified_base (339)..(339): a, c, g, t, unknown, or other
ggtggactagaaagtagaaacacaaagagaagacgagtcctcgagattcctaaaccaactttgcaatcgcacctcgaatcaatcgacactcagcggaaaccctagaaagtaataataataataataacaatagaatgcgaatttattagagattgcaaaaggtgggaagaggaatggcgaagcattcggtggcaatggcgaagaagcggtggctgataatgttggcggcattcctgtccgtctcaacagtgacggtgctcttaatgagatccaacaactccgattcctgcaacaccaaccattttactattgcacaagataataaccagattcgttccnctgtccaactcactaatgccgctttcagcccccttaatttcatgaagttcaagctaagtctcatggtttcgcacgagc

SEQ ID NO: 26755 - DNA, 381 bp, Glycine max
acaacccgtccgaccggatgcaagaggcctccttaagggggccctaacaccaactaacgggcgggttccaaggcggagaaggcaggaatggccaccaacgaggagagggatatggagaacaagaagagtgaggaagaactgaagcatctcgggtttgtgaagattgcggcaatgaaagccttagtgtgtgtgtcgaatctctacggcttcgcatagcaaaactcgggacttttgagatctgctgttggaaccgtggaagacactgtaaccaccgttctgggtcccgtctaccacaaattcaacgctgttcccaaccacatcctcctttttgtcgacaacaaggtggatgaagctggtcacatattcgatgagcatgcacct

SEQ ID NO: 26756 - DNA, 131 bp, Glycine max
gcttcttgaggggtgcaaatatctcagtaatgggtgggattatttctgtatctgggggccaggtactcacactctctcaatcaaatgtaccaaattaagaatctgatactcttaacgaaatcgtctgcaca

SEQ ID NO: 26757 - DNA, 335 bp, Glycine max
ctcctattgcaggtttattttactctgtgtttcgccgcggttgctgcggctgttggggcttaccttcatgtcctcttgaacattgggggttttcttactacattggcatgcgtgggaagcagtgttcggttactctcgacacctccttttgaagagaggaaaagagtgactttgttgacggccgaatgactgtttcagggtgcctctattggacccttgatagatttggctattcaaatcgatccaagccttatctttagtgcatttgtgggaacatgcttggcctgtgcatgcttctcatgagcatacttggttgctaggcgtaaggagtacct

SEQ ID NO: 26758 - DNA, 415 bp, Glycine max
  modified_base (301)..(301): a, c, g, t, unknown, or other
  modified_base (334)..(334): a, c, g, t, unknown, or other
  modified_base (383)..(383): a, c, g, t, unknown, or other
ggggcaaaaaaaaaaaaatacagcaggggtcaagaaaatcctaatcctcttgggctctttgtgtctgaagcttcactcgaaagtggaaacactgctctcatcgactcgaaagcggtttgcggtttccgtcatcggcgagacgccgccgccgtctggaattggaagaccgtcgcagtagtcgcaccatcgcagcacgcattggaaacggaaatgggttcttgtgctacatcatctgttctgactaatcaatttattccgtggtctacaaccaatactgaatctcccttggactccaaattgngcgtcatattttataaaatgtacagaaatacanacaaaagacaactcagtctctcttttgcttgggatagttataaaatcangagtattggtgcgattaaatcatacaaagatg

SEQ ID NO: 26759 - DNA, 431 bp, Glycine max
ggacctggggttggtcaaggcactgctgcagggcaagctgtagaagggattgcacgacaaccggaggcagagggaaaaatacgaggtactttattgcttagtttggcttttatggaagctttaacaatttatggactggttgtagcattagcacttttatttgctaatcctttagtttaatcctaaaaaaatagaaatacatatccttttttccgtggacttgctttaccggtcttgctttttcgaattctatttatattaatatttcactcctataattctttatccgttcggacaagaacacaggggaaggactaattgaaaggtgaagaattcacatactgattcgccctctttcttctcttttttagtccaatgacccccccctttttttaagataatttttctcaagtgttaaaacttgagagatt

SEQ ID NO: 26760 - DNA, 275 bp, Glycine max
tgagggctgtaccgagaagactacagaagctgatgctggggatgtattacattgaagcactctagtttacttttgggtacatgtatcgtttcgtttagtttcatcccactcaacgtatttggtattttttcaccgttcactaatgtcttgttaatgtgtgcaaagactactagatattatcttattctaagtaagtttttgtggttcacattcttaggcatgtacaacgcattgaatgtatcatatcccatgaaatgtctaattactgctaactt

SEQ ID NO: 26761 - DNA, 424 bp, Glycine max
  modified_base (369)..(369): a, c, g, t, unknown, or other
ggttctagtgtgtgattgtttgttgttgtaactcgtgcttcttcttttgttgttctgtgtttgtgtttgttttttctctcacctgaaaatgtcttgctgcggtggtaactgtggttgcggaagctcctgcaagtgcggcaacggctgcggaggctgcaagatgtacccagacttgagctacactgagtcaaccaccaccgagaccttggtcatgggagtggcacctgttaaggctcaatttgagggtgctgaaatgggtgtgcccgctgagaacgatggctgcaaatgtggaccaaactgctcctgcaacccctgcacttgcaagtgaggtgttgggagagcaagctttcaagcagagatagccctttnttaggaataatgattaactattaatgtgtagctaataacttatgtattatgtctg

SEQ ID NO: 26762 - DNA, 336 bp, Glycine max
cccggtcgacgacgcgtcgacgcgtcgacactccgaaggactacttagggggacacttgatgaaaaacgtgatcggaagttttaaaaaactcgagttgtggtccaaaaagaataggaagaaaatgacccatggccatgagcatgctcctcactattgctgcaactgctattgatcctgatacatccaaccattatctgcacccttaccttcatcctaatgccttgattctgaatacagcaactatggaacattcttaccaacctcggagccatgacctgagccggaaccgcaaccacaagagattgccagcctaaactcatcgtatcatcaatata

SEQ ID NO: 26763 - DNA, 55 bp, Glycine max
gcttcataagcagttcttgcatcctatcaattggtgggattacttctgtctctgg

SEQ ID NO: 26764 - DNA, 428 bp, Glycine max
gttgcatgaaaatgataactttgaagatcaatgttgtcatgattttgatcccactgcttttagtatccatgctgattctgatcctgttagtttggatgaatctctggatgaagctcatttcagttcaccagcttttggcaagagagatcaattacaaactggtacatttgatgctgcacaagcaaaggaaactggcagattaggtgaatttcttgcatgcaaatactttgtcgataaagttggcaatactgcagtaaggtgggttaataaagataatgaaactggacttccatatgatttagtcattggggaggataacagccaagaattcatagaagttaaagcaaccagatctccaagaaaagactggttcaacatatcagcgagagagtggcagtttgcaaatgaaagatgccaatcttttagca

SEQ ID NO: 26765 - DNA, 340 bp, Glycine max
gttgccagagaagtcaattgagcttttgattgggtttacccaccctgggaggtctgctttttatactgatataatggcgcattcctttgacaattatggatacgctctcgtgcacatatgtgctataatcaataacatcagcattctgattgtttacatgattataattggtgatgtgctctctggaacatctgccagtgtagatcatcactatggactccttgactgactgtttggtgtagcaatggcggacaggccggacatttgttgtactttttactacactcgtcatatctgtacctatagcaagcagtaatctaattcattcatcgagattcac

SEQ ID NO: 26766 - DNA, 299 bp, Glycine max
ggagacacagtggggaaactgaacccttttgtttgttttttcagctgataattcagaccaatatatattttgagtatatcttttcctttgatttcgtggaaagttattatcacagaatctgagggttttgtagacagaacttcacgtttaacaatgaagaaggttcccaagaacagctgcaagtctgcatcacacaggctctttaaggacaaggcatagaaccgtgtggatgacttgcagctgatgttcctggatctgcagtttgctaggaaggagagccgcacggttgatgccgtggt

SEQ ID NO: 26767 - DNA, 324 bp, Glycine max
  modified_base (39)..(39): a, c, g, t, unknown, or other
  modified_base (58)..(58): a, c, g, t, unknown, or other
  modified_base (103)..(103): a, c, g, t, unknown, or other
  modified_base (112)..(112): a, c, g, t, unknown, or other
  modified_base (127)..(127): a, c, g, t, unknown, or other
  modified_base (255)..(255): a, c, g, t, unknown, or other
aaaaaaaaaaaaaaaaaaaaaaaaaaaaaaaaaaaaaanaaagaaaaaaaaaaaaaanaaaaaaaaaaaaaaaaaaaaaaaaaaaaaaaaaaaaaaaaaaaanaaaaaaaanaaaaaaaaaaaaaanaaaaaaaaaaaaaaaaaaaaaaaaaaaaaaaaaaaaaaaaaaaaaaaaaaaaaaaaaaaaaaaaaaaaaagggaaaaaaaaaaaaaaaaaaaaaaaaaaaaaaaagaaaaaaaaaaaaaaggaagaanaagaaaaaagaaaaaaaaaaaaaaaaaaaaaaaaaagaaaaaaaaaaaagaaaaaaaaaaaaaaataaa

SEQ ID NO: 26768 - DNA, 425 bp, Glycine max
gatcgagagtggggtgctcgcatgacaaaagcaggtctggttcctccagttactagaaaatatgaagtcattgaccaatattgcattgtagctgatgaggaggatgtgcgaaggaagatgagggtttcattacctgatgactatgctgagaaactgagtgcacaaaagaatggcactgacgagtcagatatggaacttcctgaagtaaaagattacaaacctagaaagcagctaggaaatgaggttatcgagcaagaagtttatggaattgatccttatacgcacaatcttttgcttgattctatgccagaggagttagattggtctttgcaggagaagcatttgtttatagaagacacactccttcgaacattgaataagcaagttaggaattttactggagctggaagtacttcaatgagcta

SEQ ID NO: 26769 - DNA, 311 bp, Glycine max
gttatagaaagagtgaggagagaattacaggggggtttccaacacgattacgcgaccgaatcaaaccctctctttctctccgaagctgcgtttaatatcttactcgccttagattgttcttctctttcattatactgttctcttttcgatttgagggaacagtacatgagtgtgaggatcggttaacccaactgcacatgttgtcactaaaataatggatccttacgatgagactggatgccatgctcctgaacgccccattctttgcattaataattgtggcttcttcggaagaacatctaccatgaaca

SEQ ID NO: 26770 - DNA, 342 bp, Glycine max
gacacacaacttgtttcaaggaaaatggctctggttggatttcttctgggacttttcttaatggtcactcatgtcaaggggtatggttttggaggttggaccaatgcacatgccaccttctatggaggtggtgatgcttctgggacaatgggtggagcttgtggttatggaaatctgtatagccaaggatatggaactgatacaacagcactgagcactgctctgttcaacaatggcttgagctgtggtgcatgctatcacattaaatgtgtgaatgatccacagtggtgcctttctggctccatcatagtcacttgcacaaatttctgtccacctggtggt

SEQ ID NO: 26771 - DNA, 217 bp, Glycine max
cgagagggcagcagatgtgggaaggggtaacattgcaacagatgcgatattttccttgaagacagcccatcaggaacatgcctcatagatggatactcagatgccttatatagacggatgagcagctacacaatgaatcacgtagattgtagattgcgggacacgaaattattcatggacagactatgaaaatattacacactgacatgtacccatt

SEQ ID NO: 26772 - DNA, 377 bp, Glycine max
gattgtgaattcacttatttgtccacacagatactgcacttcctgggagttgaaggaccaaaaacttctgaccccagcaaatatattcgttatatttataacagagtacatcttgagaatgcgactgttagggctggtgctgtgagcacattggcaaagtttggtgctgctgttgatgaattaaagccccgcatattcatactgctaaggcggtgtctttttgatagtgatgatgaggttcgtgacagagcaacgctttatctgaacacacttggaagtgatggttcagttgttgagacagataaagatgtcaaagattttctctttgggtcatttgatatcccacttgtcaatctggagactaagttgaaaaacta

SEQ ID NO: 26773 - DNA, 304 bp, Glycine max
gaggacaacaagaagagattctagtgtgtaatggcaagatggagggaccatgtcgaatggttgtggtcactagtatatgtgttggctcttacgctcagcatgagactgtcttgctgctctgatatccgtgatatatgaagcatctgctagtgcatattcaattgaagagactactagcagcaccgagcctagagcggcactgaatcatccaacgacgaaaccttggtcatgagagaatcccctgcaagagctaactccgagggagctgatcagagcgcacacactgagaactaaagatggctat

SEQ ID NO: 26774 - DNA, 364 bp, Glycine max
gataatattaaaccacagtacctcacatgcccggctggaaaatgtttcaggtttgatgaatttgaccaacttgaagagtctctggcttgaaaaggtttccatccctcagttatcaggcactgtcttgcaaaacttgggcaaattatttgtagtcctctgcaagattaataatagtttggatgggaaacagttccctaacctctctgagctcactcttgatcactgtgttgatctaactcaatttccctcaagcatttgtggaataaagtcactacaaaacttgagtctcaccaactgccacagtttgagtcaactaccttgtgaatttggcaaactaagatcactagagatccctccgttatat

SEQ ID NO: 26775 - DNA, 351 bp, Glycine max
gatgatgaagtacttcttgcaatggcagaagagttgggagtgttcattccttatgttgggggagtggaacatgctagtgtgttgctgccaccgctggagacactttgcactgttgaggaaacctgtgtgagagataaagctgcggagtcactttgtagaattggatctcaaatgagggagagtgatttggttgaatattacatcccgttggtgaagagattggcagcaggtgaatggtttactgctcgagtctctgcatgtggactatttcatattgcataccctagcgcaccagatacatcaaagacagagttgagatcaatatacagtcagttatgtcaggatgacatg

SEQ ID NO: 26776 - DNA, 366 bp, Glycine max
gttacagaagtgtggaacaccatttatctcacggatgagagactcctctcccatggagtacgagattaaaaatagctcgcgatgcacctagtgggttaacatacctgcactaggaaatggattcccagataattatcagagatttcaaatcttcaaatatcctattgcatgaacagcggaatgctaagctatcagactttgggttagcaaggttgggaccatcagatggactgactaatgtcttaacagcggttgtcggaacaatgagatatgcagctcctgaatatgtgcacactggacgtataacatcaaagaatgatgtatggagctaccgtgtcttcctttatgaactcataactggcaggc

SEQ ID NO: 26777 - DNA, 389 bp, Glycine max
  modified_base (346)..(346): a, c, g, t, unknown, or other
gatccaaaggaggcacgagctggtatcagggaggtccactttcttccattcaatcctgtggacaagaggactgctctaacttacattgattctgatggaaattggcatcgatctagcaaaggtgctcctgagcagatattgaacctctgcaactgcaaagaggatgtaaggaaaagggttcatggaacgattgacaagtttgctgagcgtggactccgttctttaggtgttgctagacaggaagtacctgagaaaaacaaggatagtcctggtgcaccatggcaatttgttggtctgctaccactttttgatccttcaaggcatgacagtgcggaaaccatcacangagctctgaaccttgtgtgaatgttaagatgatcacttgtgat

SEQ ID NO: 26778 - DNA, 274 bp, Glycine max
ccactttcttccattcaatcctgtgtacaagaggactgctctaacttacattgattctgatgtaaattgtcatcgatctatcaaaggtgctccttatcagatattgaacctcttcaactgcaaacaggatgtaatgaaaagtgttcatggaacgattgacaagtttgctcatcgtggactccgttctttatgttttgctatacattaagtacctgataaaaacaatgattgtccttgttcaccatggcaatttacttggtctactaccactttt

SEQ ID NO: 26779 - DNA, 368 bp, Glycine max
  modified_base (111)..(111): a, c, g, t, unknown, or other
acatatgaacagtaaaaactagtaggtaaattgagactagaactcatagggaagaaaatagatttatgaatggaataaaatatgcagtatttacagacaaaagtattcggntattggggaaaaatcaatatacttttaatgtcgaatcgggattaactaggacagaaatcaagcattgggtcgaactcttctttgatgtcaaagtaatagctatgaatagtcatcgactcccggtaaagggtagaagagtacgacctattatgggacatacaatgcattacagacgtatgattattacgcttcaaaccgggttattctatttcacctcttagaaagaaaaaaacttaaattaaaatacttaatagcat

SEQ ID NO: 26780 - DNA, 398 bp, Glycine max
acgacgggctcatttgtgatacatgacgttgaaacctgagaggaaagtttaattggcagcattgcatttccataagaacctccgctagctagctgcgtataaaatataaaatataaaggggaaaaaaaaaacgagaaaacagtgtcatattattattccttccttctcactgtgtctggtgcataaacctcaacaacacactcttcaattttctagggtttgagttttgctccctttttcttcgccttcttcaatggccgcttccttgctcctgagatccgcgcttctcgctccttcctcctgcgatcgccccaaggtatataccaatgcctcaagttctaatttaaaatccaagggattacatagcaacaatttttgtacttcaattcaatgtgact

SEQ ID NO: 26781 - DNA, 304 bp, Glycine max
cggcccacgcgtccgcccacgcgtccgcggacgcgtgggcggacgcgtgtatgcggagagtggtgtacgacacgggggcggctgactcgatcggttgcccctgcccgaacatagcagaaccaaacgacgcccaggtttcggaattgtgttctaggtttttgagtttcgattccgatcgaccgacgatgctggccaatcatttccaaaacggcatcgaaacggcgaggctcgtttggtcgcggattcctaattcggaagaatcgcagctcctcgacgacgccgttggcatccttaagaagaacga

SEQ ID NO: 26782 - DNA, 112 bp, Glycine max
acgcgtccgaagactacagaacgggcttactaacatactaatgccattcaattgaaggtttaattaccccgtttccatgtctatcataataaacattcccacactttacatc

SEQ ID NO: 26783 - DNA, 402 bp, Glycine max
ggagatgggacttgtaataatgggcagttctatgaatgcctgaacatggcagctctgtggaaattgccaattgtgtttgtggtggagaataatttgtgggctattgggatgtcgcatctcagagcaacctcagatcctcagatatggaagaaagggccagcatttggaatgccaggggttcatgtagatgggatggatgttttgaaggtcagagaggtggcaaaggaggcagttggaagggctagaagaggtgagggaccaactctagtggaatgcgagacctatagatttagagggcattcattggctgatcctgatgagcttcgtgaccctgctgagaaggaacactatgccggtagggaccccatcactgcattgaagaaatacctttttgagaacaat

SEQ ID NO: 26784 - DNA, 351 bp, Glycine max
ggtggccaaatcatggacaatgatgatgccatcacctatgcagcatataccattaccatcttctctaatgaataatatttccactcacaattcaatcttgtgttgtgactttaactatgtgaatttgagcaaccaaagaggtacaaggcttttgtgttcagcaaggaggcaaattagataccaagatgatggggatgataaagatagtgatgaagagtatgggcacaatgaggagattgccaagttggagtcttatagtcaatcagcaaaaggagaagtactccttgtgcatgcacttgtggaccaggagtgaagttgatgtgcttatcttcaaggggttctcttcatgct

SEQ ID NO: 26785 - DNA, 377 bp, Glycine max
gacttcaaagtggagaaaaacacacacgggtgggtcattctctctcttgtctttttcctcaaaaagttgaaaaagaataaagggggaacaatcgagtgaagttgttgctcttcaatagtaaacttacctatggaagagggaagggttgtgagtgggtacacaaaagatggaactgtggatcttaaagggaaacccattctcaaatccaaaagtggtggttggaaagcatgctcctttgttgttgggtacaagatatttgaaagaatggcttattatggaatatcatcaaatttgatactgaatctgactaggaagcttaaccaaggcactgtgaccttttccaacaacgtgaccaattgggttggcaccatttggat

SEQ ID NO: 26786 - DNA, 427 bp, Glycine max
gggagaaaaggggaagacagaagtggaagcagtgagaactgagaactcttatcattcttttttccacttgacattgccgacgccaccaaatacacaaccttaactttcccacaacactacccatccatcattcgttttctctctagattttttcagttagttattgctgtcttctttttgtgtgtgccaacaacacagaaagagagagaaagacatggctctgaaccaatcaaaggccgtgttgttgagggtgagtttggtggtggtggcgctgtgtatagcacgatacatagtgggtccccctctctactggcatttcgttgcggtgaacaaccactcttcatcttctacttgtgcaccctgcatctgcgattgctcttcacaacccattctatctattccacagggacttatcaacactttcttc

SEQ ID NO: 26787 - DNA, 240 bp, Glycine max
ggtctcgtgataccatttaatttcacagcgattaattatgtatagttaagtgtggagtgcagtgcaggtcaaggcctgagattcggttctttacttgttgggttgttctgatcttctctcatagcaatcaaatcacactcacatcttctcatctcgtaaaccctaaaccccgttttcagtgacatcgagatcgatcgaacatggatgaggagtacgatgtgatcgtgttgagcacgggtc

SEQ ID NO: 26788 - DNA, 453 bp, Glycine max
gagttcagacggtgatgctgctgcatccccacctatgggtgttgcttcttgtgttacaacagtttctgaggttgcttcctcttcctattccagtgagtttgaagccaggcttaagaatttgttgggttctcattctgataaccctaaccttacccctgaggaggttgtggaggcttcaaaagctgcagcagtggctgcatctaaagctgcaaaggctgcaagagctgcggccaaggagaaggccgagactgcagcataggcagttgcagctgccaagagggctttggatttagtttcctccttctctgaagaggcagtgagcagcatggagaggaacctaacgaagaacatgctcatgaagcacctaccagttcatctcttgtacaaaacataccagcccattgaaaattgtgggactgatgaagaattggccaggaagtacatcgcgccatg

SEQ ID NO: 26789 - DNA, 393 bp, Glycine max
ggaagaaaggcagagttattgccattgcgtctgcctcttgcaacaccaaactgatacacacttaataatattatagtaaaaattagccaccaaagtacactaaccccttttttcatacaactcaatagctggattggagcaaggtgaaagtaaaatcatttgcaaccaatgccgttgaacatatttcaggacaaagatggattgccacggattatattgactgagccaaagggttcatcagctgaggttcttctttatggagggcagattatttcttggaagaatcatcgaaaggaagaacttctttttatgagcagtaaggctaacaagaaacagcataaagcaatcagaggaagaatatcagcttgcctagcacggtttggtgatctcagt

SEQ ID NO: 26790 - DNA, 341 bp, Glycine max
gtagtgctctattggaaatgatgatatggcatgtaccctctccatcaacagcccataagtatcgtgtggagaacttgtatgagggtcctcttgatgatcaatatgcttctgctatcagaaattgtgatcctgaaggtcctctgatgctctatgtctccaagatgattccagcatctgataaggggagattttttgcctttggccgtgtattctttggcagggtttcaactggtttgaaggtgaggattatgggacctaattatgtccctggggagaaaaaggatttgtatgttaaaagtgggcaactaactgtcatttggatgggaaagaggcaagaaact

SEQ ID NO: 26791 - DNA, 383 bp, Glycine max
gacactaaacaagttggaagaagagcatcactgaactaacaaagcaaccctatgtcgaaggtggtttgtgtcaccggagccagcggcgccatcggatcatgggtggtcctactcctcctccagcgtggttacaccgtccatgccaccgtccaagatatcaaggatgaaaatgagacgaaacatttggaggaaatggaaggagcaaagagtcatctccatttttttgaaatggatcttcttgacatcgactccattgccgctgccataaagggttgttccggcgtaatccaccttgcatgtcctaacatcattggtcaagtcgaagatcccgagaaacagatattggaaccggcgataaaaggaacggttaatgtgttgaaggc

SEQ ID NO: 26792 - DNA, 372 bp, Glycine max
tttacttggttatcattagattggggggggcggatcttttcgagagtaggttcggatcgctcggtctcgctaggtcaccgctgaccataatttgaacttctcgtcactactaagccgttatttagctaaagcttgtgttgggagaaagcatagagcatctagtttgttaacaatggaagatgatctgttggacacagaagacaggaacaacaatggcagtttcaccttatagaaatcgaatcactggcgaacgaggtatgagttcatggttgactatgatggccaagttggggccccagagaagctggcaaatagaatcttggtatctctgactaaggccttcctatgctttgggaattgggtcccaaacct

SEQ ID NO: 26793 - DNA, 351 bp, Glycine max
gacggacgagggtttcgtttcgggtttgacgttgttcacaatcactttctgcgcttcactcactcccttcgtgcggttttctttctttgtcgaactcgtgcgaaaatgcgtgagattcttcacatacagggagggcaatgcggaaaccagatcggagcgaagttctgggaggtggtgtgcgcggagcacgggatcgattccacggggaggtaccagggggacaactagttgcaactcgagcgagtcaacgtctattacaatgaagcgagttgcggaaggttcgtgccgagggcggtgctcatggatctagagccagggaccatggacagcgttagatctggtccctacggt

SEQ ID NO: 26794 - DNA, 350 bp, Glycine max
gggttctagtgtgtgattgtttgttgttggaactcgttcttcttcttttgttgttctgtgtttgtgtttgttttttctctcacctgaaaatgtcttgctgcggtggtaactgtggttgcggaagctcctgcaagtgcggcaacggctgcggaggctgcaagatgtacccagacttgagctacactgagtcaaccaccaccgagaccttggtcatgggagtggcacctgttaaggctcaatttgagggtgctgaaatgggtgtgcccgctgagaacgatggctgcaaatgtggaccaaactgcttcttgcacctctgcacttgcaagtgatgtgttgggagggcaagcttc

SEQ ID NO: 26795 - DNA, 426 bp, Glycine max
gatgaggagggaggtgtaagaaactgggaagagaaggtggtggtcttgttgccattctgatctaaagcttgtgtctttctgcttcgtttgcatcttctgctgcgtaaagttgattcttttctgattcttccgtagatttcatctctgaaactagttctaatactttatctacagatctctatattctaggtgaaggtttgcttttgatccggcttgggagttttgatagacttgattctaactctttaagagccatatgctcacagtggtcggatatagtacatcagaagttcacacaagagatatatataattattcttgggtaccacctgcagaatgtcattccgcagcatagttcgtgatgtaagggatagtttcgggagcttatctaggcgtaattttgatgtcagacttactgtgcatcat

SEQ ID NO: 26796 - DNA, 88 bp, Glycine max
gtcaatccaatccattattaaagggataggccggggccttacaacgcagctcagccaaaattcgctacttgtaaagggctgcactata

SEQ ID NO: 26797 - DNA, 288 bp, Glycine max
  modified_base (96)..(96): a, c, g, t, unknown, or other
  modified_base (105)..(105): a, c, g, t, unknown, or other
  modified_base (160)..(160): a, c, g, t, unknown, or other
  modified_base (281)..(281): a, c, g, t, unknown, or other
tgaaagaaagtgtatttcgccacttgtcataacattttatgtcgtcgtgaggcttttcaacctgcaagtccttgagtgaggagtgcccccatcatntgatgatgnttgatgacggtgattgcttcatgaggttagtaagccaagttactggagaaacatnaagcacattgccattgcccattgatgagaaggtttttaccttggcatacatctcctgcaacaaagggaactgtatgtcactcacagtcacacaatggcaccacatgcaacggttgtagtangtgatga

SEQ ID NO: 26798 - DNA, 449 bp, Glycine max
ggtcgcgtgataccatttaatttcacagcgattaggtatggatagttaagtgtggagtgcagtgcaggtcaaggcctgagattcggttctttacttgttgggttgttctgatcttctctcatagcaatcaaatcacactcccatcttctcatctcgtaaaccctaaaccccgttttcagtgacatcgagatcgatcgaacatggatgaggagtacgatgtgatcgtgttgggcacgggtctcaaggagtgcattctcagcggtcttctctccgtcgatggcctcaaggttctgcacatggacaggaatgactattactgaggagaatccacttcgctcaatcttattcagctttggaagagattcaggggagatgactagcctactccacatttgggagctagcatggactataacatcgatatgaaccctaagttaatatggctaatg

SEQ ID NO: 26799 - DNA, 344 bp, Glycine max
cctgaggggggaggctggattccaagaactttccagttagttagggctaatcttgaagaatcattgcattatataatcatattgcatattccagctcaagtgctttgtggatattgctcttcgattctatatatgctttattgcaaccttattattattcttcagtcgctcttctacgctcgattggaaacttttcctatattctatgatgcgattataactggcggtctttacattggtgactgagacatgtgaggatgggttctctctgagtatgatttcagattgatacctcacacatcgcatagtggcatcaagctggactgtcattataagctacttgt

SEQ ID NO: 26800 - DNA, 381 bp, Glycine max
  modified_base (314)..(314): a, c, g, t, unknown, or other
gatgatgaagatgaagaagagcaagttgggtgcagaagcaaagggaagcaattgatggatgatcgaaatgtatctgtaaatttgactcctcttcgctccttaggatatgttgacccagggtgggagcatggtgttgcccaggacgagagaaagaagaaggtcaaatgcaattactgtgagaaaattgtcagtggaggtattaatcggtttaaacaacatttggctagaattcctggagaggtagcaccttgtaaaaatgctccagaagatgtttatctgaaaattaaagagatcatgaaatggcatcgtactgngaggagacttaggcgacctgaggctaatgaattgatgcctatctatgcaaagtcggataatgatgat

SEQ ID NO: 26801 - DNA, 371 bp, Glycine max
gagagggaaaagagttggagacgtgaagtgaagaaagaaagaattgagaaaggatagggtttagggttggcaaaggaaggaagggatggaagcagctgtggtggacgtctgctctaagcttctcaaagcggactttgcaattcctgaccagactcccgccatgataattcccactcagatgaagcaattgctcgatgatggatcagtcactgatagttcactggctgacaatgtcaccgttgatcccgtcgtgcgaggatttattagagattgggatgccattgaagatttgttgcaccatggtttgtatactggcctcggatgggaaattggcaatgaaggacaaatactatttactgatccacttttgt

SEQ ID NO: 26802 - DNA, 144 bp, Glycine max
tgttgaagacattgcaaggagcattggggaggtgtacgtacactgtacgggactatgcacaaaccggtttgattgcagcagtgttcttctttaaaatgatggaatggtgtgtccaatctgttgaggagagaatgtcagtttcta

SEQ ID NO: 26803 - DNA, 358 bp, Glycine max
cggacgcgagatcggacgcgactgtgcgagaggaccacagaacgttgcgcgttgggcgaatattaacgtttgaagtgtagctggaagctgcaggactggctcctaatataacacgtacagctatcagactccctaagtagatacggagaatctgaaagctctcaaggtcccagatggactacgagagagcgcatagatctagcactgcctaatagccgtgcatgctacgattgcgcagaccttgacgatcacctgcagctacggcatacaaaccgctgatcactcaccctactgatgctacttagaggccgcaatcgaactgacactgaccgatgccagcttaacccatggctagcat

SEQ ID NO: 26804 - DNA, 382 bp, Glycine max
ggggctgacattcacgaagcttttgaggcggcttttcgcgaaggaggaaatgcgaattctgatggttggtcttgatgctgctggtaagaccactatcctctacaagctcaagctcggagagatcgttactacaattcctaccattgggttcaatgttgagactgtggaatacaggaacattagcttcactgtatgggatgtaggtggccacgacaagattcgtcccttgtggaggcactacttccagaacactcatggtcttatttttgctgcatacagctatgatagggacagaattgttgtagccatacattatttacatatgatgttgaatgaggatgaactgatagatgccgtattgcttgagtttgcataacaaatc

SEQ ID NO: 26805 - DNA, 364 bp, Glycine max
gggagtcagacagacggacaaactactgctacgttaatcatgggtccaacctctatggccgccggaagagtcacgaggtttttggccaggcactaccctctcgagcaccaccgtgataacgccgatgttgagttcgactttcttgatgatattggagaagccttgttagctcaaagtgctagcagtgatgagtgcggtcaccccaatgaaatggaggaacagttcgaccaagacgaggatcacagagataccgtcgaggagaatagaaccttttgggacaaacaacaccagcttttgcaggccagtatatgcagaactagttcttcggagtcacggataaagcatgccaccaaagaagcgcttc

SEQ ID NO: 26806 - DNA, 307 bp, Glycine max
ggaccaagagattaagtcttggcttgcgtttgcagcacaaaaagttgttgaagtaaatgccttggccaaggcattgtctggacagaaggatgaggttttcttttctgctaatgctgctgccttggcttcaaggaagtcctccccaagggtgataaatgaggctgtccaaaaagccgctgctgctctgaagggctctgatcatcggagggccacaaatgttagtgccaggttggatgctttacagatgaaattgaatctttctgttcttccaacaactacaattggatctttccctcatactggcgat

SEQ ID NO: 26807 - DNA, 463 bp, Glycine max
  modified_base (366)..(366): a, c, g, t, unknown, or other
  modified_base (420)..(420): a, c, g, t, unknown, or other
gtaccctctaatttacaatattaaaacagctgtacgagactagttcatgataccggtgcaccacatttattgagtgtatggtggaaattaggaagagaaataaatcaataaactaatatatgtaataaagagaggaataagaagaaaaattgggtgtatgtttagcatttttctttgttgaggttacgtgcttcgttttatttattttcaaaaaaactaataattccttgttatcttttagagagagctggtaaaaaaaaaagatctttttttttccaactaaacaaacatgtcatgttttgtgtaaactcagttttttcatggagaatagcacgtaagaacttatgagagaaggtcaaaactcanaaggggtagaaagaaggggaaaaccggaaaagtgtgactttatttataaagtangtaatggcccatccgtccccacactagcctcaatattttttta

SEQ ID NO: 26808 - DNA, 365 bp, Glycine max
atcaacaaacagggggtgcaatagcaccagctcaatggcttgccattgggactcctgggatatcagcctctcctttattggcagaattcagtgctcctgatggtgcgcatggtaatgctttagctgccacttctgggaagtcaactgttacagagcagcctcttgaacgcctaattaatgcggtgaaatcaatgtcaagtaaagcattaagtgctgcagtcatggatattggttcagttgtcagcatgaatgatagaattgcatgatcagctccaggtaatggatccagatcggctgttggtgaagatttggtttccattgacttatttgtcgtctacaggcttgaaatttcattactctaagat

SEQ ID NO: 26809 - DNA, 307 bp, Glycine max
gcatttcaggaggagaatataatggttgaaaactaaagcgagcctctgaaagtgattaaattccgctgtctgtcttgattcctccatctcagtcccctgtcatttgcagactcatctctgtgaatcgctgatattcattgatcaactttaaaagggatatgatggttaagacataactgatagtgatcagatcttagctacttaaccgttctatctatgacttgaggtaaacacatgaatgaaggaccagattgaatagctacacaggtgccaaagaaaagagtcggcatctgtgctgatagacgga

SEQ ID NO: 26810 - DNA, 431 bp, Glycine max
  modified_base (396)..(396): a, c, g, t, unknown, or other
gtacaaagtgatgtgaagagtcgaacccaagagcttcgtcggatctcaaaagctggatggaaatcaaaaccatcatgattgggccactaaaagactagttgaggatgaactgaagagacttttatttggtttggagcacaattacacaagttttggaagccatttaaacagccaatggtgcttttaaacgtactcagttcaacagtgttatcttcatgttagaattgaagatgagcttattggttagtgaacatttgaatgctcagcagtgcagttaaacgtcccatgctacgttgataagatttagctactgactgtgtgcatttaaatgtcgtccaacgggacatttaaacgtactcagtttacttaggttgatgcaaaaaatgttcctaactntgtagacttttgataggtggaaaacactatgtaac

SEQ ID NO: 26811 - DNA, 393 bp, Glycine max
gacagggaaagcaaaatatctgatctttcgccctcccttgcactgagtaggcaatggcggaggaagcacagtactcatcgggacccgattccgcgcccctcaagcgcaagtacgaagaccaaccctccggcatcgagcttgccaagcagcgtgctcaggaagtcgccgcacgcctcctcaacgccgctcctcctccgccactcgacgccaagcgtcccaaacccgacaccggcttcgattctctcgatttgaagcctctgtattccgcatctcctcctcccgtctcctacggtcaccaaggttccagcaagaagattgatatccctaatggcagggttggtgtgattattggtaaaggcggagagactattaagtatctccaggtgcagtctg

SEQ ID NO: 26812 - DNA, 374 bp, Glycine max
caagggtttggggtttaacaacaaattcgaccgcgctttgtccctcttcgacttcatccgtacccgaaacgaccgcgtttcgctcctgaacggttccgtgatcgccgtgatcgtctccattctcgggaaaacgggtagggtttcccgcgcggcgtcgatgctgcacaatctagaagccgatgggtttgaggtagatgtgtatggctacacctttctcataactgcttatgctaataatataaaattctcagatgcacttaaggtgtttgggaaaatgaaagaagtggggtgtgaacctactatgattacttacaatgcaattttgaatggtttatggtaagatgggcatgcccagggctaagatcattgctctt

SEQ ID NO: 26813 - DNA, 394 bp, Glycine max
gaagaaagaagtgagaatacgaaagaagggggtttattgccaaatgaagaaggctcacgagacacgcatggggtcagccacatgctatccctcctcctcctccttctctctccggtggtggtgactcgccggaaaacacccactgccacctctaacgccgccgccggcgaacacccttctcaaaatctcacccgacccaattcacctttctcctctctcttctcaattccccatctgggtatccctgtttccctaaaagttctcttctttttcgtgattcagaagtgctcagtgatacccttttcttagaacaatgaaagcgggggaaagggagtcaggaagaggatgagttcgatgaaaaagagtttggttctttcaaaaaacagggcacttc

SEQ ID NO: 26814 - DNA, 387 bp, Glycine max
gttctgagcagaaaccaatttagtggccgcattcctcaaaatattggaaacatttcaaagcttaggcagcttgatttgtcactgaataatcttagtggagaaattccagtcgcctttgataatctgcgtagtcttagttgcttcaacgtttctcataacaacctatctggtccagttccgaccctacttgcccaaaaatataactcgagctcatttgtggggaatattcaactatgaggctatagcccttcaaccacatgttgctgactagctccttctggttcacctcctgaaatatcagaacaccgtcatcataataaattaggcaccaaagacataattctcatagtagcaggagtgctccttgtagtcctggtaacaatttgc

SEQ ID NO: 26815 - DNA, 310 bp, Glycine max
ggagcgcggaaccaaatgaaatgattgagaagagagagcgaagaaaaaaaagagagccaaaccaaacctttcccgaaacggttcgttttgcccttcttcggaaccctcccttctgcgccgctgctgctgctccggtcgccgtcggcgactctccggtaaccgaagaccactgccgatccgtcagaaacctcggatctcggatctgaacgagcgaaacgatgccgtctcacgcggatctggaccggcagatcgagcatctgatggagtgcaagcctctgccggaggccgaggtgaaggcgctgtgcgatca

SEQ ID NO: 26816 - DNA, 382 bp, Glycine max
ggatccagcacataacaatggaaacgcagctttacgtgttttctctctagattctgctcttaaacgccgtcgttttcaaactctttttttccccttcgcttctctgtctttgtaaccgaaaggggggaaaatataattaacaccgatttcgcgaccaattcttcttctgcgttgaattgggacaacgagaaattggatctcagtttttggcaggaaataaaaattgcatttgagtgtaaaataacagagtatagtgtagggccttgttcttgatactgtgctaaatttgttggatggcggagaaatcatgcatcaagcgccttcagaaggaatatagagccctttgtaaagagccaagttctcatgttgtggctcgtccttc

SEQ ID NO: 26817 - DNA, 390 bp, Glycine max
gcattacctacatccattcactgtgaaccaattggacagtttaaggtaccaagctatgaacattgtggtggttaggcttgggagagcagaaccaccccttaggaaagaggttgtggagtacatgcttgatgtggactctcacatatggagcatgagaagaagcaaagccaatttcttcagaattgtgtcactcttttctggtgcaatatctatgagcaagtggcttggtgaggtacaacagtggaagaatccagtgaccacaatcctagtgcatgtcctctttttcatcttgatatgttaccctgaactgatcctccccacaatgttcctctacatgtttctcattggaatatggaactttaggtttaggccaaggcaccctccacacat

SEQ ID NO: 26818 - DNA, 411 bp, Glycine max
gaacaaaaaaaagtagagaatttgctttgcgaggaagtaagtaggagatgctctgaactttcaaatttgtacaacccctaggaagagaagaagaaggttcaaaatccaatccatttttcatttcgaaagatcgtgatcgcaatgtccctctccaccgtgaggcagcggcgctcggagccgtctgatccgtcgccatcagaaccgtacacgaagctggacaagcccgagaaagcggaggagaaagacgaagggttggggtgggttttcccgttcgtggctcttgggttattgaggtacatgagtgccaccttcaacatcatccacgattgcgacgaggtcttcaattactgggagcctcttcatttccttctctacaaatctggattccagacatgggaatacagttcacag

SEQ ID NO: 26819 - DNA, 356 bp, Glycine max
ggaggataatggacttgttatgaacttctacaaggaatcatgccctcaggctgaagacatcatcaaagaacaagtcaagcttctctacaagcgccacaagaacactgctttctcctggctcagaaacatcttccatgactgtgctgttcagagttgtgatgcttcactgttgctggactccacaagaaggagcttgtctgagaaggaaacagatagaagctttgggttgagaaatttcaggtacattgagaccatcaaagaggctttggaaagggaatgcccaggaattgtttcctgtgctgatatcctccgtctctctgccaaagatggcattgtttcgctaggagggccccata

SEQ ID NO: 26820 - DNA, 362 bp, Glycine max
ggtatcaagaaattttgactgatcctagggatgctggccagtttgtgctcatgacaaacccacatattgggaatactggcataaattttgatgatgaggaatcaatacagtgtttccttgctggacttgtaattagaagtttgagtatcagtacctctaactggagatgtaagaagcctctgggggattacctagctgaaaggaatattatgggaatgtatgatgttgatactcgcgcaatcacgctgcgattgctgctagatggctgtcttattggtgttttgagcactttcaattcctaaatggatgaggaactgctttacatgtctaagttatggaacatttgtggtaatgatctaata

SEQ ID NO: 26821 - DNA, 384 bp, Glycine max
gggtgcacggttcagtatgtttgagatgagagttaagatagctttggcagagaaaggaatcaaatatgagtacatggaacaagatctcaccaacaagagtactttgcttcaagaaatgaacccaattcacaagaagattccagttctcatacatcatggaagacctatctgtgagtccctcataattgttgagtatattgatatggtttgggacaacaattgtcctttgcttccctctgatccctaccacaaagctcaagccaggttctgggctgattttgtagatcagaaggtgtatcatgcttctaagagagtttggatttcaaagggagatgagaaagaggtggcaaaaaaggacttcctagagagcttaaaacaattgga

SEQ ID NO: 26822 - DNA, 282 bp, Glycine max
ggtgtgagttcattaacatatacaaatggtctgtgttgtgttgtgtacttgtgttaattgtgttgttgttgtaggaaatttaagtgaagagagaatgatgatgaagtctgctatgtgtgcattggtgcttgtggcactggttgtggttgaagtagtggcccatggctgaagctgttgtgacttgcaacccaacacagttgacttcttgtcttccggcaattaattcaggttctgcaccttctattgcttgttgccagaagctgaaagagcataatccatgct

SEQ ID NO: 26823 - DNA, 373 bp, Glycine max
gatgatattcattgttatcgtaagcatagggcctatgtaaatgtcaaatatgtgttcacatgccacatgtgctatcaacaacgtctattaaaactgggttctccatttgaagcacttgtatactgaccaagggctatgcaccaaactctgaactggatacattgcatgatggttatatatatctatacactatgcattctgaaagtatgtgatgctaagcacaacatgatgaaaagagttaagtatggatgaaaagtcgctttccatgcgatcttattcaatacaaaacccaatctgatgtatatacgcgttatatctctctatgtatgatggattatgctacaggcattgataactcaaaatcataacacaa

SEQ ID NO: 26824 - DNA, 113 bp, Glycine max
atcggtcgttagatcactacacatcgtcgaccgttctacctaatcacatgattgggacctgtgactaagtacactatctagagtcataccatatcttctaccatacaacctct

SEQ ID NO: 26825 - DNA, 340 bp, Glycine max
gtgagaagcatatgaaggtcacgataagtgagtcggctattgtcttcaatgaagctaaggggacatttcatgttcaggacaatccattgtatgctgcttcctttgcagctaatggcaatgttgaatatgtggtactctatcatgaatatggatacgtctaaatcctttattcacacttcttaacactttatacagagatggatgctgctgttcttcacaaattcatatatcacatccttaagaaccttgctgttgcaaaggacgacatgccagatgcattaacagcagctagtaacaccgtctgtttagatttagacgctctgaacgggttttactgtac

SEQ ID NO: 26826 - DNA, 376 bp, Glycine max
ggcacaagtgagtttgttgatcgagataactagaaacagtgtgatgaaaatgaaggtccttgttttcttcgttgctacaattttggtagcatggcaatgccatgcgtacgatatgttccctctccgaatgaacactggctatggtgcccgtactccggaggtgaaatgcgcaagttggaggcttgctgtggaagcacacaacatctttggctttgagaccattcctgaagagtgcgttgaagcaacaaaggaatacatccatggcgaacaatatagatcagactccaaaacagttaaccaacaagcttacttttatgccagagacctcgaagtccatcccaaggacacatttgtgttcagtatagatggcaccgta

SEQ ID NO: 26827 - DNA, 429 bp, Glycine max
cgctcaagttgggagcgaagtcaggactcatatccggtttaatcagccaacacttcacgtcaacatttcagaagccacctccgcgaccagcagatgttaatataaattctgctgtctatccgggcggccctcctgttcctgtgcaagctcctaagcttctcaaatttgttgacacaactgagatgaccagaggaccacaagagtctcctggctattgggttatctctggagcaaagcttgttgttgataagggcaagatttctctccgggttaagtattctttgttgaccatggtattaccagatgaagaagagatgttggatgatcagtagctgattccttgcctccagcaaacaagtgctcatttttaaagtgtggtaggtcgggaaataagaaagaaggtagagggtactactagttatcacttgg

SEQ ID NO: 26828 - DNA, 118 bp, Glycine max
cccactcgtacgatccgatactaaggtgacttcttatgggagtgtctccgcattcgggagggctcttcactctgttgtggacatcctattctatttgcttttctaataaggcctttgc

SEQ ID NO: 26829 - DNA, 452 bp, Glycine max
  modified_base (405)..(405): a, c, g, t, unknown, or other
gggttctagtgtgtgattgtttgttgttgtaactcgttctgcttcttttgttgttctgtgtttgtgtttgttttttctctcacctgaaaatgtcttgctgcggtggtaactgtggttgcggaagctcctgcaagtgcggcaacggctgcggaggctgcaagatgtacccagacttgagctacactgagtcaaccaccaccgagaccttggtcatgggagtggcacctgttaaggctcaatttgagggtgctgaaatgggtgtgcccgctgagaacgatggctgcaaatgtggaccaaactgctcctgcaacccctgcacttgcaagtgaggtgttgggagggcaagcttcaagcagagatagcccttaattaggaataatgataaactattaatgtgtagctaanaacttatgtattatgtctgtgatggttttcgtgcactcttgtgtttt

SEQ ID NO: 26830 - DNA, 397 bp, Glycine max
cccacgcgtccgactatactctaggaagcatggacaccaccgccatggcatccaaggtgctggcattgttcgctatgttagctgataatacaatcaccactattactacatatataataatgcgactagtgctatggcatgcttattcttgctatgaacgtcatgcaaccattactctatgattcatcattctcctgttgccttgagttcatgatgggcaatgtgaacgtgactactgaagaacaagaagtttctgcaagtgcaagggcaaccgatgagaacgccatgcctcagtatactgccacctctactactgctatgcattatcccctcatattcgctgctcaggttcctgtggttccgctacatagacctgatgagatgcatgttccaagtt

SEQ ID NO: 26831 - DNA, 427 bp, Glycine max
ggtggtagctgttacgagtcagcaagagagaaataggtcggtgagttgatttctgatcccaaattgagtttgagtttcagccatggtatctgtttctctgctcttattcctatctttctttgccttctttgcaccctctgaatctcacgacaaagtctcgtcggaattgtactacgaaagcttatgcccctacagcgccaacttcatcgtgaatcacctgccaaaaatcttcaccccagatcttgccccaatcgttcacctcaaactcgttccttggggcaatgccaaactccgtgccaacgccacctttgactgccagcatgggccatatgagtgcttgctgaacacagttgaagcctgtgcaattcacatctggcctcaactcagcaaacattgtcctttcatctactgtgttgaagatctggtg

SEQ ID NO: 26832 - DNA, 297 bp, Glycine max
tgggccgaggaaatgatagaaatacaaaaagaagggcattacacatcgtccgtagatttcctattctctgcttcggaagaaagagaaaacatacaaaacaatgtctttcgcttctttccttttcagagtcctatttgctactgtcttcatactctctgcttaccaacaatttaatgaatatagagttgatggaggacctgctacataagcactcatacctaagtttgatgcctttacacatctgtagcattctcaagtgggctttcatattccagatattaatcttaaatttataat

SEQ ID NO: 26833 - DNA, 343 bp, Glycine max
gaaggaaggaagaagcagagggaatctttgacagacagaagaaaatgggaagcagatgtccacctcaatcccatccatattccgctgccatttccaagggttacaacttcactttcacttgggaacagaatgctcctctgacagagcagtaacaattctcgattgtatcgctttctcacgcctattctgatctaccgttgcctctcaagttggctcaagagaatgcgtctgtacaagacaattccttgtctgtttaaacgaatgatagtttcctttgatgactcttgtactattgagactgttatggtcaataccaatcatttctacaaatggtttacagatc

SEQ ID NO: 26834 - DNA, 378 bp, Glycine max
gacacagaacaatagtagcaagcagaggcccgagatctgtgcttgaaccttcacttgtgtttccttccttctgcagacgagcttcaccttgcgccgaagggccacagatggttgaaaccgatatggatgccgaaactgttgcaaatgtggttccaccaaaggagactccaaacagtgttcccatctcttatcattcctcacactcacaccctcctcttaatgagaggattatttcatccatgaccagaagatctgttgctgcacacccgtggcacgaccttgagataaggcctggtgcttcaacgatccttaattgtgtgattgagatttggaaagggagcaaggtgaaatatgaactggactaaaaatcgggtctta

SEQ ID NO: 26835 - DNA, 118 bp, Glycine max
actcttcaaataccactttaggattcaactactccaccatctcaacatgcgatagtactttcatttgtcttaatcccagctcccaaatcaatctccactaccactcctcatatcttat

SEQ ID NO: 26836 - DNA, 381 bp, Glycine max
ggactgaagacagatgatggtgctcatcaattacccaccattgcaatagttgcttcatatgacacctttggggctgctcctgcattatcagtgggaagcgatagtaatggaagtggcattgtggctcttcttgaagtagctaggttgttttctctcttatattctaatccaaagacaagaggacaatacaatctgctgtttgggctaacgtctggtgggccttataactacaatggaacccataagtggcttatgagctttgatcaacgtctgcgtgagagcattgactatgctatttgcttggatagtattggctcttgtgaaaatgaattgtggattcatgtatctaagccttcagaaaatgcctttattaagaaaatt

SEQ ID NO: 26837 - DNA, 388 bp, Glycine max
  modified_base (346)..(346): a, c, g, t, unknown, or other
ggtcttggtgatggatagacacaaatgcgaggctttgttcaaggtctttcagcaatggcagagcccttggtgggcacatgaaggctcaccttgcttctctccctctccctctccctccaaagcttcactcttgtttctcttcctctgactcagaacaagaacaatctttaagggagaatcctaagaaaaccttgaggattctggatcctgaagacagagagagcgagacagagtctaataagaacccgactcgtcaacgatccaagcgcaactggaaatctaccatgcccaagctcagcctcggacaccccgaagccgaacctctcagctccgtctccgacacctnccccgaagaagacctcgccatgtgcctcatgatgctctcccg

SEQ ID NO: 26838 - DNA, 387 bp, Glycine max
ggcagatgagggtgctatttctctatggagaggaaacactgctaatgttatccgttatttccccacccaggctttgaactttgcatttaaggattacttcaagaggcttttcaactttaagaaggatagagatggctactggaaatggtttgctggcaactcggcctctggtggtgctgctggtgcatcatcccttttgtttgtttactctcttgactatgcccgtacccgtcttgccaatgatgcaaaggctgcaaaaaagggtggagagagacaattcaatggtctcgttgatgtctacaggaagacattggcatctgatggtgttgccgggctctaccgtggtttcaacatctcatgtgttggaatcatcgtgtatcgtggtct

SEQ ID NO: 26839 - DNA, 421 bp, Glycine max
ggagagtgagtgagatagagagagacgcttcgcgggtctgaatcgaatctcagaaaaatgagagaaatcatcagcattcacataggtcaggccgggatccaggtcggaaactcctgctgggaactctactgcctcgaacatggcatccagcccgacggcatgatgccttctgactccaccttcggtgtagcccacgacgccttcaacaccttcttcagcgaaaccggatctggcaagcacgtgccccgtgctgtcttcgtcgacctcgaacccaccgtcatcgacgaggtccgctgcggcacctaccgtcaactcttccaccccgaacaactcatctccggcaaggaagacgccgtcaacaacttcgcccgcggccactacaccgttggcaaagagatcgtagatctgtgcttggatcgcg

SEQ ID NO: 26840 - DNA, 300 bp, Glycine max
gacactgttgaagtggatgctataacacaccgaatgacatgtaaaacaggggtagtgaatataccatatggtggtaccaaaggagggataggctgttacccagcagaattaacaatatctgaattagacagacttactagagattttacactgactaatcacgatcagattggttctcacacagatgttccagcacctgatatgtgaacaggaccacagaccatgtcatgggatactatatcaattttccaaatttctacgttacttttctgcagtagtttactggaaaacctttatata

SEQ ID NO: 26841 - DNA, 418 bp, Glycine max
gaggtgcagagagaggaattgaagcatgggaagagggaaggtggttctggagagaatacagaacaagatcaatcgccaagtaaccttctcaaagcgcagaaatggtttgctcaagaaagctttcgagctatctgttctatgcgatgctgaaatcgctctcgtcatcttctccagccgtggcaagctttttcagtatagtagcactgacattaacagaatcattgagaagtatcgtcaatgctgcttcaacatgtctcagactggcgatgtagctgaacatcaatcggagcaggagcttttggtattaagagtcaagcatgagtcactccagcggactcaaaggaatcttctgggagaagaactagagccacttagcatgaaagaattgcatagtttagagaaacaactggatagaacg

SEQ ID NO: 26842 - DNA, 386 bp, Glycine max
acagatgatgggagtgtacacacagaggaattgcagcgatgggtcgagccatagtcgtgctgtatatattaccgaacaagatcaatcgtcaagtatccttctcaaagcgcataaatggtttgctcaataaagctctcgagctatctgttctatgcgatgctgaaatcgctctcgtcatcttctccagccgtggcaagctttttcagtatagtagctctgacattaacagaatcattgagaagtatcgtcaatgctgcttcaacatgtctcatactggcgatgtatctgaacatcaatcttaacatgagctattggtattaagagtcaagcatgagtcactccatcggactcataggaatcttctggtagaagaactagagccactt

SEQ ID NO: 26843 - DNA, 417 bp, Glycine max
gcagtgagcgagagtgaacagcgaacagaatggctcccaggggtttaatctttttggctgtgttatgcttctcagcactgtcactgagtcgttgtcttgctgaggataatggacttgttatgaacttctacaaggaatcatgccctcatgctgaagacatcatcaaagaacatgtcaagcttctgtacaagcgccacatgaacactgctttctcctggctcagaaacatcttccatgactgtgctgatcagagttgtgatgcttcactgttgctggactccacatgaaagagcttgtctgagaaggaaacagatcgaagctttgagttgagaaatttcaggtacattgagaccatcatagacgctttggagagggaatgcccattagttgtatcctgtgctgatatcctagttctct

SEQ ID NO: 26844 - DNA, 213 bp, Glycine max
gagggcgaggaagccggatggagacacaatacagagtgagttgttgctccttcgtcacaactctctgccaacatgggtatctccagagattctatgcacatgaggctttccactggtggcaagaagaaggcctggaggaaaaagagtaagtatgatcttggtcgccagcctgctaacactaagctgtctagcatcaagacagtcaggaggatc

SEQ ID NO: 26845 - DNA, 396 bp, Glycine max
gggagagagagggagaaagagaaggagatcgcacttaacacatcacacagcaagagaaagagtaatagaatcgtggttcgtttgcagaagaagaggttaagagaaggagtgaccgaagcgaagatgttaccaacagcttccaaaggacgttcttcttcttcctcctcctcctcctcttcctctcgacctaacaatcccatgctgcttccctacctccgcagaatcatcaagtggcaacaaatggatattgaatatactttttggcaaatgcttcatctatgtacatcaccgaaagttgtctatcggcatactaaatatcacaaacgtaagtctctgtctcattaatatctttgttcttctgatttattgatacacatttctgaacagtgattggtt

SEQ ID NO: 26846 - DNA, 394 bp, Glycine max
tactgatggtgggggtaaaaattggattaaatccatgggccttacagcatcactgttcccattcatgtgctttggaattggttctattttaaacacaattgctatattctatggatctctagctgcaatcccctttggtactatggttgttgtctgtgttatatgtgcttatatctatttgcctctagcacttcttggcacagttgttggaagaaacttgactggtactgcatataatccatgctgtgtgaagaccattcctagtcccattcctgagaagaaatgttacctcacaccatctgtagtttcgctgatgggacgactgctttcctttggcagcatattcatcgagatgtagtctgtattcacttgcttctggaattacaaggtgtac

SEQ ID NO: 26847 - DNA, 169 bp, Glycine max
tactactcacagtctggttaaaaattggattaaatcggaggggtttacaatatatctgcagatactaatgaactatggaattgaggctactgttctcacatatcttatattctataaatcgatcgatgaaatcctgaacgcctcgattgatatcgaattttttacatct

SEQ ID NO: 26848 - DNA, 371 bp, Glycine max
gggagaatggaggtggtgtgtcggggaatgttgaaacccagaaagttcatgcagaggaggaggaaattcgaggttttcaaggattctgcagatgaagctgaccagaagaattggaggagaatcatgactgaaatcgaagaatccggttctgctgtctctgtgctctctgctgagaagattaataaccaaaatattcctaaagacctcgttgttggtaccttgattaggtttaaacaactcaaaaagtggaaccttgttgttgagattctcgaatggcttcggactcagaactggtgggattttggtaagatggatttcttcatgcttatcacggcttatgggaagctaggagacttcaatggtgccgagaa

SEQ ID NO: 26849 - DNA, 456 bp, Glycine max
ggtgttattgaagagtagggataatagaatccgtatcgtagcaaaacgcacgagttaggggcggcgatgggaggttcatcggaggatttctcggtggtggtgctggcgtcggacctcggcgtcgatgcgcgacctttcctcgaacacgatcaacagcaagaagaagagaattggcacgactgttcccagtacctctcccccgacgaggacttctccgatctcgatcagttgcaattcctccgcctccaaggctccgacaagaactccaatcgcattctccgcatcgtcggcaagtactttcccgcaactgttgtgagtgcggagcggctcaagcggtatgtgttcaacaaaatttgcagtgagttgcctgaggggcccttctgtattgcttacatgcacagcaccgttcagaaggaggataattcccctggcatcaccatcttgaggtggatctat

SEQ ID NO: 26850 - DNA, 302 bp, Glycine max
ggagtgagagggtatcaattgagtgatcagtcggggcgaaagccgtactcggagaagaaacgcgactcaaattggcggatgatcgtctcatccaatccgtagttccatccgaggtgggtcttttaatcggaaagttcagctcctttttgggccggtccttcctcttcgatctcattcccaccccacacaacgactacggcgagcccgcctgctccctcaccgagtcctacaagactaatgtccccaaatttaaatccaaattctagctcgttgattcctctttctttttcatcgtcaaggac

SEQ ID NO: 26851 - DNA, 423 bp, Glycine max
ggtggtggtggtgccaatattgggactggcaccaccaattattggaacctcaatatgtgccaagaagtgaataatcctgcaaagaagggtgtgatcaacgtggctgatcatgatgatgagaagggtgtgatggagagtgaggaaaacggggtctatgggcctgactttagggtgtgccaagattgtggcaacatgcgctaagaaagattgcgtctttagaagatgcatgacttgctgcatgggacgtgggtatgattgcaacactcacgtgaagagcacgtggatccgctacgttcgacgactctagcgcgatatcacggtggctctcggtggctgtgttagcggatatggtggtctgtagatgccaatatctgtgctggggtcatctcataatgccacttttcatagttacaactctaatgc

SEQ ID NO: 26852 - DNA, 447 bp, Glycine max
ggaggaaaagtgtgagaacgaaaatggagcattgtagctgctacatgttcacgctgagccttcttcttcttcttcttcttactccgccttctctctccgacgatctcggattcgattttccggcgaagaagctgataagagaccttaacctttttccttctgaagatgtcaacatcgttcctcgccactccaattctcacgccaacaaaatcgtcgagaaaccgcttaggttcccaaacttagtgccttcagactccggcatttccctcgacgacttggctcaccgagctggctattatcttattcctcattctcatgctgccaagatgttctacttcttctttgaatcaaggaacagcaagaaggatcctgatgtgatttggttgactggtggaccaggttgcagcagtgaatcggctgagttttatgagaatggccctttcaaga

SEQ ID NO: 26853 - DNA, 438 bp, Glycine max
gactgacaagatgcatgatacaagactctaatcctaaatctaaggagagaaaaaatttcacaagataatcagcaaataaaatttgtaatgaattttgagtaattcttagtttagaaaaaagtgaaggacacttgagtctagaattacttatattaatttgattctgtcgagaagcttgagcgagtagagttgaggattgagtaacggagatgtagcagagtcacccggctattcaacaggactttccgttttattcatttcacttttgaatcttcgaatcacatccgatgggtagcagagggcacactctcttggaggttggacccgacgacggtgttgccgtcatcaccatcgtcaaccctcccgttaattcactctcatttgacgtattgcgcagtttaaaggagagttttgatcaggcgatacatagagatgatg

SEQ ID NO: 26854 - DNA, 393 bp, Glycine max
gacgttagatcatgtgtttatcgcaagaaaacacggcgtgggtcatcaacattcatggaaaaacagataccttttactggaatattaagcaataatgttgaagataatccagattttttcaactggaacagagtgaaaattcgttattgtgacggtgcctcttttgctggggatggtgaagataaggctgcgcaactgcaatttggaggacagcgtatttggtcggcagcaatcgaagatttgatgtcaaagggaatgcgatttgccaggcaagctcttctttctggatgctcggctggtggtttggctactaatatacaactgtgatgaattcagaaggttttttcccacagactacgaaagtgaagtgtcttaatgatgcaggattatttt

SEQ ID NO: 26855 - DNA, 342 bp, Glycine max
ggccatcaaaaggaatagtttgattggaggagatgactttaagagtggtcagaccaaaatgaaatcggtgttggtggatttcctagtatgggccggcatcaagccaacatctatagtgagttacaaccatttgggaaacaatgatggcatgaatctctcagcccctcaaaccttccgctcgaaggaaatttccaagagcaatgttgttgacgatatggtcaacagcaacgccatcctctatgagcctggtgaacattcggaccatgtggttgtcattaagtatgtaccttacgtttgtgacagcatgatggccatggatgagtacttctttgagatattcat

SEQ ID NO: 26856 - DNA, 153 bp, Glycine max
agataagacttccgactgttggttctgaatatatatttctgttttcggcaaggagtgtgtgttatcgagatagctcctttgactcatctatcagaatctgatggcccaaaatctagggtattctgttcctctttgtggatctgaattacattc

SEQ ID NO: 26857 - DNA, 390 bp, Glycine max
gatatcaggtggcaacaacactgcctcagggaacccaactttccgccctaattctcagtttatgggcttgcaccacccaagaccaatgcctgccatgggagccacccatagcttcataaataggatgtacccaagcaaactatatggtcaatatgggaacactgtcagatctggaatgggttatggtacacatgggtatgattctcgcactaatggacgggcttggttagctgttgacagtaaatacaaaactaggggaagaagtggtggctactttggctatggcaatgagaacgcagatggtttgaacgaactgaacagagggcctagggccaagggtggcaaaaaccaaaaaggttttgcaccaactattctggcagtcaaagggca

SEQ ID NO: 26858 - DNA, 372 bp, Glycine max
gaatcaagtgaaagctctgatgaagacaatgatgcataacccgccgtaactgatgtgtcaaagccttctgctcttgcaaagaagaaggttgacagctctgattctgatgatagcagctctgatgaagataaggggaagatggatattggtgatgatagttctgatgaaagtgaagagccacaaaagaaaaagactgtgaaaaatccataagaaagcagtgatagttccgaagaagacagtgaggatgaaagtgaggaggaaccctccacaactcctcagaaaagagacagggatgtggagatggttgatgctgcctcgtctggaaagaaagcgcctaagaccccagttacacccaaagaaaaaactggcgct

SEQ ID NO: 26859 - DNA, 369 bp, Glycine max
gatacaaaaagttcttatcagtgacagagtaaaggaggcataccgatgacgatggcgatgacggcgtcgcagttgcggtgcggttgggggtggaggccaacgccgaatcagcagcagcaacgacgtcgtatggttccggtggtgtgttccatcgctatagagaacgcgaagaacaaagagagagcgaaactgaagaagctcttcgatgaagcgtacgagaggtgccgcactgctcccaccgaaggcgtttccttcactctccaacaattcaccgacgctctcgacaagtacgacttcaacgccgaaatgggcaccaaggttaagggcactgtttttgccacggataacaatggagcttatgttgacatt

SEQ ID NO: 26860 - DNA, 387 bp, Glycine max
ggagagaaagagtgaggagagaattacagagcattttccaacacgattacacgaccgaatcaaaccctctctttctctccgaagctgcgtttaatatcttactcgccttagattgttcttctctttcattatactgttctcttttcgatttgagggaacagtacaagagtgtgaggatcggttaacccaactgcacaggtagtcactaaaataatggagtctcacgatgagactggatgccaggctcctgaacgccccattctttgcattaataattgtggcttctttggaagagcagctaccatgaacatgtgttccaagtgttacaaggacatgctgttgaagcaggagcaggacaattttgcagcatcgtcggttgaaaacatt

SEQ ID NO: 26861 - DNA, 371 bp, Glycine max
gcttggcaatgggactgagtcagtgaaaccctagcggtgggactgacactctccgaagcaatggaagttccttatgaagcgccgtctaccgacatagacgacgagaccataagctaaaatgcgctgaagcgcgaactcatgaacaaacagaaagaagaagataggaaacgcaaggaggaggacaaggccaaaaaggcagctgacatgcagaaggctaacgataacacatctgcacctgctgatgaagatgatatggacccaactcaataccttgagaagaggcataaagtatcttgcagttcataaggcagaggggaataacctatatcatgacaaatactatgtcactatgtctattgatcaatacatca

SEQ ID NO: 26862 - DNA, 381 bp, Glycine max
gaaaaaatttgaatctattggtatatgcgaatcaatcctactacttctggtcctgaggtttctgcgcttgaaaaaaaaaatctgggacgtatcgcccaaataattggtccggtactagatgtagcttttcccccaggtaagatgcctaatatttacaacgctctgatagttaagggtcgagatactgttggtcaacaaattaatgtgacttgtgaagtacagcaattattaggaaataatcgaattagagctgtagctatgagtgcgacagaaggtctaatgagaggaatggaagtgattgacacaggagctgccctaagtgttccagtaggtggagcaactttaggacgaattttcaacgtgctgggaaagcccattgat

SEQ ID NO: 26863 - DNA, 446 bp, Glycine max
gaacatacggatgaacattatattgggaactgcaagaggattggcctatcttcatgagggtcttgaaccgaaagttgtccaccgagatgtgaaatcaagtaacatacttattgatcgccaatggaactccaaggtttccgattttggacttgctaagcttttgtgttctgagaatagttacgtcacaactcgagtgatggggacatttggttatgttgcaccagaatatgcatgcactggaatgctgactgagaagagtgatatttatagctttgggatacttatcatggagataatcaccggaagaagtcctgttgattatagtagaccgcatggagaggttaatttaatagaatggttgaagactatggttgggaatcgaaaatccgaggaagtagttgatcctaagctccatgagatgccattttcaaaggctcttaaacgtg

SEQ ID NO: 26864 - DNA, 377 bp, Glycine max
ggcagcgcttgagaccaagccccactcaaccaccacaccactctctctgctcttcttctacctttcaagtttttaaagtattaagatggcagagacattcctatttacctcagagtcagtgaacgagggacaccctgacaagctctgcgaccaaatctccgatgctgtcctcgacgcttgccttgaacaggacccatacagcaaggttgcctgcgaaacatgcaccaagaccaacttggtcatggtcttcggagagatcaccaccaaggccaacgttgactactagaagatcgtgcgtgacacctgcaggaacatcggcttcgtctcaaacgatgtgggacttgatgctgacaactgcaaggtccttgtaaacattg

SEQ ID NO: 26865 - DNA, 218 bp, Glycine max
ggtacctaatcgaaacaggtactcccaatattcaggacgctgagactggttcaatgggaattttattatagactgtgacggcgttcattctatcaacaaccgaagacatctaagatcgtaagggatacacaatacacagtagatttaaagccttggtgctaaaacaatgtggatctgatacataccgctgcataattcccgatgatgaagataggtgc

SEQ ID NO: 26866 - DNA, 283 bp, Glycine max
gacgataaagggtttttgttttgtttccttgggggctgcatgcactttcactcgaagaaccttgaagcgagtctgggccacagcaaccagcgacaacaactcaatcagctagggttgctttgcttgctatcttgttggaggattttctgttcaagagaagatggtaactagaattgtggatcttcgttcagacacagttacaaagccaactgaagcaatgagagctgctatggcaagtgctgaagttgatgacgatgttctaggctatgatccaactggtttt

SEQ ID NO: 26867 - DNA, 396 bp, Glycine max
ggatgaagataggatgcttctgaaattccgatgcgtcaataaggtccttaagtaaaaaatactactgtcgtcacagatctgaatctggtcccctctggtatcgtgtagtactagtattttagttgcatctaataaatgaggatacccaagaagttgatttaataaatgttcaccaacttaacataagctatttgattttgctgacaaatacagaggcaaatatgacagcagcatcacggttgcccaaaagtattacagatccatcagtggttacaatgatgaattgctctgggctgctgcttggttgtatcaagcatctaacaaccagtattacttggattaccttggaagaaatggtgattccatgggtggaactggttggagcatgactgaatt

SEQ ID NO: 26868 - DNA, 386 bp, Glycine max
ggggagcgaagtgaattgaaattgaagtgactcggggtgagttgactcagcaatggcggaagaggtgactcgggtgatggtggcggtgaacgagtcgagcattaagggataccctcatccttcgatcagcagcaaaggggctttcgactggaccatcaacaagatcgttcgcgacaacgtctctgccttcaaccttctttttcttcacgttcaagtccccgatgaagatggttttgatgacatggatagtatctttgcttctcctgacgattttaagaacatgaatcagagagatagaattagaggagttcatctgctggaatacttcatcaataggtgtcatgaaattggggtggtttgtcaagcatggataatgcatggtgatc

SEQ ID NO: 26869 - DNA, 367 bp, Glycine max
gaggaaggaaatgtgcagttagatgcaaaacatgaatgcaaagatgcaactctttttcaggcccctgaagattgtgcacttgccataacaagcattattcgtcaccatgaaacagagtaccttgcttctcttgaggcatcatatctaaaccttcctgattctactttcaaggatcttcggagaaagcttcctgtcacccgcacgttatttccatggcataatactttgcagttcagcttgacaagagacatctcaaaagaacttggcattggaaaagtaatacactacattcacacagaacaaataaaagtttgtgtttactcggtggtgacaagttcctcatatattcactacatgtcatttgatc

SEQ ID NO: 26870 - DNA, 281 bp, Glycine max
gctgcgtgagtgagtagtgtgacggacgaacgaactgctgctgcatcgagtgccgttgcaggctatagcgccgtggtcagatgctcctgggttttgtcaaaacgatagccttaagagtgtcattgcgatccagtacacggtaaactcgactcaattgatggtttactttaacgcttgttagctcaacgatctacgctcgattagtgccgtcactctaaccgactaaactatcaaattgaactacagcagctatcactagatgtcaagttaggattatatgc

SEQ ID NO: 26871 - DNA, 383 bp, Glycine max
  modified_base (267)..(267): a, c, g, t, unknown, or other
ggaggagactgagaaaacagaagaaaacaaaatggaagacacagtttctgcgttgaggtctttgatggtttctcactctccgccgctggatgccttagtggtgccctctgaagattatcacctgagcgaatatgtgtctgcacgagacaagcgccgcgaattcgtttccggcttcactggaagtgccggcttggcacttataacaaagaaagaagcactgctgtggacggatggacggtattttttgcaggctgagaaagaacttantgctgggtggaagctaatgcgaattggtgaagatcctgctgtaaatatctggatggccgataatttgccaaaagaagcattcgttggggttgatccctggtgcatttcaattgata

SEQ ID NO: 26872 - DNA, 428 bp, Glycine max
gccggatgagcagaggaatccaattcaagaatatcaggttgctcacattcctggtgcccttttctttgatgtagatggaatagcagatcggactacaaaattaccacacatgctgccatcagcggaagcgtttgctgctgctgtttctgctcttggcatagagaacaaagatgatttggttgtttatgatggaaaaggattatttagtgcagctcgtgtttggtggatgttccgagtatttgggcatgacagagtttgggtattagatggtggcctgccgagatggcgtgcatcaggttatgatgttgaatccagtgcttcaagtgatgctattcttaaagccagtgctgctactgaggctatagagaaagtatataagggacaaacagttggcccactcacatttcagactaaatttcagccacatc

SEQ ID NO: 26873 - DNA, 413 bp, Glycine max
ggaagaaaggcagagttattgccattgcctctgcctcttgcaacaccaaactgatacacacttaataatattatagtaaaaattagccaccaaagtacactaaccccttttttcatacaactcaatagctggattggagcaaggtgaaagtaaaatcatttgcaaccaatgccgttgaacatatttcaggacaaagatggattgccacggattatattgactgagccaaagggttcatcagctgaggttcttctttatggagggcagattatttcttggaagaatcatcgaaaggaagaacttctttctatgagcagtaaggctaacaagaaacagcataaagcaatcagaagaagaatatcagcttgcctagcacggtttggtgatctcaagtcacttgaacaacatggatt

SEQ ID NO: 26874 - DNA, 420 bp, Glycine max
gtagtgctctattggaaatgatgatatttcatgtacccgggccatcaacagcccagaagtatcgtgtggagaacttgtatgagggtcctcttgatgatcaatatgcttctgctatcagaaattgtgatcctgaaggtcctctgatgctctatgtctccaagatgattacagcatctgacatggggagattttttgcctttggccgtgtattctctggcacggtttcaactggtttgaaggctaagattatgggacctaattatgtccctggggagaaaaaggatttgtatgttaaaagtgtgcaacgaactggcatttggatgggaaagaggcaagatactgtagaggatgtcccctgtggtcatacactggctatggttggtcttgaccaagtcatcacatagcatgcaacattgacaa

SEQ ID NO: 26875 - DNA, 286 bp, Glycine max
gtcgaccacgctccgacacgcgttcgaacacatcgaaggactacacattttacacttacaatttaaaagggagctgtatttttaacggagcaaccgtatgtctaaagtagtttggtcaccctaccatgacactatccatcatgtatagtactactctcctcatcgtgcttacactttccatgcctcctttcaagatatcacttatgataacgagacataacatttctaataaattgaatgctcatatactcatctacattttttttaaatgtatcattattgacat

SEQ ID NO: 26876 - DNA, 326 bp, Glycine max
gtcgctggaaggcggtggcttgtaggcggcggagcttcgcgagattaggttcggatcgctcggtctcgctaggtcaccgctgacgagaatttgaacttctcgtcactactaagccgctatttagctaaagcatgcgttgggagaaagcaaatagcatctaatttgttaacaatggaagatgatctgttggacacagaagacaggaacaacaatggcagttccacccgaaagaaatcgaagcagcggcgaaagacgaaggagtacatggtggacgaggatgggcaggttggggcacgagaaaagctggcaaaaagaatcttgatatc

SEQ ID NO: 26877 - DNA, 414 bp, Glycine max
gtcggacgagggtttcgtttcgggtttgacgttgttcacaatcactttctgcgcttcactcactcccttcgtgcggttttctttctttgtcgaactcgtgcgaaaatgcgtgagattcttcacatacagggagggcaatgcggaaaccagatcggagcgaagttctgggaggtggtgtgcgcggagcacgggatcgattccacggggaggtaccagggggacaacgagttgcaactcgagcgagtcaacgtctattacaatgaagcgagttgcggaaggttcgtgccgagggcggtgctcatggatctagagccagggaccatggacagcgtcagatctggtccctacggtcagattttccgacctgataacttcgtcttcggccagtccggcgccggaaacaactgggccaaa

SEQ ID NO: 26878 - DNA, 423 bp, Glycine max
  modified_base (405)..(405): a, c, g, t, unknown, or other
gggttctagtgtgtgattgtttgttgttgtaactcgttcttcttcttttgttgttctgtgtttgtgtttgttttttctctcacctgaaaatgtcttgctgcggtggtaactgtggttgcggaagctcctgcaagtgcggcaacggctgcggaggctgcaagatgtacccagacttgagctacactgagtcaaccaccaccgagaccttggtcatgggagtggcacctgttaaggctcaatttgagggtgctgaaatgggtgtgcccgctgagaacgatggctgcaaatgtggaccaaactgctcctgcaacccctgcacttgcaagtgaggtgttgggagggcaagcttcaagcagagatagcccttaattaggaataatgataaactattaatgtgtagctaanaacttatgtattatgtct

SEQ ID NO: 26879 - DNA, 397 bp, Glycine max
tagtaacggcgagccactctgctggactgctgccttaagaccacagaaggggacaaccacttgcatcattaaagggataagccgtaatctggcaaccaaacacaaccaaaatacgctactcgttaagggctgcactataccagaatgtctcacggaagaggctgcgcatatatgcctaatgtggtcactggggtgtcacaactgtgcctaacgtaacgcgcttacgcaacatcttacttctctggacgacctgtaggatggaccattaacactaatgcttgacccaatggaaaaagactttgagctggtgatatcctaatcataaactatgactaaacgacctacaatgatgcagctgaagacagaaattgaaacaacagctagaagacaacaacat

SEQ ID NO: 26880 - DNA, 398 bp, Glycine max
tgggatgatgaacatgaagaagagcaagtggggtgcataagcaaagggaagcaattgatggatgatcgaaatgtatctgtaaatttgactcctgttcgctccttaggatatgttgacccagggtgggagcatggtgttgaccaggacgagagaaagaataaggtcaaatgcaattactgtgagaaaattgtcagtggaggtattaatcggattaaacaacatttggctagaattcctggagaggtagcaccttgtaaaaatgctccagaagatgtttatatgaaaattaaagagaacatgaaatggcatcgtactgagaggagacttacgcgaccttaggctaaagaattgatgcctttctatgcaaagtcggataatgatgatgatgatgatgagta

SEQ ID NO: 26881 - DNA, 420 bp, Glycine max
gagagggaaaagagttgaagacttgaagtgaagaaagaaagaattgagaaaggatagggtttagggttggcaaaggaaggaagggatggaagcagctgtggtggacgtcggctctaagcttctcaaagcggactttgcaattcctgaccagactcccgccatgataattcccactcagatgaagcaattgctcgatgatggatcagtcactgatagttcactggctgacaatgtcaccgttgatcccgtcgtgcgaggatttattagagattgggatgccattgaagatttgttgcaccatgttttgtatactggcctcggatgggaaattggcaatgaaggacaaatactatttactgatccactttgtacccctaaggcgaacaaagaacagctggtgcaactaatgtttgaaacatt

SEQ ID NO: 26882 - DNA, 386 bp, Glycine max
cggttgaagtcattgcaaggagcattgctcagctgtacggacactgtacttgactatgcacaaaccggtttgattgcagcagtgttcttctttaaaatgatggaatggtggtaccaatctgctgaggagagaatgtcagctcctacagtatatccttctacacctccttcgtcttcaccaaaggtagccaaagaagggataccactaccaccagacagaacaatttgccccttatgctcgcaaaagcgtgcatatccatctgtagttactgtttcagggtatggctactgctatgcttgcatatttaagcatattactcaagataagctctgaccaattacgttaatgcctttaacagttgacctgattaggagactttttcatga

SEQ ID NO: 26883 - DNA, 392 bp, Glycine max
ggcgcattgaacgaaaattagggtttgtagtgtagcaggaagaagcagcaatggcgccgaagataacacgtaaggttagcagaaaccctgaattgataaggggaatcggaaagtactcgaggtcgcagatgtaccacaagaggggcatttgggctatcaaggccaaaaacggtggcgttttacctcgccacgaccctaaacccaagcctgaagctcctgctgaaaaaccacccaaattttaccctgctgatgatatcaagaagccccttgtcaacaagcacaaaccgaaaccagctaagctcagggctagcattactcccgggacagtgttgattcttcttgccggtagatttaagggaaagagggtagtctttttgaagcagcttccttct

SEQ ID NO: 26884 - DNA, 418 bp, Glycine max
ggggctgacattcacgaagcttttcagccgggttttcgcgaaggaggaaatgcgaattctgatggttggtcttgatgctgctggtaagaccactatcctctacaagctcaagctcggagagatcgttactacaattcctaccattgggttcaatgttgagactgtggaatacaagaacattagcttcactgtttgggatgttggtggccaggacaagattcgtcccttgtggaggcactacttccagaacactcagggtcttatttttgttgtagacagcaatgatagggacagagttgttgaggccagagatgagttacataggatgttgaatgaggatgaactgagagatgccgtattgcttgtgtttgcaaacaaacaagatcttcctaatgcaatgaatgctgctgagattact

SEQ ID NO: 26885 - DNA, 402 bp, Glycine max
  modified_base (366)..(366): a, c, g, t, unknown, or other
gggagtcagacagacaaacagactactgctacgttaatcatgggtccaacctctatggccgccggaagagtcacgaggtttttggccaggcactaccctctcgagcaccaccgtgataacgccgatgttgagttcgactttcttgatgatattggagaagccttgttagctcaaagtgctagcagtgatgagtgcggtcaccccaatgaaatggaggaacagttcgaccaagacgaggatcacagagataccgtcgaggagaatagaaccttttgggacaaacaacaccagcttttgcaggccagtatatgcagaactagttcttcggagtcacggataaggcatgccaccaaagaagcgcttcangaaattcaaagcgcggaaactgtgtgcggttgtggc

SEQ ID NO: 26886 - DNA, 420 bp, Glycine max
ggaccaagagattaagtcttggcttgcatttgcagcacaaaaagttgttgaagtaaatgccttggccaaggcattgtctggacagaaggatgaggttttcttttctgctaatgctgctgccttggcttcaaggaagtcctccccaagggtgataaatgaggctgtccaaaaagccgctgctgctctgaagggctctgatcatcggagggccacaaatgttagtgccaggttggatgctcaacagaagaaattgaatctttctgttcttccaacaactacaattggatctttccctcaaactgccgatcttagaagagttcgtcgtgaattcaaggctaacaagatctccgaggaagattatatccgtttcattaaggaggaaatttacaatgttgtaaagctccaggaagaacttgacat

SEQ ID NO: 26887 - DNA, 272 bp, Glycine max
ctagtaacggcgcgccagtctgctggaattcgcccttccgagcggccgaccggccaggtacgcgtgcaggcattcatactcaatgtctagggggtatcacaactggtaatctagccaactaaaaacgggcacaactcaaagctaatgatggagctcatggtattgctcaaacatgagagcctgaacaagagtcatatggacagcatctgtccttatcctatcatctgtgtcggctgccatatgtcctgtaccatatcatccgttgctgcctg

SEQ ID NO: 26888 - DNA, 383 bp, Glycine max
  modified_base (274)..(274): a, c, g, t, unknown, or other
cgacagggaaagcaaaatatctgatctttctccctcccttgggctgagtaggcaatggcggaggaagcacagtactcatcgggacccgattccgcgcccctcaagcgcaagtacgaagaccaaccctacggcatcgagcttgccaagcagcgtgctcatgaagtcgccgcacgccttctcaacgtcgcttctactacgtcactcgacgccaatgcgtccaaacccgacaccggcttttattctctcgatttgaagcctctgtatttctgatgtnctccatccgtcttctacggtcaccaaggatccagcaagaagattgatatccctaatggcatggttggtgtgattattggtaaaggctgaaagactattaagtatcttca

SEQ ID NO: 26889 - DNA, 426 bp, Glycine max
catgggtttggggtttaacaacaaattctacggcgcttggtccctcttcgactttatacgtacccgatacgaccgcgtttcgctcctgaacggttccgtgatcgccgtgatcgtcttcattctcgggaaaacgggtagggttttccgcgcggcgtcgctgctgcacaatctagaagccgatgggtttgaggcatatgtgtatggctacacctctctcataactgcttatgctaataataaaaaatacagagatgcactcaaggtgtttgggaaaatgaaagaagtggggtgtgaacctactttgattacttacaatgcaattttgaatgtttatgggaagatgggcatgccctgtgctaagatcattgctcttgttcaggacatgaattgccatggccttgcccctgattcgtgcacttataatac

SEQ ID NO: 26890 - DNA, 414 bp, Glycine max
  modified_base (93)..(93): a, c, g, t, unknown, or other
gaagatagaagtgagaatacgaaggaaggggtttagttgccgaatgaagaaggctcacgagacacgcatggggtcagccacatgctatccctnctactactacttctctctccggtggtggtgactcgccggataacacccactgccacctctaacgccgtcgccggcgaacacccttctcaaaatctcacccgacccaattcacctttctcctctctcttctcaattccccatctgggtatccctgtttcccttaaagttctcttctttttcgtgattcagaagtgctcagtgatacccttttcttagaacaatgagagcggtgaaagggagtcaggaagaggatgagtacgaggaaaatgagtttggttcttccaagaacagggcactttctttgccctaacaccataagat

SEQ ID NO: 26891 - DNA, 416 bp, Glycine max
cgttctgagcagaaaccaatttactggccacatgcctcaaaatattggaaacatttcaaagcttaggcagcttgatttgtcactgaataatcttagtggagaaattccagtcgcctttgataatctgcgtagtcttagtttcttcaacgtttctcataacaacctctctggtccagttcccaccctacttgcccaaaaatttaactcgagctcatttgtggggaatattcaactatgtggctatagcccttcaaccacatgttcctccctagctccttctggttcacctcctgaaatatcagaacaccgtcatcataagaaattatgcaccaaagacataattctcatagtaacaggagtgctccttgtagtcctggtaacaatttgctgcattctgctattctgcttgataaaaa

SEQ ID NO: 26892 - DNA, 417 bp, Glycine max
ggagcgcggaaccaaatgaaatgattgagaagagagagcgaagaaaaaaaagagagccaaaccaaacctttcccgaaacggttcgttttgcccttcttcggaaccctcccttctgcgccgctgctgctgctccggtcgccgtcggcgactctccggtaaccgaagaccactgccgatccgtcagaaacctcggatctcggatctgaacgagcgaaacgatgccgtctcacgcggatctggaccggcagatcgagcatctgatggagtgcaagcctctgccggaggccgaggtgaaggcgctgtgcgatcaggcgagggcgattctcgtcgaagagtggaacgttcagccggtgaagtgccccgtcaccgtctgcggcgacattcacggccagttctacgatctcatcgagctctttc

SEQ ID NO: 26893 - DNA, 418 bp, Glycine max
ggatccagcacataacaatggaaacgcagctttacgtgttttctctctagattctgctcttaaacgccgtcgttttcaaactctttttttccccttcgcttctctgtctttgtaaccgaaaggggggaaaatataattaacaccgatttcgcgaccaattcttcttctgcgttgaattgggacaacgagaaattggatctcagtttttggcaggaaataaaaattgcatttgagtgtaaaataacagagtatagtgtagggccttgttcttgatactgtgctaaatttgttggatggcggagaaatcatgcatcaagcgccttcagaaggaatatagagccctttgtaaagagccagtttctcatgttgtggctcgtccttctccaagtgatattcttgagtggcattatgtgttgga

SEQ ID NO: 26894 - DNA, 417 bp, Glycine max
gcattacctacatccattcactgtgaaccaattggacagtttaaggtaccaagctatgaacattgtggtggttaggcttgggagagcagaaccaccccttaggaaagaggttgtggagtacatgcttgatgtggactctcacatatggagcatgagaagaagcaaagccaatttcttcagaattgtgtcactcttttctggtgcaatatctatgagcaagtggcttggtgaggtacaacagtggaagaatccagtgaccacaatcctagtgcatgtcctctttttcatcttgatatgttaccctgaactgatccttcccacaatgttcctctacatgtttctcattggaatatggaactttaggtttaggccaaagcacccttcacacatggacaccaaactttcttgggcagaagc

SEQ ID NO: 26895 - DNA, 414 bp, Glycine max
ggaggataatggacttgatgtgaacttctacaaggaatcatgccctcaggctgaagacatcatcaaagaacaagtcaagcttctctacaagcgccacaagaacactgctttctcctggctcagaaacatcttccatgactgtgctgttcagagttgtgatgcttcactgttgctggactccacaagaaggagcttgtctgagaaggaaacagatagaagctttgggatgagaaatttcaggtacattgagaccatcaaagaggctttggaaagggaatgcccaggagttgtttcctgtgctgatatcctcgttctctctgccagaaatggcattgattcgctaggaggtccccatatccctcttaaaacaggaagaagggatggtagaaggagcagagccgatgtggtagagca

SEQ ID NO: 26896 - DNA, 423 bp, Glycine max
ggtatcaagaaattttgactgatcctagttatgctggccagtttgtgctcatgacaaacccacatattgggaatactggcataaattttgatgatgaggaatcaatacagtgtttccttgctggacttgtaattagaagtttgagtatcagtacctctaactggagatgtaagaagcctctgggggattacctagctgaaaggaatatcatgggaatttatgatgttgatactcgcgcaatcacgcggcgattgcagcaagatggcagtcttattggtgttttgagcactgacaattccaaaaaggatgaagaactgcttcacatgtctaagtcatggaacatttgtggtaaggatctaataagtggagtatcatgcaaaacttcacatgaatgggttgataaaacaaaacaacaatgggagt

SEQ ID NO: 26897 - DNA, 429 bp, Glycine max
gggtgcacggttcagtatgtttgagatgagagggaagatagctttggcagagaaaggaatcaaatatgagtacatggaacaagatctcaccaacaagagtactttgcttcaagaaatgaacccaattcacaagaagattccagttctcatacatcatggaagacctatctgtgagtccctcataattgttgagtatattgatatggtttgggacaacaattgtcctttgcttccctctgatccctaccacaaagctcaagccaggttctgggctgattttgtagatcagaaggtgtatcatgcttctaagagagtttggatttcaaagggagatgagaaagaggtggcaaaaaaggacttcctagagagcttaaagcaattggaggagtttcttggagacaagccttattttgggggtgacacatttgg

SEQ ID NO: 26898 - DNA, 281 bp, Glycine max
ggtttcacgattcagtatgtgagacaagagagggtatatggctagagcacataaaggaatcacatattagtacatcgaacatgatcttacctactacagaactttgcttcaagaaatgaactgaattcacaataagactccagttcatatacatcatgtaacacctatctgatactccctcataaatgtcgcgtatattgatataattttgatacaaccaaagtactttgcttctctatcattcctaccaaaaagctcaaatcaaccatatgaactcattc

SEQ ID NO: 26899 - DNA, 421 bp, Glycine max
gatgatagtcattggtattgtgagcggggtacgtatgcaaatgtcaaatctgcctccacatgccagatgtgctatcaacaacgtcgatgaaaacttggttctccatttgaagcacttgtctcctgcccaaggcctctgcaccaaaagctgagatggagacattcctgtatgtttatatatatttatgcactatgcagtctccaattttgtgatgctaaatacaacaggatgaaaggagtaaggcatggaagaaaggttgctctccatgcgctcctattcaatacaaaacccaatttgatgtatatagtgttctatctctttatgtatgaggttttctgctacaggcatttgtaactcaatatcataacacaacagatgttggagaatggagatgaacacaaatgtgcttgtttgtgacaac

SEQ ID NO: 26900 - DNA, 284 bp, Glycine max
tgtatggggttgcgcggaaccaaatgaaatgagtgataagggagagcgtagaaaaaaaagagagccaaaccaaaccttttccgaaacggttcgttttgcccttcttcggaaccctaacttctgtgccgctgctgctgctccggtcgccgtcagcagactctacggtaaccgaataccactgccgatccgtcagaaacctcggatctcggatctgaacgagcgaaacgatgccgtctcacgcggatctggaccgtcagatcgagcatctgatggagtgcaagcct

SEQ ID NO: 26901 - DNA, 394 bp, Glycine max
gagaaaagcaaaagaaggtcacgataagtgatttggctattgtcttcaatggggctaaggggacatttcatgtggaggacaaaccattgtatgctgtttcctttgcagctaatggtaatgtggaatatgtggtactttatcatgaatatggaaatgtggaattgttttattcagacttgttaaaactttgtacagagatggatgctgctgatcttcacaaattcatatatgacaaccgtaagaaccttgctgctgtaaaggacgaaataccagatgcattaagagcagctactaacaccgtctgtttagatttagactctctgaacgtgttttactgtacagaagtgtcaaatcacgacgtagagaaggatgctaacttactggatgttcgtcg

SEQ ID NO: 26902 - DNA, 406 bp, Glycine max
ggcacaagtgagtttgttgatcgagataactagaaacagtgtgatgaaaatgaaggtccttgttttcttcgttgctacaattttggtagcatggcaatgccatgcgtacgatatgttccctctccgaatgaacactggctatggtgcccgtactccggaggtgaaatgcgcaagttggaggcttgctgtggaagcacacaacatctttggctttgagaccattcctgaagagtgcgttgaagcaacaaaggaatacatccatggcgaacaatatagatcagactccaaaacagttaaccaacaagcttacttttatgccagagacctcgaagtccatcccaaggacacatttgtgttcagtatagatggcaccgtactctctaatattccatactacaaaaaacat

SEQ ID NO: 26903 - DNA, 416 bp, Glycine max
gacagccgtccgaacggatgcgaggacactgccgaagggggtggcgccgctcacataagggctctgcactctgtcttacggaaactattatattcgcttctctgctcaagcctcttcttctccagcactggcatctcataatgttggttatacacacatgctaccgacgagagaacttaaactagcttcagaatctttttcagatggaaagactagtactcaggaactgcacacggttactgaaaaccgtatgtcagccatatggaatcacatggctgatgctggaataaagtatattcctagctgcaacttctaaatttacgatcaaatactggacacaacaaccatgcacaggtcaattccatctagatataaccgtaacggtggtgacattggatttgatgaatacttctcaa

SEQ ID NO: 26904 - DNA, 363 bp, Glycine max
ggctcgaggaaaagaaggaaatagaaaaagaaggacatggcacagcagtcctagatatcctattctctgcttcggaagaaagagagaacatactgatcaatggcgttcgcttctttccttggcagagtcctatttgctactgtcttcatactctctgcttaccaacagtttaatgaatatagagatgatgggggacctgctacaaaagcactcagacctaagattgatgcctttacacatcaggtgcattctcaagtgggctattaaattccagagattaatctgaaatctataattgctggagctattgctctgaaagatcttgcaagggttcttttcatattaggcagatcttttggagct

SEQ ID NO: 26905 - DNA, 412 bp, Glycine max
gaaggaaggaagaagcagagcgaagcggtgacagacagaagaaaatgggaagcagaggtccacctcaatcccatccaaattccgctgccatttccaagggttacaacttcgcttccacttgggaacagaatgctcctctgacagagcagcaacaattcgcgattgtatcgctttctcacgccgtttctgagcgaccgttgcctctcaagttggctcaagagaatgcgtcggtacaagacaatgccttgtctgttaaaacgaaggatagttccgttgatgactctggtactattgagactgttatggtcaataccaatcagttctacaaatggtttacggatcttgaatctgccatgaaatcagagacagaagagaagtatcaacattacgtgaacactctaacagatcgcat

SEQ ID NO: 26906 - DNA, 427 bp, Glycine max
gacacagaacaatagtagcaagcagagccccgagatctgtgcttgaaccttcacttgtgtttccttccttctgcagacgagcttcaccttgcgccgaagggccacagatggttgaaaccgatatggatgccgaaactgttgcaaatgtggttccaccaaaggagactccaaacagtgttcccatctcttatcattcctcacactcacaccctcctcttaatgagaggattatttcatccatgaccagaagatctgttgctgcacacccgtggcacgaccttgagatagggcctggtgctccaacgatcttcaattgtgtgattgagattgggaaagggagcaaggtgaaatatgaactggacaaaaaatcgggtcttatcaagatcgaccgtgttctttactcatcagttgtgtatcctcacaatta

SEQ ID NO: 26907 - DNA, 408 bp, Glycine max
gatggaacggagaagctgagggcaccggacacagacagaagaaaacgggaagcagaggtccacctcaatcccatccaaattccgctgccatttccaagggttacaacttcgcttccacttgggaacagaatgctcctctgacagagcagcaacaattcgcgattgtatcgctttctcacgccgtttctgagcgaccgttgcctctcaagttggctcaagagaatgcgtcggtacaagacaatgccttgtctgttaaaacgaaggatagttccgttgatgactctggtactattgagactgttatggtcaataccaatcagttctacaaatggtttacggatcttgaatctgccatgaaatcagagacagacgagaagtatcaacattacgtgaacactctaacagatc

SEQ ID NO: 26908 - DNA, 395 bp, Glycine max
  modified_base (355)..(355): a, c, g, t, unknown, or other
  modified_base (368)..(368): a, c, g, t, unknown, or other
ggactgaagacagatgatgatgctgatcaattacccaccattgcaatagttgcttcatatgacacctttggggctgctcctgcattatcagtgggaagcgatagtaatggaagtggcattgtggctcttcttgaagtagctaggttgttttctctcttatattctaatccaaagacaagaggacaatacaatctgctgtttgggctaacgtctggtgggccttataactacaatggaacccataagtggcttaggagctttgatcaacgtctgcgtgagagcattgactatgctatttgcttggatagtattggctcttgggaaaatgaattgtggattcatgtatctaagcctncagaaaatgcctntattaagaaaattcatgaagatttttc

SEQ ID NO: 26909 - DNA, 411 bp, Glycine max
ggtcttggtgatggatagacacaaatgcaagcgtttgttcaaggtctttcagcaatggcagagcccttggtgggcacatgaaggctcaccttgcttctctccctctccctctccctccaaagcttcactcttgtttctcttcctctgactcagaacaagaacaatctttaagggagaatcctaagaaaaccttgaggattctggatcctgaagacagagagagcgagacagagtctaataagaacccgactcgtcaacgatccaagcgcaactggaaatctaccatgcccaagctcagcctcggacaccccgaagccgaacctctcagctccgtctccgacaccttccccgaagaagacctcggcatgtgcctcatgatgctctcccgcgacacgtggcatgaacacaaac

SEQ ID NO: 26910 - DNA, 417 bp, Glycine max
ggcagatgagggtgctatttctctatggagaggaaacactgctaatgttatccgttatttccccacccaggctttgaactttgcatttaaggattacttcaagaggcttttcaactttaagaaggatagagatggctactggaaatggtttgctggcaactcggcctctggtggtgctgctggtgcatcatcccttttgtttgtttactctcttgactatgcccgtacccgtcttgccaatgatgcaaaggctgcaaaaaagggtggagagagacaattcaatggtctcgttgatgtctacaggaagacattggcatctgatggtgttgccgggctctaccgtggtttcaacatctcatgtgttggaatcatcgtgtatcgtggtctgtactttggattgtatgattctgttaaacc

SEQ ID NO: 26911 - DNA, 396 bp, Glycine max
gaccctgatgaagggaatgctttagcacaactaagggcatggaaaacagctgtagcaaatataccatatggtggtgccaaaggagggatagggtgtgacccagcagaattaagtatatctgaattagaaagacttactagagtttttacacaaaaaattcatgatttgattggaactcacacagatgtgccagcacctgatatgggaacaggaccacagaccatggcatggatactatatgagtattccaaattccacgggtactatactgcagtagtgactggaaaacctatagatcttggcggatctcttcgtagagacgcaggtacaggacaaggagtactctatgcaacagaagctatgcttaatgagcatgggaagagtgtatctggacaa

SEQ ID NO: 26912 - DNA, 417 bp, Glycine max
gagggcgaggaagccacatagagacacaatacagagtgagttgttgctccttcgccacaactctctgccaacatgggtatctccagagattctatgcacaagaggcgtgccactggtggcaagaagaaggcctggaggaaaaagagaaagtatgagcttggtcgccagcctgctaacactaagctgtcaagcaacaagacagtcaggaggatccgtgttggaggtggaaatgtgaaatggagggcattgagattggatactggaaattactcctggggaagtgaagctgtaactcgcaagactcgtgtactggatgtggtttacaatgcctcaaacaatgagcttgtgcgtactcaaactcttgtcaaaagtgctatcgttcaagttgatgctgctccattcaaacagtggtatctt

SEQ ID NO: 26913 - DNA, 426 bp, Glycine max
gggagagagagggagaaagagaaggagatcgcacttaacacatcacacagcaagagaaagagtaatagaatcgtggttcgtttgcagaagaagaggttaagagaaggagtgaccgaagcgaagatgttaccaacagcttccaaaggacgttcttcttcttcctcctcctcctcctcttcctctcgacctaacaatcccatgctgcttccctacctccgcagaatcatcaagtggcaacaaatggatattgaatatactttttggcaaatgcttcatctatgtacatcaccgaaagttgtctatcggcatactaaatatcacaaacgtaagtctctgtctcattaatatctttgttcttctgatttattgatacacatttctgaacagtgattggtttaacaatgtttattaagcttctgttttact

SEQ ID NO: 26914 - DNA, 416 bp, Glycine max
gggggtaaaaattggattaaatccatgatccttacagcatcactgttcccattcatgtgctttggaattggttttattttaaacacaattgctatattctatggatctctagctgcaatcccctttggtactatggttgttgtctttgttatatgggcttttatctctttccctctagcacttcttggcacagttgttggaagaaactggagtggtgctccaaataatccatgccgtgtgaagaccattcctcgtcccattcctgagaagaaatggtacctcacaccatctgtagtttcgctgatgggaggactgcttccctttggcagcatattcatcgagatgtattttgtattcacttccttctggaattacaaggtgtactatgtctatggcttcatgctacttggtttttc

SEQ ID NO: 26915 - DNA, 294 bp, Glycine max
gtttgtataaattggattaaatccaggatcctgacagtttcactgttcccattcatgtgctttgtaattggttttattttaaacacaattgctatattctatggatctctatctgcaattcacttaggtactattgatgatgtctttgttatatgtgcttttatctctttccctttatcacttctagacacagctgttttaataaactcgaatgatgctctaatatatccatgctgttttaagaccatactttggttcataccttatattaattcatatctcacaccattttta

SEQ ID NO: 26916 - DNA, 397 bp, Glycine max
gggagaatggaggtggtgtgtcggggaatgttgaaacccagaaagttcatgcagaggaggaggaaattcgaggttttcaaggattctgcagatgaagctgaccagaagaattggaggagaatcatgactgaaatcgaagaatccggttctgctgtctctgtgctctctgctgagaagattaataaccaaaatattcctaaagacctcgttgttggtaccttgattaggtttaaacaactcaaaaagtggaaccttgttgttgagattctcgaatggcttcggactcagaactggtgggattttggtaagatggatttcttcatgcttatcacggcttatgggaagctaggagacttcaatggtgccgagaaggtcttaggcttgatgaataagaatg

SEQ ID NO: 26917 - DNA, 427 bp, Glycine max
gatttaaatgaagggttcaatgcagatgatgggaaatgtagtgagatgcctgggtctacacctgctgcaagattggtcagtcctgttccattttctgcttcatccatgtcttttggtattctctcgatcacagtagctgctgctgcaaagagcccctttgtggcacctgaagatttattgaaaagtaaaaaggagcttggttggaagggatctgctgctactagtgcatttcggccagctgagcccaggaaagttatggaaattcctcttgatatgtcaactacccctattcctaatgatgaagctagaaagcagagccgggcaccattggattttgacttgaatgtttctgatgaagtaatacttgatgatgtttcttcccaaaattgtgctcgtcagactgattgtggaactcattcagacaatg

SEQ ID NO: 26918 - DNA, 415 bp, Glycine max
ggagtgagagggtagcaattgagtgatcagtggtggcgagggccgtagtcggagaagaaacgcgactcaaattggcggaggatcgtctcagccaatccgcagttccatccgaggtgggtcttttaatcggaaagttcagctccgctttgggccgggccttcctcttcgatctcattcccaccccacacaacgactccggcgagcccgcctgctccctcaccgagtccgacaagaagaagggccccaaatctaaatccaaatccgagctcgctgattcctcttcccttttcatcgacaaggactgggtcgccgaacatgtccgccaggtttctagaatgctcgtcggcggcatcaaggtcgttggcctatacgtttgggttagcgacgccgcgttcaagaattcaaccataatgct

SEQ ID NO: 26919 - DNA, 427 bp, Glycine max
gacgttagatcatgtgtttatcgcaagaaaacacggcgtgggtcatcaacattcatggaaaaacagataccttttactggaatattaagcaataatgttgaagataatccagattttttcaactggaacagagtgaaaattcgttattgtgacggtgcctcttttgctggggatggtgaagataaggctgcgcaactgcaatttggaggacagcgtatttggtcggcagcaatcgaagatttgatgtcaaagggaatgcgatttgccaggcaggctcttctttctggatgctcggctggtggtttggctactattatacactgtgatgaattcagaggttttttcccacagactacgaaagtgaagtgtcttagtgatgcaagattatttcttgatgcgattgatgtctccaggggacataccatca

SEQ ID NO: 26920 - DNA, 400 bp, Glycine max
ggccatcagaaaggaatagtttgattggaggagatgactttaagagtggtcagaccaaaatgaaatcggtgttggtggatttcctagtaggggccggcatcaagccaacatctatagtgagttacaaccatttgggaaacaatgatggcatgaatctctcagcccctcaaaccttccgctcgaaggaaatttccaagagcaatgttgttgacgatatggtcaacagcaacgccatcctctatgagcctggtgaacatccggaccatgtggttgtcattaagtatgtaccttacgttggggacagcaagagggccatggatgagtactcttctgagatattcatgggcggaaagaacacaattgtgttgcacaacacttgtgaggattcactgttagctgc

SEQ ID NO: 26921 - DNA, 427 bp, Glycine max
gggtgctaaattgagataactgtgtgtgacagagagagagagtaatcaagatagctcctttgaattttctatcagaatctgagggcccaaaatctagggttttctgttcttctctggggatctgaagacatgcagtccaagtctgaaactgcaaatcgactgagatcagatcctcattcctttcaacctggcagtgtttattctgagccttggtggcgtggtattgggtacaatcctgtggcccagacaatggctggggcaaatgcatccaattcatcgtctcttgaatgccctaatggtgattctgaatccaatgaagaaggtcagtctttgtccaatagcgggatgaatgaggaagatgatgatgccactaaggattcacagcctgctgctcctaatggaacaggaaattatgggcaagaacagc

SEQ ID NO: 26922 - DNA, 415 bp, Glycine max
gatatcaggtggcaacaacactgcctcaaggaacccaactttccgccctaattctcagtttatgggcttgcaccacccaagaccaatgcctgccatgggagccacccatagcttcataaataggatgtacccaagcaaactatatggtcaatatgggaacactgtcagatctggaatgggttatggtacacatgggtatgattctcgcactaatggacgggcttggttagctgttgacagtaaatacaaaactaggggaagaagtggtggctactttggctatggcaatgagaacgcagatggtttgaacgaactgaacagagggcctagggccaagggtggcaaaaaccaaaaaggttttgcaccaactattctggcagtcaaagggcagactttgcctgcaactttaggcaca

SEQ ID NO: 26923 - DNA, 405 bp, Glycine max
gaatcaagtgaaagctctgatgaagacaatgatgcataacccgccgtaactgatgtgtcaaagccttctgctcttgcaaagaagaaggttgacagctctgattctgatgatagcagctctgatgaagataaggggaagatggatattgatgatgatagttctgatgaaagtgaagagccacaaaagaaaaagactgtgaaaaatccaaaagaaagcagtgatagttccgaagaagacagtgaggatgaaagtgaggaggaaccctccaaaactcctcagaaaagagacagggatgtggagatggttgatgctgcctcgtctggaaagaaagcgcctaagaccccagttacacccaaagaagatactggcgcttcaaagacactatttgttgagaacttgccattt

SEQ ID NO: 26924 - DNA, 390 bp, Glycine max
gatacaaaaagttcttatcagtgacagagtaaaggaggcataccgatgacgatggcgatgacggcgtcgcagttgcggtgcggttgggggtggaggccaacgccgaatcagcagcagcaacgacgtcgtatggttccggtggtgtgttccatcgctatagagaacgcgaagaacaaagagagagcgaaactgaagaagctcttcgatgaagcgtacgagaggtgccgcactgctcccaccgaaggcgtttccttcactctccaacaattcaccgacgctctcgacaagtacgacttcaacgccgaaatgggcaccaaggttaagggcactgtttttgccacggataacaatggagcttatgttgacattactgctaagtccacggcctac

SEQ ID NO: 26925 - DNA, 409 bp, Glycine max
  modified_base (339)..(339): a, c, g, t, unknown, or other
ggagagaaagagtgaggagagaattacagagcgttttccaacacgattacacgaccgaatcaaaccctctctttctctccgaagctgcgtttaatatcttactcgccttagattgttcttctctttcattatactgttctcttttcgatttgagggaacagtacaagagtgtgaggatcggttaacccaactgcacaggtagtcactaaaataatggagtctcacgatgagactggatgccaggctcctgaacgccccattctttgcattaataattgtggcttctttggaagagcagctaccatgaacatgtgttccaagtgttacaaggacatgctngtgaagcaggagcaggacaattttgcagcatcgtcggttgaaaacattgtgaatggcagttccaatggca

SEQ ID NO: 26926 - DNA, 410 bp, Glycine max
gaaaaaatttgcatctatgcgtatatgcgaatcaatcctactacttctggtcctgaggttcctgcgcttgaaaaaaaaaatctgggacgtatcgcccaaataattggtccggtactagatgtagcttttcccccaggtaagatgcctaatatttacaacgctctgatagttaagggtcgagatactgttggtcaacaaattaatgtgacttgtgaagtacagcaattattacgaaataatcgaattagagctgtagctatgagtgcgacagaaggtctaatgagaggaatggaagtgattgacacaggagctgccctaagtgttccagtaggtggagcaactctaggacgaatgttcaacgtgcttggagagcccattgataatttaagtcctgtagatactcgcacaac

SEQ ID NO: 26927 - DNA, 408 bp, Glycine max
gacgataaagggtttttgatttgtttccttgggtgctgggtgcactttcactcgaagaaccttgaagcgagtctgggccacagcaaccagcgacaacaactcaatcagctagggatgctttgcttgctatcttgttggaggattttctgttcaagagaagatggtaactagaattgtggatcttcgttcagacacagttacaaagccaactgaagcaatgagagctgctatggcaagtgctgaagttgatgacgatgttctaggctatgatccaactgcttttcgcttagaaacagagatggcaaagacaatgggcaaagaagctgctctttttgttccatctggcactatgcggaaccttgtatctgtacttgttcattgtgatgtcatgggatgtgaggttattct

SEQ ID NO: 26928 - DNA, 416 bp, Glycine max
ggatgaagataggatgcttctgaaattccgatgtcaataaggtccttaagtaaaaaatactactgtcgtcacagatctgaatctggtcccctctggtatcgtgtagtactagtattttagttgcatctaataaatgaggatacccaagaagttgatttaataaatgttcaccaacttaacataagctatttgattttgctgacaaatacagaggcaaatatgacagcagcatcacggttgcccaaaagtattacagatccatcagtggttacaatgatgaattgctctgggctgctgcttggttgtatcaagcatctaacaaccagtattacttggattaccttggaagaaatggtgattccatgggtggaactggttggagcatgactgaatttggttgggatgtcaagtatgct

SEQ ID NO: 26929 - DNA, 419 bp, Glycine max
gcgagcatcaatatctttacgtgtgcagttactcatgagatttcttcctattctttgctcagacggggagtcttctgcaaggagcatgagatacatgcttgcctctgtacttcttcgtctccttggcagccgggttgtgcatgaggatgcaacggtgaatcccatgcactatactccattgagaagggaggcagagtcacatgctgaagcttcttttgtagattcttctgctgaaggcctgtttgatcatctgctgttgattttgcatggattgttgagtagttctcctccaagttggctcaggtcaaaacctgtttcaaagacaactaatgaacctacaagggaattttctggatttgaacgtgagccattggaggcattgcagaatcatcttgataatatgcaactgccagacacta

SEQ ID NO: 26930 - DNA, 411 bp, Glycine max
ggggagcgaagtgaattgaaattgaagtgactcggggtgagttgactcagcaatggcggaagaggtgactcgggtgatggtggcggtgaacgagtcgagcattaagggataccctcatccttcgatcagcagcaaaggggctttcgactggaccatcaacaagatcgttcgcgacaacgtctctgccttcaaccttctttttcttcacgttcaagtccccgatgaagatggttttgatgacatggatagtatctttgcttctcctgacgattttaagaacatgaatcagagagatagaattagaggagttcatctgctggaatacttcatcaataggtgtcatgaaattggggtggtttgtcaagcatggataatgcatggtgatcccaaagaagtaatatgtcatgaagt

SEQ ID NO: 26931 - DNA, 402 bp, Glycine max
  modified_base (303)..(303): a, c, g, t, unknown, or other
gaggaaggaaatgtgcagttagatgcaaaacatgaatgcaaagatgcaactctttttcaggcccctgaagattgtgcacttgccataacaagcattattcgtcaccatgaaacagagtaccttgcttctcttgaggcatcatatctaaaccttcctgattctactttcaaggatcttcggagaaagcttcctgtcacccgcacgttatttccatggcataatactttgcagttcagcttgacaagagacatctcaaaagaacttggcattggaaagtaaatacactacattcacacagaacanataaaagtttgtgtttactcggtggtgacaagttcctcatatattcactacatgtcatttgatcaagtcaatcattctttgggttgacgttcgttatat

SEQ ID NO: 26932 - DNA, 312 bp, Glycine max
gcttcgtgagtgagtagtgagacggacgaacgaactgctgctgcatcgagtgtccttgcaggctatagcgccgtggtcagatgttactgggtttactcaaaactatagccttaagcgtgtcattgcgatcccgtacacggtaaacttgtctctcttgatggattactttaacgctgtttagctcaacgatctacgatcgattagtgccgtcactctgaccgactaaactgtccaattgaactactgcatcttcacttgatgtccagttgggattatatgctttcgattgcatttattcacgcagatttcgac

SEQ ID NO: 26933 - DNA, 423 bp, Glycine max
ggaggagactgagaaaacagaagaaaacaaagtggaagacacagtttctgcgttgaggtctttgatggtttctcactctccgccgctggatgccttagtggtgccctctgaagattatcacctgagcgaatatgtgtctgcacgagacaagcgccgcgaattcgtttccggcttcactggaagtgccggcttggcacttataacaaagaaagaagcactgctgtggacggatggacggtattttttgcaggctgagaaagaacttagtgctgggtggaagctaatgcgaattggtgaagatcctgctgtagatatctggatggccgataatttgccaaaagaagcatccgttggggttgatccctggtgcatttcaattgatactgctcaaagatgggagcgtgcttttgccgaaaaacagca

SEQ ID NO: 26934 - DNA, 433 bp, Glycine max
gacttcaaagtggagaaaaacacacacggttggggcattctctctcttttctttttcctcaaaaagttgaaaaagaataaagggggaacaatcgagtgaagttgttgctcttcaatagtaaacttacctatggaagagggaagggttgtgagtgggtacacaaaagatggaactgtggatcttaaagggaaacccattctcaaatccaaaagtggtggttggaaagcatgctcctttgttgttgtgtacgagatatttgaaagaatggcttattatggaatatcatcaaatttgatactgtatctgactaggaagcttcaccaaggcactgtgacctcttccaacaacgtcaccaattgggttggcaccatttggataactcctatcttaggagcctacgttgccgatgctcatcttggtcgcttttggactt

SEQ ID NO: 26935 - DNA, 361 bp, Glycine max
gggagaaaaggcgaagacaggattggaagcagtgagaactgataactcttatcattcttttttccacttgacattgccgacgccaccaaatacacaaccttaactttcccacaacactacccatacatcattcgttttctctctagattttttcagttagctattgctgacttctttttgtgtgtgccaacaacacagaaagagagagaaagacatggctctgaaccaatcaaaggccgagttgttgacggtgagtttggtggtggtggcgctgtgtatagcacgatacatagtgggttcccctctctactggcatttcgttgcggtgaacaaccactcttcatcttctacttgtgcaccc

SEQ ID NO: 26936 - DNA, 356 bp, Glycine max
ggttgcgtgataccatttaatttcacagcgatggattatttatagttaagtgtggagtgcagtgcaggtcaaggcctgagattcggttctttacttgttgggttgttctgatcttctctcatagcaatcaaatcacactcccatcttctcatctcgtaaaccctaaaccccgttttcagtgacatcgagatcgatcgaacatggatgaggagtacgatgtgatcgtgttgggcacgggtctcaaggagtgcattcttagcggtcttctctccgtcgatggcctcaaagttctgcacattgacaggaatgactattacggaggagaattcacttcgctcaatcttattcagctttgg

SEQ ID NO: 26937 - DNA, 408 bp, Glycine max
ggatgaatggcagagttattgccattgcctctggctcgggttacaccaaactgatacacacttaataatattatagtaaaaattagccaccaaagtacactaaccccttttttcatacaactcaatagctggattggagcaaggtgaaagtaaaatcatttgcaaccaatgccgttgaacatatttcaggacaaagatggattgccacggattatattgactgagccaaagggttcatcagctgaggttcttctttatggagggcagattatttcttggaagaatcatcgaaaggaagaacttctttttatgagcagtaaggctaacaagaaacagcataaagcaatcagaggaggaatatcagcttgcctagcacggtttggtgatctcagttcacttgaacaacat

SEQ ID NO: 26938 - DNA, 389 bp, Glycine max
gtagtgctctattggaaatgatgatatttcatgtgaccctctccatcaacagcccagaagtatcgtgtggagaacttgtatgagggtcctcttgatgatcaatatgcttctgctatcagaaattgtgatcctgaaggtcctctgatgctctatgtctccaagatgattccagcatctgataaggggagattttttgcctttggccgtgtattctctggcagggtttcaactggtttgaaggtgaggattatgggacctaattatgtccctggggagaaaaaggatttgtatgttaaaagtgtgcaacgaactgtcatttggatgggaaagaggcaagaaactgtagaggatgtcccctgtggtaatacagtggctatggttggtcttga

SEQ ID NO: 26939 - DNA, 417 bp, Glycine max
gacactaaacaagttaaaagaggagcatcactgaactaacaaagcaaccctatgtcgaaggtggtttgtgtcaccggagccagcggcgccatcggatcatgggtggtcctactcctcctccagcgtggttacaccgtccatgccaccgtccaagatatcaaggatgaaaatgagacgaaacatttggaggaaatggaaggagcaaagagtcatctccatttttttgaaatggatcttcttgacatcgactccattgccgctgccataaagggttgttccggcgtaatccaccttgcatgtcctaacatcattggtcaagtcgaagatcccgagaaacagatattggaaccggcgataaaaggaacggttaatgtgttgaaggcggccaaagaagcatgggtggaacgcgtggtggcc

SEQ ID NO: 26940 - DNA, 368 bp, Glycine max
gtcgctgtaaggcggtggcttgttggcggcggagctgcgcgagattaggttcggatcgctcggtctcgctaggtcaccgctgacgagaatttgaacttctcgtcactactaagccgctatttagctaaagcttgtgttgggagaaagcaaagagcatctagtttgttaacaatggaagatgatctgttggacacagaagacaggaacaacaatggcagttccaccgcaaagaaatcgaagcagcggcgaaagaggaaggagtacatggtggacgaggatgggcaggtgggggcacgagagaagctggcaaaaagaatcttgttatctctgacgaggccttcctatgttttgggattgggtcccaaacc

SEQ ID NO: 26941 - DNA, 406 bp, Glycine max
  modified_base (265)..(265): a, c, g, t, unknown, or other
gacggacgagggtttcgtttcgggtttgacggtgctgacaatcactttctgcgcttcactcactcccttcgtgcggttttctttctttgtcgaactcgtgcgaaaatgcgtgagattcttcacatacagggagggcaatgcggaaaccagatcggagcgaagttctgggaggtggtgtgcgcggagcacgggatcgattccacggggaggtaccagggggacaacgagttgcaactcgagcgagtcaacgtctattacaatgaancgagttgcggaaggttcgtgccgagggcggtgctcatggatctagagccagggaccatggacagcgtcagatctggtccctacggtcagattttccgacctgataacttcgtcttcagccagtccggcgcccgaaacaact

SEQ ID NO: 26942 - DNA, 423 bp, Glycine max
gggttctagtgtgtgattgtttgttgtggggactcgttcttcttcttttgttgttctgtgtttgtgtttgttttttctctcacctgaaaatgtcttgctgcggtggtaactgtggttgcggaagctcctgcaagtgcggcaacggctgcggaggctgcaagatgtacccagacttgagctacactgagtcaaccaccaccgagaccttggtcatgggagtggcacctgttaaggctcaatttgagggtgctgaaatgggtgtgcccgctgagaacgatggctgcaaatgtggaccaaactgctcctgcaacccctgcacttgcaagtgaggtgttgggagggcaagcttcaagcagagatagcccttaattaggaataatgataaactattaatgtgtagctaaaaacttatgtattatgtct

SEQ ID NO: 26943 - DNA, 329 bp, Glycine max
tttgggtactagtgtgtgattgtttgttgttgcagcgttttattcttcttttgtccctctctctttctctttgttttttctctcacctgaaaatgtcttgctgccgtggtaactgtggatgcggaagctcctgcaagtgcggcaaccgctgcggaggctgcaagatgtacccagacttgagctacactgagtcaaccaccaccgagaccttggtcatgggagtggcacctgttaaggctcaatttgagggtgctgaaatgcgtgtgcccgcttaaaaccatggctgcaaatgtggaccaaactgctcctgcaacccctgcactttcaag

SEQ ID NO: 26944 - DNA, 388 bp, Glycine max
gatgaggagggaggtgtaagaaactgggaagagaaggtggtggtcttgttgccattctgatctaaagcttgtgtctttctgcttcgtttgcatcttctgctgcgtaaagttgattcttttctgattcttccgtagatttcatctctgaaactagttctaatactttatctacagatctctatattctaggtgaaggtttgcttttgatccggcttgggagttttgatagacttgattttaactctttaagagccatatgctcacagtggtcggatatagtacatcagaagttcacacaagagatatatataattattcttgggtaccacctgcaaaatgtcattccgcagcatagttcgtgatgtaagggatagtttcggagcttatc

SEQ ID NO: 26945 - DNA, 418 bp, Glycine max
  modified_base (391)..(391): a, c, g, t, unknown, or other
gacaaccaattccattattaaagggataagcctgaaccttgcaacccaacacaaccaaaattcgctacttgttaagggctgcactataccagaatgtctcagggaagaggcagtgcatctttgcctattgtggtcactgtggtttcactactgtgccttttggaacgtgctaacgcagcaacttactccgttggaggacctgggggatggaccttcaacactaatgcttggcccaatggaaaaagattcagagctggtgatatcctaatcttcaactatgactcaacgacccacaatgtggttgctgtggacagaagtggatacaacagctgcaagacaccagggggtgctaaagtgttcagttcagggaaggaccaaatcaaactagcangagggcagaactacttcatatgtaact

SEQ ID NO: 26946 - DNA, 385 bp, Glycine max
gtctgtcaatgaagcatatcaatttgcgcgtgatcaagcgattgtggttctaggttctacatattcaatatatatcctctcatgtgaaaaaagttgatcaagtgatcattcacaccatgggtggcgtcttctaccatgaagaaaagccaccaaaccataccaagagatgcaaattcattgcaggcactctgaaagaagtgttttcccactgtcacacttttagtcgtgtgaggctttcaactgcacgccttgaggaggagtgccccatcattgatgacgatgctgacgtgattgtttcagaggttacaagccaagttattgagaaacaaaagctcataccaagcccattgagagaaggtctttccttggcatactcgactgcaac

SEQ ID NO: 26947 - DNA, 401 bp, Glycine max
tgtggttgctggatttcaacaactttccaggggggggtctcttatcttgaagaatcattttattatataattatattgcatattccagctcaagtggcttgtggatattgctctttgattctatatatgctttattgcaaccttattattattcttcagtcgctcttcttcgctcgattggaaaaccatcctctcttcttttatgtgattttaactggcggactttaaattggtgactgagacatgtgaggataggttctctctgagtatgattatagattgatacctcacacaacgcatagagccatcaagctggactttcattataagctactctgtctgtggtcgactttggtaatgatacgaggctcttatcccatgttgctatacatatctttata

SEQ ID NO: 26948 - DNA, 376 bp, Glycine max
gagagggaaaagagttgaagacttgaagtgaagaaagaaagaattgagaaaggatagggtttagggttggcaaaggaaggaagggatggaagcagctgtggtggacgtcggctctaagcttctcaaagcggactttgcaattcctgaccagactcccgccatgataattcccactcagatgaagcaattgctcgatgatggatcagtcactgatagttcactggctgacaatgtcaccgttgatcccgtcgtgcgaggatttattagagattgggatgccattgaagatttgttgcaccatgttttgtatactggcctcggatgggaaattggcaatgaaggacaaatactatttactgatccactttgtacccct

SEQ ID NO: 26949 - DNA, 412 bp, Glycine max
ggttgaagacattgcaaggagcattgctcagctgtacgtacactgtacttgactatgcacaaaccggtttgattgcagcagtgttcttctttaaaatgatggaatggtggtaccaatctgctgaggagagaatgtcagctcctacagtatatcctgctccccctcctgcgtcttcaccaaaggtagccaaagaagggataccactaccaccagacagaacaatttgccccttatgctcgcaaaagcgtgcaaatccatctgtagttactgtttcagggtatgtcttctgctatgcttgcatatttaagtatattactcagtataagcgctgcccaattacgttaatgccttcgacagttgaccagataaggagactctttcatgatgtctaggcctgttggagctggggttg

SEQ ID NO: 26950 - DNA, 375 bp, Glycine max
ggcgcattgaacgaagattagggtttgtagtgtagcaggaagaagcagcaatggcgccgaagataacacgtaaggttagcagaaaccctgaattgataaggggaatcggaaagtactcgaggtcgcagatgtaccacaagaggggcatttgggctatcaaggccaaaaacggtggcgttttacctcgccacgaccctaaacccaagcctgaagctcctgctgaaaaaccacccaaattttaccctgctgatgatatcaagaagccccttgtcaacaagcacaaaccgaaaccagctaagctcagggctagcattactcccgggacagtgttgattcttcttgccggtagatttaagggaaagagggtagtctttt

SEQ ID NO: 26951 - DNA, 406 bp, Glycine max
  modified_base (147)..(147): a, c, g, t, unknown, or other
  modified_base (244)..(244): a, c, g, t, unknown, or other
  modified_base (256)..(256): a, c, g, t, unknown, or other
  modified_base (389)..(389): a, c, g, t, unknown, or other
ggggctgacattcacgaagcttttcagccggcgtttcgcgaaggaggaaatgcgaattctgatggttggtcttgatgctgctggtaagaccactatcctctacaagctcaagctcggagagatcgttactacaattcctaccattgngttcaatgttgagactgtggaatacaagaacattagcttcactgtttgggatgttggtggccaggacaagattcgtcccttgtggaggcactacttncagaacactcanggtcttttattttgttgtagacagcaatgatagggacagagttgttgaggccagagatgagttacataggatgttgaatgaggatgaactgagagatgccgtattgcttgtgtttgcaaacaaacaagatctntctaatgcaatgaatgc

SEQ ID NO: 26952 - DNA, 378 bp, Glycine max
caggggggaagtgcagacaagacgggacaggactgactggctacgttaatgcatggagtccaacactctatggcgcgcctggaagtagtcacagaggtgttcttggcgcaggcacctacctctcttcgagccaccaacctgtgataaccgcgcgagtgttgagtatcgacttctcttgatagatatgtggaagaacgccttgttaagcttcaaagtgctaagcagtgatgaagtggcgtcacacccaatgaacatggaggaacatggtcgaccaagacgaggatcacagagataccgtcgaggagaatagaaccttttgggacaaacaacaccagcttttgcaagccagtatatgcagaactagatcttcggagtcac

SEQ ID NO: 26953 - DNA, 350 bp, Glycine max
tggggaccaagagattaagtcttggcttgcatttgcgagcacaaaaagttgttgaagtaaatgccttggccaaggcattgtctggacagaaggatgaggttttcttttctgctaatgctgctgccttggcttcaaggaagtcctccccaagggtgataaatgaggctgtccaaaaagccgctgctgctctgaagggctctgatcatcggagggccacaaatgttagtgccaggttggatgctcaacagacgaaattgaatctttctgttcttccaacaactacaattggatctttccctcaaactgccgatcttagaagagttcgtcgtgaattcaaggctaacaagatc

SEQ ID NO: 26954 - DNA, 367 bp, Glycine max
tgggtaccctctaatttacaatattaaaacaggtggacagactattcatgataccggtgcaccacatttattgagtgtatggtggaaattaggaagagaaataaatcaataaactaatatatgtaataaagagaggaataagaagaaaaattgggtgtatgtttagcatttttctttgttgaggttacgtgcttcgttttatttattttcaaaaaaactaataattccttgttatcttttagagagagctggtaaaaaaaaaagatctttttttttccaactaaacaaacatgtcatgttttgtgtaaactcagttttttcatggagaatagcacgtaagaacttatgagagaaggtcaaaactcaa

SEQ ID NO: 26955 - DNA, 409 bp, Glycine max
atcaacatacagggggtgcaatagcaccagctcaatgccttgccattgggactcctgggatatcaccctctcctttattggcagaattcagtgctcctgatggtgcgcatggtaatgctttagctgccacttctgggaagtcaactgttacagagcagcctcttgaacgcctaattaatgcggtgaaatcaatgtcaagtaaagcattaagtgctgcagtcatggatattggttcagttgtcagcatgaatgatagaattgcaggatcagctccaggtaatggatccagagcggctgttggtgaggatttggtttccatgactaattgtcgtctacaggctagaaatttcattactcaagatggttccaatggaattaagaggatgaaacgttacaccagtgctatacc

SEQ ID NO: 26956 - DNA, 348 bp, Glycine max
ttttgcttttcaagaagagaatatgatggttggggagttaagcgagcctctgagagtgattaaattccgctgtctgtcttgattcctacatcttagtcccctgtcatttgcaaactcatctctctggatcgctcatattcattgatcaactttgaaagggatttggttgttaagacatcaattatactgatttgatattttcttcttaaccaaactatctataacttgaggtaaacacatgaaaaaaagaccagaatgaatactacacaggtgccaaagaaaagagtggcatctgtgctgatagacggattggccgatgtgtcactgccaaagcttggatacaagact

SEQ ID NO: 26957 - DNA, 365 bp, Glycine max
gtacgaagtgatgtgaagagtcgaacccaagagcttcgtcggatctcaaaagctggatggaaatcaaaaccatcatgattgggccactaaaagactagttgaggatgaactgaagagacttttatttggtttggagcacaattacacaagttttggaagccatttaaacagccaatggtgcttttaaacgtactcagttcaacagtgttatcttcatgttagaattgaagatgagcttattggttagtgaacatttgaatgctcagcagtgcagttaaacgtcccatgctacgttgataagatttagctactgactgtgtgcatttaaatgtcgtccaacgggacatttaacgtactcagtttac

SEQ ID NO: 26958 - DNA, 371 bp, Glycine max
gacagggttagcaaaatatctgatctttctcccgcctggcactgagtaggcaatggcggaggaagcacagtactcatcgggacccgattccgcgcccctcaagcgcaagtacgaagaccaaccctccggcatcgagcttgccaagcagcgtgctcaggaagtcgccgcacgccttctcaacgccgctcctcctccgccactcgacgccaagcgtcccaaacccgacaccggcttcgattctctcgatttgaagcctctgtattccgcatctcctcctcccgtcttctacggtcaccaaggttccagcaagaagattgatatccctaatggcagggttggtgtgattattggtaaaggcggagagactatta

SEQ ID NO: 26959 - DNA, 427 bp, Glycine max
catgggtttggggtttaacaacaaattcgaccgcgtggtgccctcttcgacttcatccgtacccgaaacgaccgcgtttcgctcctgaacggttccgtgatcgccgtgatcgtctccattctcgggaaaacgggtagggtttcccgcgcggcgtcgctgctgcacaatctagaagccgatgggtttgaggtagatgtgtatggctacacctctctcataactgcttatgctaataataaaaaatacagagatgcactcaaggtgtttgggaaaatgaaagaagtggggtgtgaacctactttgattacttacaatgcaattttgaatgtttatggtaagatgggcatgccctgggctaagatcattgctcttgttcaggacatgaagtgccatggccttgcccctgatttgtgcacttataatactc

SEQ ID NO: 26960 - DNA, 351 bp, Glycine max
gaagatagaagtgagaatacgaaagaaggggttttagtgccaaatgaagaaggctcacgagacacgcatggggtcagccacatgctatccctcctcctcctccttctctctccggtggtggtgactcgccggaaaacacccactgccacctctaacgccgccgccggcgaacacccttctcaaaatctcacccgacccaattcacctttctcctctctcttctcaattccccatctgggtatccctgtttccctcaaagttctcttctttttcgtgattcagaagtgctcagtgatacccttttcttagaacaatgagagcggggaaagggagtcaggaagaggatgagta

SEQ ID NO: 26961 - DNA, 411 bp, Glycine max
  modified_base (14)..(14): a, c, g, t, unknown, or other
  modified_base (40)..(40): a, c, g, t, unknown, or other
  modified_base (66)..(66): a, c, g, t, unknown, or other
cgttctgagcaganaccaatttagtggccacatggctcanaatattggaaacatttcaaagcttangcagcttgatttgtcactgaataatcttagtggagaaattccagtcgcctttgataatctgcgtagtcttagtttcttcaacgtttctcataacaacctctctggtccagttcccaccctacttgcccaaaaatttaactcgagctcatttgtggggaatattcaactatgtggctatagcccttcaaccacatgttcctgcctagctccttctggttcacctcctgaaatatcagaacaccgtcatcataagaaattatgcaccaaagacataattctcatagtagcatgagtgctccttgtagtactggtaacaatttgctgcattctgctattctgcttgat

SEQ ID NO: 26962 - DNA, 415 bp, Glycine max
ggagcgcggaaccaaatgaaatgattgagaagagagagcgaagaaaaaaaagagagccaaaccaaacctttcccgaaacggttcgttttgcccttcttcggaaccctcccttctgcgccgctgctgctgctccggtcgccgtcggcgactctccggtaaccgaagaccactgccgatccgtcagaaacctcggatctcggatctgaacgagcgaaacgatgccgtctcacgcggatctggaccggcagatcgagcatctgatggagtgcaagcctctgccggaggccgaggtgaaggcgctgtgcgatcaggcgagggcgattctcgtcgaagagtggaacgttcagccggtgaagtgccccgtcaccgtctgcggcgacattcacggccagttctacgatctcatcgagctctt

SEQ ID NO: 26963 - DNA, 353 bp, Glycine max
ggatccagcacataacaatggaaacgcagctgggcgtgttttctctctagattgtgctcttaaacgccgtcgttttcaaactctttttttccccttcgcttctctgtctttgtaaccgaaaggggggaaaatataattaacaccgatttcgcgaccaattcttcttctgcgttgaattgggacaacgagaaattggatctcagtttttggcaggaaataaaaattgcatttgagtgtaaaataacagagtatagtgtagggccttgttcttgatactgtgctaaatttgttggatggcggagaaatcatgcatcaagcgccttcagaaggaatatagagccctttgtaaagag

SEQ ID NO: 26964 - DNA, 344 bp, Glycine max
gctttacctacatccattcactgtgaaccaattggacagtttaaggtaccaagctatgaacattgcggtggttaggcttgggagagcagaaccaccccttaggaaagaggttgtggagtacatgcttgatgtggactctcacatatggagcatgagaagaagcaaagccaatttcttcagaattgtgtcactcttttctggtgcaatatctatgagcaagtggcttggtgaggtacaacagtggaagaatccagtgaccacaatcctagtgcatgtcctctgtttcatcttgatatgttaccctgaactgatcctccccacaatgttcctctacatgtttctca

SEQ ID NO: 26965 - DNA, 354 bp, Glycine max
gaacaaaaaaaagtaaagaatttgctttgcgaggaagtaagtaggagatgctctgaactttcaaatttgtacaacccctaggaagagaagaagaaggttcaaaatccaatccatttttcatttcgaaagatcgtgatcgcaatgtccctctccaccgtgaggcagcggcgctcggagccgtctgatccgtcgccatcagaaccgtacacgaagctggacaagcccgagaaagcggaggagaaagacgaagggttggggtgggttttcccgttcgtggctcttgggttattgaggtacatgagtgccacctccaacatcatccacgattgcgacgaggtcttcaattactgggag

SEQ ID NO: 26966 - DNA, 275 bp, Glycine max
ttctatctccaccgtccacaatttcctccgaaataaatgcaccaccaacaatatatttcattcctcttccacaagcattccctctttcttgcatgatcatcactaccactctttcttattatatttgccaatcattctcatccaaattaattgtcatctaatactcccatcaaaacatcatattcacaagccgaaaagatctctcatcatatccacttttgtgagctattcaattaatttaaatacatcagcattccctttttataaaccacttc

SEQ ID NO: 26967 - DNA, 424 bp, Glycine max
gggtgcacggttcagtatgtttgagatgagagtgaagatagctttggcagagaaaggaatcaaatatgagtacatggaacaagatctcaccaacaagagtactttgcttcaagaaatgaacccaattcacaagaagattccagttctcatacatcatggaagacctatctgtgagtccctcataattgttgagtatattgatatggtttgggacaacaattgtcctttgcttccctctgatccctaccacaaagctcaagccaggttctgggctgattttgtagatcagaaggtgtatcatgcttctaagagagtttggatttcaaagggagatgagaaagaggtggcaaaaaaggacttcctagagagcttaaagcaattggaggagtttcttggagacaagccttattttgggggtgacaca

SEQ ID NO: 26968 - DNA, 319 bp, Glycine max
tcaaatattactacatggaacaagatctcaccaacaagagtactttgcttcaagaaatgaacccaattcacaagaagattccagttctcatacatcatggaagacctatctgtgaatccctcataattgttgagtatattgatatggtttgggacaacaattgtcctttgcttccctctgatccctaccacaaagctcaaaccaggttctgggctgattttgtagatcagaacgtgtatcatgcttctaagagaagttggatttcaaagggaaatgagaaagaggtggccaaaaatgacttcctaaagagcttaaaaca

SEQ ID NO: 26969 - DNA, 406 bp, Glycine max
gatgatagtcattggtattgtgagcattgtaccgatgcaaatgtcaaatctgcctccacatgccagatgtgctatcaacaacgtcgatgaaaacttggttctccatttgaagcacttgtctcctgcccaaggcctctgcaccaaaagctgagatggagacattcctgtatgtttatatatatttatgcactatgcagtctccaattttgtgatgctaaatacaacaggatgaaaggagtaaggcatggaagaaaggttgctctccatgcgctcctattcaatacaaaacccaatttgatgtatatagtgttctatctctttatgtatgagggtttctgctacaggcatttgtaactcaatatcataacacaacagatgttggagaatggagatgaacacaaatgtg

SEQ ID NO: 26970 - DNA, 386 bp, Glycine max
ggttcgcggaaccaaatgaaatgattgagacgagagagcgaataaaaaaaagagagccaaaccaaaccttttccgaaacggttcgttttgcccttcttcggaaccctcccttctgcgccgctgctgctgctccggtcgccgacggcgactcttcggtaaccgaagaccactgccgatccgtcagaaacctcggatctcggatctgaacgagcgaaacgatgccgtctcacgcggatctggaccggcagatcgagcatctgatggagtgcaagcctctgccggaagccgaggtgaaggcgctgtgcgatcaggcgagggcgattctcgtcgaagagtggaacgttcagccggtgaagtgccccgtcaccgtctgcggcgacattcac

SEQ ID NO: 26971 - DNA, 388 bp, Glycine max
gagagaggcggaggaaggtcacgataagtgattcggctattgtcttcaatggggctaaggggacatttcatgtggaggacaaaccattgtatgctgtttcctttgcagctaatggtaatgtggaatatgtggtactttctcatgaaaatggaaatgtggaattgctttattcagacttgttaaaactttgtaaagagatggatgctgctggtcttcacaaattcatatctgacaaccttaagaaccttgctgttgtaagggacgaaataccacatgcattaagagcagctactaacaccgtctgtttagagttagactctctgaaggggttgtactgtacagaagtgtcaaatcacgacgtaaagcaggatgcttacttactgggtgt

SEQ ID NO: 26972 - DNA, 410 bp, Glycine max
ggcacaagtgagtttggtgatcgagataactagaaacagtgtgatgaaaatgaaggtccttgttttcttcgttgctacaattttggtagcatggcaatgccatgcgtacgatatgttccctctccgaatgaacactggctatggtgcccgtactccggaggtgaaatgcgcaagttggaggcttgctgtggaagcacacaacatctttggctttgagaccattcctgaagagtgcgttgaagcaacaaaggaatacatccatggcgaacaatatagatcagactccaaaacagttaaccaacaagcttacttttatgccagagacctcgaagtccatcccaaggacacatttgtgttcagtatagatggcaccgtactctctaatattccatactacaaaaaacatggat

SEQ ID NO: 26973 - DNA, 430 bp, Glycine max
aaaaaacccggcccgacccacgcatccgcccacccctccgtacacctgcgagtttactacacaaagccccacaaattactttcgtgggctatataactaaaaacagccgcctcaaaattaaccttctttttttcttctctgctacaatttttttagcactacacagccatgcctacgatattttccctctccgaataaacactatctatggtaccctcactccctatgtgaaatgctcaaattttatacttgctttctaatcacacaacatctttttcttctataccattccttaacattttcatttaaacaacaaatcaatacctccactgctaacaatattcatctcactcctttataattaacctacactcttacttttaatccatataccttctattccattccaatgacacatttctttttcata

SEQ ID NO: 26974 - DNA, 297 bp, Glycine max
ttctaatcctaccctctgcgcttctcagagcgagccaattcttctccagcactgacatctcatattgttggttatacacacatgctacccactagacaccttaagttgctatggaatctttctgacacggaaagagtagcgctcaagagctgcacaaggctgctgaacaccttatgtcatccatatggaagcagatggctgatgctgtactaaagtatattcctaactgcaccatctctctttactatcaagtactggacacaacacccatgctcggggcaagtccatctagatata

SEQ ID NO: 26975 - DNA, 398 bp, Glycine max
gggttctagtgtgtgattgtttgttgttgtgactcgttcttcttcttttgttgttctgtgtttgtgtttgttttttctctcacctgaaaatgtcttgctgcggtggtaactgtggttgcggaagctcctgcaagtgcggcaacggctgcggaggctgcaagatgtacccagacttgagctacactgagtcaaccaccaccgagaccttggtcatgggagtggcacctgttaaggctcaatttgagggtgctgaaatgggtgtgcccgctgagaacgatggctgcaaatgtggaccaaactgctcctgcaacccctgcacttgcaagtgaggtgttgggagggcaagcttcaagcaaagatagcccttaattaggaataatgataaactattaatgtgt

SEQ ID NO: 26976 - DNA, 418 bp, Glycine max
ggaggcggtggtgatggtgttgtgtggggcaatgctcacccctccaaatccaaagtcgtcggagaatattcttattagtattaattaattaataataatgagacgagtgcttggcttcttattcttgttctgtaagtttgcaacttttttcctttcattcattattcttctcttgccttgagttgaggatgggcaatgtgaacgtgactcctgaagaagaagaagtttctgcaagtgcaagggcaaccgatgagaacgccatgcctcagtctcctcccacctctcctacggctatccatttccccctcatattcgctcctcaggttccggtggttccgctacaaagacctgatgagatgcatgttccaagttgttcctggatggagacaacttcagggtatgaagatgtgtaccgcga

SEQ ID NO: 26977 - DNA, 350 bp, Glycine max
tgtggtggtagctgttacgagtcagcaagagggaaatatcttgttgagttgatttctgatcccaaattgagtttgagtttcagccatggtatctgtttctctgctcttattcctatctttctttgccttctttgcaccctctgaatctcacgacaaagtctcgttggaattgtactacgaaagcttatgcccctacagcgccaacttcatcgtgaatcacctcccaaaaatcttcaccccagatcttgccccaatcgttcacctcaaactcgttccttggggcaatgccaaacttcgtgccaacgccacctttgactgccagcatgggccatatgagtgcttgctgaaca

SEQ ID NO: 26978 - DNA, 413 bp, Glycine max
gaaggaaggaagaagcagagcgaagcggtgacagacagaagaaaatgggaagcagaggtccacctcaatcccatccaaattccgctgccatttccaagggttacaacttcgcttccacttgggaacagaatgctcctctgacagagcagcaacaattcgcgattgtatcgctttctcacgccgtttctgagcgaccgttgcctctcaagttggctcaagagaatgcgtcggtacaagacaatgccttgtctgttaaaacgaaggatagttccgttgatgactctggtactattgagactgttatggtcaataccaatcagttctacaaatggtttacggatcttgaatctgccatgaaatcagagacagaagagaagtatcaacattacgtgaacactctaacagatcgcata

SEQ ID NO: 26979 - DNA, 405 bp, Glycine max
gacacataacaatagtagcaagcagagccccgagatctgtgcttgaaccttcacttgtgtttccttccttctgcagacgagcttcaccttgcgccgaagggccacagatggttgaaaccgatatggatgccgaaactgttgcaaatgtggttccaccaaaggagactccaaacagtgttcccatctcttatcattcctcacactcacaccctcctcttaatgagaggattatttcatccatgaccagaagatctgttgctgcacacccgtggcacgaccttgagatagggcctggtgctccaacgatcttcaattgtgtgattgagattgggaaagggagcaaggtgaaatatgaactggacaaaaaatcgggtcttatcaagatcgaccgtgttctttactcat

SEQ ID NO: 26980 - DNA, 321 bp, Glycine max
  modified_base (276)..(276): a, c, g, t, unknown, or other
cttgaacctgcagtcgtgtctccttccttctacaaacaaacttcaccttgcgccgaatggccacagatggtagaaaccgatatggatgccgaaactgtttcaaatgttgatccaccaaacgagactccaaacactgttcccatctattatcatttctcacactcacactctcctcttaatgagaggattatttcatacatgaccacaacatcatgtgctgcacacccgtggcacgaccttgagatagggcctgatgctccaacgatcttcaattgntcgaatgaaattgttaaaggcagcaaagtgaaatattaaccgtac

SEQ ID NO: 26981 - DNA, 391 bp, Glycine max
  modified_base (355)..(355): a, c, g, t, unknown, or other
ggactgaagacagatgatgatgctgatcaattacccaccattgcaatagttgcttcatatgacacctttggggctgctcctgcattatcagtgggaagcgatagtaatggaagtggcattgtggctcttcttgaagtagctaggttgttttctctcttatattctaatccaaagacaagaggacaatacaatctgctgtttgggctaacgtctggtgggccttataactacaatggaacccataagtggcttaggagctttgatcaacgtctgcgtgagagcattgactatgctatttgcttggatagtattggctcttgcgaaaatgaattgtggattcatgtatctaagcctncagaaaatgcctttattaagaaaattcatgaagatt

SEQ ID NO: 26982 - DNA, 420 bp, Glycine max
ggtcttggtgatggatagacacaaatgcaggcgttgttcaaggtctttcagcaatggcagagcccttggtgggcacatgaaggctcaccttgcttctctccctctccctctccctccaaagcttcactcttgtttctcttcctctgactcagaacaagaacaatctttaagggagaatcctaagaaaaccttgaggattctggatcctgaagacagagagagcgagacagagtctaataagaacccgactcgtcaacgatccaagcgcaactggaaatctaccatgcccaagctcagcctcggacaccccgaagccgaacctctcagctccgtctccgacacctcccccgaagaagacctcgccatgtgcctcatgatgctctcccgcgacacgtggcaggaacacaaactcgccaatgc

SEQ ID NO: 26983 - DNA, 408 bp, Glycine max
ggcagatgagggtgctatttctctatggagaggaaacactgctaatgttatccgttatttccccacccaggctttgaactttgcatttaaggattacttcaagaggcttttcaactttaagaaggatagagatggctactggaaatggtttgctggcaactcggcctctggtggtgctgctggtgcatcatcccttttgtttgtttactctcttgactatgcccgtacccgtcttgccaatgatgcaaaggctgcaaaaaagggtggagagagacaattcaatggtctcgttgatgtctacaggaagacattggcatctgatggtgttgccgggctctaccgtggtttcaacatctcatgtgttggaatcatcgtgtatcgtggtctgtactttggattgtatgattc

SEQ ID NO: 26984 - DNA, 424 bp, Glycine max
  modified_base (359)..(359): a, c, g, t, unknown, or other
tggggagagtgagtgagatagagagagacgctgcggaaatctcaatcgaatctcagaaaaatgagagaaatcatcagcattcacataggtcaggccgggatccaggtcggaaactcctgctgggaactctactgcctcgaacatggcatccagcccgacggcatgatgccttctgactccaccttcggtgtagcccacgacgccttcaacaccttcttcagcgaaaccggatctggcaagcacgtcccccgtgctgtcttcgtcgacctcgaacccaccgtcatcgacgaggtccgctgcggcacctaccgtcaactcttccaccccgaacaactcatctccggcaaggaagacgccgncaacaacttcgcccgcggccactacaccgttggcaaagagatcgtagatctgtgcttggatcgcg

SEQ ID NO: 26985 - DNA, 299 bp, Glycine max
gaggtgcagagagagggattgaatcatgggaagagggacggtggttctgcagagaatacagaacaagatcaatcgccaagtaaccttctcaaagcgcacaaatggtttgctcaagaaagctttcgagctatctgatctatgcgatgctgaaatcgctctcgtcatcttctgcagccagggcaagctttttcagtatagcagcactgacattaacagaatcattgagaagtatctgcaatgctgcttcaacatgtctcatactggcgatgtatctgaacatcaatctgagcaggagcttt

SEQ ID NO: 26986 - DNA, 352 bp, Glycine max
gggagagagagggagaaagagaaggagatcgcgcttaacacatcacacagcaagagaaagagtaatagaatcgtggttcgtttgcagaagaagaggttaagagaaggagtgaccgaagcgaagatgttaccaacagcttccaaaggacgttcttcttcttcctcctcctcctcctcttcctctcgacctaacaatcccatgctgcttccctacctccgcagaatcatcaagtggcaacaaatggatattgaatatactttttggcaaatgcttcatctatgtacatcaccgaaagttgtctatcggcatactaaatatcacaaacgtaagtctctggctcattaatatcttt

SEQ ID NO: 26987 - DNA, 406 bp, Glycine max
gggggtaaaaattggattaaatccatgatcctgacagcatcactgttcccattcatgtgctttggaattggttttattttaaacacaattgctatattctatggatctctagctgcaatcccctttggtactatggttgttgtctttgttatatgggcttttatctctttccctctagcacttcttggcacagttgttggaagaaactggagtggtgctccaaataatccatgccgtgtgaagaccattcctcgtcccattcctgagaagaaatggtacctcacaccatctgtagtttcgctgatgggaggactgcttccctttggcagcatattcatcgagatgtattttgtattcacttccttctggaattacaaggtgtactatgtctatggcttcatgctac

SEQ ID NO: 26988 - DNA, 285 bp, Glycine max
aaattggattaaatccataatcctgacggcttcactgttcccattcgtgtgctctggaattgcttttattttaaacacaattgctatattctatggatctctagctgcaatcccctttggtactatggttgttgtctttgttatatgggcttttatctctttccctctagcactccttggcacagttgttggaagaaactggagtgttgctccaaataatccatgccgtgtgaaaaccattcctcatcccattcctgagaataaatggtacctcacaccatctgt

SEQ ID NO: 26989 - DNA, 390 bp, Glycine max
  modified_base (54)..(54): a, c, g, t, unknown, or other
gggagaatggaggtggtgtgtcggggaatgttgaaacccagaaagttcatgcanaggaggaggaaattcgaggttttcaaggattctgcagatgaagctgaccagaagaattggaggagaatcatgactgaaatcgaagaatccggttctgctgtctctgtgctctctgctgagaagattaataaccaaaatattcctaaagacctcgttgttggtaccttgattaggtttaaacaactcataaagtggaaccttgttgttgagattctcgaatggcttcggactcagaactggtgggattttggtaagatggatttcttcatgcttatcacggcttatgggaagctaggagacttcaatggtgccgagaaggtcttaggcttgatgaat

SEQ ID NO: 26990 - DNA, 400 bp, Glycine max
ggtgttattgaagagtagggataatagagtccgtatcgtagcaaaacgcacgagttaggggcggcgatgggaggttcatcggaggatttctcggtggtggtgctggcgtcggacctcggcgtcgatgcgcgacctttcctcgaacacgatcaacagcaagaagaagagaattggcacgactgttcccagtacctctcccccgacgaggacttctccgatctcgatcagttgcaattcctccgcctccaaggctccgacaagaactccaatcgcattctccgcatcgtcggcaagtactttcccgcaactgttgtgagtgcggagcggctcaagcggtatgtgttcaacaaaatttgcagtgagttgcctgaggggcccttctgtattgcttacatgcaca

SEQ ID NO: 26991 - DNA, 415 bp, Glycine max
gttgtgggagggtaccaattgagtgatcagtcgtggggaaggccgtagtcggagaagaaacgcgactcaaattggcggaggatcgtctcagccaatccgcagttccatccgaggtgggtcttttaatcggaaagttcagctccgctttgggccgggccttcctcttcgatctcattcccaccccacacaacgactccggcgagcccgcctgctccctcaccgagtccgacaagaagaagggccccaaatctaaatccaaatccgagctcgctgattcctcttcccttttcatcgacaaggactgggtcgccgaacatgtccgccaggtttctagaatgctcgtcggcggcatcaaggtcgttggcctatacgtttgggttagcgacgccgcgttcaagaattcaaccataatgct

SEQ ID NO: 26992 - DNA, 56 bp, Glycine max
ggcggaggctgttccacgcttgtttttaccacgaccctggttgataacattaaaat

SEQ ID NO: 26993 - DNA, 357 bp, Glycine max
tttatgaaaagtgtgagaacgaaaatggagcgttgtaactgctacatgttcacgctgagccttcttcttcttcttcttcttactccgccttctctctccgacgatctcggattcgattttccggcgaagaaactgataagagaccttaacctttttccttctgaagatgtcaacatcgttcctcgccactccaattctcacgccaacaaaatcgtcgagaaaccgcttaggttcccaaacttagtgccttcagactccggcatttccctcgacgacttggctcaccgcgctggctattatcttattcctcattctcatgctgccaagatgttctactttttctttgaatcaaggaac

SEQ ID NO: 26994 - DNA, 288 bp, Glycine max
  modified_base (169)..(169): a, c, g, t, unknown, or other
gaggggactgacaagatgcatgatcgagaactctaatcctaaatctaaggagagaaaaaatttacaagataatcagcaaataaaatttgtaatgaattttgagtaattcttagtttagaaaaaagtgaaggacacttgagtctagaatacttatataatttattctgcnagaagcttgagcgagtgagttgggattgataacggagatgagcagagtcacccggctattcacaagactttccgttttattcatttcacttttgaatcttcgaatcacatccgatgggt

SEQ ID NO: 26995 - DNA, 396 bp, Glycine max
ggccatcaaaaggaatagtttgattggaggagatgactttaagagtggtcagaccaaaatgaaatcggtgttggtggatttcctagtaggggccggcatcaagccaacatctatagtgagttacaaccatttgggaaacaatgatggcatgaatctctcagcccctcaaaccttccgctcgaaggaaatttccaagagcaatgttgttgacgatatggtcaacagcaacgccatcctctatgagcctggtgaacatccggaccatgtggttgtcattaagtatgtaccttacgttggggacagcaagagggccatggatgagtactcttctgagatattcatgggcggaaagaacacaattgtgttgcacaacacttgtgaggattcactgttagc

SEQ ID NO: 26996 - DNA, 402 bp, Glycine max
gggtgctaaattgagataactgtgtgtgacagagagagagagtaatcaagatagctcctttgaattttctatcagaatctgagggcccaaaatctagggttttctgttcttctctggggatctgaagacatgcagtccaagtctgaaactgcaaatcgactgagatcagatcctcattcctttcaacctggcagtgtttattctgagccttggtggcgtggtattgggtacaatcctgtggcccagacaatggctggggcaaatgcatccaattcatcgtctcttgaatgccctaatggtgattctgaatccaatgaaaaaggtcagtctttgtccaatagcgggatgaatgaggaagatgatgatgccactaagggatcacagcctgctgcttctaatgga

SEQ ID NO: 26997 - DNA, 371 bp, Glycine max
gatatcaggtggcaacaacactgcctcaaggagcccaactttccgccctaattctcagtttatgggcttgcaccacccaagaccaatgcctgccatgggagccacccatagcttcataaataggatgtacccaagcaaactatatggtcaatatgggaacactgtcagatctggaatgggttatggtacacatgggtatgattctcgcactaatggacgggcttggttagctgttgacagtaaatacaaaactaggggaagaagtggtggctactttggctatggcaatgagaacgcagatggtttgaacgaactgaacaaagggcctagggccaagggtggcaaaaaccaaaaaggttttgcaccaacta

SEQ ID NO: 26998 - DNA, 373 bp, Glycine max
gaatcaagtgaaagctctgatgaagacaatgatgcataacccgccgtaactgatgtgtcaaagccttctgctcttgcaaagaagaaggttgacagctctgattctgatgatagcagctctgatgaagataaggggaagatggatattggtgatgatagttctgatgaaagtgaagagccacaaaagaaaaagactgtgaaaaatccaaaagaaagcagtgatagttccgaagaagacagtgaggatgaaagtgaggaggaaccctccaaaactcctcagaaaagagacagggatgtggagatggttgatgctgcctcgtctggaaagaaagcgcctaagaccccagttacacccaaagaagaaactggcgctt

SEQ ID NO: 26999 - DNA, 372 bp, Glycine max
gatacagagggttcttatcagtgacagagtaaaggaggcataccgatgacgatggcgatgacggcgtcgcagttgcggtgcggttgggggtggaggccaacgccgaatcagcagcagcaacgacgtcgtatggttccggtggtgtgttccatcgctatagagaacgcgaagaacaaagagagagcgaaactgaagaagctcttcgatgaagcgtacgagaggtgccgcactgctcccaccgaaggcgtttccttcactctccaacaattcaccgacgctctcgacaagtacgacttcaacgccgaaatgggcaccaaggttaagggcactgtttttgccacggataacaatggagcttatgttgacattact

SEQ ID NO: 27000 - DNA, 382 bp, Glycine max
ggttggcaatgggactgagtcagttaaagcgtggttgttgtactgacactgtcccaagcaatggaagttccttatgaagcgccgtctaccgacatatatcgacaaaaccataagcaaaaatgcgctgaagcgcgaactcaagaacaaacataaagaagaagataggaaacgcatggaggaggacaaggccaaaaaagcagctgacatgcagaaggctaacgataacacatctgcacctgctgatgaagatgatatggacccaactcaataccttgagaataggctaaagtatattgcaggtcataaggcagaggggaataacctctatcctgacaaattctatgtcactatgtcttttgatcaatacatcaaggaatatgga

SEQ ID NO: 27001 - DNA, 412 bp, Glycine max
gaaaaaaattgaatctatttggatatgcgaatcaatcctactacttctggtcctgaggtttctgcgcttgaaaaaaaaaatctgggacgtatcgcccaaataattggtccggtactagatgtagcttttcccccaggtaagatgcctaatatttacaacgctctgatagttaagggtcgagatactgttggtcaacaaattaatgtgacttgtgaagtacagcaattattaggaaataatcgaattagagctgtagctatgagtgcgacagaaggtctaatgagaggaatggaagtgattgacacaggagctgccctaagtgttccagtaggtggagcaactctaggacgaattttcaacgtgcttggagagcccattgataatttaggtcctgtagatactcgcacaacat

SEQ ID NO: 27002 - DNA, 288 bp, Glycine max
gaacatacggatgaacattatattgggaactgcgggaggattggcctatcttcatgagggtcttgaaccgaaagatggccaccgagatgtgaaatcaagttacatacttattgatcgccaatggaactccaaggtttccgattttggacttgctaagcttttgtgttctgagaatagttacgtcacaactcgagtgatggggacatttggttatgttgcaccagaatatgcatgcactggaatgctgactgagaagagtgatatttatagctttgggatacttatcat

SEQ ID NO: 27003 - DNA, 342 bp, Glycine max
tgttcagcgcttgagaccaagccccactcaacgacgcggaccactctctctgctgttcttctacctttcaagtttttaaagtattaacatggcagagacattcctatttacctcagagtcagtgaacgagggacaccctgacaagctctgcgaccaaatctccgatgctgtcctcgacgcttgccttgaacaggacccatacagcaaggttgcctgcgaaacatgcaccaagaccaacttggtcatggtcttcggagagatcaccaccaaggccaacgttgactactagaagatcgtgcgtgacacctgcaggaacatcggcttcctcttaaacgatgtggg

SEQ ID NO: 27004 - DNA, 194 bp, Glycine max
ggtacctaatagaaacaggaactactgcgagggcagacgcaaagacgggatcattggccattctattataaactgtgatggccttcattctatcaacaaccgaagacatggaaaatcgtaaggtttaaacaatacacagtagatttaaagccttggtgctaaaacaaagtcgagcgtatacataccgctgcata

SEQ ID NO: 27005 - DNA, 413 bp, Glycine max
gacgataaagggtttttgttttgtttccttgggggctgcatgcactttcactcgaagaaccttgaagcgagtctgggccacagcaaccagcgacaacaactcaatcagctagggttgctttgcttgctatcttgttggaggattttctgttcaagagaagatggtaactagaattgtggatcttcgttcagacacagttacaaagccaactgaagcaatgagagctgctatggcaagtgctgaagttgatgacgatgttctaggctatgatccaactgcttttcgcttagaaacagagatggcaaagacaatgggcaaagaagctgctctttttgttccatctggcactatggggaaccttgtatctgtacttgttcattgtgatgtcaggggaagtgaggttattcttggag

SEQ ID NO: 27006 - DNA, 415 bp, Glycine max
ggatgaagataggatgcttctgaaattccgatctcaataaggtccttaagtaaaaaatactactgtcgtcacagatctgaatctggtcccctctggtatcgtgtagtactagtattttagttgcatctaataaatgaggatacccaagaagttgatttaataaatgttcaccaacttaacataagctatttgattttgctgacaaatacagaggcaaatatgacagcagcatcacggttgcccaaaagtattacagatccatcagtggttacaatgatgaattgctctgggctgctgcttggttgtatcaagcatctaacaaccagtattacttggattaccttggaagaaatggtgattccatgggtggaactggttggagcatgactgaatttggttgggatgtcaagtatgc

SEQ ID NO: 27007 - DNA, 338 bp, Glycine max
gcgagcatcaatatctttacgtgtgcagttactgatgagatttcttcctattctttgctcagacggggagtcttctgcaaggagcatgagatacatgcttgcctctgtacttcttcgtctccttggcagccgggttgtgcatgaggatgcaacggtgaatcccatgcactatactccattgagaagggaggcagagtcacatgctgaagcttcttttgtagattcttctgctgagggcctgtttgatcatctgctgttgattttgcatggattgttgagtagttctcctccaagttggctcaggtcaaaacctgtttcaaagacaactaatgaaccta

SEQ ID NO: 27008 - DNA, 325 bp, Glycine max
  modified_base (273)..(273): a, c, g, t, unknown, or other
ggggagcgaagtgaattgaaattgaagtgactcggggtgagttgactcagcaatggcggaagaggtgactcgggtgatggtggcggtgaacgagtcgagcattaagggataccctcatccttcgatcagcagcaaaggggctttcgactggaccatcaacaagatcgttcgcgacaacgtctctgccttcaaccttctttttcttcacgttcaagtccccgatgaagatggttttgatgacatggatagtatctttgcttctcctgacgattntaagaacatgaatcagagagatagaattagaggagttcatctgctggaatac

SEQ ID NO: 27009 - DNA, 356 bp, Glycine max
gaggaaggaaatgtgcagttagatgcaaaacatgaatgcaaagatgcaactctttttcaggcccctgaagattgtgcacttgccataacaagcattattcgtcaccatgaaacagagtaccttgcttctcttgaggcatcatatctaaaccttcctgattctactttcaaggatcttcggagaaagcttcctgtcacccgcacgttatttccatggcataatactttgcagttcagcttgacaagagacatctcaaaagaacttggcattggaaagtaaatacactacattcacacagaacaaataaaaagttgtgtttactcggtggtgacaagttcctcatatattcactacat

SEQ ID NO: 27010 - DNA, 282 bp, Glycine max
tggggtgcgtgagggagtaaagagacggacgaacgaagtggtgctgcatcgagtgcctttgcaggctatagcgccgtggtcagatgttactgggttttctcaaaacgatagccttaacggtgtcattgcgatcacgtacacggaaaactttactcaattgatggattactttaacgcttgttagctcaacgatctacgcttgattagtgccgtcactctcaccgacggaactgactaattcaactacagcaactacactgtatgttcagttcggattaaatg

SEQ ID NO: 27011 - DNA, 422 bp, Glycine max
ggaggagactgagaaaacagaagaaaacaaaatggaagacacagtttctgcgttgaggtctttgatggtttctcactctccgccgctggatgccttagtggtgccctctgaagattatcacctgagcgaatatgtgtctgcacgagacaagcgccgcgaattcgtttccggcttcactggaagtgccggcttggcacttataacaaagaaagaagcactgctgtggacggatggacggtattttttgcaggctgagaaagaacttagtgctgggtggaagctaatgcgaattggtgaagatcctgctgtagatatctggatggccgataatttgccaaaagaagcatccgttggggttgatccctggtgcatttcaattgatactgctcaaagatgggagcgtgctttttgccgaaaacagc

SEQ ID NO: 27012 - DNA, 420 bp, Glycine max
gccggatgagcagaggaatccaattcaagaatagtcaggttgctcacattcctggtgcccttttctttgatgtagatggaatagcagatcggactacaaaattaccacacatgctgccatcagcggaagcgtttgctgctgctgtttctgctcttggcatagagaacaaagatgatttggttgtttatgatggaaaaggattatttagtgcagctcgtgtttggtggatgttccgagtatttgggcatgacagagtttgggtattagatggtggcctgccgagatggcgtgcatcaggttatgatgttgaatccagtgcttcaagtgatgctattcttaaagccagtgctgctactgaagctatagagaaagtatataagggacaaacagttggcccactcacatttcagactaaatttc

SEQ ID NO: 27013 - DNA, 253 bp, Glycine max
ggtgaaaggagaaaacaaaagggggaaaaattgacttgtgtagcttctaatgtgtggacattaaactcactttctctgtagccatagaaattcacattttatcttttgcattgtgcaacttcctcgcgccatggctgctaccatcatcacatgcaagctcttactgcttttaagccttctctcaagttcactattgctgggtgtgagttcatcagatacccttcagaatgtaggggcaattcccccaacatgc

SEQ ID NO: 27014 - DNA, 467 bp, Glycine max
ccgccagactgctggaattaggcttaccgaggtcgcttccgaggtacttgagccctggcttgatgaggatcatctgcagcagcctgtggttgaagtcggacaccccgatggacttggccaatcctgcatctttacactactccatggcctcccatgtggcacagagatccactgtgtcaaatagtatttttccattttcatcttttgggatcacttactcacctggctttatagacactggaaaatgaataagatagaggtcaacatagtccaattgaagatttttcagtgacctttccaaggctggtcggaccaactctggtcgatgggaattgctccaaagctttgaagtgtagaatatgtcttctctcttcacactgccatctgcaatcttgcttcggatggccagtccaacctgctcctcattattgtaaacatgtgcagaatcaatatggtggaacccggct

SEQ ID NO: 27015 - DNA, 79 bp, Glycine max
attatagatttataatggtacatgtccaaatttacatatgtaaatctattcatattctatcttactatcacttatactt

SEQ ID NO: 27016 - DNA, 252 bp, Glycine max
ggaactggaggcaaaagtatatatggtcgtactttcaaagatgagaattttaatttgtctcacactggaccgggtgttgttagcatggcaaatgcaggacccaacacaaatgggagtcagtttttcatatgcactgtcaagacaccttggctggatcagagacatgtagtatttgggcaagttttggaaggcatggatattggtaggttgatcgaatcacaggagacagataggggtgaccgtcctacaaag

SEQ ID NO: 27017 - DNA, 427 bp, Glycine max
cagacatgaggttgtcaaacctgaagctactatctgcatctcatcaccaagatggaaagaatagaggggctgatatgaagaagacaatgaaaaaatcaaggtcaataaagctttccgatcttgaggctcttcaaccatcatcatcatcatgaccttaaaggagaagcttgccttttaacactccaacaactgcaacatcagcatcaccacagatgcaacaacctttgttcagaacggtagatggttcaccaaattacaggaagccaacaagcatttcacatgcaaaaaaggaccttttcctggtaagccaaaggaacactgaacctggttcagattataagaatcttcctagaaaaatttccagtgattccaaagctgcatgtgttaagaaacctgcaaaagccttgacaagaccatctaatagttt

SEQ ID NO: 27018 - DNA, 289 bp, Glycine max
ggtgaaaggagaaaacaaaaggagaaaaaattgacttgtgtagcttctaatgtgtggacattaaactcactttctctgtagccatagaaattcacattttatcttttgcattgggcaacttcctcgcgccatggctgctaccatcatcacatgcaagctctcactgcttttaagccttctctcagattcactattgctgggtgtgaggtcatcagatacccttcagaatgtaagggcaatttccccaacatgcaagcgcatagagtgtcccagctatgatgtcattcac

SEQ ID NO: 27019 - DNA, 254 bp, Glycine max
tggtgaaaggagaaaacaaaaggagaaaagattgacttgtgtagcttctaatgtgtagacattaaactcactttctctgtagccatagaaattcacattttatcttttgcattgtgcaacttcctcgcgccatggctgctaccatcatcacatgcaagctctcactgcttttaagccttctctcagtttcactattgctgggtgtgagttcatcatatacccttcacaatgtaagggcaattcctccaacatgc

SEQ ID NO: 27020 - DNA, 361 bp, Glycine max
gaattgggaatttttctaataggggatcaaaatggttttccctggagatggaaaattcgtccgccaggttttatcaatttgcaaattcttcctcaattagttaaaagaatgaaattggccgatattatgacaatactaggtagcatagatattattatgggagaagttgatcgttgaaatgataatttatttaacagagatacaagatatccatttttttttcagattggaatcttttaaagagatatatggaattatatgggtatttgcccctattttgattcttatattgggaattacgataagtgtactagcaattgtatggttagaaagggaaatatccgcagggatacaacaacgt

SEQ ID NO: 27021 - DNA, 429 bp, Glycine max
gaattgggaatttttctaatacgggatcaaaatggttttccctggagatggaaaattcgtccgccaggttttatcaatttgcaaattcttcctcaattagttaaaagaatgaaattggccgatattatgacaatactaggtagcatagatattattatgggagacgttgatcgttgaaatgataatttatttaacagagatacaagatatccatttttttttcagattggaatctttcaaagagatatatggaattatatgggtatttgcccctattttgattcttatattgggaattacgataagtgtactagcaattgtatggttagaaagggaaatatccgcagggatacaacaacgtattggacctgaatacacaggtccttttggagttcttcaagctctagcagacggaacaaaattaccttt

SEQ ID NO: 27022 - DNA, 309 bp, Glycine max
gctgcatatgacgacagagggcggcagcgtctttgctgatatcgctcttagcgaaggataatgatttcatcattaagtgtaatgcggtcggacagaagatccttgataacgtacgcttatatgctatcgaatagaacggctttagcattgccagtgatttggtccactaggcttatattgacaaggttgcatatgaaaatacgctctgatgaccccatgaactgcatcttgcagaggattgaacgagcgaagtgagcacaatcctgcctgaatgagtctgaacccgctgacctgattgaaacgagtctg

SEQ ID NO: 27023 - DNA, 293 bp, Glycine max
ggcacaagtgagtttgttgatcgagataactagaaacagtgtgatgaaaatgaaggtccttgttttcttcgttgctacaattttggtagcatggcaatgccatgcgtacgatatgttccctctccgaatgaacactggctatggtgcccgtactccggaggtgaaatgcgcaagttggaggcttgctgtggaagcacacaacatctttggctttgagaccattcccgaagagtgcgttgaagcaacaaaggaatacatccatggcgaacaatatagatcagactccaaaacag

SEQ ID NO: 27024 - DNA, 418 bp, Glycine max
ggttgttaccattaccagcaagttaaagagtgtttattcagagtacttgaattgaggttccgaatggcacactctctgagttttgctcctatttgttccttcaagtcctcttgcacacaaggggcaatttccggtaattcggttgcccgaaaggcttttcagataaatgaggcatgtcaggattctaaggctcgaaactttcaatctttgaaggccgcggatggtaatccaagcaccaaaacaaagagtatagtttgtcctgattgtgaaggaaatggtgcaatattatgcactcaatgcaaaggtactggagttaattctgtagatcacttcaacggacaatttaaagctggtggataatgttggctatgcaggtatgtgcactaaatatcacatttctggttttggctctaaattt

SEQ ID NO: 27025 - DNA, 417 bp, Glycine max
gggttgaaagtgagcaatgtcgttcgcagtggcattgtgtacaacgtcgtcgttcttcccttcccgttttgaaattcgcaatccaaagcagcttcagcttccacctctcctttcaatgtcactgtcgtcgaagctaccgttgcatttctccggcaatgccatattcaaccgcaaccacccaaccatgttcaaaattcgagcctcaaactcttcatccaaactcgtcttattgagctccactatcgtcgtcacaacagcggtagcgaatcgcgtgctctacaaattggcccttgttcccatgaaagagtaccccttttttctcgctcagttcataacttttgggtatgttgttatatatttctcgatcttgtatttccggtaccgggcgagaattgtgaccgatgagatgctggcaat

SEQ ID NO: 27026 - DNA, 412 bp, Glycine max
ggctcaactggtgagtagaattggggtcatcggagttactgtcatggctgtgctatctggttttggtgctgtaaacctcccatacagttacttgtcacttttcatcagagagattgaggaaacagaaatcaaggccttggaaagacagctaatgcaatcgattgagacttgtgtatcaaagaaaaagaaaattattctttgccaaatggagatggataacaagcaaggatctgaagagaagttaaatgctagatctttaattaaacgaattgttggtacggttgttcgatccgtgcaagaggatcaaaaagagcacgatattaaaggcttggaagcagaagttctggccttagaagagctttcgaagcaattggtcttagagatctatgaacttcgtcaagcaaaagaagct

SEQ ID NO: 27027 - DNA, 382 bp, Glycine max
ggtggaagtgcagaagaagaagaagaagaagaaaaagggaaaaacgcaggaaaaatagaggaagatcgatcgagatctccctcgcgtttgtctcagttgaagaaattaaaacgcagaactagagtaactcaacggtctcagaattttcagggttttcagtacttccatattttttcttccggatttgagttggaagaagatcgaagaggtttctagttgcttcaattgttcctctgggtggtggagacttgctatatttttaaaatattgacaattcgaaatgccaaagagagaagggatagatctttgtcacatgaaagtagcagagcatcaccttacccaagtagctctagtcgtgtttggaaatctgctcttaaagagt

SEQ ID NO: 27028 - DNA, 298 bp, Glycine max
gaagcagtggtacatagcaaggcagagaaagaaatttgggtctctctaaagagtctccgctgaactttttggtttcttgaagatgtcgatactctccgatcttatcaaccttaacctctacgacatcaccgataaggtgatcgccgtgtacatatgggtcggtggatctggcatggatatgatgagcatagcaaggactctcgggactggttaatgaccctttcaagcgttccaagtggaactatgatggttccagcacgtgtcaagcttctggacaagatagtgtagtgatcttata

SEQ ID NO: 27029 - DNA, 413 bp, Glycine max
gaaagcaagcagggtaactgctgaaggaaggatcggttcttacatccatgacagcaggataggtgttttggtagaagtaaactgtgagacagattttgtctcacgaggtgaaatttttaaagagcttgtcgatgatatagccatgcaagtggctgcatgccctcaagtagagtttcttgatactgaggatgttcccgaggaaattgtgaacaaagaataagagatagaaatgcataaagaagatcttttgtcaaaaccagagcagataagatcaaagattgctgaagggcggattagaaaaagacttgaggagctggcattgcttgagcagtcctacattaaggatgataaggtagcagtaaaggacttcttcaagcatactattgcaactattggaggaaatattaaagtta

SEQ ID NO: 27030 - DNA, 267 bp, Glycine max
gggccacagactatggttgttcagaaaaggaggaagaatttcattggctgatcaagtactcaccattgcataacgtccggagaccttgggaacagcatcccgatcagtcaattcagtacccatcaacaatgctattgactgctgatcatgatgatcgtgttgagccattgcattcgttaaagctgttggcgaccctgcaatatgtcctcgttaccagccttgataaaagtccgcatacaaactccaataattggtcgcattgaatgc

SEQ ID NO: 27031 - DNA, 358 bp, Glycine max
ccacgcgtccgtgcgctcgaattacgactttcaagcagacgcccgaacgcgtactacaagctggatttgcttgtgactggatagttaacgaagcaatttcataacatgcatactacaagttctttgtgcacatttcatgtacaatgcatctacatttgccatttacagttgacactttgtagtatgaagcgacaactgtccttacatcctcaaaacttaataggctatcagccactcaaatttagcatgaaacgcctcagatccctgccttgcactgtaccgaaatctgaatcaacggctcagctgtcctgagatatgaactggacttaatacactactaccttcactacttggaaaa

SEQ ID NO: 27032 - DNA, 428 bp, Glycine max
ggagtgagagaaagagatcacatagcagaatggcttgtactcaatgtttcttgcaccaccatgctcttaccacccctgccagatccccatcacaacgcatcatggttagcaccaagcctaaccagcttgtttgcaaggcacagaagcaagaggatattgatgtcagcccaatctctcgccggttagctctaaccgtgctcattggtgctgctgctgttggctccaaagtccaacctgctgatgcagcttatggggaagctgccaatgtgtttggaaagccaaagacagacacagatttcctgccatacaatggagatggattcaaactatcgattccctcaaagtggaacccaagcaaagaagttgagtacacaggtcaggttgttagatatgaggataactttgattcaaccaccaacgtggctgtc

SEQ ID NO: 27033 - DNA, 425 bp, Glycine max
ggacacagtgagagtgtgagataatggacgaaattttacgacgtctttctgcggtggccgagtatcgaagaaagttttacctttgtcaaataatccattacagaatccgagcagccaaaagggttttgcgggatgcaaagaaggaatatgcgacaactcagtccctgaggaggggtggccaactcgttactcttgttgaagggccttataatgatcacaatcaacgctttatagtaaaatcaagcagtggagcagatagacatatagttggcattcatagtaaggtggagaaggagaagctagttccaggcacaagagttagcctggataggactaccatgaccattatgagaattcttccgtcccaagttgacccttttgtgtataacatgattcatgaagaccctataaatgctaattactct

SEQ ID NO: 27034 - DNA, 421 bp, Glycine max
gaatcgaagagagagtattgttcttaatttcttaatcctccgtcgtgggtggcgatgttgttcttctccggagcggattctcagatccatggagcaggctcatattattaagccaaagcctctcagatccgcggtggcggcgtgacggaaatgaagtcctcaagccgtctcttcacgatcggactggtgtcggcgtggtactcctccaacattggggtactgctcctcaacaagtaccttctcagcaactatggcttcaagtatcctatcttcctcaccatgtgccacatgaccgcctgctccctctttagctacgttgccatcgcctggctcaagatggtccccatgcagaccatccgctcccgcctccagttcctcaagatcgccgccctcagcctcgtcttctgcgtctccgtcgtct

SEQ ID NO: 27035 - DNA, 311 bp, Glycine max
  modified_base (207)..(207): a, c, g, t, unknown, or other
  modified_base (225)..(225): a, c, g, t, unknown, or other
  modified_base (232)..(232): a, c, g, t, unknown, or other
ggtatccccattcagttggccaatcctcttcacttgttctctctctctctcctcagtgtctcttctctctggttgcaacttggtctgtgtgtgtgaaagcaccaaaaataagaattttctgcaaaagaaatcaatcccctctctcccaaaagaaatgctaaagtgtgggagaaaagggtattaaaaaagataagtgccaaacctcanagttgtgctttttacctncctcagntaaagaaaaaaccaggaccaaaaggaataaaaaataaggtagagagagaaggcattaaggtaagagttaagactagtta

SEQ ID NO: 27036 - DNA, 422 bp, Glycine max
gctgcgttgtgcgtcggagctgtgtctggggaaagttgcgttgctttttgcggtacagctcacacacactgaacggtaagtatggcggacaaggctgttacaatccgaacccgaaagttcatgaccaacaggcttctttccaggaagcagtttgtgcgttgatgttcttcatccagggagggcaaatgtttccaaggctgaacttaaggagaagctagctaggatgtatgatgtgaaagaccctaatactgtatttgtcttcaaattccgaacacattttggacgttgcagatccactggatctggtttgatttatgacacagtggaaaatgctaaaaagtatgagcccaaatacaggcttatcaggaacggtcttgacactaacggagaaaagtcatggaagcaaatgaaagagagaaaga

SEQ ID NO: 27037 - DNA, 432 bp, Glycine max
gacacgcagtcgtattgtagaactgaacaagggtttctctgtctctatctctgtctgcttcttcactttctctcgtttcaatcgaacaaaatcatgggcagaaaattcttcggcggtggcaactggaaatgcaatgggaccactgaggacgtgaagaagattgctactactttaaatgaagctaaagtccctggagaagatgttgtagaagttgacgcgagccctccttttgagttccttccttttgtaaaaagtttgctgcgccctgatttccatgtctcggcccagaattgctgggttcgcaaaggcggtgcttatactggataggttagcgctgaaacgcttgtgaatttgggaattccttgagtgattattggtcactctgaacggatgcagctgttgaatgaatcaaatgagtatgtgggagataaa

SEQ ID NO: 27038 - DNA, 317 bp, Glycine max
gaatcgaatagagagtattgatcttaggggctgggtcctccgtcgtgggtggcgatgctgttcttctccgaagcggattctcagatccatggagcaagctcatattattaagccaaagcctctcagatccgctgtgtcggcatgacagtactgaagtcctcaagccgtgtcttcacgatcggactggtgtctgcgtgatactcctccaacatttcggtactgctcctcaacaagtaccttatcagcagctatggcttctagtgtcctatcttactgaccatgtgccacatgaccgcctgctccctctttagctacgt

SEQ ID NO: 27039 - DNA, 419 bp, Glycine max
gaagtataatacttttgtccaggattcaagtgcggatgatcttaccgatgtcggcgatgtggagtccttgcagttcgacttggctacagttgaagctgccacagacagattctcagatgaggacaagattggccaatgtggatttggggtggtttataagggtgtcttccctaacggacaggagatagctgtgaagaggttgtcagtaacctccttgcagggtgctgtagagttcaggaatgaagctgctcttgtggccaagcttcaacatagaaatttagtgagactattgggattttgcttggagggacaagagaagatccttatctatgaatacataccatacaaaagccttgatcgctttttatttgaccctgttaagcaaagagagttagattggtcaagacgctacaagatta

SEQ ID NO: 27040 - DNA, 303 bp, Glycine max
cggaaccaaacaagctactctcaaggttaatcaaagcttgggttttcatttcaccatcttctacgtctcttgtttctgaagcattgaaagatgagaatggttttttggtgttggtgatttgtgaaaacattgatttggtaaagatggcgtggagaaaagggtctgaggaagtggctaatatcaatcctctgttccttacgatctacactgttttcatcattggcatcgtggtttcttctttctacgtcttctctggtatatacttaaccaaccctgcttctgctcaatcttctgcatggctct

SEQ ID NO: 27041 - DNA, 412 bp, Glycine max
gcttcttcaaaagtacgttgcattccacgaatttcttctctctcgaagagggtaaactcgtaatgttggttccgattttttcggaaaaacgccttcgtttctttcccagcgaatttttcttttgttcgacgaaccttggattcatttcagtagcatagttcaggttcgtagatctcgaatttcactcaatcgcgtgttgttttccacttttccttttttgaagagccgtgagcatgttgaattaagtgccgttttctgttgttaaaaactccgatggttttattgtaattttgacaccaatatttagggctttgattcttgctttatactgattctgaagttaatctcctcttaatttaaccctgagcttagttcagatgctgagaatttgtcaatagatcaagattgcagt

SEQ ID NO: 27042 - DNA, 398 bp, Glycine max
  modified_base (274)..(274): a, c, g, t, unknown, or other
  modified_base (354)..(354): a, c, g, t, unknown, or other
ggaacagaagaagaagaacatggaaggtataagtggtggctggagaaattagctgacataagcttgcgacaaagtgctgcatatggagtttggaattttagctttaacattctttatcattcaactcaggttattgctgtgctatttggaggaatgtctattctagcaggtcatatcacagccgagaaacttaccaagtttatattatacagtgaatggttaatttattctacctggtgggtgggagacaatatatccaatttgatgcaatcangttgggctagtgaaaaagtattccacttaatggatctcttaccgagcagccaattcatagaaagaggggtaacattgcanaggttaacagggcgtattgaggttctaaatgtatcttttcacta

SEQ ID NO: 27043 - DNA, 354 bp, Glycine max
  modified_base (331)..(331): a, c, g, t, unknown, or other
tgcaaaaggacacgaaaggggaacccaaccaagctaactctcaaaagttaaatcaaaatctttggtttttcatttcaccatcttctacgtctcttgtttctgaagcattgaaagatgagaatggttttttggtgttggtgatttgtgaaaacattgatttggtaaagatggcgtggagaaaagggtttgaggaagtggctaattcgaagcctctgttcctcacgatctacactgttgtcatcattggcatcgtggtttcttctttctacgtcttctctgctatatactcagccaacccttcttctgctcaatcttctgcatggctctcttncatttcgagtgatgcaactcatg

SEQ ID NO: 27044 - DNA, 427 bp, Glycine max
gagattggatggtggaaatggaatcggcagctgagaaccctaattacccggcggtggactacaagcgaccttccatcttgtcatttcctcggaggcccgccctcagagttacatccgagttcgatagtgaaagcgcagtcttcttccataagatttcctgcaagttgttggacagccttgccaagttcaagttttcgttcaaccacagcggtaagggcggcgacatctccgaacctcaattcagctttgtctccaagcaccttagcctccactacgacctcgaagaccataatgctctcgttaagacctccatcgatcttgctcccagtttgcaactcactgcttctcatgatctcaaggctcaacaaggagaggttaccgtgcttgcaaacctaggcgatcctgcctattcacttcaactatctac

SEQ ID NO: 27045 - DNA, 318 bp, Glycine max
gctggaatagaagaaaaggtgcttgctagaagtgacagtatgctgaagtgtgtcagatggtaggggactcaactacttcttcgtaactactccctttcatcttatcgagcttatgtatcacgagactaactacatttagtaactaattgcgtgcatatacaatggctgtacatacaggatatggctggaagttgtatagcatattaagctaaccatatagcagcatccgggtcatgactagttacatgactagcactagtagtacttagctgatgtcagtgtatagggattgtagcatgatacttgattgttaagtga

SEQ ID NO: 27046 - DNA, 377 bp, Glycine max
aggcgtgcgaacacctcagacaggacagcagtagaagaatgggagcatgctgctagcgccagtaagctgtcaaccatcaaatggtaagtgcctcaaccacaggctacctactccactagttcatctgagtggagccatgtatccacacactatctacctctatatcatgatctggatctgatacactggcattacacacaggtgacggacatacgtccaaggacatattcgaatcatcgtattacagcgttctgagaattacttgactaatcactcgcattcactaaacacagtttatgtcagcgtaaatgtatcgtcgctagatactagaggattagttcgaaccttatgtattgagtggatagatcatacctgca

SEQ ID NO: 27047 - DNA, 416 bp, Glycine max
gacactaaacaagttaaaagaagagcatcactgaactaacaaagcaaccctatgtcgaaggtggtttgtgtcaccggagccagcggcgccatcggatcatgggtggtcctactcctactccagcgtggttacaccgtccatgccaccgtccaagatatcaaggatgaaaatgagacgaaacatttggaggaaatggaaggagcaaagagtcatctccatttttttgaaatggatcttcttgacatcgactccattgccgctgccataaagggttgttccggcgtaatccaccttgcatgtcctaacatcattggtcaagtcgaagatcccgagaaacagatattggaaccggcgataaaaggaacggttaatgtgttgaaggcggcgaatgaagcatgggtggagcgcgtggtggc

SEQ ID NO: 27048 - DNA, 365 bp, Glycine max
ggaaaggcgaagggataaggtgtacattggctgtggagctgggtttggtggtgacaagcccttggctgctcttaagttgcttcaaagagttcaagaactaaattatctggttcttgaatgcttggccgagcgaactcttgctgatcgttatcaaatcatgatgtctggtggtgatggttatgattctcagatttctaactggatgcatatgctgctgcctctggctttggaaagaggaacttgcataattaccaatatgggtgcaatggatcctctgggtgctcaacagaaggtcttagaaatagctaacagcctgtgtctcaatgtttctgatgctgtggctcacgtagtgtctggcactaata

SEQ ID NO: 27049 - DNA, 429 bp, Glycine max
gtacttgaagggtttcactgaagggacgatgattgttggggaatttgctgggagaagagttcaggaagctaagcccttgattaggaacaagcttttagaaacaggccaggctattatctacagtgaaccagagaaacgggtgatgtcaagatctggcgatgagtgtgtggtagccctcacagatcagtggtacattacatatggagaatcagaatggaagaagctagctgacgagtgcctttctaacatgaacctgtattctgatgagacacgacatggatttgagcacactttaagctggttgaaccagtgggcttgctcacgatcatttggtcttgggactcgcataccgtgggatgaacagttcctagttgagtctttatcggattccaccatttacatggcgtattacacttgtgcacaccattt

SEQ ID NO: 27050 - DNA, 422 bp, Glycine max
  modified_base (303)..(303): a, c, g, t, unknown, or other
ggttctagtgtgtgattgtttgttgttgtaactcgttcttcttcttttgttgttctgtgtttgtgtttgttttttctctcacctgaaaatgtcttgctgcggtggtaactgtggttgcggaagctcctgcaagtgcggcaactgctgcggaggctgcaagatgtacccagacttgagctacactgagtcaaccaccaccgagaccttggtcatgggagtggcacctgttaaggctcaatttgagggtgctgaaatgggtgtgcccgctgagaacgatggctgcaaatgtggaccaaactgctnctgcaacccctgcacttgcaaagtaagtgtttggagagcaagctttaagcagagatagcccttaattaaggataattgataactattaatgtgtagctaaaaacttatgtattatgtct

SEQ ID NO: 27051 - DNA, 422 bp, Glycine max
ggagtcagacagacaaacaaactactgctacgttaatcatgggtccaacctctatggccgccggaagagtcacgaggtttttggccaggcactaccctctcgagcaccaccgtgataacgccgatgttgagttcgactttcttgatgatattggagaagccttgttagctcaaagtgctagcagtgatgagtgcggtcaccccaatgaaatggaggaacagttcgaccaagacgaggatcacagagataccgtcgaggagaatagaaccttttgggacaaacaacaccagcttttgcaggtaacaattcattacttaatccaaccaataccttcctcaatttaattactaatttgctagctactgtacgcctatctaagaaacttgcatgcaccctgttaatttattttgatttttttaaat

SEQ ID NO: 27052 - DNA, 386 bp, Glycine max
gcttctgaaggagacactgaacttgctggaagaggatctttactgaactgactaagctaccatatgtcgaaggtagtttgtgttaactgcgccagcgcagccatcggatcatatgtggcactactcctactacatcgtggttacacattaccatgccaaggccacggatatacatgacgaatatgagacgaaccatttttacgtaatggtatgagcatatagtaatatccatttaattgctagggaccttactggcatctgctgcattgacgttatcataaaggattggtactgcgtcatgaatcttgaatgttctgacatcagtggtctactgatagattaggtgatacagattttggtgctcactatgaattgatcggatgctg

SEQ ID NO: 27053 - DNA, 424 bp, Glycine max
gcatacaaaaagattgagcctaagccactagtcattgcaccaggaggtttctatgatgcaaactggttcaacaaatttataagcaaatcaggaaaatctattgatgtggtcactcaccgcatttataaccttggaccaggagttgatgaacaccttgtggaaagaattctggacccttcctatcttgataaagaggttagcacattcagtggcctaaaaaatatacttgcaggtacaggaacctcagcaacagcatgggttggtgagtccggaggggcctacaatagtggccatcatcttgtatccgatgcatttgtttacagtttctggtatttggatcagcttggcatgtcagctgcttatgacactaaaacatattgcagacagactttgataggaggaaactatggtttactcaatacta

SEQ ID NO: 27054 - DNA, 421 bp, Glycine max
ggcgaggcaaggcaatagcctcatcctgttcaactcagagagagcgaaacgaagcgtctaaggttaaaaaaaactaaaaagggaaccacaaatactaccaccaggtttctctctatctattcctcactctagtctcttcattgctaattgtctgtaacgcttacatattttgattctttcactcactttgttgttgcgtgggctagatttcagcgttctcgtttctactctttattttaatgcactttgttcttgtgtttggaattaattttatttcttatgccatgtgattttcggtgtttttttggtttctggtgtacgaaacttgaatagtttgcaattcattcctaagttcacttggcaattcgatagttttttttttgctggtctggtattttcttatatatatttttaatatctt

SEQ ID NO: 27055 - DNA, 432 bp, Glycine max
ggcacaagtgagtttgttgatcgagataactagaaacagtgtgatgaaaatgaacgtccttggtttcttcgttgctacaattttggtagcatggcaatgccatgcgtacgatatgttccctctccgaatgaacactggctatggtgcccgtactccggaggtgaaatgcgcaagttggaggctatgctgtggaagcacacaacatctttggctttgagaccattcctgaagagtgcgttgaagcatcagaggaatacatccatggcgaacaatatagatcagactccaaaacagttaaccaacaagcttacttttatgccagagacctcgaagtccatcccaaggacacatttgtgttcagtatagatggcaccgtactctctaatattccatactacaaaaaacatggatatggggtggagaaatttaact

SEQ ID NO: 27056 - DNA, 415 bp, Glycine max
gggcacgagtcatttacaaacctaaggtctcggggttcaggtctatgtgatattgcaattttggttgttgacattatgcatgggttagagcaacaaacaatagaatccctaaatctattaaaaatgaggaatacggaattcattgttgccttgaataaggttgacaggctttatgggtggaaaacatgtcggaatgctccaattgttaaagcattgaagcagcagactaaggatgttcaaaatgagtttaatatgaggctcactcagattattactgaattcaaagtacaagggctgaataccgagttgtattataaaaacaaagaaatgggagaaacgttcagcattgtgcctacaagtgcaataagcggtgaaagaattcccgatttgttattactattgattcaatggaccc

SEQ ID NO: 27057 - DNA, 395 bp, Glycine max
ggaacaccacagtgatgaacgaacacccatttgaggactgggaacgttccatattaacatctttgttggttacacttgaagttagaagcctcaagtgaagtgtacttgcatcttgttcttggaaaagttcagttgaatggggactcaaagaggaatagctcttctcagtttcacattcttcttgttggtgagctcagcaaatgctttgctttctcctaagggagtgaactttgaagtgcaagccttaatgggcataaaagattctttagaggatccacatggtgttctagataattgggatggggatgcagttgatccatgtagctggactatggtcacttgttcttctgaaaacttggtcattggactgggcactccaagtcaaagtttatctg

SEQ ID NO: 27058 - DNA, 418 bp, Glycine max
gggagcgtgatgttggggtaggtggtggtggcgccgaaccgcaatggagaagccatcgtcgtcgtcgtcgtcgcgaagaaaatcgagcacgaaggtgaaagcttcaaccgatgcgaacacgaacctgagcatgctcaacgaggaccttctccagaacattctagcgaggcttcctgctctgcatttcgcttccgcagcttgcgtcagcaaatcatggaactctctctgcaatcgcatcctcactcgccccaaactctcttccgcgatttctctcaacccttcgctccccgatgctttcaacgaggttgttcacaaggttctttcggagccaattcgaccccatttcgctattgccaatatcggaactggattcagcactgccaagactttgtgccttattagacaagtcgtgggatcc

SEQ ID NO: 27059 - DNA, 405 bp, Glycine max
gtgaagctgatgatgttaaagcaagaccagcaaatgcagcaaaggcaccagaaaatctgggttctgaagctcagttggatgaaatgaccatggctgctgctagtcttgaaagaaatcaatctgttagtggcttagatcaacttgatgataactctcagcataagccaagttcttttgattctgattgccaacaagatggggacagtgctgcaactgagagacagttctcccctgataaactttatcgagctgctgtattgaagaaacgatttcttgataccatcttgaaagctcgagaaaagacactgacacagggtgaaaagggggatcctgagaaattgcgccaggaaagggagaaactggagatggagcaaaagaaagaaaaggctaagctacaagcagaag

SEQ ID NO: 27060 - DNA, 190 bp, Glycine max
cggggcgcggcaacgcaatagtcatcaatctgtgtaggtgccgcttaaccaaaatgaacgtctcatgtttattaaaagttacaatgatcgaatcatgctagcatcaggcagtctttatttaagctctcactatcctcactttatttatcgctgacagtctcgataacatattctcatgctttaattcact

SEQ ID NO: 27061 - DNA, 397 bp, Glycine max
ggaagctaagcgaagcaaaatgggtggatcagtgagggacgtgaagtcgaagggcgaggtcgacgaggtggtggcgagtggctctccggttatcctccacttctgggcgtcgtggtgcgaagcttccaagcacatggaccaactcttctctcacctttccactgatttccccaacgcccgcttcttaagggtcgaggccgaagagcaacccgagatttctgaggcttactccgtctccgctgttcctttctttgccttctgcaaggatgggaagacctttgatacattggagggagctgatccgtcaagcttaaccaataaggttgctaaagtagcaagctcaattaaccctggagaatctgcatcttctggcagtcttgggatggctgcaggggct

SEQ ID NO: 27062 - DNA, 380 bp, Glycine max
gaaattgatgtggatgaacttgagaagaggatgtggagggacaaaatgcgtcacaagcgattgaaagaacaaaccaagtccaaggaagggactgatgcaacaaagcaaaggcaatcccaagagcaggcaaggaggaaaaagatgtcaagagctcaagatggaatactgaagtacatgctgaaaatgatggaggtttgcaaggcacaagggtttgtttatgggataattcctgagaaggggaagccagtgactggagcatcagacaatcttcgtgaatggtggaaggacaaggtcaggttcgatcgaaatggtcctgctgccatagtgaagtatcaagctgataatgcaatccctggaaagaatgatggatgcaattccat

SEQ ID NO: 27063 - DNA, 422 bp, Glycine max
gagaacagagtgtgataatagtaagacagagcacctactcactcgtaaatggcgaggaagaagatcagagagtaccactccaagaggcttctcaaggagcatctcaaacgtctcgcctctatcgacctccaaatcctctcagctcaggtgacagaatctacggatttcactgagctgacagaccagcatccatggctttcgtcaaccagattggtcgtcaagccagacatgctgttcgggaagcgcggcaagagtggcttagttgctctcaatttagacatagctcaagtcgccgagttcgtcaaagcacgcctcggcgttgaggttgagatgggaggttgcaaggcgcctataaccacttttattgtcgaaccgtttgttcctcacgaccaagagttttatctgtctattggttctgaaag

SEQ ID NO: 27064 - DNA, 404 bp, Glycine max
ggtggaagtgcagaagaagaagaagaagaagaaaaagggaaaaacgcaagaaaaatagaggaagatcgatcgagatctccctcgcgtttgtctcagttgaagaaattaaaaagcagaactagagtaactcaacggtctcagaattttcagggttttcagtacttccatattttttcttccggatttgagttggaagaagatcgaagaggtttctagttgcttcaattgttcctctgggtggtggagacttgttatatttttaaaatattgacaattcgaaatggcaaaggagagaagggatagatctttgtcacatggaaattgcagagcatcaccttacccaagtagctctagtcgtgttggaagatctgctcttaaagagtcagaagagaatggtaaagaat

SEQ ID NO: 27065 - DNA, 416 bp, Glycine max
attacaaagagaaataatcgaaatgtagatgaatccagttctgctctcaatcatgctgatgagagtttgtttcaagtatgatctgattccaatggtgaaattggatgtgaaaatgagaaggatttacgtttgaacccaggagttgcttcaaataaaatgtatttttgatgaaagtggcataaatgcttccggtgattgttccgagactgttctggtctaacagaatgactaagttctgtactgcccgtgatactctccttaagttttttttttccagagcttcattgccttgtaagcaagtcaattttcaaggcatttgaagcttctgcgatgtgctttgatctgggtattatgaataagttttattgatgttgggggaaatattgtttggtcccttgtcatttgagtggattttt

SEQ ID NO: 27066 - DNA, 429 bp, Glycine max
gactgagggagaggggaatttgcccaagcttgtgctcacttccccggccggtaggtgcgtaatttgctataaagctatttttcccttaacaatcacaaccacaaccatgtgagtgcgtactttgattgattgaatatgtgggtgtgcagtgaggctgagatatacccggttggaaggttcattacttcttggaaagttcccagtggtaaggacctcctctttgttcgccccgacgctgttttcaatgggaacaaaccgataagtggtggtgttccgcattgttttccacagtttggtcctggtccaattcagcaggtacgtgtgcatctttaatccacgctattttctgcacttcttcttgatcttttttcctgtatattttactttttttatggtatatctgctgaattaaaatacaaaaatctgagt

SEQ ID NO: 27067 - DNA, 437 bp, Glycine max
  modified_base (328)..(328): a, c, g, t, unknown, or other
gggagcttctatcagtagcagtgcaccggctgctaaggcgcaagttgttggttggcctcctataagatcatttaggaaaaactcattggccaccacttcaaagaacaatgatgaagtagatggaaaaccaggtgcagctgcaatctttgtgaaggtcagcatggatggggctccctatctgaggaaggtagatctaacaaattatacaacgtaccgggaactgtcttctgcacttgagaaaatgttcagctgtttcactctaggtcaatgtggttcccatggagctccaggaagagaaatgttgagtgagagcaagctgaaggacctnctgcacggttcggaatatgtactcacttatgaagataaagatggtgactggatgcttgttggagatgtaccatgggatatgttcatcgacacatgcaaacgactgaaaa

SEQ ID NO: 27068 - DNA, 412 bp, Glycine max
  modified_base (345)..(345): a, c, g, t, unknown, or other
gaggcaattgcaaaggaaaaattgccaaagatggtttatgacttctatgcatcaggggctgaggatcagtggactttgaaagagaaccgaaatgcgttctcaaggattctgttccagccgcgtattcttattgatgtaagcaagatagacttgactacaactgtaatgggcttcaaaatatcaatgcctatcatgattgctccaacagccatgcaaaagatggctcaccctgaaggagaattagctactgctagagcagcatcagcagctggcacaatcatgacactatcctcaactgcgacttccagtgtcgaggaggttgcttcaacaggtcccggcattcgnttttttcaactttatgtgttaaaagacagaaatgtggttgctcaggttgtgagaagagctgaaaaag

SEQ ID NO: 27069 - DNA, 298 bp, Glycine max
ggcagaagaagcgagagagagagaagaaagaatcaagcttagtcaaagtgtctgtgactgtcacacacagtctttaagatctggaagcgcttctcacttgcccacaacaacaattcctctcaatttcaaaattttcagcttcaaaataataaaaccctaagagaggggttgcaagcaaaatgagaagcgcaaagatgtggacggttttgatgtgtctgatggtgagcttcttcgctcgcattgaatcgctgtctgtgacggtgaacgacgtcgagtgcgtctacgagtacgtgcttta

SEQ ID NO: 27070 - DNA, 397 bp, Glycine max
ggagagatggagggaagtatccggtgctctgccaactacgttcctctcactccaatcagcttcttggaccgcgccgacgtcgtttaccgcgacagactttctcttgtctccggtgacgttacctacacgtggacccagacacaccaacgctgtatcaaacttgcttcttccatttctcaacttggtgtccgtctttctcccctcgatgtgggtgctgtattggcccctaatgttccagctatgtatgagctgcattttggctgtcccatgtcaagggcttgtctctgcacgctaaatacacgtcatgattctgcaatggtttccttgttgctaaaacattctgaggccaaacttgcttttgctgattatcaattacttgatattgctaaggagcact

SEQ ID NO: 27071 - DNA, 430 bp, Glycine max
gcagatgatggcagacaaattgttgccagggctaagtctgaagctactaactatgacagcgtatatggcgaaccaattcctgttaaggaacttgctgaccgcgtggctagttatgtgcacctctgtacgctatattggtggctcagaccttttggatgtggtgtcatactaggaggttatgacagggatggaccacagttgtacatggttgaacctttcggtgtttcctatagatatctcggtgctgcaaatgggaaaggcaggcaagctgctaaaacagagattgaaaagttaaagcttgctgatatgacatgtcgacaaggggttattgaagtggctaaaattatatatggagttcatgatgaggcaaaggacaaagattttgaactagacatgagcttcgtgtgtgatgagtcacaaccgacacatg

SEQ ID NO: 27072 - DNA, 446 bp, Glycine max
  modified_base (257)..(257): a, c, g, t, unknown, or other
  modified_base (394)..(394): a, c, g, t, unknown, or other
  modified_base (403)..(403): a, c, g, t, unknown, or other
ggcagccaaagaaaagaaaatcctcaattttctgagcaggcgaacactctgtctctgtctctcgaaaattctcagtttgcagagaaaatctgaatcatgtcgtggcaagcgtatgtcgacgatcaccttctgtgtgacatcgaaggtaaccacctcactcacgctgctatcatcggccaagacggcagcgtttgggctcagagtaccgacttccctcagttcaaacctgaggagataactgccatcatgaatgactntaatgagcctggatcacttgctccaactggattgtatctcggtggcaccaaatatatggtcatccagggtgaacccggtgctgtcattcgagggaagaagggtccttgtggtgttactgtgaagaagaccggtgcgngcctgatcnattggcattatgatgaaccaatgactccaggtcaatgcaacat

SEQ ID NO: 27073 - DNA, 431 bp, Glycine max
gatggacttgatcattttcgtctatctccgacacaactccgtgcagagttcacaaggcgcaatgcggatgctgtgtttgccttccagctccggaatcctgttcacaatggccatgctttgctaatgactgacacccgaaagcgccttcttgagatgggctataagaatcctgtcctcttgcttcatccacttggaggctacaccaaagctgatgatgtcccacttgattggcgaatgaagcaacatgagaaggtacttgaggatggtgttcttgatccagagacaactgtggtatccatattcccatctcccatacactatgctggacccacggaggtgcagtggcatgcaaaggctaggatcaatgcaagggctaacttctatatcggtggtcgtgaccccgcaagcatgagccatccagttgagaaaaa

SEQ ID NO: 27074 - DNA, 420 bp, Glycine max
gggtggagtgtgcaaaagagcgtcgtagtcgcaagcctaatcagaagaagcgcagcttcaagcgagtgacagccaccagccatgggtcgtatgcacagccgcggtaagggtatatcctcttctgctttgccctacaaaaggacacctcctagctggctcaagatctcttcgcaagatgtcgaagaaaatatctgcaagtttgcgaagaaaggtttgaccccgtctcagattggtgtcattctcagagattctcacggtattgctcaggtcaatagcgtcactggcagcaaaatccttcgcatcctcaaagctcacggacttgcgcctgaaattccagaggacctgtaccatttgattaagaaggcagtttcaattaggaagcatcttgagaggaacaggaaagacaaggactccaagttc

SEQ ID NO: 27075 - DNA, 365 bp, Glycine max
aagggataaaaatggagatgtcaaagatggtgggagtgattcctcaaatggggtgctgaatgagtcattggataaacctgttgtgactgctaacatcgagccgcagccaaatgtggtagcaacaggattttgtagatatgtacatgaaaagcatgcagctattcaccgagtcattgtcgataatgaagcttcctatggactgagaaagtggaccatctaggtcaggaaactctaactgtgaacagaagatacagactcgaaatagcactaactgacgcgtgctgtatggaagcagggctttcttctgaactctggatcatgggaaatactctcaagtgacttagactttagaatgaaaactgata

SEQ ID NO: 27076 - DNA, 360 bp, Glycine max
ggagcatgaatgaagagcgatcagaatggctcccaagggcttaatgtttttcgctgcgttatgcttgttatcactgccactgagtcggagccttgccgaagataccggactcggtatcaacctctacgatgaatcataccctcacgctgatgacattatctgcgaacacgtcaagcttctctacaagcgccacaataacactgatttctcctggctcataaacatcttacatgactgtgctgttcagagccgtgatactctactgatgctggactccacatgacagagcttgtctgagaacgaaacctatagaagctctcggctgagaaatttgaggttcattgagaccatcaaacaatc

SEQ ID NO: 27077 - DNA, 448 bp, Glycine max
  modified_base (385)..(385): a, c, g, t, unknown, or other
tcatgaagaactcaggaaacaattgcctaatcacaggttccgtacaggaagtgattgtgatgttattgctcacctgtatgaggagcacggagaaaactttatggacatgcttgatggtatattttcatttgttctgctggatactcgtgacaacagttttatagtggcacgggatgcaattggggtcacttccttgtacattggttggggtttagatggctctgtctggatttcctctgaattgaaggggttgaatgatgattgcgaacattttgagtcttttccacctggtcacttgtattctagcaaagagagagcgttccgcagatggtacaatcctccatggttctctgaggctattccatctgccccttatgatcctctngctttgaggcatgcctttgagaaagctgtggtaaaaaggttgatgactgatgtgccctttggt

SEQ ID NO: 27078 - DNA, 332 bp, Glycine max
tcatgtagaacgcaggtagcaattgcctaatcacacggtacatacaggaagtgattgtggagccatagctcatctgcattaggagcacggccaaaactttctggacatgcttgatggtatctctttatttgttcttctgcgatactcgagaccccagttctatagtggcactggatgcaatctacggcactttcttgtacattgattggggtatagatggctcctactggatatcctctgaatatgaaggggttgaatgaccgattgctaacatattgcacctttcacaccttgtcactcgtattctagcatatagagagcattccgcagat

SEQ ID NO: 27079 - DNA, 396 bp, Glycine max
gggagaagaaggaagcatcataaccggccaaagcttcgctctcttccatttatcccccataaataaaactaggtgaaaaaaatatactctgtgcttctcatgatgatagtgtagctgaagctgcttctgctgcagcattggtgatttggacacaaaacaagtatcaaacttttcagttctctgagcttctggcttatcaatcttgaaggagttcaatactttaccctattagttggttccctgaaatttgtattggtattgctgtatcacaaattcttctgaacaatctctctaatcaaccatgtcattattggctaaactacgctgtgacaccatagatgttactggtaccctaatggcttacaaaggtgagctcggtgactaatattgcatggc

SEQ ID NO: 27080 - DNA, 409 bp, Glycine max
  modified_base (324)..(324): a, c, g, t, unknown, or other
  modified_base (336)..(336): a, c, g, t, unknown, or other
  modified_base (402)..(402): a, c, g, t, unknown, or other
gattcagatacgtttcagtgggaaatgaagtgaaacgggaacactcatttgcacaatttctagtgcctgcattggaaaacattcagagggccatttctaatgctggccttggaaaccaagtaaaagtttccactgccattgatactggtgccttggcagaatcattcccaccatcaaagggttccttcaaatctgattatagaggagcatatcttgatggtgtcatcagatttctagtgaacaataatgccccattaatggttaatgtgtactcttacttcgcttacaccgcaaaccctaaggacattagtcttgactatgcancttttaggtctncttcggtggtagtgcaagatggttcacttggttacccgaacctctttgatgcttccggtgatgctngttatgc

SEQ ID NO: 27081 - DNA, 396 bp, Glycine max
ggagccaaagagagagaaagagaagaggaagaagaggaagaagaagctctggattccacctcttcccgtccttcgagacggttgttgtgctgcttgctcttcaggttgacctgggattgaatctaaagaatcttgatttacattttgagatatggagggagtttgtttctggacaaattgctaccagtatcggttttttgcattccaagaagtgcttgattggcgagttttcatccttggagattttcttcgggtttcctttgttaattgcacttagggttctgctccgctttaatgatcagcacagggtacgtgatgctacattcttctgatacaggtgctgcatcttaagtgcacttgtacaatgcattgctgacccaacattcagttaaaact

SEQ ID NO: 27082 - DNA, 446 bp, Glycine max
ggcacaagtgagtttgttgatcgagatggctagaaagagtgtgatgaaaatgaaggtccttgttttcttcgttgctacaattttggtagcatggcaatgccatgcgtacgatatgttccctctccgaatgaacactggctatggtgcccgtactccggaggtgaaatgcgcaagttggaggcttgctgtggaagcacacaacatctttggctttgagaccattcctgaagagtgcgttgaagcaacaaaggaatacatccatggcgaacaatatagatcagactccaaaacagttaaccaacaagcttacttttatgccagagacctcgaagtccattccaaggacacatttgtggtcagtataaatggcaccgtactctctaatattccatactacaaaaaacatggatatggggtggagaaatttaactcgaccctggatgatg

SEQ ID NO: 27083 - DNA, 379 bp, Glycine max
gactgtcaaacctatgtttactcatgggcttgatgggactgaacttccaggcattgctgggtggctagataagctgctgtctattgcttttgaacagacccttgttgagcccaacatgctcgctgttgatgttgagaaatttgtttcaccacaacaagagtcttggttcaaagtgaatgagaaggagcctgttgcttatgcaaaagtggaagttattgaagcatctgagatgaagccatctgatctaaatggattagcggatccttatgtgaaaggtcaaatgggtgtatacagattcaggacaaagatacaaaggaaaacacttactccaaaatggcacgaggaatttaaagttcccatcataacattggagtctgat

SEQ ID NO: 27084 - DNA, 424 bp, Glycine max
  modified_base (383)..(383): a, c, g, t, unknown, or other
ggaggaagaaagggtcgaagagaatgtgggaatcaggtgttttgacggtggttgccaccgccggcaacaacatcggcaaaatccttcagaagaagggcaccgtcattcttccccctctctctttcaagctcaaggtcataagggcatatgctttgaacaaaacctgggtgataggttttctaatggatatatttggggcactgttgatgttaagggcattagctcttgcgcctgtctctgtcatccaaccagtttctggctgtggactggcaattctctcagtcttttctcatttttatctcaaagaagtcatgaatgttgttgattgggtgggcattaccttggcaggttttggcacaataggagttggtgctggaggtgangagcaagaggctgctgctctatctattttccacataccatg

SEQ ID NO: 27085 - DNA, 315 bp, Glycine max
gaagcataagaatctgcaacaaatagtcatggctgcgcttggggaacaatcagaagaacaagccatggctgcccaacctaaacctcagaaccgacgacccatttctaacatcgtcatcgtcgttgctatgcagacggaggcacttcccattgtcaacagatttcagctcaccgaggaccctcactctccgtttccgcgaggggttccttgggttcgttatcaagggacatacaaagatcttaatataagcttgatttggcctggaaaagatccaactttgggggttgatagtgtaggcacgatatcatctgctct

SEQ ID NO: 27086 - DNA, 396 bp, Glycine max
tataggggcttccatagagaatatacagtaaacagaaaatgtgaagctcgagtggctggtgagaggcagcgactgctaaggaagggaagcatatttaactacaaatccaatggcggatacctcaagccgatcaagagacctcgacaagctgcttctccgacctggcaatctcgtcggtcctaggttctaacctgggcctgagttgccagatgaccttcaagccttcgccaattcttgttcagacttggagatgttggcaaacccaaagccgaagtagctgccaagcgtgtcatggagagaattagtggtgtggaaatcgtgccgcactttttcaggatcgaggacaaaggaattgaattctacaacaattttaacaatattgcccttggtcttgat

SEQ ID NO: 27087 - DNA, 419 bp, Glycine max
  modified_base (289)..(289): a, c, g, t, unknown, or other
gagaagaagaaggttggttgattggtcccattgattcgcgaagagaaaagaaaagatgtttgagccacaacagctatacactcgcgcgaagaccgaggaattcgacctcgaatcaggagaaaccctctacccagggctgagcgtcggcgagaaccagctccgatggggtttcatccgcaaggtctacggcatcctctccgcgcagatcgtgctcaccaccctcgtcttcgtcaccaccgttttctatactccaatcaatgacctgctcaagggcaattccaccctcctnctcatactcctattccttcccttcatctttttgattcccctgttgaagtaccagcagaagcatcctcataattacatcttgcttgcactcttcaccgtgtcgatcagttccaccatcggagtcacctgtg

SEQ ID NO: 27088 - DNA, 412 bp, Glycine max
ggtacacagcctcaacaaccctaacgcgtgcagagcggagagagacgcagccatggggcgaagacccgcgaggtgttataggcacattaagaacaaaccataccccaagtcacggttttgccgtggtgttcctgatcccaagatcaggatttacgatgttggtatgaagaagaagggtgttgatgagtttcctttctgtgtccatctggttagttgggagaaggaaaacgtttctagtgaggccctggaagctgctcgtattgcttgcaacaagtacatggccaaatttgctggaaaggatgctttccacttgagagtcagggtgcacccattccatgttcttaggatcaacaagatgctttcgtgtgctggagctgataggctccaaactggaatgagaggtgcttttgga

SEQ ID NO: 27089 - DNA, 451 bp, Glycine max
ggagacagagagaatgagtacggtgggagaagggaaggtgagtagtaatggtcatggatgttgcaaatcagggccaggctatgcttccccactggaagccatttctggtcccagagagtctctcatttatgtaacctctgtctacacagggaccggaatagagaagccagactatttggcgacagtggatgtggatccaaactctccaacttattccaaagtcatccataggcttcctgttccttatttaggtgacgaattgcatcacacaggctggaattcatgcagctcttgccatggagacccctcagcagaccgacgatttctcatcgtacctgcactcgtatcaagtcgagtatatgtggttgatgtgaaaacaaatccaagggctccatctttgcacaaagttgtcgagcctgccgatatcatacataagactggattagcttat

SEQ ID NO: 27090 - DNA, 398 bp, Glycine max
cggacgcgtgggcagacgcgtgagaaaacacctaaggggtaattaaggtacatgaaaaggaagatactggggaggttgatgttctaacaaaaagggacaactattatggggatgacaggctactggatgctcatggtcaactttggctgcaaatgcaccacattattggtatgagccgcgggttcttaccatacgtaagctatgtgaccatcattatgactgaaaaggcctatgatcaagtatattctcattgaggctttggggatgatcgtgataacttgcaaggattaaatgatgaatgtgaagtcaaaactgcggtctaactatggatggttgggtgagcagaatataatggtatgattaaaagatgaatctgaaatcattacgtaccattcata

SEQ ID NO: 27091 - DNA, 351 bp, Glycine max
gggactaactaatctccataaaataagctgagtgacgctcctcactttgtggccatggcttcactcacgtgcctacgcccaacccaccctcatcttcatcgcggttcagtgcttctcgccatttcgaaccgctgcttcaaccattcctccttgctgaactggattctctccgtaaaccctcctcgaaccgctcctacacgcgcaatggccaagccctgttcctcacctgcccaagacctagtcggatctcctggcgattttgaatttgtgctgcctctgaaaatcgtggagtatccggatcctagattgaaggccaggaattagcgcatagatgccttcgatgatagtctg

SEQ ID NO: 27092 - DNA, 451 bp, Glycine max
ggttctagtgtatgtgattgttgtgagtcgttcttcttcgtcgttatcttcttcttttgttgtttgtgtgtttgttctttctctcacctgaaaatgtcttgcttcggtggtaactgtggttgctgaagcgcctgcaagtgcggcaacggctgcggaagctgcaagatgtacccagacttgagctacaccgagttaaccaccaccgagaccttggtcatgggagtggcaccagttaaagctcaattctagagtgctgaaatgggtgttcccgctgagaacgaatgcttgaaatgtggagctaactggacctgcaacccctgcacttgcaagtgaagtgttcgagagctaaagctttaagcataaattgcccttagaaataatgattaaaactatatgtagcttcaaaacttcaaaattatgtaatatgtattatggtgcactctggtgtttt

SEQ ID NO: 27093 - DNA, 396 bp, Glycine max
  modified_base (24)..(25): a, c, g, t, unknown, or other
  modified_base (144)..(145): a, c, g, t, unknown, or other
  modified_base (185)..(185): a, c, g, t, unknown, or other
  modified_base (197)..(197): a, c, g, t, unknown, or other
  modified_base (232)..(233): a, c, g, t, unknown, or other
  modified_base (283)..(284): a, c, g, t, unknown, or other
  modified_base (297)..(299): a, c, g, t, unknown, or other
  modified_base (316)..(317): a, c, g, t, unknown, or other
  modified_base (338)..(339): a, c, g, t, unknown, or other
  modified_base (348)..(350): a, c, g, t, unknown, or other
  modified_base (372)..(373): a, c, g, t, unknown, or other
  modified_base (388)..(390): a, c, g, t, unknown, or other
tgcaccgtactcggtccgtgaatnntcccgggtcgagcccacgtcgtctcgtcggcttggtcgagaagaaacgtacagaaggggggccccgcagaagttgaagttcgaacggaaaaaagagagcctcttggagaaagtcctaannaaatcccaacccggcagaagggtaagggaaggaccttgcnttaaatctgatnaccagaaagaagagaaccaaagaagggcttaatannaacctgaaagaaatctgttttctccaatgtgaataagtgactcaatgcannaagaacataaaannnacctaactttaacatcnnagataataccaaggggatgtnnctgatcatnnntgtttgaaagaagcccagcaannagtagaaattctagnnntagtag

SEQ ID NO: 27094 - DNA, 338 bp, Glycine max
gagagcagaggagagagagagagatacacagtcacacacacaacgcaaaacacaaagggtctgtgtttgttcttctgaaaagtccagctttctccaccacctctctagggttcctttgctttcaatttttgcttaaaaatattatttttatagtttttctgaaaaaagcaacagaccccttttccttaccgatcttgtcctctctctgtatttcttgccgtatgctgaatttgcagaactgaactaaagcttccttcatcatattgtccaacagcttattcaagagcaaaagtagaagcagtttaaagatgggttacttatgtgatttttgtggagac

SEQ ID NO: 27095 - DNA, 292 bp, Glycine max
gaagtaagaaagtaagaaagtaggaaagatgacaggtgggatgtttggaaggaaggggcaaaagataaaggggacagtggtgttgatgcctaagaatgtgttggacttcaacgccataaccttcgtcagataaggcagtgttaacgacaccgtctccgatttcttgggcatatgcttgtactcattatgtcatgcatttgatgctgttactgctttaactggtcaaagcatctgcttgcaacttatcatggctactcagactgatagtagcggataaggaaaaggtggaaac

SEQ ID NO: 27096 - DNA, 420 bp, Glycine max
ggagaaaggggtgcattctgttctgtgtttcggggttacgctttgcgagtgagaattgataaacaaatcgttagggttttttggttgtgcgagtgagagtgagagagaacaatggaagacataacagagggagtgaacaacatcaacatctctgattcgtataagaaaaatcgcattcaggtctctaacaccaagaagcccctcttcttctacgttaatctggccaagagatatatgcaacagcatgatgaggtcgagctctcagctctaggaatggctattgccacagtagtaactgttgctgaaattttgaaaaacaacagacttgctgttgaaaagaaaatcaggacatcaactgttgacataaaggatgactctagaggtcgacctgttcaaaaggccaagattgaaatagtacta

SEQ ID NO: 27097 - DNA, 351 bp, Glycine max
gatggcagggaagaataaaggggtggcgccggaagacgccataagggccattggcttgggttacgatctcaccaacgatctgaagctcaaatcctgcaagaaccactccagattgatcgctattgacgatgacaaccttcgaactgtcgaactccctcctcggatttccatccctaatgtccccaaatccatcaagtgcgataaaggtgaccgcatgagattgtgctccgatgtcctctcttttcagcagatgtcagagcagttcaaccaggacttgtcactgtctggtaagattccaacgggccatttcaactctgcgtttgggtttaaaggagtttggcaaaaagatgc

SEQ ID NO: 27098 - DNA, 386 bp, Glycine max
ggcggccaaacgtttcctagccgaaaccctagctagctctttcttaatccataatctctcttatcttcttctctttctatctgcaaaacacaaatgtctcacttcggacgttcgggtcccccagacatttacgacacttactctcttctcgatctcaacatcaccttccgtaccaccgacgacgacctattccctctcttcgacaagtacgggaaggtcgtcgacatcttcatccccaaggatcgaacaactggtgagtcacggggttttgcattcgtgcgttacaagtatgctgatgaggctcagaatgccgttgagaggctcgacgggagaatggctgatggtcgcgaaataactcgccagtatgcgaaatatgggcctaatgc

SEQ ID NO: 27099 - DNA, 248 bp, Glycine max
gaggttgaaaattttaaaggtgtggaataagactactcagtcacctggaatttcaatgccaatccttattttgaggatcctaaacttgcaaagacctataccttacttgaatatggaacacctaaagtgactgctacacccatatgctggaaagagggcttgggcatacccaatggagtctctcatgagaaaacaaggtacacgcgtacttctactgatgtcagcttctttagactgcttactgacac

SEQ ID NO: 27100 - DNA, 413 bp, Glycine max
gagaagaagaagagagaaggtataagcagccgtttggtctgttggtatatgaaggtggtgaagagagaagaagaaggagaatggtgacggaccaggatatagcgaaaggggtggagtctctactgcgtcactctgacccaaactccataactacggttaacggtgtcgttcagcagctggaggccaaactagggttagacctctctcacaaggccagtttcatcagagaccagatcgaccatcttctccggtcacagccacaggcatttggtcctcaccctcctccactttacaaagactattttgcccctcacccccaaccgcactttccgaccacccactttccttcccattttgccctccatgacgagatcaacttccagcagcacccccgcgctccttcaccgtgcaaa

SEQ ID NO: 27101 - DNA, 449 bp, Glycine max
ggggaaagagacagaaccgaaaatggttgcgactttgagtcttccgatcatagacctctcttctccccatcgtctttccacagccaattccattcgtcaggcatgcgtggaatatggtttcttttaccttgtgaaccatggggtggacaccgattttgtgagcaaagtcttcgaccaaagttgcaagttcttctcgcttccggtccaacgcaaaatggacctggcccgcaaggaatatagaggctacactcctctctatgctgagacacttgatcctacttcactctccaaaggtgatccaaaagagacctattacattggtcctatagaaagtacctctattgctcatctgaatcaatggccttctgaagaattactgccaaactggagacctacaatgaaatccttatattggaaactactggctgctggaaaaagtctgctgtctc

SEQ ID NO: 27102 - DNA, 267 bp, Glycine max
ggcgcactcagagaggaagcttatagagagagagagagagagagtgaggagagcgtattggctcttcatcaagattggtatttatagggattccatgcacaagaggcgtgccactggtggcaaggacaaggcttggagattgaagagcaagtatcatctatgccttaaggcatgcaaacacctacttatcaagcatcaagtcactctagaggattcgtgtaacatatcactgcttctcatacaggtcattgaggctaaatactggct

SEQ ID NO: 27103 - DNA, 389 bp, Glycine max
ggtgatagcacgtagattagagccatggtaaaggaagtcaacacccaaaccgaggttagtgtgagattggaagccctctgggcagttctgtccaaggatttcgtcaccgtagctccaaaggtactccccaatattgtgaaggatgtgcaagtgattgaaggtgatggaggggttggtacaatcctcatctttaattttttgtctgatgtgtccccaagttaccaaagggagaagatcacagagtttgatgaaatttcacatgaaattgggctgcaagtgattgaaggaggttatctgagtcaaggattgtcatactacaagacaacttttcagttatctgcaataggataggatcagaccttggactacgtggaaattttttatgacca

SEQ ID NO: 27104 - DNA, 274 bp, Glycine max
gggaactggggtacacagaatgatgacattgctgtggttactgaggaagtggtgtatgaaactgaaaagaattttgctgatgagaagcctgcatgcgaggaagatgcacctgaaggaaacaaggactgtcctgccaatgaaaatgaataaaaggagtctgaagacaaggagatgacactggaagagtatgagaaggtgcttgaagagtaaagaaaggccctgcaggcacaaatgactgaagttagaaaggtggacattaaggagtttgcattca

SEQ ID NO: 27105 - DNA, 449 bp, Glycine max
  modified_base (276)..(276): a, c, g, t, unknown, or other
  modified_base (288)..(288): a, c, g, t, unknown, or other
gggagagagagaggctgaaacaaagaagtgaaaatggcagcaaaaagtaggagctgcagcagctcccccgaagcttatctcagcggcagactctgaaagctgtttgagtagcctcaacccggagaatagcaccaatgggagaggaggaaaacaaaccagaggaacccatggcaaaggagaaaaacccagaggaagaagcaacccaagagaaaaaaccggagcaagagtccaaagaggaagttgctgctgctgctgctgctccgccaccgccaccgncaccgccaccgnccgagattgtgctcaaagtgttcatgcattgcgagggttgcgcccgcaaggttcgtcgctccctcaaaggattcccaggtgtcgacgatgttgtcaccgattgcaaatctcacaaggtggtcgttaagggagagaaagcggatccgctcaaggtttggaga

SEQ ID NO: 27106 - DNA, 425 bp, Glycine max
ttagggggcgtcaatagagagtagagagtaaggagaaaatgtgaagcgcgagtggctggtgaaggcagcgactgcgaaggaagggaagcatctttagctccaaattcaatggcggatacctcaagccgatcaagagacctcgacaagctccttcttcgccctggcaatctcgtcggtcctaggttcgaacctggccctgaattgcgagatgaccttcaagccttcgccaattcttgttcagacttgaagatgttggcaaacccaaagccgaggtagctgccaagcgtgtcatggagagaattaatggtgtggaaatcgtgccgcacttttgcaggatcgaggacaaggaaattgaattttacaacaattttaacattattgcccttggtcttgattccattgaggcccccaaatatatcaatact

SEQ ID NO: 27107 - DNA, 445 bp, Glycine max
  modified_base (334)..(334): a, c, g, t, unknown, or other
gatatccaaaggaacaaaaatattattaagatgatcgacattattggagcacttgttctactctttgcatttctcttcctcagttgtgtgtatgcacaagacacaacaacccttgtgcctgcaatcataacttttggtgattctgctgtggatgtagggaacaatgactatcttcccacccttttcaaggctgattaccctccttatgggagggactttgttaaccaccaacctactgggaggttttgcaatggcaaattagctactgatttcactgctgacacattgggtttcaagacctatgctccagcatatcttagcccacatgcatcanggaaaaacctccttattggagcaaactttgcttcagctgcatctgggtatgatgaaaatgctgctactttgaatcacgcgattccgttgtcccaacagttgagttatttca

SEQ ID NO: 27108 - DNA, 369 bp, Glycine max
  modified_base (363)..(363): a, c, g, t, unknown, or other
ggaagcagagctgaagaggtgaagtgaagatgatgtccggaaaatatacgtcgattgacgcgcagcagcttcagggatctgttcctgccgttccagattcacgacccgccaccgtcaatttcgcagattcaaatcttcagacttttcctccttctggagctcagggcaagatcaccgctgcttccgggccttctcgtgacgctgatgattcattttcaaaacctgtatctggttctgatgaaccgcagcagggtggttggtttcagacttttacaattgctgcttacaaaccatactttgatgttgacacttcagatgttctagagaggattatcgactcactatttccatttagaggatctntcaatg

SEQ ID NO: 27109 - DNA, 260 bp, Glycine max
gattgcgaagacaaacacgattatgcctatgagttggcaaactgtactgttcatcgtctgagacggtgcttgtggtgaggaggaggccacacgtggtgaatggtgggggttttgtagtcatggattgtagtgcccagagggttgtgttcagggtcgatggttgtggtgttcgtggcaaacagggagacttgattctaagagaatgagatggatacgctttgcttcttatgcgtctaatggaaggcatggttgaggcctta

SEQ ID NO: 27110 - DNA, 196 bp, Glycine max
gaatatggagcgtgtgactcaggctgtaatggtgggttgatgaacaacgcatttgagtacatacttcaatctgggggagtacagaaaggaaagggctatccatacaccgggagaaattgcacctgcaaatttgaccaaaccaaagttgccgctactgtatctaattacagtgtggtttcccttgatgaagaacaaa

SEQ ID NO: 27111 - DNA, 201 bp, Glycine max
gacgacaaactttacggtgtgaacattgttatagttgtaggtacataagagtttattagatgccttatttacaattttttagatgtttttggtattgttcttcaatcaaagtcatagagtttttgtgtttttatttaccagtccaatgttaatcattagtttttgttagaatattaatgggaatttttccttttaactctc

SEQ ID NO: 27112 - DNA, 418 bp, Glycine max
gaagaaggcacagttgcaaactatactttccacaaatacaaggctggctacattcatcactgtcttattgaaggccttgagtatgagactaaatactactatagaattggaagtggtgattcttctcgagaattttggttcaaaacacctctcaaagttgatccagattctccctacaaatttgggatcattggtgatttggggcaaacgtttaattctctttccacccttgagcattatatacaaagtggagcgcagactgtcttatttgttggagatctttcttatgctgataggtaccagtacaatgatgttggattacggtgggatacatggggacgatttgttgaaaggagtacagcatctcatccatgggtatggtctgctggaaatcacgaaatagactatatgcgctaca

SEQ ID NO: 27113 - DNA, 435 bp, Glycine max
ggtggtattgcgtgttggtgtgaatgaagaaccggtctgctgtggctgctctgcaatacttggaatcgctgcgtaattcgcaccctgagctctccgattggtacaattcgctggcggatctgtaccagaagaagctctggcaccagctcactctcaagctcgagcagtttgtggctctcgccgtcttccaggctggtgatgctttaatacaattatatcacaatttcatcacagactttgagacgaaaatcaaccttctcaagcttgcacattttgctgttatagtttctcggcagtattctgaaaaagaagctgctgttggttatcttggaggggtcattcagaaacttcaagacactatggagcagcgcatagaagaacctattctttacattaagatgcaaatagcaatattcaagcttgagcaaggtgatc

SEQ ID NO: 27114 - DNA, 315 bp, Glycine max
tatggggaggttgaattaggtttttaggtattgagacctaggggacacactattacgcatcattcatatttctcaaaactgaactatgctcatcaagtgatgccaagatcttcccagctaaggacatcacttttgctagtattgattctcatgctctgatgtaatcagtatctttacgcactttgtaaagcttcatactcttgttgtcataactgctctcgttgccatcaatctactgcgatgttctgaattgggacattggctaatgatttcactgtgttcacattcggtcttaagaactatcctacaacatat

SEQ ID NO: 27115 - DNA, 417 bp, Glycine max
gagggcagtgaggagtaatgagattgaattgaggttgaagtgtgttgtgttgtggcaaagctcagaaaaagagagagagattgaagaagcgatttttttatatgaaattttgaagagtgaatgaaaaatctcaatcccatggatgagcaattgaatttgagctgaatcggcgtcgtttcgatttctctcagtcacacactactgactcggccagattcaagtaaacgcttcttctcagcaaaccctagtgtttcggtttccgatcgttgactaaaccgaaaatctcttcttcttttcttcgttcccccctttcgtgatggccatatattggagattgatgtgatgacctctttacctacctatcttcatgcagtgcttaattgatacctttgggttttatctcatgctattttaatt

SEQ ID NO: 27116 - DNA, 391 bp, Glycine max
tcagctgaagaactatctatactccttagagtctctcttggatgataacagctggagagcttctgttcacagatatcagagcggtaagacaaggggtgctcattaccgtcagtctgatgacttattggcggatgctggttggcattgcagcttttgcttccgctatatcagcgatttcctctttaagatgaaagcctacagtcataatgacagagtcagactctctcattatttaaatcccagacgaattcaagatgtaatctgcacaggggctgattgatttgacatgctaccagatgagtacaccttcaaggaaatcattggtcaaatggggccgataccccattcctattctgcagctcatcttactgcttatctactggaaaatgct

SEQ ID NO: 27117 - DNA, 371 bp, Glycine max
  modified_base (248)..(248): a, c, g, t, unknown, or other
  modified_base (343)..(343): a, c, g, t, unknown, or other
ggaagaggaaaaactagaaaagatcccaacagtgaggagccgagcgattttgtttaccttccaagagatgaagcatttggtcacttgaagtcatcagattttctcgcttatggaatcaaatctgtatcccaagatgtcttgcctgtcttgactgatgcattcgatggaaatattttgagccttgagtttgataattttgctgaagtgcacaaactctatgaaggtggagttacactacctacaaactntcttagcaagatcgcccctataccagtgatcaaggaaatttttcgaactgatggcgaacagtttcctcaagtatccaccacctaaagtgatgcangttgataagtctgcatggatgactgatg

SEQ ID NO: 27118 - DNA, 357 bp, Glycine max
atcgacctttcctttaacaacctctccggccccataccaagctcgcttggtaaactgcctaaactcgcgtatctagatttgagccgcaacaagctcacgggctcaattccggcctcatttggatccttccaaaagcccgggccggctattatgctctctaaaaaccagctttcagggcgccttcctgcttctttggccaacttagactcggacaggatagacttgtcaaggaacaagctcgaaggcgatgcctccatgcttttcgggagcaataaaaggacgtggtctcttgacctttcaaggaacaatttcgcgtttgatctatctcgcgtggagattccccacaagaccctggca

SEQ ID NO: 27119 - DNA, 399 bp, Glycine max
  modified_base (303)..(303): a, c, g, t, unknown, or other
gaaaataattggaaaaaagcacaaccaaaatgaacatatatataaaaaacgactcaggtttgaacgcatctgaatgagaacggagaataacataccaaatagtagagcaattttcgattttgcaagctattgcacgacactaaaggaggaatcacggtgcgtacaaacgggtggaggcgctctctctcacacacacgtttggcaagcacgagcagtctgaactcaatgattgggtgctctaagtagaactcaacatggccattgatttctggcccaataagaagacatttggatatgcacctnctaactttgtatcttgcaactcccattttatttgtgtggataaaaatatctctttcagtaggaatctccattccgaaaggtattttttaccttttg

SEQ ID NO: 27120 - DNA, 196 bp, Glycine max
gtagatagttgggaaatagcgcgattaattggtacatatatgtcagaagacggctcaggtaatgatctgcatgcgagtgagagcaagtggtagcatagcaaatagcacatcatttcttagacgctcaagctatagcacgatacttatagaggaatcaaggtccgtacaaatcagaggtggcgctctctctcacaca

SEQ ID NO: 27121 - DNA, 392 bp, Glycine max
  modified_base (362)..(362): a, c, g, t, unknown, or other
gatctttatgagaaagaagggcagagtccatggtatgataatctcggcagacctgttacagaccttcttcctcttatagcaagtggtgtcagaggcgtcactagcaaccctgcgatttttcagaaagctatctcatcatcgaatgcttacaatgatcagttcagggaacttgtgcaagcagggaaagacattgaaagtgcatattgggaacttgtagtgaaggatatccaagatgcttgcaaattatttgaaccaatctatgatcaaacagatggtggtgatggctatgtttctgctgaagtatctcccaggctcgctgatgacactgagggaaccatagaagctgcaaaatggcttcatanagtggttgatcgcccaatgtgtatattaag

SEQ ID NO: 27122 - DNA, 448 bp, Glycine max
  modified_base (417)..(417): a, c, g, t, unknown, or other
ggtgtgtgtttgtgttgggaggattgggattgggatgggaatcagcgaccccatgagacctcagagaacgtcgatccacgccgtcacgacatgggtgaggcgacagcccccaaaggtgaaggcttttctcgccgtcgtttccggcatggcggccctcgtcctccttcgcttcatcgtccacgatcacgacaacctcttcgtcgctgccgaggctgtccactccctcggaatttccgtcctcatctacaagctcatgaaggagaggacatgtgctgggttatcactcaaatcccaggaattaacggctatctttttagctgttacgctgtactgcagttttgtcatggaatatgatatccacaccttacttgatttcgctactttcgtaacaacgctctgggttatatacatgattcngtttaagctgaaagctagctacatggaagag

SEQ ID NO: 27123 - DNA, 442 bp, Glycine max
ggtagacgactgcgaagtgcgaagttgttgaaaacgcgacaggggaaagcgcaaagcatggacaacaaaaccgatttttcaactcctcttctccccacaagctacggtcccgttgactctcaggggaaaggccataccggaccttcttcttcttcttcttctttttcttccataccaactactcttatactcactaccctcgtcgctgtttttggttcttacgtttttggctccgctattgggtattcatcacctactcaagctagaatcatgcgtgacctcaatctcggagtggcccagtactcaatttttggttcaatattgacgattggagcgatgattggtgccgttgtgagtggtagaatagcagattatgctggtcgtcgagttgccatgggattctcccaggttttctgcatcttgggatggcttgccataacat

SEQ ID NO: 27124 - DNA, 416 bp, Glycine max
tggggtgttcgaggtagccattgatattctggtaatgactgtggtgttcaaaaacacaaaccagttagaggaaagtatggattccacttatgacaggaaggctgaagtgaaagcctttgatgattcaaaagctggtgttaaaggtcttgtagagtctggattgacaaagatccctcgcatgttccattctggcaggttggatatcattgaaacctcagtcagtgactctaaaatcggtattcccatcatagacgctcaaaatattcactcctatcctgctcttcattcaaaatgaattggcaaagttcgaaatgcatgccctgactggggatttttccaggggaataatcatggaattcctatcagtgtggtggatgaggataatgattgaattcgtagattcaatgacaagacac

SEQ ID NO: 27125 - DNA, 387 bp, Glycine max
ggcgctaggggaagagagactctctctgctcttccgtctacacgtttagagagagaaagtgtgtctcatttttcaatcttgcccgcatctttttgcgatttctcatttttctcctgttcctttcctttccgtttctctgctactacttccaactccttccattctcaactttctttcaatctctagggtttaattcgccactcatcgaatggaacctcgggttgcgaacaagttccgtcttggccgcaagattggtagcggatccttcggcgagatctatctcggtacgaatactcagacaaatgaagaggttgcagttaagctcgaaaatgtcaaaactaagcattctcaattgttgtacgaatcaaagttgtataaaatacttca

SEQ ID NO: 27126 - DNA, 356 bp, Glycine max
ggacacaaccaattgcattattagagggataagcctcaaccttgcaacccaacacaaccaaaattcgctacttgttaagggctgcactataccagaatgtctcagggaagaggcagtgcatctttgcctattgtggtcactgtggtttcactactgtgccttttggaacgtgctaacgcagcaacttactccgttggaggacctgtgggatggaccttcaacactaatgcttggcccaatggaaaaagaatcagagctggtgatatcctaatcttcaactatgactcaacgacccacaatgtggttgctgtggacagaagtggatacaacagctgcaagacaccatggggtgctaa

SEQ ID NO: 27127 - DNA, 438 bp, Glycine max
gacgaaaaaaatagacacaaatcaaatgtaatcaggtgagatcacgatcccggcgtttgttgcagtccaaacgcatctgtcgtgtctggcgcgcactctctgtttattattagggttttgttttaaatctcttttttattttaccacccaaaattcccatctctctccccagtccaggcttagaaatggcacgctctctctgttctgcaagtggaatctctaatttttagggtttcgtttcgggaatttctcatttccttcaataatgaccgaattgcactctcatgacaatgccgcggttgctactgattccaagccggaggtttcttcgacggaagaatttagggttagtgtttgctccgacgctaacacatcatcattcaccgtcgataccgataagtttcacggtttcgatagcaaatcgctgttaccggaatt

SEQ ID NO: 27128 - DNA, 402 bp, Glycine max
ggcacaagtgagtttgttgatcgagataactagaaacagtgtgatgaaaatgaaagtccctgttttcttcgttgctacaattttggtagcatggcaatgccatgcgtacgatatgttccctctccgaatgaacactggctatggtgcccgtactccggaggtgaaatgcgcaagttggaggcttgctgtggaagcacacaacatctttggctttgagaccattcctgaagagtgcgttgaagcaacaaaggaatacatccatggcgaacaatatagatcagactccaaaacagttaaccaacaagcttacttttatgccagagacctcgaagtccatcccaaggacacatttgtgttcagtatagatggcaccgtactctctaatattccatactacaaaaa

SEQ ID NO: 27129 - DNA, 385 bp, Glycine max
  modified_base (363)..(363): a, c, g, t, unknown, or other
  modified_base (381)..(381): a, c, g, t, unknown, or other
ggaagcgtgaaagaaagataatgggtgcttattgcagcggatacgtttcgttgccaccatcctacgacgtcgcttcaggagaagatcccagggtctgcaagcacgttcgcgacaacgtccatggcaacatttatctcgattccctcagtttgaagttcattgacactgagcagtttcagaggcttcgcgagttgaaacaactaggttttacgaacatggtttatccaggtgctgtgcattccagatttgagcattctcttggtgtgtattggcttgccagtcaatgtgtggaaaagcttaaaacttatcaaggcttggagcttggtataaatagatttgatattcaaacagtgaaacttgcangacttctgcatgatgtgngaca

SEQ ID NO: 27130 - DNA, 294 bp, Glycine max
atggtgagaagtgcaagaagaggaagaagttgagttgagttgaggttggagctgaaagaaaattgagtgagaattcaatgacacagaatctgaagcataccgtggatttggaatgcagtgataatagcaggccgtcaaagatatcaaaaatcgagtatccgagtgacagtgacattgacgaagaagaagaaggaatgagccaaaaccctatgaatgggattcagcgctatttggttgcaatcgagtatattgggactctcttctccggttctcagaagcagctcaatgtccgta

SEQ ID NO: 27131 - DNA, 398 bp, Glycine max
  modified_base (344)..(344): a, c, g, t, unknown, or other
ggaactaatgggctcctaacgtgttgcatacgccgtagcagcatttttgggcctggtgataggctgttggtgccttccctagttgatgctgccagaaaagggaagtctaagttcattattggtgatggcaataatgtttatgatttcacatatgttgaaaatgtggctcatgcccatatatgtgctgatcgagctctagtttcagaaggaccaatttcagaaaaagctgcaggagaggcatatttcataacaaatatggagtctatgaaattttgggagttcgtgtcagtggtagtggaaggtcttgggtatgaagggccaagaataaagatccctacctttgntatcatgccaattgcacatttggtggagtggatatataggctactaagcccata

SEQ ID NO: 27132 - DNA, 343 bp, Glycine max
ggagatggatgtgagtaggagaagacttggagttagatgcagtgtggttgcagggtcagtgtgggagagcagaatgaagagtgatgaagttggtggtggagttaaggtcttcactggagaacaaagtgctgaagaaggaggcaatggtggcacctgcagattgaagagaagccaaattgggagtgtggttgccactggaaagagaaaaacttggaaatcagaagggttagaaaacaaccatattcaaatagccataggaaaatcagaaccccataagaatggtggtaatagtagtagtagtcagcaatgcaagggatctaacatatcttctgattcaatcaag

SEQ ID NO: 27133 - DNA, 428 bp, Glycine max
gacaacttttaccagaatcatcgacggtatgttaaaagccgaaatgatgatcagctgagggattctggaaaagcaagctcagtaagtggttgtgaacctgaaaataatgtaaatggaatggcaattttaccttgcggtcttatagcttggagcttgttcaatgatacgtacagcttctcacgcaacagcaataatttaacagtgaacaagacaggcatctcatggaagagtgacagggaccacaaatttggaagtgatgtttttcctaaaaatttccaaaatggtcctataataagtggtggtggcctcgatgaaaatgtacctttgagtctgcatgaggatcttattgtttggaatcgaactgctgctttgccaacttttaggaagttgtatggaaagattgaggtggatctaaaaaaaggcgatgt

SEQ ID NO: 27134 - DNA, 400 bp, Glycine max
  modified_base (331)..(331): a, c, g, t, unknown, or other
gcaccaactagggagcttgctcagcaaattgaaaaggttatgcgggcactcggagattatcttggtgtgaaggtgcacgcatgtgtgggaggtaccagtgttcgtgaagaccaacgcattctatcaagtggtgttcatgttgttgttggtactcctggtcgtgtatttgatatgctgcgcagacagtcacttcggccagactatatcaagatgtttgtattggatgaggctgatgaaatgctttcccgtggttttaaagatcagatctatgatatattccagttgcttccatctaagattcaagtgggagttttctctgctacaatgcctnccgaggcacttgagatcacaaggaagttcatgaacaaacctgtgaggatccttgtgaagcgtgatgagc

SEQ ID NO: 27135 - DNA, 314 bp, Glycine max
gacacaccgaatggggacttgagacaatgccagcagtgctggtgcttctgagtataatccttcggctcgcagcgctacggtcaaatccatataatcaaaagatgcagcttacaacatgacacttaactttaagaatcctgtgaatgactatcatgctgccaaagacagcacagattgccatgaattatacgcagacattgttctagctctttgcaaacttgttgatcgtaagaattataccactgactgacgaccagttagactattgtacagctaaaatactaggcattcagctgcatttatatgacgcttgc

SEQ ID NO: 27136 - DNA, 385 bp, Glycine max
  modified_base (272)..(272): a, c, g, t, unknown, or other
ggacacagagagcatagtaatacttactgagtgcttgcagttgctgcgtcgcaaggtaccggcggcgacggagagctatcttctcaatttccgatcactgcattggttctgttgacgagggttttgttctacttgacttgcatacttgatggcgtcaaagttgcagaagttgcagtccgcagcatgtcaagcatctcaatttgtatccagtcgtggaactaactactacaggcaattgctggaacagaacaagcaacacattcaggagcctnctacagtagagaaatgcaacctgcttgcaaagcaattgttttacacccgccttgctagtattccgggtcgtaatgagtccttttggaaggaacttgattatgtcaagaattta

SEQ ID NO: 27137 - DNA, 261 bp, Glycine max
tgggaagggtttcaagttattgttagcaaggaaagattgggagtgaaataactgaaaagaagaaaaaatgccgtgcctcaaccttagcaccaacgtgtccctcgaatgcgtctacacctcttgcattctcgccgaagccactctgcttcgtcgccagcataatcggcaaacccgaagcctatgtgatgattgtactgaaaggatcagtacccataacttttggtgggaattaaccgccagcagcttattgagaatttgttt

SEQ ID NO: 27138 - DNA, 314 bp, Glycine max
gatccacacgctcacaataacacactgtcaccgttccgttccgttttgctctgttttttttttctttctttcaaatccccgcttcgtggaaatcccgaaccagaaaccatgcttcttcgaaccgctgctgcttctgcttcgtccctcttcctcttcagcccgaacgccgaaccttcccgttcggttcccgctcgtggattggtggttcgcgcagcgaaaggatccacgaaccaccgcgccctgaccggagtgatttttgaaccgttcgaagaggtgaagaaggagctcgatctcgttcccaccgttccgcaagc

SEQ ID NO: 27139 - DNA, 444 bp, Glycine max
tataagggagagttttgtcggctactggttggatgcatgatcagagactcgtggaggtttcaagtggcttcgtgaaggtgctgcaacttccttggagatggggaatgaagtatttctgggacacccttttggatgcagatcttgagagtgatgctcttggttggcagtacatatctggcactctccctgatggtcgtgaacttgaccgaatagataatccacagtttgaggggtacaaatgtgacccaaatggagaatatgtgcgacgatggcttcctgaacttgctagattaccaactgaatggatacaccatccatggaatgcaccggaatctgtactccaagctgcttgaattgaacttggttcaaattatcctctttccattgtgggaatagattccgcaataagtttaacttcaagaagcacttattcaaatgtggcaa

SEQ ID NO: 27140 - DNA, 398 bp, Glycine max
gctggacaatgggcaaagggcttgggtacttgcactttggattggtgtgatgttaggtctttatgcctataaatttgtgcaatataggagaaaagcagcctatgaggtgatgggccattgtgtatgcatggcaaaaggtgcagccgagacacttaaattgaacatggctcttatcttgttacctgtttgccgcaacaccatcacctggctgaagaataagaccaagttaggtgttgtagttcctttggatgacaacatcaacttccacaaagtgatagctgtggcaatagcagttgctgttgctgtacattccatctatcatcttacttgtgattttactcgccttcttcatgcaagtgatgaaaagtacaagctgatgcaaccttttttcggagaca

SEQ ID NO: 27141 - DNA, 426 bp, Glycine max
gagtgctatgaggatattgctgctggaagtgagattcgcagtgttgtcgtggctgggcggcgcttttatgagaaagagggtctgcctgcatttcccatgggtaaaattgatcagacccggatgtggaaggttggtgagcgtgtccgttctacaaggccagctggtgatctaggtccattatacccatttactgctggggtctacgtggcattgatgatggcccagattgagatcctgaagaagaaggggcattcttactctgaaattattaacgagagtgtcattgagtctgttgattctttgaatcctttcatgcatgctcgtggtgtttcattcatggttgataactgttcaaccacggcaaggttgggttcaaggaaatgggctccccgatttgattacatcctaacccagcaggccttggtg

SEQ ID NO: 27142 - DNA, 288 bp, Glycine max
ggatgtagcgatctcttatagcgctgaaaatcgcgtgagaggagtaaatcgactaatcatacattaataacaggttctgtatgcattactgacagacaatatagatctaaccccattattgaacatcgtagtgagagttaggacttcacatatagagaatatactactcatgctgttctcactgattgttgagctctacctgcaaaaggacctagtccagattaagatgctgatgaagaatgtctaatcgcacatgtcaagtttttgacaaactgatattgactgtat

SEQ ID NO: 27143 - DNA, 448 bp, Glycine max
gagtgtgtgagttcattaacatatacaaattctctgtgttgtgttgtgtacttgtgttaattgtgttgttgttgtaggaaatttaagtgaagagagaatgatgatgaagtctgctatgtgtgcattggtgcttgtggcactggttgtggttgaagtggggcccatggctgaggctgcggtgacttgcaacccaacacagttgactccttgtcttccggcaattaattcaggttctgcaccttcgagtgcttgttgccagaagctgaaggagcaaaagccatgcttctgtggctacctcaaaaaccctagcttgaagcagtatgttaactctcctaatgccaaaaaaaccgttagttcttgtggtattgcctatccaacttgttaagcacctcttatatatatatatataaaatgtgtgaacaatatatatatattgattaaaaaatat

SEQ ID NO: 27144 - DNA, 417 bp, Glycine max
ggcgtaaaaattggagcaattggtggaactcgctgggaacattcaaaatccaaaggagagagccgacagagtggggtcaagtgtgaatgaaaatgctgaaactgaaaccgacatatgcaccctaaattgcttgtgtcagtcaacacttgcaagtgagaaagacaaaacactcaaacagggtgatgttatgtgccactcccactactactgctctgctgtgtctcactctatctgtctctttgaatactgtgccaaaattccacacacaaacaaacagataacataacagaagaagaactcaagagatggagagtggcggtaatgggaagagagcacatgaagaagcggggccttcatctgggattgatggaaggaaacttgaaatgactgaaaaagcgagtgatgatgataaagaag

SEQ ID NO: 27145 - DNA, 422 bp, Glycine max
gagatacggagttacattgggaatgcgcggactccggccaccgcgacaatcgtgttcaaggggacaaggctaggggttaggccagcacctgtggtggcatcattttcagcaagagggccaaaccctgagtccccagagattttgaagcctgatgttatagctccaggattgaacattcttgcagcttggcctgatcatgttggaccctctggggtaccctctgatgggcgtaagactgagtttaacatcctctctgggacttcaatggcttgtcctcatgtttctggtttggctgctttgttgaaagcagcacatcctgattggagtcctgctgccattaggtctggcttgatgaccactggttacactggggacaacaagggggatcccatgttggatgagtccactgggaatgtttcatc

SEQ ID NO: 27146 - DNA, 418 bp, Glycine max
gcaaccaaacaacagatattcatggggttctttatgctctcctttctcttccttcttcctgtttcatctgccactgcttgtgatcgctgcttgtatcaatccaaggcttcctatttctccaaagcttctgctctttcatctggggcatgtgggtatggctctttggcactagacataagtggtggacaccttgcagctggtgtggattctctcttcaaaaatggagcacgttgtggtgcctgctttcagataagatgcaagaacccaactctatgtagcatagaacgtaccaaagtggtattgactgatcttaatcacaacaatcaaactgattttgtgctaagcagcatagcctttgcggtcatggctcataagggtatgggccaacaaatactgaagcttggcattgctgagattg

SEQ ID NO: 27147 - DNA, 291 bp, Glycine max
gacccgaaggaatgaggaccacatggagcagataacagcgtatcccattcctataatgaggagccacaagaatgccagcatggactaccaactcaaccagaatccaccactatattattgagtctcggacttggattgcatcccttctcgtgattggaaccaaaaggaagacgtaaattaaattatgcatccatataacacgacaaacaagtgccctgatatgtagaacagcacatgggtatggcagtgcaagccaaggtacgggcatgcaacccaattcgaataccacaa

SEQ ID NO: 27148 - DNA, 440 bp, Glycine max
gacactaaacaagttaaaagaagagcgtcactgagcgtaacaaagcaaccctatgtcgaaggtggtttgtgtcaccggagccagcggcgccatcggatcatgggtggtcctactcctcctccagcgtggttacaccgtccatgccaccgtccaagatatcaaggatgaaaatgaggcgaaacatttggaggaaatggaaggagcaaagagtcatctccatttttttgaaatggatcttcttgacatcgactccattgccgctgccataaagggttgttccggcgtaatccaccttgcatgtcctaacatcattggtcaagtcgaagatcccgagaaacagatattggaaccggcgataaaaggaacggttaatgtgttgaaggcggcgaaggaagcatgggtggagcgcgtggtggcgacttcatcgatttcgtcgatta

SEQ ID NO: 27149 - DNA, 340 bp, Glycine max
gccttccattgtgctttatacctgaggaggtaaccagagccgttcacacccccctctctgttcttcaaaacgcaccttattcttccccctattttgcatcgcatttgttcttgaatctctttggtattcctcctcagagcctctaatcagagagagagagagagagaaagtgagagatggagagaatgttccctcccaagaagccctctactatgaattcccatgacagacccatgtgtgttcaaggagactcgggtcttgtcctcaccactgaccctaaacctcgccttcgttggactgttgagctccatgaacgctttgttgatgcctgtactcagct

SEQ ID NO: 27150 - DNA, 430 bp, Glycine max
ggggttaaggaagataaactatgcgcgagagtgaagcgagagaggggcacagttgagtagcaaagcaatgagcgcagtgggtgggtttactctcactctcagtcccatcaatttgaaactcccccttctcccttccaatcgcctctttaaccgcactcccttcaaatcttccatttccttctccctacgctccaacgacgagcaacaacccctcggcctcgacatcgccgcactaaggtaccgtactactctctctctctatttcactcatctcgttcgttgcaagcatagcatttatggattcgattgttcaagagcactttggttacgggaacaggtcagctttcgtgaagctcattgatgggaaatagatcatggtcggagttgtgttcagactctggcccgtcaaatggcccaggattctgaactc

SEQ ID NO: 27151 - DNA, 408 bp, Glycine max
ggaagtaggcgaggatcgttcacataaaatatcgagagagatcgacgagaaaaagctaagcgaacaatgtggagctccaaaacgacgatgatgctggccattgcagccattgctctgatgatgtttctctcatcggcttcagccgacgacgtcgttgcactcacagaggaaaccttcgaaaacgaggttggcaaggatcgcgccgctctcgttgagttttacgctccctggtgtggacactgtaaaaggcttgccccggagtacgaacagctcggagcgagttttaagaaaacgaagtccgttttgattgccaaggtggactgtgatgaacataaaagcgtttgcggtaaatatggggtatctggttaccctaccattcaatggtttcctaagggatctctagaacct

SEQ ID NO: 27152 - DNA, 283 bp, Glycine max
ggcacacaacatttttagtgaaactgaaatggggacggagatcgtgaaatgggggagctttacgcgttggacttctatggaatcatatttgatatctgcattgaaagctttctttttgctatgaaggcttccaaagtgtgatggcctgatttgtttgatgtggtggatgtaacctcagaaaattgggttattgaccatatgcacactttgcgaccagttttggatacttggtatggacactgtttacttgttagactggtgcttgaaagcatagcaccaacca

SEQ ID NO: 27153 - DNA, 442 bp, Glycine max
  modified_base (410)..(410): a, c, g, t, unknown, or other
  modified_base (422)..(422): a, c, g, t, unknown, or other
gacacatacaaagcttcagagtctttactctctctgtctctctcgctctctctctctgcgtaaatcgcgtcttccaccaatcagcttgcttgcttgctacctgatctgtcaatactgcgtcgtttaggaccaatccctcaccctccaaggatatggcaatgccggagacaatccctcccactactcccagtgctcaagttgtcggcaatgcctttgtggagcaatattatcacattctgcatcaatccccagaattggtgcacagattttatcaggattcaagtttcttaaccagatcagacagcaatggtgtgatgacaactgttgcaactgtacaagatatccatgaaaagattatttcccttgaatatgaagattatacagcagaaataaaaactgcagacgctcangagtcacataanggaagtgtgatagttttagt

SEQ ID NO: 27154 - DNA, 438 bp, Glycine max
gaatctgagaagcaatggtcaaaagcagctcaaatgctcagtggtattgaccttgattcaggaatgagggtgattgatgatggattcaggctgtcaaagtgtgtccaaattgcttgtttatatcttgaggacgatgatgctgtcaatgctgaagcttttattaataaagcatcattcttggtcagcaacagtcagcatgaagttctgaatttaaagtacaaggtttgctatgcaaggattttggatttgaagaggaagtttttggaagcagcattacgatattatgatatatctcaaattgagaaaaggcaaataggagacgaggagattaatgaggaagcacttgaacaagctttatctgctgctgttacatgcacaatattggcagctgcaggacctcaacgttcccgtgttcttgccactttgtacaaggatgag

SEQ ID NO: 27155 - DNA, 426 bp, Glycine max
gacacaaaaataagtgcgtccaacggaatataaagcatgagaaaaatgccctcccctctggtgtctctgatgcggttgggagtggggacagggagggtttgccattaggtaaaggtaaagcagcacaagtgtcattcatttctctgcaatggatatggatctctagcattcgcattcatcccctccttttctccatgcctccgtcttcacccgttattttcttgtcctgaatgcattcccagaatgttgtagagatggaaggcaagacagaaattcgtatgacatcagctgctgcctttgttgaaggggggattcaagaatcctgtgatgatgcttgcagcatatgccttgaggagttttgtgcaagtgatccttcgacggtcactacctgcaagcatgagtttcacctgcagtgcattctcgaat

SEQ ID NO: 27156 - DNA, 225 bp, Glycine max
taatgggagatacggagttgcggggcgaatgcaccgacttctgtcatcgtgacaatcgagctcaatggtacacggctatgggataggccatcacctgtaatggcatcatttttagcaagatggccactctcagagtccccagagattttgaagcctggtgatatagctacaatattgaacattcatacagcttgtactgatcatgtccgacactgtcccataccc

SEQ ID NO: 27157 - DNA, 406 bp, Glycine max
gattgctgatagatgttacttacagaggcgtgtacggcaatgtctcaagaggtcctgcagttcgtgcattacgtgctcagaccgataaaagggactatgccattcaaatgaaaagtgtagtagaaagcactccaaacctttctattcgagaggctatggtcacagatattttactagggaagaatgataacgtggaaggtgtttgtacattctttggaatgaaattctatgctccgtctgttattctcaccacagggacttttatgagtggtaaaatttgggtcggtagaacttctatgcctgcaggaagagcttgcgagtctgcttcacttggattaacagaaaacttacaacgacttggttttgaaactgatcggttgaaaactggaaccccttgccgagtgga

SEQ ID NO: 27158 - DNA, 389 bp, Glycine max
gggtttaacagcaaacccaattgtcaaggtctccggcgttgtaggaactaatgtacttgcccttggtactgatgtttcttttgacaccaagattggggagttaactaaattcaatgctggattgaacttcaccaaagatgatttggttgcctcattgactgtgaataacaaaggtgattccctgaatgcttcatactaccatacagtcaatcgcttgaccaacacagctgttggtgctgaggtaactcaccaattctcaaccaatgagaacaccctcacacttggcacccagcatgcattggatccattgacgactgtgaaggctcgtgtcaacaacttgggcaaggcaaatgctctcatccagcacgagtggcgtcccagatcgttct

SEQ ID NO: 27159 - DNA, 446 bp, Glycine max
  modified_base (407)..(407): a, c, g, t, unknown, or other
ggagttgaacaagaaagaaaagaaaagatgatgaggaggagagtggacaggaagaaaaggattgaagttgttgctgtgagaaagagaaagagtgaaatcggagtttgggaaggaattgcaatcaatggatgtgataaagacgcagcaaatctcatctcgaccaatctagaaggtggtggttcaccctctcgtgcttctcagcatcgtcgacaactacaacagagtcgccaaagacactctcaagcgcgtcgtcggcgtcttgctcggctcctccttcaaaggcaccgtcgacgtcaccaacagctacgccgtgccctttgaagaagatgacatggatcctagcatctggtttcttgaccacaattaccatgaatctatgttatccatgtttaaaagaataaatgcanaggatcatgttgtggggtggtatagcactggtccaaagc

SEQ ID NO: 27160 - DNA, 291 bp, Glycine max
gggtaaagcattgatgaagcgtgtcatgcaaacctggctttcagcaagtagtgctctattggaaatgatgatatttcatctacccttttcattaacagcccagaagtatcgtgtggagaacttgtatgaaggtcctcttgatgatcaatatgcttctgctatcagaaattgtgatcctgaaagtgctctgatgctctatgtctccaagatgattccagcatctgataaggggagattttttgcctttggccgtgtattctctggcagggtttcaactggtttgaaggtgag

SEQ ID NO: 27161 - DNA, 275 bp, Glycine max
gaagaagaagaagaaaaagctcccgattccgctaaacccgttactgaatctggcaagaagggttatgttggcatccatagttcgggatttcgagacttactgttgaaaccagagcttcttcgagccattgtagattcaggatttgagcatccttcagaagtgcaacacgaatgcatacctcaagcaatcttaagaatggatgtcatttggcaagcgaaatctgggatgggaaagactgctgttttgttttgtctacactttagcaagatgatcct

SEQ ID NO: 27162 - DNA, 424 bp, Glycine max
ggattcggcaaagttgatttcaattcaatttgaggtccccctttttcttctccacgtttgtgcctgcaacctcaaataccgattagggttcatgctacactgaacttggtttcggtgttccaagttagttagaggcattgttgcttgcatagatctctgatctgaaaatgagtgcgtcgaggttcattaagtgcgtcaccgtcggcgacggtgctgtcggcaaaacctgcttgttgatttcctacaccagcaacacttttcccacggactatgtgcccaccgtttttgacaatttcagtgctaatgtggtggtggatggaagcaccgtaaacctaggattgtgggatacagcttgtcaggaggattacaatagattaagacccttgagctatcgaggagctgatgtcttcatacttgccttttc

SEQ ID NO: 27163 - DNA, 312 bp, Glycine max
tcataatgaaatgatccagagcaattccactgaggctgttttgtctgaagtgttcacctcttctgggtcgacagcttctacaattgccaagacatcagagactgctctccttgatgaaaaatcattattagcttgtattgtacgcactattccagctggtggccgaattcgaattagttcaacgctccctaacaggctgggcaagatgcttgcacctctacattggcatgattacaaaaagaagtatgggaagctggatgactttgtagctagccatcctgaattatttttgattgaaggtgactatattca

SEQ ID NO: 27164 - DNA, 423 bp, Glycine max
ggtggtaacgttgttgtgcgtgcggttcatcatgcacaattccacatcctgataactatacaacacaagcacgaacacccccttaccaaaacggcacttgtttattgtcgtttagatcccatggatcacacgcctgctgcgcaacgtcgtctcaaagccattcacgcccacctcaccgccaccgccgatgaatctccctcccacctccgatccaatcccaccgccggcgagttcttctccgctttgatctttacttctgggcagaacaagggtatagtgttgtactcccagagaaattacaaacaggaaagtggaacgtttacagatctgtacgatctcctctgcagctggtgaccaagtttactaatcatcctgaaattggtaccctgcacgataattttgtgcgctcagttgacacctttc

SEQ ID NO: 27165 - DNA, 200 bp, Glycine max
ggacaacataacatacaggaggtgaacaacgagcgagtgagtgatttataacccccggagtggcgaacgagaaccgcttatcaggcttaagaatattaagaggggcttgtacttgtgcatattgaacaacaacgatttcaaatggtgtatagagcatttacatcgaaacggagacaaactctacattgggcacatgatgc

SEQ ID NO: 27166 - DNA, 339 bp, Glycine max
ggaccacataggattcatcattttccaaacgagcatctgcgtagtttcttaagtcaagagaagaagtgaagtgctgcttcaatggcttcaagtcaggaagaggtgatccttttgggggttattggaagcccatttctgcacagggtgcagattgctctcaaattgaagggagttgaatacaaatatttggaagatgatttgaacaacaagagtgatttgctcctcaagtataacccagtttataaaatgattccagtgtttgttcacaatgaaaagcccatatccgagtcccttgtgattgttgagtacatcgatgacacatggaaaaacaaccccatc

SEQ ID NO: 27167 - DNA, 347 bp, Glycine max
ggtgcgcattttgtgaaaaaaaataaaaaatggggataggggtactatttgttgggtttttcttgctatcttgtgttgtgtgtgtgaagggtgtggagccaaaagcctcacccacttgtacatttccggcagtttacaactttggggactcaaactcagacactggaggcatatcagcttcatttgtgccaattcctgcaccttatggcgagggcttctttcacaagccttctggaagggactgtgatggccgtctcattgtagattccatagctgagaagctaaacttgccatacttaagtgcttatctgaattcccttggaaccaattaccggcatggggcaaat

SEQ ID NO: 27168 - DNA, 298 bp, Glycine max
ggagagaagcaagtgaaacactcaatcacctaggctaaaatcgtctcgtcttcattccttttttttccggtttagagaattgaaaagatttcattgataattgagcaaacacaatgagtgctccacctcatcatgatgatgacgacgacaacgaagaagttttccttgatgagtctgacatcatccatgaagttgccatggataatgaagatcttcctgacgctgatgatgattctgaactcctcgaagaggatgaggatggtgattttgtgcacaaattcactgctcataccgggga

SEQ ID NO: 27169 - DNA, 276 bp, Glycine max
  modified_base (251)..(251): a, c, g, t, unknown, or other
acacacaagttcattcacagagagatagaatcactgaagagcttcaatggcggtttctctctctgttactcctctttctctctccaattcttctccttctctatcttccaagccaaagtttccatctttgtgctttctctctggcaacaacaccttgagggtcaaatgcccaaaaccttcgcactcaacaactgttgttcatgttgctccaaaagcgttggattcttcacctgatcccttagacccacctncagaaacccttgatgatgactctga

SEQ ID NO: 27170 - DNA, 209 bp, Glycine max
  modified_base (15)..(15): a, c, g, t, unknown, or other
gggcttacgtagcanattcttatgttgggtcgattctggactttcactctctcatctctcggttatgtcttggtaaactataaactcttatctctttccaacctaaaatcaagaatctaattctctatattttctccatgaaaaaatccgcctaccatcatcatctttttattcccagaggaagaaaccttgctttttatatataaaac

SEQ ID NO: 27171 - DNA, 109 bp, Glycine max
gatccccaatcagagagaaaagttagggttcacaacttttccttttccttttgcttgccaatcttaatcaaataatcaatcatccattcattattcatatgtcgtccgc

SEQ ID NO: 27172 - DNA, 367 bp, Glycine max
ggcagcgttttatagtgctcggagaatccccttgattgcaacaccaacccaactcgaagaacaccgtcgccgttcgccgccgtttcctgaagccgagtaaaattttctccgcgctactctccgagttcaacattgctcagaagaaaccaccatgtctccgaaactgctattattggcgaattagggtttgtaaattaggttttaatggcgaacgacactggttccggtcgcgtcgtcacagagaaaggactggctacgaggtcttcgagagagacattaaggaagaatgcgcttgcgagcggttccgccacgaacgccactccgaatcgcaagtcggaacggctcgagaagcggacgccgccgtcgc

SEQ ID NO: 27173 - DNA, 341 bp, Glycine max
ggagagacacgtgagatagcacagtggcagggcgtgtcaatccgagagaaagaggcaaccaacttcccattttgttatttccattttccattcccaatcgtaaaaacaacaaatcataatcagtcatagcttcggcgacttctcgatattattttttctgacagagccaccgacagagccggcggttcccgtggcggtttgagaatggccgacaagtacaacctgaagaaccccgccgtgaagcggatcctccaggaggttaaggagatgcagtccaacccttccgacgatttcatgagccttcctctcgaggaaaatatatttgagtggcaatttgcgat

SEQ ID NO: 27174 - DNA, 319 bp, Glycine max
ggcagtagtttattgaaacagattccctttgacccgtgacattttaagtggtgactactagaccaatggaatggagtgcaaagaacatttcagttacctctgctaaatgggtcactactactctgtctctgctctccctgttttggctcttgtccctgcaccaagcaagagctgcaaagttccacaatgtgagtggcttgagagggaaaaagccagttgtagtaaatgggtgcaatttgttcctgggaagttgggtggttgacacgtcttatcctctctatgactcttcaacatgccccttcattgatcccgagtttga

SEQ ID NO: 27175 - DNA, 236 bp, Glycine max
gggcaatgtgcaattcatatgcatgacaatgtatcagagagtgctaatagtcctgctgagttgataacaagatgctttaatggcattaaagttttgcaagagcaatatgaaactggaaatattgctcagcaaggagttgaattgctatatgtaactttgacaaagatatgtagttcactgcaagatgcatataatggtcaaatcgatggaattatctactgtcacgtggctactac

SEQ ID NO: 27176 - DNA, 391 bp, Glycine max
ggagagaaaaaatggccaaatcaatcaaattctttgagttgaacacaggggccaagattccttctcttgggttagggacttggcaagctgaacctggtgttgtagctgaagctctcaccacagccattcaggttggatacaggcatattgactgtgctagtgcgtataagaatcaagcagagattggttctgctcttaagaagctttttgatgatggtgtggtgaagcgtgaggacttatggatcacttccaaactctggtgttcagatcatgcaccagaagatgtgccaaaagcattggataaaacattacaggaattgcaacttgactatcttgacctctatctgatccactggccagtccgcatgaaaagtggaacatttggactcaa

SEQ ID NO: 27177 - DNA, 387 bp, Glycine max
gtgttgaaggcggcgaaggaagcaggggtggagcgcgtggtggcgacttcatcgatttcgtcgattatgccaagtcctaattggccagctgataagattaagggagaagagtgttggacggaccttgaatactgcaagcaaaaggggttgtattatcccattgcaaagactctagcagagaaagcgggttgggactttgcgaaggagacaggttttgatgttgtcatgataaaccctggtacagcattgggccctctgcttcctccaagaatcaattcaagcatggctgtgcttgttagtgttctcaaagggggcaaagagacctacgaggacttttttatgggaacggctcactttcaagacatagcattggcacatattttggca

SEQ ID NO: 27178 - DNA, 157 bp, Glycine max
ggagcgaaaataggacaatgaaaaggagattcctgtacagtgtacagggatttataggcagagatagttgcgtaatatgaacgcagctgagaagcagttgattttccgatcagaaaatctgaatcatgtcgtggcaagcgtacgtggatgatcacct

SEQ ID NO: 27179 - DNA, 359 bp, Glycine max
ggaatgaatgagttgtgtaagaaagagatccatgcaatgttgcaagtcaactgagtagtcctgctatgctctgctctgctctcccaaacatctctgacacaacacacaccaaaatgcataattgaaatgacccttttgcccttccttccttccctacttctcctttgactctccgcaacgccaccgcccacaatggacggcaccaccaactccggcgaaccccgctccagttcggtgctccaaaatactggggcatccgaggatccgaatcgaagcgggtcgggtcagaattcgatggcgaggtacaagctgatgtcaccggcgaagcttccgatctcgaggtcgccgtgcatcgcgat

SEQ ID NO: 27180 - DNA, 276 bp, Glycine max
gggaggaaagtggtaaaggaacatggaagcacgctgctttccatgttgcccccactattgccacccctgctgcttatgcccctttgcccttcgctcttgcttctctcggttggcctcttggtgtgactagtctggtgagtgcaacactagtcacctggtactctagctttttgatcgcttcgcttgggaaatggaacggggagaagcaccttacctatagacatcttgcacataatattttcggattctgggggtactggtctattgccttttttc

SEQ ID NO: 27181 - DNA, 430 bp, Glycine max
gatatagatgatgtgtcttctaaatgagtttgctattggtttgtgtacaaggataaattactgcatggtcattgtctaggacaatctctacgtgacacataatcacatttatgaaagaaaaaaaaaagttaatattgtgttacatgaagaagagtcaaaatcatatgattccagaccatgtaataatttctccaaacacatgaatgttggctttgtcaagagccccatcatttgcttcctaaatcctgtggttatgttttattttgtttttaagcttgggccataatttgcttcagcacccaactctgaattttccttcaatctcaattgtactggttcacatttttttcttctgtatcaataccttgagggagtggatatctactccattagttattgccgggtggatcttgttgatgtaattattact

SEQ ID NO: 27182 - DNA, 428 bp, Glycine max
  modified_base (321)..(321): a, c, g, t, unknown, or other
  modified_base (421)..(421): a, c, g, t, unknown, or other
ggtacacagcctcaacaaccctaacgcgtgcagagcagagagagacgcagccatggggcgaagacccgcgaggtgttataggcaaattaagaacaaaccataccccaagtcacggttttgccgtggtgttcctgatcccaagatcaggatttacgatgttggtatgaagaagaagggtgttgatgagtttcctttctgtgtccatctggttagttgggagaaggaaaacgtttctagtgaggccctggaagctgctcgtattgcttgcaacaagtacatggccaaatttgctggaaaggatgctttccacttgagagtcanggtgcacccattccatgttcttaggatcaacaagatgctttcgtgtgctggagctgataggctccaaactggaatgagaggtgcttttggaaagccacanggtactt

SEQ ID NO: 27183 - DNA, 393 bp, Glycine max
  modified_base (288)..(288): a, c, g, t, unknown, or other
ggcctcaagaaggagaacatggggtttgaggaaactgagttaaggcttggactgcctggaaacggaggcactgaagaagtgctcatcaggaagaggggtttctctgagactgaaactggtcatgaagatgagtctgccaccactgtggatttgatgcttaatctttcttctaaggaggccgcaaccactgctgctgctgctgcagatccaactgataagcacaagactttgcctaaggagaagacccttctgccagcagatcctgctaagcctccagccaagacgcangtggtgggttggccacctgtgcggtccttccggaagaacatgttggctgtgcaaaaaagcgttggagaagagagcgagaagaacaagcagccttatgcaagcttt

SEQ ID NO: 27184 - DNA, 406 bp, Glycine max
ggaggcgaaccgaacgagtgttttcaagctgcggggtgtggtctttctctccgtgacacagcacaaacaaattctcagtgttggagacttgagctcatagagaaatcatagtttgtttaatttcaattctgagcaaaggtcaacatgcaagttttttccattgaaggcgaaagtgctttgtcagttgttggtccaaggccaatggaatggtctactgttccatacaatgcccctcaagctcctgggccaaatggaaagcagcggacctcaagtttggaatcaccgatcatgttgctgtcaggtcaccagagtgctatatataccatgaagttcaatccagcaagatcagtcattgcatctggatctcatgacagggaaattttcctctggaatgtgcatggggatt

SEQ ID NO: 27185 - DNA, 362 bp, Glycine max
atacgccctagcagcatttttgggcctggtgataggctgatggagccttccctagttgatgctgccagaaaagggaagtctaagttcattattggtgatggcaataatgtttatgatttcacatatgttgaaaatgtggctcatgcccatatatgtgctgatcgagctctagtttcagaaggaccaatttcagaaaaagctgcacgagaggcatatttcataacaaatatggagtctatgaaattttgggagttcgtgtcactggtagtggaacgtcttgggtatgaagggccacaaataaagatccctaccttcgttatcatgccaattgcacatgtggtggagtggatatataggctact

SEQ ID NO: 27186 - DNA, 410 bp, Glycine max
gggatatgaagattttgtttacttcatactatcagaagaggataaatcatctgaaccaagtcttgagtactggttcaagtgcatagatttggatggaaatggagttctaacaaggaatgaactgcaatttttttatgaggagcaattgcatcggatggaatgcatggcccaagagcctgtgctctttgaggacatattgtgtcagataattgacatgattaaacctgaggatgagagtgttataactttgcgggacctgaaaggtggtaaactttcaggaagtgttttcaacatcctgttcaatctaaataagttcatggcctttgaaactcgtgacccatttttgatccgtcaggaacgtgagaacccaacattgacagagtgtgatcgatgtgctcatcgagaatata

SEQ ID NO: 27187 - DNA, 395 bp, Glycine max
gggcccgtggagcttgctgctgcaggagtgtccattgctttgttcaaccaagcttcaaggattaccatcttccctttggttagcatcacaacttccttcgtagctgaggaaaataccattgaaaaaatcaatacagaaaagaagttaagtgataaggctaagtccaaagaacaagtaatgctcgatgatcattcccttcaagacatagagaaagttgcatccaaagagaacaatgagactgagaatgtggaaatgaatgattgcaatacaagtatatgcaagtctacctctgatactagtagtagtagcagtaacaagagtgtgccaaaagatggaagggaagaagcgacacgttgcttcagcatccacagcattactttttggcacaatccttg

SEQ ID NO: 27188 - DNA, 355 bp, Glycine max
gtacgaaaattgagcctgatgacccaaatgggtacataccggagaggttaattggtgaaatagagtttcatgaagtgcatttcgcgtaccctgctaggcctaatgtggccatctttgaaaatttctccatgaaaatagaggcgggaaaatctacggcaatggtgggacaaagtgggtccgggaaatcgacgatcattggtctaatagagaggttttatgatccacttaaagggatggtgacaatagatggcatggacataaaatcgtataacctaaagtcactaaggaagcacatagcactagtgagccaagagccaacgttgttcggtgggaccataagggagaacattgcata

SEQ ID NO: 27189 - DNA, 350 bp, Glycine max
gaaggagagggagtgctgaggttgaagcgggaaacaatggcaattcccatgttgagggctgcaatgatttctcattctcaatctcaaccactcattcattccatatctgctatttatgaaaccgctaagaggaggaagagagtggtgttctcttcttcttcttcagaacttaaccctgtaattcggtgagttacacttcattttctgattctttttgtttttttggcctttcttaaacatggtttttggcttgctttctgttgctgaggttgtaagtcagaggtatcattttgtgttgggacttgcctcattccacatccaaaaaaggttaacacaggtggggaagatgc

SEQ ID NO: 27190 - DNA, 440 bp, Glycine max
  modified_base (47)..(47): a, c, g, t, unknown, or other
  modified_base (91)..(92): a, c, g, t, unknown, or other
  modified_base (144)..(145): a, c, g, t, unknown, or other
  modified_base (205)..(206): a, c, g, t, unknown, or other
ggtccggaattacccggggtcggacccaaacgcgtccgtaccggctntgtcgagaagaacgaacagaaggggggtgttgatgtgatgaagnntaatcggaatgggacaaatgggtgtacggtgtgggcggaaactgcggataannagtcgggaaactcttttttgaatgcaaagtagacgcctgagtaccttcgacttacagggnnggagggaagcttcgtagaccagcctcgcttccccgcatagcatggagggtctaaggtaagatcggaggactgaaaggaaggcataatatgagtactcgctcgctgaagaggtaatcatataaaaggcaaaggaagaagatcatgttctcgcttcccttatctgtttggcctggaagcgtatctcccgatggtcgactgaaggcttattaccgattaacctttttgctactaaag

SEQ ID NO: 27191 - DNA, 309 bp, Glycine max
ggaaaaactgtagcagaatgggaatctgcccttgaaacttataaaagaattcccagtaatgaaatcttaaagattctagaagtaagctttgatgctttggaggaagaacaaaagaatgtttttcttgacattgcttgttgcttcaaagggtataaatggacagaggtttatgatatattccgtgctctttatagtaactgcaagatgcatcatattggggtgttggttgaaaaatctctcttattaaaagttagctggcgtgataatgttgaaatgcacgacctgattcaggacatgggtagagacatt

SEQ ID NO: 27192 - DNA, 403 bp, Glycine max
ggtgcacaagtgagtttgttgatcgagataactagaaacagtgtgatgaaaatgaaggtccttgttttcttcgttgctacaattttggtagcatggcaatgccatgcgtacgatatgttccctctccgaatgaacactggctatggtgcccgtactccggaagtgaaatgcgcaagttggaggcttgctgtggaagcacacaacatctttggctttgagaccattcctgaagagtgcgttgaagcaacaaaggaatacatccatggcgaacaatatagatcagactccaaaacagttaaccaacaagcttacttttatgccagagacctcgaagtccatcccaaagacacatttgtgttcagtataaatggcaccgtactctctaataatccatactacaaaa

SEQ ID NO: 27193 - DNA, 201 bp, Glycine max
gagacacagagcgagagagaatcgtaacagaaacggtcactggaagttgtctctaccaccctctcagccatggcaacaattccccctagccgatcatcatcacacgcgtttgttgccatggcaaccttcacgactctgtttgtgtgcacggcggcggcgaaagaaaacgtgtacgaaatactccccaagtacgggctcccg

SEQ ID NO: 27194 - DNA, 238 bp, Glycine max
ggaccatagaggacatgtgccagctgttcgaccatattggtttcactttggtcttcttcaccctgttagggtttgcatcagattcccccaattcttgtttgattttgcgctttcactagtttttcttcgacatgactcaagatctcgagatgagggatcgctcaacgccttccaactctgtttctttgcctgctccatctactttgcagcatttgaaggagatagcgtctcttatcga

SEQ ID NO: 27195 - DNA, 384 bp, Glycine max
ggagaaaaacgagccaattcatcattttctctcttctctgcttcttcttgttcaaatcttaagagctgaggagaatcaatcgagagaaatatgtctggtatcgctcgtggacgccttgctgaggaacgaaagtcatggcgcaaaaaccatccacacggtttcgttgccaagcccgagactctacctgatggcaccgtaaatttgatggtctggcattgcactattcctggcaagaccgggactgattgggagggtggatatttcccactgacaatgcacttcagtgaagattaccctagcaagcctcccaagtgcaaattccctcaaggtttctttcaccctaatgtgtatccatctggaactgtttgcttgtctatacttaat

SEQ ID NO: 27196 - DNA, 384 bp, Glycine max
  modified_base (62)..(62): a, c, g, t, unknown, or other
ggagaaaaacgagccaattcatcattttctctcttctctgcttcttcttgttcaaatcttangagctgaggagaatcaatcgagagaaatatgtctggtatcgctcgtggacgccttgctgaggaacgaaagtcatggcgcaaaaaccatccacacggtttcgttgccaagcccgagactctacctgatggcaccgtaaatttgatggtctggcattgcactattcctggcaagaccgggactgattgggagggtggatatttcccactgacaatgcacttcagtgaagattaccctagcaagcctcccaagtgcaaattccctcaaggtttctttcaccctaatgtgtatccatctggaacttgttgcttgtctatacttaat

SEQ ID NO: 27197 - DNA, 403 bp, Glycine max
  modified_base (161)..(161): a, c, g, t, unknown, or other
ggaccaaggggcgtgtggttcgtgttggtctttcagtacgacgggagcgttggaaggagctcattatctggccactggtgagctcgtgagccttatcgagcaacagcttgtggattgcgatcacgtgtgtgatccagaagaatatggagcgtgtgactcangctgtaatggtgggttgatgaacaacgcatttgagtacatacttcagtctgggggagtacagaaagaaaaggactatccatacaccgggagagatggcacctgcaaatttgacaaaaccaaagttgcggctactgtatctaattacagtgtggtttcccttgatgaagaacaaattgctgcaaacctagtaaagaatggccctcttgcaggtgctatcaatgcagtttttatgcagacatat

SEQ ID NO: 27198 - DNA, 354 bp, Glycine max
  modified_base (312)..(312): a, c, g, t, unknown, or other
gacaccgagtcgcagaaaaagaaaaaagcgatcatagtttcacttcggccttatccagtttagggtttcggttctctaccctatctttcacgtatcgaaaccttaaatttacgatcaggtctgagcaatctggttggtagaacctttggtcttagtgagtcaagttttatgtctgaattagacgatcaaattcctactgccttcgatccttttgctgatgcaaatgctgatgactcgggtgctgggtcaaaggagtatgtgcatattcgtgtacagcagcgaaatggtaggaaaagcctgacaaccgttcanggattgaaaaaggaattcagctataacaagatacttaaagac

SEQ ID NO: 27199 - DNA, 409 bp, Glycine max
ggcacaagtgagtttgttgatggagataactagaaacagggtgatgaaaatgaaggtccttgttttcttcgttgctacaattttggtagcatggcaatgccatgcgtacgatatgttccctctccgaatgaacactggctatggtgcccgcactccagaggtgaaatgcgcaagttggaggcttgctgtggaagcacacaacatcttttgctttgagaccattcctgaaaagtgcgttgaagcaacataggaatacattcatggcgaacaatatagatcagactccaaaacagttaaccaacaagcttacttttatgccagagaccttgaagtccataccaaggacacatttgtgttcagtataaattgcacccgactctctaatattcatactacaaaaacatggata

SEQ ID NO: 27200 - DNA, 402 bp, Glycine max
  modified_base (335)..(335): a, c, g, t, unknown, or other
ggagcaagagtgaagagcgaagagaatggctcccaagggtttaatctttttggctgtgttatgcttctcagcactgtcactgagtcgttgtcttgcggaggataatggacttgttatgaacttctacaaggaatcatgccctcaggctgaagacatcatcaaagaacaagtcaagcttctctacaagcgccacaagaacactgctttctcctggctcaaaaacatcttccatgactgtgctgttcaaagttgtgatgcttcactgttgctggactccacaagaaagagcttgtctgagaaggaaacggatagaactttgggttgaaaaatttcangtacattgagaccatcaaagagctttgaaagggaatgcccagagtttgttctggctgatatctcgtc

SEQ ID NO: 27201 - DNA, 316 bp, Glycine max
tttaatggcctttggatataccaatgctaacacctatgccagataagttttattttctggctctgttatgcttcaatgactacaaatactaacagtttgaaactttgaatatactatttcatatgggatttgggctggtgaaaagaattctatattttggttggtttttagaaatgttaaagcagccaaattcacaattaatcttaaattatgtgttctgtttgttttcttataatgagactttgtgctggtgtgagaattttgtcacagccttaagcccctaatttttaagcagatagccatgcgtatttatttt

SEQ ID NO: 27202 - DNA, 396 bp, Glycine max
gatgacaaactttttgaggctcacagggactggggtaggcgatttatgagactatattcacagttcacatcatgggacaactcaaaagatcctgaacggcctcttgtgataggatatgtctctcctgattattttacacattctgtgtcatatttcatagaagctccccttctctatcatgactataccaattataaagtggttgtttattcagcagttgtcaaggcagatgcaaaaaccattcggtttagagagaaagtcttaaagaaaggtgggatctggaaagatatttatggaactgatgaaaagaaggttgccgacatggttagagaagatcaagttgatattgtaatagagcttactggtcacactgcatacaataagctgggaatgatg

SEQ ID NO: 27203 - DNA, 307 bp, Glycine max
  modified_base (91)..(91): a, c, g, t, unknown, or other
aaaagtggaaaagcctgtaatgcttataggaaattaacagactcctggatactggaagtatcgcaacattatggatatgaatgctggatgngtagtttgctgctgatattcatcatcaagttgggcatgaatgtggcctactatgctgaaaaagtcattgggtgtcattatgacgaggcttatgcatctatcatgattgggtgaaccttcttcatacccaagacatatgacctattcatagtgatagctctttagtctttataggataatgtgatacaaagacatttttggagatgaccgaatttac

SEQ ID NO: 27204 - DNA, 366 bp, Glycine max
  modified_base (312)..(312): a, c, g, t, unknown, or other
cgggtccgaacggttgaaaaaagacgattgaggggggaaccaaaaaacaaaaaaccgtgcttagaaaaaaaaatggagtactctaatggattccctagaaaaagagatgtttctcttcaggaacttagcacatggcttgctgagtttgctgaagtaagaggatgggatcaatatcacagtcccagaaatcttcttttagctcttgtgggagaggtgggagagccttctgagatcttacagtggaagggagaggttgcaaagggattgcccaattggagttctgatgataaggagcacttacacgaaaagctntcagatgttttgctttatttagtgcgtcttgctgatgtttgtgggctaaatctt

SEQ ID NO: 27205 - DNA, 393 bp, Glycine max
  modified_base (17)..(17): a, c, g, t, unknown, or other
gaggaggagtgaggcanagctgatagctccggcgaagcccacccctcgtgaagtgaagctactctcagacatagatgaccaagatgggttacgtttccaaattccggtgatacagttctatcgccacgacccatcaatggcagggaaagaccctgtcgatgtgataagaaaggctgtggccaaaacgcttgtgttttactatccttttgcaggtaggcttagggaaggacttggtcggaaactgatggtggattgtactggggaaggtgttttgttcattgaggctgatgcagatgtcactcttaagcaatttggtgatgctcttcaacctcctttcccgtgctgggaggaactcctttatgatgtacctggttctcaaggagtgcttaacac

SEQ ID NO: 27206 - DNA, 414 bp, Glycine max
gagtaggtttgaggcagagctgatagctccggcggggggcacccctcgtgaagtgaagctactctcagacatagatgaccaagatgggttacgtttccaaattccggtgatacagttctatcgccacgacccatcaatggcagggaaagaccctgtcgatgtgataagaaaggctgtggccaaaacgcttgtgttttactatccttttgcacgtaggcttagggaaggacttggtcggaaactgatggtggattgtactggggaaggtgttttgttcattgaggctgatgcagatgtcactcttaagcaatttggagatgctcttcaacctcctttaccgtgctgggaggaactactttatgatgtacctggttctcaaagagtgcttaacaactcccttctgcttattcaagt

SEQ ID NO: 27207 - DNA, 372 bp, Glycine max
ggaggcaagaagttgtattttggcatccccgtggcttcaagaagagaatctcaatggaggcccaggagctgaagcgcgtgttccagatgttcgaccgcaacggcgacgggagaataacgaagaaggagctgaacgactcgctggagaacctgggcatcttcatctctgacaaggacctgagccaaatgatccagaggatcgacgtcaacggcgacggttgcgtggacatggacgagtttggggagctgtatcagaccataatggacgagcgcgacaatgaggaggacatgagggaggccttcaacgtcctcgaccagaacgccgacggcttcatcaccgtcgacgagttgaagaccgtcttgtcctccctcg

SEQ ID NO: 27208 - DNA, 387 bp, Glycine max
gagagaaatgggtggtatcctcattgagcacacagaaagcaaagtgtctctctaacctctgcaaaagtccaaggttgcacggttttaactgcttaggcttttgtcttcaaaattaaaactgtgcaactttggttgcagagtcataagtgttaagttgtgtatgcatgaaagtgggcttgagttaattgtgcctcttgtatgatggaatccctttggaaactgttgtacttgctagagcctgcgcctgtcacacttatcattacagctgtggctgtgacatttggcgcagcatttcgagctctaaactatgggaaagaaatggagcataatcgtgacttatgtgaagcatcgattacattggataggtcacaggcattgatgatcccg

SEQ ID NO: 27209 - DNA, 110 bp, Glycine max
gctccgaaaaagacaaaaaaaggggattggttattggaaaaaccaaaaaaaagggaaatatcaggaggtgcaagtcccggacccaaacccggtttttttttttgttaagg

SEQ ID NO: 27210 - DNA, 248 bp, Glycine max
aggatagcattagcatcgtttgcgtttgctctgctgttccacagatttgcaagtgctggttttcatgggcactcgataaataacttggacaaggaagttggtcatgacagaggagctctcgttgagttctatgctccttggtgaggaacatgtaaactgctcgctccagaatatgctattatagcagattcctttgctggacgtttttggaccattaccgctgcttctgtcatttatgaactgggatt

SEQ ID NO: 27211 - DNA, 322 bp, Glycine max
tggggaaaaaaaagatgaataaaaaagagaggttgcggatttaacgcactataattgcaacttcatcaattgcttatactctcatcctacactctgcctcatgaaactacatattcattctctatcattataacttcgagatcgtaatcattctcgacaaaggacctctaaataagttctatgctatttattctaaacactgaaactatctttctctaaacattcaaacattcattatcaactatcataaagccaaatctcttttaatttgcaaggaccactgtgatactcattacagtaaatgcagctacattggacattc

SEQ ID NO: 27212 - DNA, 341 bp, Glycine max
ggtagtagaaagggaaagagggttgataggggagaagggtttaggattttgcacaactcactcatggaggaggaagaagccccagacgttatatgcgagctggaaaacgttcaaggcttagtggacgccctcaccgccgttcggtggaagcgccggcaggacgccgtgttggagttgtccgaacacggcattgttttgatcgtcgaagaaagcggttgcctccaagccaaggtttatctcaaacgagagttattcattcgttacgattacaacgcacgaggaggacgacctcgttttggagtgagtttggggcatttcgtaaattgcttgaacgccttctc

SEQ ID NO: 27213 - DNA, 357 bp, Glycine max
gggatattggcgcggctcaatcaccaactttctcccattgggaagccttttcagagggctgctttttatttcaaagaggccttgcaattacttctccattcaaatgccaacaacagttctttcaccttttcacccaccggccttctgctcaagattggtgcttacaaatcattctcagaaatctcaccagttctgcagttcgctaattttacttgtaaccaagcactgcttgaagctgtgaaagggtttgatcgcattcacataatagattttgatattgggcttggtggacagtggtcttctttcatgcaagagttagcactcaagaatggcggtgcacctgaactcaagatcact

SEQ ID NO: 27214 - DNA, 360 bp, Glycine max
ggagcagagaaggagtttaggaagtgtttggttacttctgagattctgctgttccttagagagcgagcgatgacggtagcagcaggaatgggttacgctctgctagcgttaggaccctctctctccatcttcgtttctgtcatttacaaaaaacccttcctcattctcaccgttctctccagcacactgctgtggcttataagtttgattgtgctgtctggaatatggaggggggttttgcctgtcaacacaacagcttggtggccttttggaatactcattgtatgatctgttgcttttcaagaagccctcatgcttttctccttgaaaatatataagcaagcttatattgctcttttc

SEQ ID NO: 27215 - DNA, 291 bp, Glycine max
ggagaagaagaagaagaagaagatggagaagtatcagatctggagcaggagaatagcgttggcagcgtttgcgtttgctctgctgttccaatcggcctcagcagacgacgtcgttgtgctctctgaagataacttcgagaaggaagttggtcaggacagaggagctctcgttgagttctatgctccttggtgtggacactgcaaaaagcttgctccagaatatgaaaagcttggtagcagcttcaagaaagccaaatctgttttaattggcaaggttgactgtgatgagca

SEQ ID NO: 27216 - DNA, 409 bp, Glycine max
gcggaaataggagagaaagaagagaagaagaagaagcagcatcgacgaggaggcatcagaacattacctttcattcttgcaaatgaagtgtgtgacagatttgcaagtgctggttttcatggtaacttgataagttacttgacccaagagctgaacatgccattggtagctgcctcaaacacactgacaaactttggaggaacatctagcttcacccctctcattggggctattatagcagattcctttgctggacgtttttggaccattaccgttgcttctctcatttatgaactgggattgattagcatcactgtatcagctatactgccacaatttcgtcccccaccatgcccaacacaagctaattgccaagaagccacatgctcacaactgtggatactctaca

SEQ ID NO: 27217 - DNA, 362 bp, Glycine max
cgcctactgaaattatataatggacgagaatcaaaccagttctcacctgaagaagagaagtatgaatgggttccgttgagtgttgaatttgggatgccactattcagtccaaagttgtgtaatgatatatgtcaaagggttgtttcatctgaattacttcaatctggctcatttgaaaaacaccatcatgcaatgcaaagtttaaggaaaaacttgcgtgacatttgtgctgagtaccaagcaacaggtcctgctgcaaagattctttaccagaaggagaaagctaaggaatcctctcgacaacttatgagttatgcaagtggaaggtggaatccgctcatggatccttcttctccaatttc

SEQ ID NO: 27218 - DNA, 396 bp, Glycine max
tgagcagcagcgcataccggattctcggcatggcggagatcggaatattacctaagtttttcggagttcggtctaagtggttcgatacgccgtggctggggattttgatttcgaccatcataacgattggtgtgtcgtacatggacttcaccgacatcatttcctcggcgaatttcttgtacagtttggggatgttgttggagttcgcctcgtttctttggctgaggtggaaatctccctccattaagaggccttatcgtgttccgttgaagcttccacttttggtggtaatgtgtttggttccgtctgggtttctggttttgattatggttattgctacgaaaactgtttatttggtgagtggggttatgaccgtggctggggatggtttttttg

SEQ ID NO: 27219 - DNA, 161 bp, Glycine max
ggtgtgagttcattaacatatacaaattctctgtgttgtgttgtgtacttgtgttaattgtgttgttgttgtaggaaatttaagtgaagagagaatgatgatgaagtctgctatgtgtgcattggtgcttgtgggacttgttgggggtgaaatgggggcca

SEQ ID NO: 27220 - DNA, 356 bp, Glycine max
  modified_base (192)..(192): a, c, g, t, unknown, or other
gatgatagaggcggttccttcgtcgctgtgagaagaatttcgcagggtcttgatcgaagcaacacgtgccattcaagttccgctgagtttgtgacaggatcaacagcatggcttggcagaagtctgtcctgtgtctgtgcacagagaagagaaagtgatgcccgaccctcttttgatttaactccagcccangaagagtgcttgcagagactacaaagtcgcattgatattccatacgatggttctgtccctgagcaccaagatgccctaagagatttatggaatgcagcatttgccgaagaagactccatggtttgatttctgagcagtggaaggacatggggctgcaagggaag

SEQ ID NO: 27221 - DNA, 383 bp, Glycine max
acctgactcttgggaagctagagaatctgagggttgttgctcttcataacaacaacttctatgggtcaattccaccagagttgggaaattgcactgaattggagggaatatttttacagggtaattaccttagtggagcgattccaagtgaaataggaaacctttcacagcttcaaaatttggatatatcaagcaattccctcagtgggaatattcctgcatcacttgggaagttgtataatctcaaaaatttcaatgtatcaaccaattttctggtcggacctataccttctgatggtgtccttgccaactttactggaagctcctttgttgggaatcgtggtttgtgtggagtgaaaataaattcaacatgtagagatgat

SEQ ID NO: 27222 - DNA, 393 bp, Glycine max
ggggtagagataattaaattgttgtaaatggggcgtgcattacagatgattgcaatctagttttgatccttgctgagaaaagagtgagaatatggtaggaactgaaaattaggatataaaataggaagaccaagcaccttacaaacagaagtagccctctgttaatactaaaatatggaagaaaacaggaagataactatggagattgtgcagcagaacagaatacttcatcagtttagcccacccgagcctttcaacctcactcaattcttacttttacacttttccttccccctctttaccctcatgcccacagttcaggtaccaccactcaacatgtgacaactatctgtgtgtgtacagcctttccacagttcaggtaaaattttaaat

SEQ ID NO: 27223 - DNA, 411 bp, Glycine max
gatacaaagttacaactcaaatttctattttcatacaaagttacaatttgttacttacactactacactttagttgttccaacacaagtgtttgtggcaacaactttgatttgaggttctacttttttttgtgtaatcaagaatatttaaggtttttatttgatattcgtcgagtcagtccattttttgtttttttgagtaaagtgatatcctctgcttcttcattcttaactccaaactttagacgctccaccgtgtttttttgttacctatactacaccctttaagtgtttgtagcaaggacttttgtgtgaggtttgtcataatcaagagatatctaatccttctatttgatactcaattactcttctggtcagcctattttgaggtaaagtgatatctttaatcgca

SEQ ID NO: 27224 - DNA, 405 bp, Glycine max
ggagagcgagagagagagagaaacaaagcagcacccatttggatcctctcttctcttctttgatctccgttaccctttttgttttctcaacagagagagagagagagaatctttcgaagttcgtttgcgtgtgttgtgtggtcagtcaccgatggcagcaccacctgcgagggcacgtgccgattacgattacctcatcaagcttcttcttattggcgatagcggtgtgggaaagagttgtctgcttttgcgattttctgatggttccttcacaaccagttttatcaccaccattggcattgattttaagataagaaccattgaacttgatggcaaacgcattaagttacaaatctgggatacagctggtcaggagcgatttcgaactattaccacagcttatta

SEQ ID NO: 27225 - DNA, 372 bp, Glycine max
gatggctcagatgcataccctttttgtgaagcatggtactactcttgacagacacctcggaagctttaaaattcccccatcaagattggctgcatttgttactgtagccttgcttgttagcattgagctctatgatcgcttctttgagaagatcatgcaaaggttgaccaagaaccccagatgcattacccttattcagaggatgggaattggacttgtaatgcacacactgatcatgatcattgcatactgggactgaaagctatagactcattgttgcaagagaacatggtgtaggtgaaagcggagggcatgtgcctttgagcatattcattacgctctctcaacttatactgatgggaactgctgatg

SEQ ID NO: 27226 - DNA, 342 bp, Glycine max
gatgctgtagattatcttacgtggacattcatgtacaggcggctcacacagaatcccaattattacaacttgcaaggagttagtcacagacatctttctgatcacctctcagagatggtggaaaatactttgagtgatttagaagcgggcaagtgcattacaattgaggatgatatggagcttgctcctctcaatcttggaatgattgcatcctattattacatcagttacacaacaattgaaaggttttcatcatctgtgacttcaaaaactaaaatgaagggtcttttggagattctgtcttcagcttcagagtatgctcagcttccaatacgacctgga

SEQ ID NO: 27227 - DNA, 359 bp, Glycine max
ggggcacttgtcttggaaagaacggacagctacatttgtcgccttatcagcacaccgggtcttctttttactttcctgctggaagctgtgcatggccacaaaaagagttacattgcatacttgggagctcattctcatggtcctagccctacctgttttgacctagaaacagctacccattctcattatgattgactatcttcagacttgggaagtgaggagaaagcgctagaagcaattattgactcatattataaacacatcaatggctcgtctgcgctacttgcagaagaagaagcagcagatgttgcaaaaaacccagatgtggagaatgtggtcttgatcaaaaaacataaact

SEQ ID NO: 27228 - DNA, 392 bp, Glycine max
  modified_base (385)..(385): a, c, g, t, unknown, or other
gattagtgggagcaatacatatcattcattcagaggcaacaaaggagttgtaaattaagagcatggctgcacaagctcttgtatcatcatcatctcttaccttctcagccgaggctacaagacaaagtcttggaccaagatcactccaatctccatttggcttctcaagaaaagcctcctttcttgttaaggcagctgctactccccctgtcaagcaaggatcagacagacctttgtggtttgcatcaaagcaaagtctttcctacttggatggcagccttccgggtgactatggatttgaccctctgggactttcggaccctgaaggaacaggagggttcattgagccgaaatggctagcatatggtgagataatcaatggtcngtatgca

SEQ ID NO: 27229 - DNA, 420 bp, Glycine max
ggtgcaagagtttgttgtgagctataagctggtggatcgtgaggagaatatgaagttgtttgttttctttgttgctgcagtagttttggtagcatggccatgccatggcgcaggctaccaaaggttccctctccgaatgaaaactggctatggtgagcgttcttcggaggtagaatgcgcaagttttaggcttgctgtggaagcacacaacatccgagcctttaaaaccattcctgaagagtgcgttgaaccaacaaaggactacattaatggcgaacaatttagatcagactctaaaacagttaaccaacaagctttcttttatgctagtgaacgcgaagtccatcacaacgacatatttatattcggcatagataacaccgtactctctaatatcccatactatgaaaaacatggata

SEQ ID NO: 27230 - DNA, 384 bp, Glycine max
ggcggaagaggcccagaaaatagcctttctccgccgattcatcttctcgcaagcaatttgaacaatattctggacggacatttgcatttacgggggaagtgaattttatgcaagatgatgatgatcgtctggagattacccgaactaaatttggaagtttgcttaaaagacacggagatttgacagagcgtcctgctagggattctgacaagataatatttgagcgtctacagaaggagtttgaagctgcacgagcttctcaaactgaagagatatgtttagacggggaagagtggaatgatggactactagctacaataagagagcgggtgcatatggaggcagacagaaaagcaatgcatggggatgctgacatattagcat

SEQ ID NO: 27231 - DNA, 345 bp, Glycine max
  modified_base (32)..(32): a, c, g, t, unknown, or other
ggtttaataaggatatagtcatagagtcacanaggaggcggcgagtgttgggttgagaatcctatcttgttcgtctttctcgtcttctttcttttcttttgtttttcttgtggatgtgaaacagaatctatgacgagtcaatcggcgaagaacctattggttttgttggggctgggtttagctggaatagttctaatcaccagaaagctcaagaagtctgtcagaaaggatttgggggctttcattgagaagcttcagctgcttactcctacccagcctgctcctcccaaggctccccatcccctcaccgcactcaccttcgcacttttcgacctatttgacatc

SEQ ID NO: 27232 - DNA, 209 bp, Glycine max
ctttaacactttattactaatacaaacagcggtaggacttgaaatcctgctcatgcacccaatggaacatactatgctataacattgcctaatacataaacatcaatgccctaatctcaaagacgaacggtgacggaagaaaaaccaacgtttgtcgattatagtgggaaattgtagaccaatggtgctggtgtcgttacaacacattt

SEQ ID NO: 27233 - DNA, 396 bp, Glycine max
  modified_base (288)..(288): a, c, g, t, unknown, or other
ctttgtcactttattactaatacaaacaatggaaggcttccaatccctgtccatagacccaatgggacaaacaatgctggaacattaccttctacatcaacatcaatgccccaatctcaaagtcaaacggtagtggtagaaaatccaatgtctgttgattcaagtgggaaattggtgagcaatgttgttgttggcgttacaacggataagaaataacatcatcacatataaaaggtacagttcacgtcatgacgcatcaccacaagtgctgtcacaagaagatattgnttgtgtatatgaatatatatatgatattgcagcctgcaatggtttaattgaaatcaacatttttccaatataagaagttgacgaatatcatgtatgtatgaatgtata

SEQ ID NO: 27234 - DNA, 221 bp, Glycine max
ggtaatagaaggtgtcaaaacacttcaactttaggctccatctcaaaaaaatgggtggtttagctagcaatcttcctctaattgttatggtgggtctgcaaattcattatgcagcacttgctatattcacaagaaccgctttgttagatggattgagtacgacggtctttgtagtgtacaagcaaagcatatccactttggctttggcgcctatgtttttc

SEQ ID NO: 27235 - DNA, 343 bp, Glycine max
  modified_base (258)..(258): a, c, g, t, unknown, or other
gggtgaaggagattgttaaagaggtaaatgccggtctcgagtgtggacttgggttagaagactttgatgattgggaagagggtgacattcttgaagtcttcaacacagttcagaagaggaggacccttgaagaggcctcagcatcaatggcagctgctgtggagggagtaggagttgcattgtagaatgaaccatgatgtattccactatgagattggttcctatcttgtgtttgagcacagtgcaaatgcattccangttccagttgaaaaaacaatgtattctctccaattgatgttatgaaagtggaaaggtaacaattccctcatcattatattgatat

SEQ ID NO: 27236 - DNA, 412 bp, Glycine max
ggaagtaggaaatagcagagtttagactttagactttagagtcagtgtacgcagaagagtaaaatcgattggcgatgatggagttgaaagagattcagagactcgaaggccacaccgataaggtttggagcttggcctggaacccgaccaccggtcacgccggtatcccactcgtcttcgcttcttgcagcggcgacaaaaccgtccgaatctgggagcagaacctctcctctggcctctgggcctgcacggcggttctggatgaaacgcacactcgaactgttcgatcttgtgcttggtcaccgtcgggtaagctattggccactgcaagcttcgatgccaccactgccatttgggaaaatggtgggggggattttgaagtgggttctactttggaagggacaacgaaaat

SEQ ID NO: 27237 - DNA, 316 bp, Glycine max
ggtggtgatggcaaagtattctctccctcttctgcaaatacagctgtgtcccagcccaacacctctcagaaaagaactgctcctgctccagtggtggggtggcccccaattcgttccttcaggaagaaccttgcaagcagcagcagtgcttctaagccacctcctgagtctcaggctgagcagcacaacaaggttgctggtaaaaaacctgttgacaactatgctaataataaaggtttgtttgtcaagatcaacatggatggtgttcctatagggagaaaagtggacctcaatgcctatgacagctatgaaaatc

SEQ ID NO: 27238 - DNA, 347 bp, Glycine max
gggcagaataaggtcggaggattgattgagaatcgttcgagactgcaaaatccaaaaccaaacacaacgcacaacattcgtcattcaccgccttgtcttgtcttcttctgtctccgaatcacggaatctctctgaatcgcgggattaagagaggaatatgcaacagaggctaaagttgcagcaacaacaggccctcatgcagcaagctttgcttcaacagcagcagatgtaccaccctggcatgctcgccgctgctatgtctcaaatggagcctgttccaagtggaaatgtgcctcctggttttgatacgtctgcatgccgtagtgtttatgtaggaaatattcatg

SEQ ID NO: 27239 - DNA, 294 bp, Glycine max
ggaagcaaaacaacattaccagagtgggtctagtaattcagtgctgctagaagatggaaactagtgaatggcatatcgagcgaagatctagcttcggctctgaatcccccttagcaagagaggcaggaaatgtgcctgaaactgggtcactctctattgtggtgcttggtgcttctggtgatcttgctaagaaaaagacgtttcctgcacttttccacctatacctgcagggattcttaccaccagatgaagttcatatttttggctatgcaaggacaaaaatctctgatgatg

SEQ ID NO: 27240 - DNA, 375 bp, Glycine max
  modified_base (306)..(306): a, c, g, t, unknown, or other
  modified_base (369)..(369): a, c, g, t, unknown, or other
ggcggtggtttgtggtgaaaatttgcataataatcttttgcagaaagcaagcaagaaagaaaaagggccatggaggccctgcacttgcaccgcgtgcttctcatgcctgtttcccaaaaaacctcaatctttttgcgcgccagtggcaccccattatccacacttgcaaggccaccattgcgttggagctctcaaacttgcagtgccaaaacaaggtggtttttgggtcttggagcagacagcaagaagaccaatttacctgataccgtcaaagccggtgaccccgttctgcacgagccagcccangatgttgatcctaacgaaataaagtcggagagagtgcagaagattattgatgacatgatccangtcatg

SEQ ID NO: 27241 - DNA, 330 bp, Glycine max
agttttttgtgatttgtggtgaaaatttccatccgcgggttttgcaaaaagcgcgcgggaaacaaaaaaggccatggatgcccttcacttgcacccagtgcttctcatgcctgttttccaaaaaacctcaatctttttgcacgccagtggcaccccattatccacacttgcaaggccaccattgttttggagctctcaaacttgcaccgacatagcaagctggcttttgcttctttgttcagacaccacacaaaccaatttacctgataccatcaaaaaccattgaccaccttctgctcgatcccaccccactatatttatctctaacct

SEQ ID NO: 27242 - DNA, 406 bp, Glycine max
ggggagagaatagagaagagagatggatccagacgcgttggcaaaggcattcgtggagcactactacagcaccttcgacaccaacaggaacggcttagcgaatctctaccaggagggttccatgctcactttcgaagggcagaagatccaaggcgcttccaacatcgttgccaagctcacctccctcccttttcagcagtgccaccactcaatctccaccgtcgactgccagccctccggcgtcaacgccggcatgctcgtcttcgtcagcggaaaccttcagctcgccggcgaacagcacactctcaagttcagccagatgttccatttgataccaacacctcagggaagctattatgtgttgaatgacatattccgtttaaactatgcatgaagatgtcatatg

SEQ ID NO: 27243 - DNA, 257 bp, Glycine max
  modified_base (1)..(1): a, c, g, t, unknown, or other
  modified_base (39)..(39): a, c, g, t, unknown, or other
ncacgcccgagtgccattactacgacatcctggaactgncctaccacggggacaccctcagcatgttcattgctgccccttatgaaaaagaagtgcctctttctggcctaaccaacattctgagtgcccagctcatcagccactgcaaaggcaacatgaccaggctgacccgcctgctggatctgcccaagttctccctggagactgaaatcgacctcacgaagcccctagagaacctgggaatgaccgacatgttc

SEQ ID NO: 27244 - DNA, 205 bp, Glycine max
ccaggccgggtgatcgattctatgcctgagcgcaaatgccgtagtattgtgacactttcattgctgctactgctgctgctgatgatgccgagccctgagcttgtccctaaccaagccttagatgaccaaaacgactgggttctccagaggagcaaatgccaaggtacttgcggttaatcgaactcactgataccatttgcaaaat

SEQ ID NO: 27245 - DNA, 324 bp, Glycine max
atctgatcttgtacaaacctgagaaaaacaagcaatggggaaaggattccctatttaataaatggcgctgtgtaactggctagccatatatagaaagctgaaactggatcccttccttacaccttatacaaaaatcaattcaagatggattaaagacttacatgttagacctgaaaccataaaaaccctagaagaaaacctaggcattaccattcaggacatacgcatgggcaaggacttcatgtctaaaacaccaaaagcaatggcaacaaaagccaaaattgacaaatgggatctaattaaactaaagagcttctgcacagc

SEQ ID NO: 27246 - DNA, 426 bp, Glycine max
ggatcgcagtgggtatagtagatgaagggaaagggacagcagccagcttcgggactcacggaaccttctaggctatatataaaaaaaaaaatattgcacgctcctccgggctcctggcatttcaaattcaaggcctcttttcaatcttcaaagcagctactgcggcagctccattttccaattgaagttagcagagcagccatctgtgtgtgaaggggacatgatggatgattcccaaaagcatagaatcctgatggtctcagattttttctatcccaactttggaggtgtggagaatcacatatattatctctcacagtgtttgctcaagttaggccacaaggtggtggttgcaactcatgcttatggaaatcgatctggggtccgatatatgaccggtggtctgaaagtctactatattccatg

SEQ ID NO: 27247 - DNA, 316 bp, Glycine max
ggggtgtaagtgagtcttgggagtgagtcactcttcctgcttaacccacatctgtagacaatatgggaagcactggtttgctacatttgatatgccttgacattgctttagtaagtgagtcgcttgtgcaagcacaacatgcgtataagtatttcacatggacggtgacttatgggactctttatcccttggctagtccccagcaagttattcttatcaatggtcagattgctgggcctagacttgacttggtaactaatgaaaatgtaattctcaaccttatcaacaagctggacgaaccatttttactcacttg

SEQ ID NO: 27248 - DNA, 413 bp, Glycine max
ggatgtgggaagtgatgcatgaatgccacaaacttcagtttcagatcatgtcagcagcatataacaacagccatgctagaatcaccatgcattcagaattacgtagacagattacttcctatcttgaaaatgaactccaatttctatcatcaagctttaccaagtggattggagctcagaaattctatctggaggctataaacggatggcttctcaaatgtgttcgtcatgaagaaaaatcatccaagagaaaaaggaagcctcaatctggccctagccgttatgatcttccaatatatgtcacctgtgcagtctggttggataaacttagtgacttacctgtaaaggatgttgccgattcaattaaaagtttggcgacagatactgcccagttcttaccacaccaagacaag

SEQ ID NO: 27249 - DNA, 392 bp, Glycine max
  modified_base (321)..(321): a, c, g, t, unknown, or other
gatgagagagagagagagatgagggaggtgtaagagactggaaggagtaggtgttgttggcattctgacctaaagcttgtgtctttctgcttcgtttgtatcttctgctgcgtaaagaggatccctttctgattcttccgtaaatttcgtctctgaaactagggctaatacttcatctaccgatctctatattctggatgaaggtttgcttttgatccggcttgggagttttgatcgacttgattttaactccaacttttaagaaatgtcattccgcagcatagttcgtgatgtaagggatagtttcgggagcttatctangcgtagttttgatgtcagacttactgggcatcatagaggaaaatctcaaggatcagtgcaggatttgcatg

SEQ ID NO: 27250 - DNA, 418 bp, Glycine max
gggagcgaagtgaattgaaattgaagtgactcggggtgagttgactcagcaatggcggaagaggtgactcgggtgatggtggcggtgaacgagtcgagcattaagggataccctcatccttcgatcagcagcaaaggggctttcgactggaccatcaacaagatcgttcgcgacaacgtctctgccttcaaccttctttttcttcacgttcaagtccccgatgaagatggttttgatgacatggatagtatctttgcttctcctgacgattttaagaacatgaatcagagagatagaattagaggagttcatctgctggaatacttcatcaataggtgtcatgaaattggggtggtttgtcaagcatggataatgcatggtgatcccaaagaagtaatatgtcatgaagtgaaacgac

SEQ ID NO: 27251 - DNA, 425 bp, Glycine max
  modified_base (388)..(388): a, c, g, t, unknown, or other
ggggaaaaagaagagtaattggcaaattgattttggcttgctcggcaacacggtgggagcattcttcacttgtccttggttttggaacgacgacagccgagctatctctcattccattttcatccatcaatggctccagtagcagcagcatcttcagattcaatcaagccaagagatgtttgcattgttggtgttgcacgtacaccaatgggtggatttcttggtaccctgtcatctctatctgccaccaagctaggctctatagctattgaagctgctcttaaaagggccaatgttgatccatcccttgtggaagaagtatttttcgggaatgttcttagtgctaatttggggcaagctcctgcaagacaagctgctcttggagcangaatatccaattcagtaatctgtactactgttaacaa

SEQ ID NO: 27252 - DNA, 348 bp, Glycine max
ggaacgaggagggactttacaaattagtggtattttgttgaacatgttgggggagatgcgtaggatgggacgtttattagcaaaaggtatcaaggtttgaagggtggaggggagactggtaaataggtttggaatagaaacaggtaaagagttggcaggttaccgggtgggttaattactctccacccgcgatctcaaacgaagggaagctcacaccgccaagaagaacaacctcgtcatgggaccttcattccaaatggggaaatagatggtcaagaattgctcgcaagctaccagggcgaactgacaatgaaattaagaattattggaagactcacatgaggaaaa

SEQ ID NO: 27253 - DNA, 337 bp, Glycine max
tcggccagacacgtgcgcccttctgcagccgcccgccgcatccgccgccgcagcccccagcatgtcgggcccagacgtcgagacgccgtccgccatccagatctgccggatcatgcggccagatgatgccaacgtggccggcaatgtccacggggggaccatcctgaagatgatcgaggaggcaggcgccatcatcagcacccggcattgcaacagccagaacggggagcgctgtgtggccgccctggctcgtgtcgagcgcaccgacttcctgtctcccatgtgcatcggtgaggtggcgcatgtcaacgcggagatcacctacaccttcaagcac

SEQ ID NO: 27254 - DNA, 438 bp, Glycine max
ggagccacaacacaaccaaaagcctattcacttgggcaatcattctctcacttagcaaacaaacactgtgtgtagctgcaatggaagagtattactaccagagacatcacgtgccagcatttgggagctgggattggaatgataatcttccttttacacaatgctttgagtctgcaagacaggctggtttgctaagatatggttactctgagtctgaagatagagatctttatgtcactggagacttgtatgagaatgattttgtcaaacccgctgtgatcgttgttcctcgcagaagggaaaaggtacgttgccagaatgaaaaagacgaaaaaaagcagaattgggtgagtaatgtgaaggagctacctagcccaactagtccaattcaaagaccaaaaccaaagccggtggatgaggacttgtacaagatctcac

SEQ ID NO: 27255 - DNA, 215 bp, Glycine max
gttatacataggatggctccagatactctgcgcatgatgatacggaccgacacaattaagcttcgctgtagactagacacagtttatggagacaagcaaaatggtgctagggctgtgctgactgtgtaatggaatttggttctgatcacagatagtgaattccacagctgaactggatacaacctgcgcccttacataatgacttgtctaactta

SEQ ID NO: 27256 - DNA, 333 bp, Glycine max
ccggcgctctgtccccaccccggccggccgcccatagccagccctacgtcacctcttcaccgcaccctcggactgccccaaggcccccgccgccggtccagcgccgcgcagccaccgccgccggcgccgcctcttcttagtcgccgccatgacgaccgcgtccacctcgcaggtgcgccagaactaccaccaggactcagaggccgccatcaaccgccagatcaacctggagctctacgcctgctacgtttacctgtccatgatcgtcacagctacctgtctctggggatccctagtataacacattcagtgttcccctttcagtcttactac

SEQ ID NO: 27257 - DNA, 422 bp, Glycine max
ggagccacaacacaaccaaaagcctattcacttgggcaaacattgtctgacttaacaaacaaacactgtgtataactgcaatggaagaatattactaccagagacatcacgtgccaacatttgcgagctgagattggaatgataatcttccttttacacaatgctttgagtctgaaagacagactggtttactaaaatatgaatactctgagtctgaacatatatatctttatgtcactggagacttgtatgagaatgattttgtcaaacccgctgtgatcattgttcctagcataatggaaaaagtacgttgccagaatgaaaaagacgaaaaaaagcagaattgggtgagtaatgtgaaggagctacctatcccaactagtccaattcaaaaaccaaaaccaaagccggtggatgacgac

SEQ ID NO: 27258 - DNA, 412 bp, Glycine max
  modified_base (209)..(209): a, c, g, t, unknown, or other
gggaggccataaaaaagatgcgatgctacacgcagacaagtagtacaagtccaataagaaaagcaagatagaaagattggctagttcacacacctcaattaatacaacaacaccctgttgctgatagttattatagagagagttcgatcaattcaagcttgcaagcttaaccatggaacggtatgagataattaaagatattgggtcanggaaactttggtgtggcaaagctggtcaaggaaaaatggagtggtgaattatatgctatcaagttcattgagagaggcttcaagattgatgaacacgtgcaaagagagattataaatcataggtccttgaagcatcccaatatcattagatttaaagagttgttgcttactccaactcatcttgcaatagtcatggaatatgc

SEQ ID NO: 27259 - DNA, 431 bp, Glycine max
ggcagccaagaaaagaaaatcctcacgcattttgttcgtagccaaacactctgaaattctcagttatgtcgtggcaagcgtatgtggatgatcacctactgtgtgaaatcgaaggtaaccacctcactcacgccgctatcatcggccaagacggaagcgtttgggctcagagcaccaacttccctcagttcaaacctgaggaaataactgccatcaataatgactttaatgagcctggatcacttgctccaactggattgtatatcggtggcaccaaatacatggtcatccacggtgagcctggtgctgtcattcgagggaagaagggtcctggtggtgttactgtgaagaagaccggtgcggccttgatcattggcatttatgatgaaccaatgactccaggtcaatgcaacatggtagttgaaaggctt

SEQ ID NO: 27260 - DNA, 383 bp, Glycine max
gggagtcagaggtttgtgtcacacacacggaaagggaaagagaaaacacagagagaagcaaaacattacttctttgaacttgatgtgtattgtaacaaatgtctttcccaatattgttcgtaatgtaaggaccgaatttgaaacttaataaaggcgaacttttaatgtaaggctttctggtgggggcaagtcaaatagtttggtccatgaggagcacgaatgcctgtcagttgtacagaacatacagtgggctagccttccacctgagcttcttcgtgatgttattaaaagattggaagaaagtgagactacatggcctgctcgtaagcacgtggttgcgtgtgcttctgtatgcaagtactggagaggaatgtgcaaagaaa

SEQ ID NO: 27261 - DNA, 417 bp, Glycine max
  modified_base (116)..(116): a, c, g, t, unknown, or other
gaaggtgcaagagtttgttgtgagctataagctagtttatcgtgaggagaatatgaagttgtttgttttctttgttgctgcagtagttttggtagcatggccatgccatggcgcangctaccaaaggttccctctccgaatgaaaactggctatggtgagcgttcttcggaggtaaaatgcgcaagttttaggcttgctgtggaagcacacaacatccgagcctttaaaaccattcctgaagagtgcgttgaaccaacaaaggactacattaatggcgaacaatttagatcagactctaaaacagttaaccaacaagctttcttttatgctagtgaacgcgaagtccatcacaacgacatatgtatattcggcatagataacaccgaactctctaatatcccatactatgaaaaaca

SEQ ID NO: 27262 - DNA, 188 bp, Glycine max
  modified_base (145)..(145): a, c, g, t, unknown, or other
ggagcaagagtgaagagcgaagagggtggctcccaagggtttaatctttttggctgtgttatgcttctcagcactgtcactgagtcgttgtcttgcggaggataatggacttgttatgaacttctacaaggaatcatgccctcangctgaagacatcatcaaagaacaagtcaagcttgtctacaagc

SEQ ID NO: 27263 - DNA, 424 bp, Glycine max
ggtgtgtgaaattgagtgacttggttttgtagatgtctggtatcccaagtgggcgatcctacagcgatattctcttctctcctcctatgcgccttatctcatcccaagtggtcattctctttttctctatcactgctgcctgcaaacaaaagatatttatattgcattaaaaagatgaaaaaaaagggcaagagtgtgtggtccttttaagttgaacatgatggaatggccgtctttctcttttgggtatcttcccaaatcaggaaacactttctcatcttccctttcccagtttcacaccctacctcatggaaggctctgtcaacgaacgtcttcattttgggaagattggatatgggagaagatgcaggattcgtgctccctgctgcaacgagatctactcatgccgtcactgtcataacga

SEQ ID NO: 27264 - DNA, 203 bp, Glycine max
tcggccaccgagggcgcacgcgtgagacttcttcgccgcagacgccgccgcgatgcgctacgtcgcctcctacctgctggctgccctagggggcaactccttccccagcgccaaggacatcaagaagatcttggacagcgtgggtatcgaggcggacgacgaccggctcaacaaggttatcagtgagctgaatggaaaaaaca

SEQ ID NO: 27265 - DNA, 428 bp, Glycine max
gtgttaatatcatagcaaatctattccatgctccgataagtgatgatgagactgcagtaggtgtgggaactgtggggtcatcggaggcaataatgttggcaggtctagcttttaaaaggaaatggcagacaaagagaaaagcagaaggcaaaccatatgataagcccaacatagtaactggggctaatgtgcaagtttgttgggaaaaatttgcaaggtactttgaagtagagctcaaggaagtgaaactcaaagaaagatactatgtgatggaccctgcgaaagcagttgaaatggtagatgagaacaccatctgtgttgcagccattttggggtcaactatgaccggagagtttgaggatgtgaagcttctcgatgaacttcttactaaaaagaacaatgagacaggttgggataccccaattcat

SEQ ID NO: 27266 - DNA, 422 bp, Glycine max
ggttctagtgtgtgattgtttgttgttgtaactcgttcttcttcttttgttgttctgtgtttgtgtttgttttttctctcacctgaaaatgtcttgctgcggtggtaactgtggttgcggaagctcctgcaagtgcggcaacggctgcggaggctgcaagatgtacccagacttgagctacactgagtcaaccaccaccgagaccttggtcatgggagtggcacctgttaaggctcaatttgagggtgctgaaatgggtgtgcccgctgagaacgatggctgcaaatgtggaccaaactgctcctgcaacccctgcacttgcaagtgaagtgttgggagagcaagcttcgagcagagatagcccttaattaagaataatgataaactattaatgtgtagctaaaaacttatgtattatgtct

SEQ ID NO: 27267 - DNA, 423 bp, Glycine max
gattgagaggtccaccaaccttgactggtacaagggaccaactctccttgaggctcttgaccaaatcaatgagcccaagaggccctcagacaagccactcaggcttccattgcaggatgtctacaaaattggtggtattggtaccgtgccagtgggacgtgttgagactggtgtcgtgaagcccggtatggtggtgacttttggtcccactgggctgacaactgaggttaagtctgttgagatgcaccatgaggctctcacagaggctcttccaggtgacaatgttggctttaatgtgaagaatgttgcagtcaaggatctcaagcgtggttttgttgcatccaactccaaggatgaccctgccaaggaagctgccaacttcacatctcaagtcattatcatgaaccaccctggccagattgg

SEQ ID NO: 27268 - DNA, 385 bp, Glycine max
  modified_base (342)..(342): a, c, g, t, unknown, or other
ggggtacaaaaaatatctgcctttacttgttttggttaggatgaaatgtgaaaatgcatgtgttgatattatttgcttcattgctttagcacttatccaatgggttatggttctggtgaaaagctctgtgattgttcaatgggtttctagaatgaatgttctatggaattatcattcaacccaatgaccagtttagttagtgattctcatttttatggctcttgccctgaagtcaagttgcttcttgcaattgaagaaacctgaagctggtttcaatgtttgtttttcatctaagaaagctataatctccgtgaaacgacacactcccgtggctgctatcangaccatggaaacagtgggactctctgcaacattcaccacgttg

SEQ ID NO: 27269 - DNA, 404 bp, Glycine max
ggggcgagggttttgtcttgtgattatccttgcggcacacattgtcttgtcggcaaaatcttccaccaacaacacacagccatggcaggctcaaacattctttctcactctccttcccttcccaaaacctacagccactccttaaaccaaaacgcgttatcccaaaagctttttttttctgcccctcaaattcaaagccaccacaaaaccacgtgctctcagagcggttctctcgcagaacgctgtcaaaacctcggtggaggacacaaagaacgctcattttcagcactgtttcaccaaatccgaagatgggtatctgtactgtgagggcctcaaggtgcatgacatcatggaatctgttgagagaagacctttgtatttgtacagcaagccccaaataacta

SEQ ID NO: 27270 - DNA, 409 bp, Glycine max
gacggctaaaagctaaaaatcatcgaagtactcaaattagcatggctgtcacggttgcattcttgaatttgatcatcatgttttcagtagtctctacaagcaagtcactgagcttaaactactattcaaaaacatgccctgatgtggaatgcattgttgccaaggcagtgaaggatgccactgctagggacaaaactgttccagctgcacttctgcgaatgcacttccatgactgtttcgttcgggggtgtgatgcctctgtgctgctaaattcaaaaggaagcaacaaagcagaaaaagatgggccaccaaatgtttctttgcatgcattctatgtcattgatgcagcgaagaaagcactagaagcttcatgcccaggtgtggtctcttgtgctgacatccttgctct

SEQ ID NO: 27271 - DNA, 325 bp, Glycine max
cggagccgcggggttcttgacggatctcgccatgatccgctttatcctgatccataaccgggcaggtataacgtcgccggactagtggtacacgcgctttgatgatgatgagaaacacaggctgatcgatgaggtgcatgccttgatcacggtccgagacgccaaacacaccaactttgcggagttccggaactttaaaatcatttaccgccgctatgctggcctctacttctgcatctgtgtagatgtcaatgtcaacaacctggcttacctggaagccattcacaactatatggaggtcttaaccgaatatttccacaatgtc

SEQ ID NO: 27272 - DNA, 93 bp, Glycine max
gcgacgaaggagtaagtggtgggatctcaccgtgggtccgattagccttttctctgccttgcttgcttgagcttcagcggaattcgaaatggc

SEQ ID NO: 27273 - DNA, 425 bp, Glycine max
ggaactaaaaaatgaactgtcttcagaatctttctcgattctctgttttgcccttcgatacacttgttacgcgccaccgcaagaaccttcccctttccctgggtttcgtcaataattctcatcaaaatctaactatggcactcaaggctgcctcaggttctataccgagtgcagacacaagtagtgccgataaggaggaagaaaagtctgagacatatagtcatagcatgacagaagccatgggtgctgttttgacttataggcatgaattaagaatgaactataatttcatccgtccagacttgattgtgggatcatgcctacagactcctgaagatgtagacaagttgtgtagaattggagtgaaaactatattttgcttacaacaagatccagaccttgaatatttcggagttgatattaat

SEQ ID NO: 27274 - DNA, 432 bp, Glycine max
gacagagaaaatgagtacggtgggagaagggagggtgagtagtaatggtcatggatgttgcaaatcaaggccaggctatgcttccccactggaagccatttctggtcccagagagtctctcatttatgtaacctctgtctacacagggaccggaatagagaagccagactatttggcgacagtggatgtggatccaaactctccaacttattccaaagtcatccataggcttcctgttccttatttacgtgacgaattgcatcacacaggctggaattcatgcagctcttgccatggagacccctcagcagaccgacgatttctcatcgtacctgcactcgtatcaggtcgagtatatgtggttgatgtgaaaacaaatgcaagggctccatctttgcacaaagttgtcgagcctgccgatatcatacaaaa

SEQ ID NO: 27275 - DNA, 413 bp, Glycine max
gacggagaaaacgaattcaattgtgtgtttggcttgcttgaaggtccacatcatttctcaacccacattgcatcccacttactccttgtagtaagggaataatgtaaattactgcataattaagcactatcctttaaatctatcaaggcaataatgactgattaggtacagtgcattatcatattatctgcaccattttactgtatttaagtatttgcatactttgcttaatgaagcagacaacaaaaccagcgggtatatatatagatatacatatctagggttaatgttatcagcgacgaaattaattgcaattaagtggcatagatcttgaagctgagaatcgcgtgcgccatgaatagaggtgaaagttcaagtggtggacaaaactcgttggggtacctatttgggtc

SEQ ID NO: 27276 - DNA, 389 bp, Glycine max
  modified_base (351)..(351): a, c, g, t, unknown, or other
  modified_base (375)..(375): a, c, g, t, unknown, or other
gacgagtaaactgggatatatattttgttcctgcgaacccaaaatcaaaatccctctcctgtgagcatgctgaaaggaacaacaaaaggaggtgaaatgggaggagaaggagggagagaaggggattgggagtgcagcagttgcaacaacaggaactacgccttcagatcattctgcaaccgatgcaagcaaccccgcctcctcgtcgacaccaaaaccccctctgattccaagtggctccctcgtattggcgattggatctgcaccggttgcactaacaacaattatgcattaagagagaagtgcaagaagtgcggacaaccaaaagaggtagcagccatgccagcaatngcgatgaccggagcatctttcccnccttattcacacta

SEQ ID NO: 27277 - DNA, 321 bp, Glycine max
ggatcaagaacgagaacagcaaagtggcgtcaaagagagagagatggaggttattgtgcctagggtggatttgcaaaagctttcatatgaagatgaacgcaagattgtgatacaaacatttgagtaacgattgtgttatagagacatacactacgaaagttcactaacactcttggatgacatgtagatagtggttaaattcttgcatgatgttcacacggtaatgagaatgcatatcataccgttctgtccctaaagtggatatagtgcgtcatcttcaacaaatcctatatacgagggcatggtaatatatgatatgca

SEQ ID NO: 27278 - DNA, 407 bp, Glycine max
gacgcgtggaaatgatatgcacgcacgcttctgtgggagaggaagtaggaaatagcagagtttagactttagactttagagtcagtgtacgcagaagagtaaaatcgattggcgatgatggagttgaaagagattcagagactcgaaggccacaccgataaggtttggagcttggcctggaacccgaccaccggtcacgccggtatcccactcgtcttcgcttcttgcagcggcgacaaaaccgtacgaatctgggagcagaacctctcctctggcctctgggcctgcacggcggttctggatgaaacgcacactcgaactgttcgatcttgtgcttggtcaccgtcgggtaagctattggccactgcaagcttcgatgccaccactgccatttgggaaaatgttgg

SEQ ID NO: 27279 - DNA, 425 bp, Glycine max
gaatgaatggaaaaggatctaattagacaatgacgttatctcggactgtgaatgagtgaacagcataaaagcacaacttgactgacatacgcaaccaaactaaagataaacaaaatttagaaacaaaaacatgttggtgaaggtgtacggtccaacctatggagcccccaagagggtgctggtgtgtctgattgacaacgaaattgagtttgaaacaacacatattgatctcttgaagggagagaataacgaacctgagttgctaaagctgcacccatttggatcacttgctgctattcaagatggtgattatactctctatgaatctcgggcaataatcagatactttgcacagaagtataaataccaagggacagactcgttggtaaagacaatagaataaaaaagtctagtggaacaatggc

SEQ ID NO: 27280 - DNA, 238 bp, Glycine max
ttttacccattcattacgaccacaaaaaaatggcacactccgctctttttttaaaaaaaattgtaataacacacattattatttttatttataacaaaaatgctcttttaaatttaacaaaatggccacttatttaatctaatatataaaaaaaaccgtattttctcccccataataattacactttgtctggtaaccccccacaaaaaaacacccaatactcctcctatttggttta

SEQ ID NO: 27281 - DNA, 87 bp, Glycine max
gtgacagtcagcgtctggcgagaactgcaggtttctcttacagatccacatttccatgccggttcaatgcagccactgcaagtgcta

SEQ ID NO: 27282 - DNA, 398 bp, Glycine max
ggacgaagaatgaaattgaaaagtgaaaagtagagatggaagaagaaaaagcagcggcatactacgacgagctgagccgtaagggcgagggagccgcgaggttcaagcaaggtctcggcttttcctcttccgcgccaaacgacgacgttccaaaaccctcctccttcctctccaaattcgtcaaagcctcctccactgcgccttcaaactctgagaagcaagcgcagcttcaatccatccaccacaagctcaagaaaaagccctcttccgagtctagggtttcgagcagcgatagcgatagaagtagaagacgaagcagagatagatacagggaatcgcggaggcgaagtaggagtagagaaagacatcggcatatggagagagggagacggaggagt

SEQ ID NO: 27283 - DNA, 436 bp, Glycine max
gttaaagaactgtgaagaagagggtaactgcaaacaaagcaagcaaaacaaaagacgcagtgatggagaggatgaagagggtgcttctgctgcttctggccttcactgttcttctcatgttgccagaagcttctgctacaaagtttactgttggaaacaaccagttttggaaccccaatattaactacactgagtgggctaaaggcaaacatttctaccttggtgactggctctattttgtgtacgataggaaccaagcgagcgtgttggaagtgaacaagacagattatgaaacatgtaactctgatcatccactcacaaattggactacgggagctggaagagacgtggttccattgaatgtaacaaaaacttactacattatcagtggccgagggttctgcttcagcggcatgaagaaagcagttcatgttga

SEQ ID NO: 27284 - DNA, 421 bp, Glycine max
  modified_base (296)..(296): a, c, g, t, unknown, or other
gaacgcagccaagaaaagaaaatcctcacccattttcttcgtagccaaacactctgaaattctcagttatgtcgtggcaagcgtatgtggatgatcacctactgtgtgaaatcgaaggtaaccacctcactcacgccgctatcatcggccaagacggaagcgtttgggctcagagcaccaacttccctcagttcaaacctgaggaaataactgccatcaataatgactttaatgagcctggatcacttgctccaactggattgtatatcggtggcaccaaatacatggtcatccanggtgagcctggtgctgtcattcgagggaagaaaggtcctggtggtgttactgtgaagaagaccggtgcggccttgatcattggcatttatgatgaaccaatgactccaggtcaatgcaacatggg

SEQ ID NO: 27285 - DNA, 356 bp, Glycine max
  modified_base (22)..(22): a, c, g, t, unknown, or other
gttttgtggaggtgttcatcanaaaatagcttctgggttgtttgagcctttcgtttctcatctcaaattcctcaaagatgagatctccaaaggtggatactcaattaagcttctgcctcccaacaacggtgccttctggttcaccagagccacgtttgagagatttgtgcgctttgtcagcacacccgctattctggagaggtttgctagccttgaaaatgaaattcttcagatcgaaagttcttttcaagctaatgctctatcgatgtccattgcaactccagatgaaggatccgtaccacaagccaatggcatcacaaagaggttaagtgattctacaaagttaaatgatgtac

SEQ ID NO: 27286 - DNA, 370 bp, Glycine max
ggcatgtccaaaggaacaaaaatattattaagatgatcaacattattggaacacttgttctactctttgcatttctcttactcagttgtgtgtatgcacaagacacaacaacccttgtgcctgcaatcataacttttggtgattctgctgtggatgtagggaacaatgactatcttcccacccttttcaaggctgattaccctacttatgggagggactttgttaaccaccaacctactgggaagatgtgcaatggcaaattacctactgatatcactgatgacacattgagtttcaagacctatgctccagcatatcttatgccacatgcatcacggaaaaacctacttattggagcatactttgcttc

SEQ ID NO: 27287 - DNA, 424 bp, Glycine max
ggggccataggatcactgatcaacaccactattcggtacccccttgacacctgcaagaccaagtaccaagctgaggcacgttcctcacgtcgaacaaaatacaggaatctcactgatgtattattggaggcaatatctaaccgtcaggtgctttcactttaccagggccttggaacaaagaatcttcaatccttcatttcacaatttgtctacttctacggatacaggtattttaaaagactgtatctagaaaaaagtggttataaatccattggaacaaaagcaaacttggttattgctgctgctgctggggcttgcacagccattgcgactcaacctctggatacagactcttcaaggatgcagacaagtgaatttggaaagtctaaagggctactgaagacccttacagaaggaaactgga

SEQ ID NO: 27288 - DNA, 422 bp, Glycine max
ggttctagtgtgtgattgtttgttgttgtaactcgctcttcttcttttgttgttctgtgtttgtgtttgttttttctctcacctgaaaatgtcttgctgcggtggtaactgtggttgcggaagctcctgcaagtgcggcaacggctgcggaggctgcaagatgtacccagacttgagctacactgagtcaaccaccaccgagaccttggtcatgggagtggcacctgttaaggctcaatttgagggtgctgaaatgggtgtgcccgctgagaacgatggctgcaaatgtggaccaaactgctcctgcaacccctgcacttgcaagtgaggtgttgggagagcaagcttcaagcagagatagcccttaattaggaataatgataaactattaatgtgtagctaaaaacttatgtattatgtct

SEQ ID NO: 27289 - DNA, 430 bp, Glycine max
ggagattggtgcaattattttaaaatgcacatgtgcgactaactccctttcttctatttattgccttcgcagacacaaaaatcgccatcggaaaccaacaatgcctcctttgactttgtggctggtgctgccttttctcgtgttgctagcggcggcaacaacgtctccaacacgcgccacgacggtcgcctcgtcgttccacggtcaacgagagtttgactatttcgctttcgcgttgcaatggcccggtacttactgcaaacgcacccgcagttgctgccccaccaacggttgctgcagaggctccaattttccaacagtgttcaccatacatggactctggcctgactataatgatggaacctggccgtcctgttgctctggatctagtttcgatccaaaagagatattgacattgactaatagttta

SEQ ID NO: 27290 - DNA, 318 bp, Glycine max
  modified_base (266)..(266): a, c, g, t, unknown, or other
cttcaacagggcttggacggaacccggcgctcgttccccaccccggccggccgcccatagccagccctccgtcacctcttcaccgcaccctcggactgccccaaggcccccgccgccgttccagcgccgcgcagccaccgtcgacgtcgccgcctctccttagtcgccgccatgacgaccgcgtccacctcgcaggtgcgccagaactaccaccaggactcagaggccgccatcaaccgccagatcaacctggagctctacgcctnctacgtttacctgtccatgtcttactactttgaccgcgatgatgtggctttg

SEQ ID NO: 27291 - DNA, 433 bp, Glycine max
gaacgaaacaaagtggacgaatcacaaccaaaaaacaaagaaacagaggcagagatatatgattatgaatttctcaacagaaccctctgcctcacgcttaccattctgatctccacttcttcgctgtgcgacgaagtgaaatttcgttgctgcaaatagtgagaatttgctgtctttggtcagagttgctccgagtgatcgcttcccctggtgcgacgaagtgaaatttcgttgctgcaaatagtgagaatttgctgtctttggtcagagtggctccgagtgatcgcttcccctggtgcgacgaagtgaaatttcgttgctgcaaatagtgagaatttgctgtctttggtcagagtggctcacagtgatcgcttcccctggttccccgtcttctcatatgagttcgtctgtcttaacatctcaaggaatattt

SEQ ID NO: 27292 - DNA, 431 bp, Glycine max
ggaagaatgaggttgtcaatggcagggtttcgaagctcattgcccttttctgcactaatgagacaggttgagcaagagatggaaactgtgatcaaggtgctgcagcctggacccttgggaattatagaacacaagttttccgctgacgaaattcgcaaggctaatgctacggtttctaaagcagtggccaattggcgaaccaatgcaatcctccaagatagcaatcacgttttaaaagattatattcacaacaagtgaagcaaattttagtttcaccccccgaattttgacccaaggttacttcaattttcctttggtttgtgtgtgtgcgcgcctatttgtttaaatgtattatcgttattgagatgtttcagtgttgtaaatgctggttacttgattataaagttgtatagaatgattcaataatatct

SEQ ID NO: 27293 - DNA, 426 bp, Glycine max
ggcagggcagaggagaaggccttgtgattcatcatgacgaatgaacccaacaacaagtacgatgtttttctgtgtttagttggcccagatacccgctacaccttcgctggtaatctctataatgctttgcgccgcaacagaatcaatacctttttcacagaagataatcatcatgatgagctactactcatgaatggcgaccaaatttcaccctttgctctaagagcaattaaagaatcaaacttgttaattgttgttctctctccaaactacgcatcatccccaaggaatcttgatgaatttgtggccatcgttcggtgtataaagaggaagaagcaactgctgctttccgtcttttacaaagtggaacgaggggaaataatggatgcaatatttagtggacctgatcaacaagcgctctgtgta

SEQ ID NO: 27294 - DNA, 413 bp, Glycine max
ggtggtagtgtggcagcgacacgtatcaacttcaataatcgcatcgcagaagcagtttccggtgcatctcatcgtctccgaaaatgaacgacgcagatgtctcgaagcaaatccagcagatggtgcggttcatccgccaggaagctgaggaaaaggccaacgagatctctgtctccgccgaagaggaattcaatatcgagaagctgcagttggtcgaagccgacaagaagaagatcaggcaagaatacgaacgcaaagagcgccaagttgaaattcgcaagaagattgagtactcaatgcagctgaatgcttctcggattaaagttcttcaagctcaagatgacgtgatcagttccatgaaagaagctgcatgcaaggaacttttgactgtgagtcatcatcatgatgatcat

SEQ ID NO: 27295 - DNA, 413 bp, Glycine max
ggagcaagagtgaagagcgaaaagaatggctcccgagggttgaatctttgtggctgtgttatgcttataagcactgtcactgagtcgctgtcttgcggaggataatggacttgttatgaacttctacaaggaatcatgccctcaggctgaagacatcatcaaagaacaagtcaagcttctctacaagcgccacaagaacactgctttctcctggctcacaaacatcttccatgactgcgctgttcagagttgagatgcttcactgctgctggactccacaagaaggagcttgtctgagaaggaaacagatagatgctgtgggttgagaaatttcaagttcattgagaccatcaaagaagctttggaaagggaatgcccacgagttgtttgctgcgctgatatcctcgatctct

SEQ ID NO: 27296 - DNA, 412 bp, Glycine max
  modified_base (381)..(381): a, c, g, t, unknown, or other
ggaacaagaaggacagggagctcttctgcttggtggaggacttctttgaaaatagcctccagacattggaattctgcaatgctcttgataaatgcttgaatcgagcacgcgaaaggcatgttatagttaagtctgcaattacctgttttgaggaagaggtgcaaaatggggttgaagggtccacttatttgaagacattgcaagagcttaagggtttcaaggaagccggggaccccttcaccgaagagttttattcctttgttcagtcagtttatcaacagcaggcatcaatgctgaagaaattgcaaatcagaaagcaaaagcttgataagaaactgaaatccctgaaaacattgaaaaaggtgtcaaatgccattttcngggctgcttttgtgtctggtttgattttctc

SEQ ID NO: 27297 - DNA, 430 bp, Glycine max
gatgcatgtcatggcattggcaacatcaaggaacgggtccacgcccactcccactcccactcccactcccacggacactcccactcccacatcgaagatggagaagatactgacgttcgacacgtcgtcgtttctcaggtgttggagcttgggattgtatcacattctgttataattgggttgtccttaggagtttcgcaaagtccttgtaccataaggccattaattgcggcgttatcttttcatcagttttttgaagggtttgcgcttggaggttgcatttcccaagcgcagtttaaagcctcgtcagcaactataatggcttgtttttttgcactgactacacccttgggtgttgggattggaatggctatctcttcggggtataacccttacagccccggtgcactcatcgccgaaggtatcttgg

SEQ ID NO: 27298 - DNA, 317 bp, Glycine max
  modified_base (83)..(83): a, c, g, t, unknown, or other
  modified_base (100)..(100): a, c, g, t, unknown, or other
ggcggcgaacgcggagagcacgccatgaaggcctcgggcacgctacgagagtacaaggtagtgggtcgctgcctgcccacccncaaatgccacacgccgnccctctaccgcatgcgaatctttgcgcctaatcatgtcgtcgccaagtcccgcttctggtactttgtatctcagttaaagaagatgaagaagtcttcaggggagattgtctactgtgggcaggtgtttgagaagtcccccctgcgggtgaagaacttcgggatctggctgcgctatgactcccggagcggcacccacaacatgtaccgggaataccg

SEQ ID NO: 27299 - DNA, 353 bp, Glycine max
gaaggacactggaactgtgtatgcattgaaaatcatggacaagggatttattaccaaaaaaaataaaacagcttatgtgaaattggaacgcattgtgctaaatcaattggatcgtccaggcattgtgcggttatatttcacatttcaagactcattttctctatacatggctcttgaattctgtgaaggtggagaacttttgatcaaataaccacgaaagggcgtctatcaagggatgaagcacgattctatgcagctgaaattgttgatgctctcgaatacatacataatttgggagtcatacatcgggatattaagccagaaaacttattacttacagattgaggacatat

SEQ ID NO: 27300 - DNA, 214 bp, Glycine max
gtcactggccgtgattgtggggatttttgccctgtgctggttacctgtgcatgctgttaactgggtcactcttttccagccagctcagggtaaaaataagcccaagtgggcaatgaatatggccattcttctgtcacatgccaattcagttgtcaatcccattgtctatgcttaccggaaccgagacttccgctacacttttcacaaaattatc

SEQ ID NO: 27301 - DNA, 262 bp, Glycine max
gtcttctgacgctggtgcgcctgcccgggaacatcctgctggactcagtcatggcttgtggtctggtcgccagcaacctgaatctcaaacctggagagtgccttcgagtgcgaggcgaggtggctcctgacgctaagagcttcgtgctgaacctgggcaaagacagcaacaacctgtgcctgcactttaaccctcgctttaacgcccacggcgacgccaacaccatcgtgtgcaacagcaaggacggcggggcctgggggac

SEQ ID NO: 27302 - DNA, 385 bp, Glycine max
gaaggacactggaactgtgtatgcattgaaaatcggggacaagggatttattaccaaagagaataaaacagcttatgtgaagttggaacgcattgtgctagatcaattggatcgtacaggcattgtgcggttatatttcacatttcaagactcattttctctatacatggctcttgaatcctgtgaaggtggagaacttttgatcaaataaccaggaaaggtcgtctatcacgggatgaggcacgattctatgcagctgaagttgttgatgctctcgaatacatacataatttgggagtcatacatcgtgatattaagccagagaacttattacttacagctgaaggacatattaaaatagccgattttgggagtgtgaagccta

SEQ ID NO: 27303 - DNA, 423 bp, Glycine max
  modified_base (390)..(390): a, c, g, t, unknown, or other
gaaggacactggaactgtgtatgcattgaaaatcggtgacaaagaatttattaccaaagagaataaaacagcttatgtgaagttggaacgcattgtgctagatcaattggatcgtccaggcattgtgcggttatatttcacatttcaagactcattttctctatacatggctcttgaatcctgtgaaggtggagaacttttgatcaaataaccaggaaaggtcgtctatcaggggatgaggcacgattctatgcagctgaagttgttgatgctctcgaatacatacataatttgggagtcatacatcgtgatattaagccagaaaacttattacttacagctgaaggacatattaaaatagccgattttgggagtgtgaaacctatgcangatagccaaataactgttctttcaaatgcagca

SEQ ID NO: 27304 - DNA, 440 bp, Glycine max
ggggaattgggagtttcattttcattaatttttatttctccccgtttctcaatgcttttcttaatgttgaatccttcacaaatcgtcaagagttagcccacccagaacaacaacgcgtttcagctggccacacacattcttaatttttttggctggcctatagtaaaaactcatatcaatgtcctcaagaacgttgaggagaagactccatcatggggatgttgatggcaaaaggcaggagcatttggagacttcgggattagattcgttgagtgagcccttgctggcagatgatgattatattgagaataagaagatatgtactcttgaagatctatgggatgatgagaggaagaaggcccaggttcattggacattcatattctcaaacctcattgcacaatgggcacagcggttagcaaatgttgtactaagatctg

SEQ ID NO: 27305 - DNA, 416 bp, Glycine max
atagatcaggtggaacagaaaccactgggtaaccggtatgttaaccgtgccccgtttgctggaaatggagttcaagtctcacctgttactccatctgctgatgttactgcttacttcagctctgagcattcgaacagctcgattgattattctgacctcggatggggtgaacaagtgcccaagacacccgagatctcatccatgctttctgctgctcctttggacggtgaatctcagtttgtgcagggtgctgctgatcagaatcagaagaagaacaacctgctggatatggcatctgtgcaagatgattctgcaaaaactctttctgaggagcttgcagacattgaataccagctgaagttctttgagaccccttcttttcttgatgaaacctggactgatgctgcattggcgtc

SEQ ID NO: 27306 - DNA, 425 bp, Glycine max
ggccctaattcaggacattaaaccatagctagcgtgtccttgcgaaaaatgaccataagcttacagtttaagggctttgtgaggatatgatctatggcacttgtgtcacagcttccaagtcactgattttcagagcgttagtgttgcagaagccattaaattttcaagtaaaattctcctccaagtgttttcctacgaagataagaatggaaagtaatcttaatcatagcatagagggcaacaataaagcgtctaggggtgccttggttgtcctagaaggcttggatcgttctgggaagtcttctcagtgtagcagactagtgtccttcttggagggacaagggatctctgctgaattatggagatttcccgacagaactacaaatgttgggcaaatgatatctgcctatctaactaacacatct

SEQ ID NO: 27307 - DNA, 247 bp, Glycine max
gccgacccacgcgttcgacaagaccacagaaacggaatgacactggaactgtgtatacattgaaaatcggcgacccgggagtttttaccaaacacaataaaacagcttatgtgaacttggaacgcattgtgctatatcaattgaatcgaccattcattttaccgttatatttcacatttcaagactcattttctctatacatggctcttgaatcctgtgaaggtggaaaactttagatcaaataacc

SEQ ID NO: 27308 - DNA, 433 bp, Glycine max
ggtgacaaatggagggtccttagttctgtttctctgtcttctctctgttctctcaaccaagttctcaattcaatcttcttcacccttttgatctgctaattctcaaggcacagaaacgattctatgacagatgttgttacttgttattgtttgataaggtattcaaaattgggaggttttcgtttgaattgtgatgtccaagccactgctaggcataggggaggaggaaggtcaaagcaatgtcactttgttggtttcttcctcagtcatcatggaaagtgtgtgcctgaatagctcaaaattgaaagagcgcaactacatggggttatctgattgttcatctgtggacagctccgcgccgtccttctcagatgagactaaaagcaatctgaaccttaaagctactgagctgagactggggcttccgggattg

SEQ ID NO: 27309 - DNA, 257 bp, Glycine max
atttcattattcattaaggggttgcaagcaccaactggaataacactggcttaagtaatggcagtataaatcacatgttggtaaaatgaaagatgcctttctaccaacacgttataatggccacttcatgccaacatggcaatgggttacttaaaccatatatcaatcaacacagaagcgacttaaccaaaatgtttttaccatcatttatagaaaattatgaatttcatgccacccggattaattgcattgctttt

SEQ ID NO: 27310 - DNA, 225 bp, Glycine max
gcggtcgtgagggctgaggatttttggtccgcacgctcctgctcctgactcaccgctgttcgctctcgccgaggaacaagtcggtcaggaagcccgcgcgcaacagccatggcttttaaggataccggaaaaacacccgtggagccggaggtggcaattcaccgaattcgaatcaccctaacaagccgcaacgtaaaatccttggaaaaggtgtgtgctgacttg

SEQ ID NO: 27311 - DNA, 427 bp, Glycine max
gatagaaacaaagtgctttgctactaagcaaacgggaacaatatgggtaatcacagtaccaacatctccctgtttgcttattgatttgcttcttccgatcccatcacgaagtgcaaatagcaattccgctactcacaaaaaaccttttcctattccctttctctttcctgaacccaacacaacaacacaacacaggataaataaattaaattaaaaactagctaaattcctctctctctctctttctcttcgagggtttgggtttctcttcctcccttggagaaaaagaagagccaccgctgcgacgccgttcgtgcatttttgaagtgccgctgtcatgtttgggcgtggtggaccaaggaagagtgataactccaaatattatgatattctcgggatttgcaaaaatgccagtgaagatgaaatc

SEQ ID NO: 27312 - DNA, 431 bp, Glycine max
atcactgaaagcgaagatggcatgattagtttggcgctgatttgctcgtttaatcgaatgcgaaagcaccttaatttgggtgatgtaaagcccgaagaagtggcccaagataccgtgaatgctgttgctcaaactttgagaaattcagctacactcaaggtctccgaagatgggaaaaaagttggcaggaaaactgaacttccaaagctagaagaggttgagcaggtggagataagaacacttgctgtatcgccatttgaacatgatctgaagcttgaagatgtggagaaactctttggtcaatatgccaaggttaatagtgtccggcttccccatcatgttggagacaaaaagttcttctgtggcactgctcttgtagaattttcttcagaggaagatgtagaaaaggtcatgaaggaaaaattggtata

SEQ ID NO: 27313 - DNA, 93 bp, Glycine max
tttcttacctgctacaattctaggaacatgaaaatgccattcgcacgatatgttccctcttctaatgaacactggctatcaaacccgtactcc

SEQ ID NO: 27314 - DNA, 437 bp, Glycine max
gagaaagagcgtgagaagaatgttgaggaagcaagggaggctctgcagtttcttgagaatgagataaaggacaagaagttctttggaggagaggagattgggttggtagatattgctgctgtctacatagcattttgggtccctatggttcaagaaattgcagggttggagttattcacaagtgagaaatttcctaagctccacaattggagccaagaatttttgaaccatccaattgtcaaagaaagtctgccccctagaggtcctgttttctcctttttcaagggtctctatgaaagcctttttggttcaaaatagatttgatgatgtggtgtgagacttagtatttctaagaattatgtgtttgttaaaggcttctatgaaagcctcactgcttcaaaatagattcatgtatgtgagactcagaatctctgggg

SEQ ID NO: 27315 - DNA, 320 bp, Glycine max
ggagggtggagagagagagaagtgagagtgtgagagggagcacagtgaagaagagaacgaaggaacgaagatggagactcctcctccgcaacaaggcgtggtgaagaagaaggagacaaggggccgaaaacccaagccgaaagacgaacacgccaaggcgttgaaggaagggagaaaaacacagcaacaacaacatgatcagcagcaacaacaacaacagcaacatcaaccttcggtggacgagaaatacacgcagtggaagtcccttggtcctggcctctacgactggctcggtaaccacaaccttgtctggccctctc

SEQ ID NO: 27316 - DNA, 349 bp, Glycine max
  modified_base (340)..(340): a, c, g, t, unknown, or other
ggtgggcaaatttagttaaagacttcattcccaatggtgttgatggtatatggaatgatatgaacgaaccagctatctttaaggttctaacaaaaacaatgcctgagagcaatgttcatagaggagatactgaacttggaggttgtcagaatcattttttctatcataatgtctatggtctactgatggcaagatcaacttatgaaggcatgaaactagctaatgaaaagaagcgtccttttgttcttacgagagctggattttctggcagccaaaggtatgctgcaacatggactggagataatctttctacatgggagcatcttcacatgagtatctncatggtact

SEQ ID NO: 27317 - DNA, 298 bp, Glycine max
ggttctagtgtgtgattgtttgttgttgtaactcgttcttcttcttttgttgttctgtgtttgtgtttgttttttctctcacctgaaaatgtcttgctgcggtggtaactgtggttgcggaagctcctgcaagtgcggcaacggctgcggaggctgcaagatgtacccagacttgagctacactgagtcaaccaccaccgagaccttggtcatgggagtggcacctgttaaggctcaatttgagggtgctgaaatgggtgtgcccgctgagaacgatggctgcaaatgtggaccaaac

SEQ ID NO: 27318 - DNA, 382 bp, Glycine max
gacacaaaaggagcatcgagtaggtttcctactcccttctcatcgttggcaagatgagtgccatgaaattttgccgtgaatgcaataacattctgtaccctaaggaagacagagaccagaaagttcttctcttcgcttgccgcaactgcgaccatcaggaggttgctgataacttctgtgtgtataggaatgagatacatcactctgttggagagcgcactcaggtgttgcaagatgtcgctgcagatccaacgcttactcgaaccaagtctgttcgctgcagtcaatgcaatcatggtgaagctggctttttccaggcaactgccagaggggaagaaggaatgacactttttttcggttgctgcaacccaaactgtggaca

SEQ ID NO: 27319 - DNA, 342 bp, Glycine max
gggtatcatgtgaatgacacacacatttggtgtgggaatttagggactgataacgggaaggacgtgtttggttctgcttgtgagaacccttcacagtatataagttgggacagtgttcattatgctgaggctgcaaaccattgggttgcaaatcgtatactcaatggctcttacactgacccaccgacacccatcacccaagcatgttacaggcattaagcatcatagtcagaaaatcatttctgattggacattaattcctaaaggaacttatatatcagaaattgtaatattgcttgagacttttatttattcctgtgctagatgagaaccactagtttg

SEQ ID NO: 27320 - DNA, 343 bp, Glycine max
gtcaacaacagcagtccaagaaatttggatcatgatggaagaattgacaatgaaagttctgggacaagtacttcattacaacaaaatgctaccagtcatcaaaaaagtttccaagtggttctttactacctgataattgtctttttcccaaaaagattgttactgatggggacagggattatctacaaacaaagtattcttcagacaggaatcacagtggtccgttgcaatatcggcagaagagagacaccaacaaccttccattggttgatgacacatcggatggagcatttgtccagtttaaggggcggtttaaggtcacgccggcagatcttatccaatg

SEQ ID NO: 27321 - DNA, 208 bp, Glycine max
  modified_base (83)..(83): a, c, g, t, unknown, or other
ggagggtggagagagagagaagtgagagtgtgagagggagcacagtgaagaagagaacgaaggaacgaagatggagactcctncttcgcacaaggcgtggtgaagaagaaggagacagggggccgaaaacccaagccgaaagacaaacacgccaaggcgttgaaggaaggaggaaaaccacagcaacaacaacatgatcaggaacaac

SEQ ID NO: 27322 - DNA, 364 bp, Glycine max
ggaagaagaagaaggttggttgattggtcccattgattccgaagagaaaagaaaagatgtttgagccacaacagctatacactcgcgcgaagaccgaggaattcgacctcgaatcaggagaaaccctctacccagggctgagcgtcggcgagaaccagctccgatggggtttcatgcgcaaggtctacggcatcctctacgtgcaaatcgtccttaccacccttgtctgcgtcaacaccggtttctatactccaatcaatgaccttcttaagggcaattccagccttctacttatactgctcttacttgccttcatccttttgaatcccctggtgaagtaccagcagaagcattctcataatta

SEQ ID NO: 27323 - DNA, 245 bp, Glycine max
gagggtggtgagtagtgaccaaagcaaacgcactcactctattattgaagggaagatgaaagatgaagatggcacaccccaaagtgcacgtaaaggacagtacaagttgtgggtgttgggtgctatcattcttcttgctctttggtccatgttcactgcttctcttactctcaaatggtcagctgtgaactctaaccgtgacttcgattctgccactctcaacgatttccatgtcctggaagtgg

SEQ ID NO: 27324 - DNA, 366 bp, Glycine max
tgcataatgggtcaacaacagcagtccaagaaatttggatcatgatggaagaattgacaatgaaagttctgggacaagtacttcattacaacaaaatgctaccagtcatcaaaaaagtttccaagtggttctttactacctgataattttctttttcccaaaaagattgttactgatggggacagggattatctacaaacaaagtattcttcagacaggaatcacagtggtccggtgcaatatcggcagaagagagacaccaacaacctttcattggttgatgacacatcggatggagcatttgtccaggttaaggggccggttaaggtcacgccggcagatcttaatccaaagggttctttaaac

SEQ ID NO: 27325 - DNA, 311 bp, Glycine max
ggcggcagagagtggttgtaagaaaaggaaatgaataagaaggaaataatggtgatggttccgtatccggcacatggacacgttagtgccatgcaaaagctaggctgggaatttgtgaggcacttgttcgaggctgtgattgtgatccccaaatttattcacaggcagatagcagagcttcagaaaaatgatgagaatgagatgataaagtgggtggctctgccagatcatgaagaagaagaaggaagcaacccaccagaagatttcttcgccatagaatcggccatggagaacagcagcatcacaactca

SEQ ID NO: 27326 - DNA, 298 bp, Glycine max
ggttctagtgtgtgattgtttgttgttgtaactcgttcttcttcttttgttgttctgtgtttgtgtttgttttttctctcacctgaaaatgtcttgctgcggtggtaactgtggttgcggaagctcctgcaagtgcggcaacggctgcagaggctgcaagatgtacccagacttgagctacactgagtcaaccaccaccgagaccttggtcatgggagtggtacctgttaaggctcaatttgagggtgctgaaatgggtgtgcccgctgagaacgatggctgcaaatgtggaccaaac

SEQ ID NO: 27327 - DNA, 323 bp, Glycine max
gagcgaaacagagagtgatttcagtgagtgatcggtgttcacttgatctcatcataatcgtcagcgtcaattgaagaagatgccgatcagaaacatcgccgtcggaaggcctgaagaggcgactcaccccgacacgttgaaggcggctttggctgagttcatctcaaccttcatcttcgtgttcgccggctcaggctccggcatcgcctacaacaagctcaccgacaacggcgctgccacccctgccggcctcatctccgcctgcatcgcccatgcattcgccctcttcgtcgccgtctccgtcggcgccaacatctccggcg

SEQ ID NO: 27328 - DNA, 380 bp, Glycine max
gacctaaacagagggtaacaaaacaagcaaacaccatggtgattaagtctgtgttgttcagcttcattttccccccgccaccttctctggtggtttgggggttgactgtgacaagcttcctgatactggctaatgctttcttgtcagaaattagagggaagcatttgaactattcaaagttttggaatgctaatccctctgcagaaaagcaggtcaagttgtctagcaaagctggcatgcttttgctgtacactcctgcttttcttgctggccttgcatccttctgggtctttcctcatcaagggctcagattcaccatccttcaatctgctgttactctgcactacttcaagagggtctttggagttctgtttattcac

SEQ ID NO: 27329 - DNA, 338 bp, Glycine max
gaagaaaacaagggaagccacatggtgtttgaggttgatcagggtttggatagaaaagatgaggaggcagagaagagttgtgattgttctgtgtgtgatgctagtgtggagatactgcgtgatgaaatttgcaagttggatttgggtgtggagaaaggaaaagaaacaattgacgaggaaagtttgaatgtccctaatcctaaggttgatgatggtgatgatgatgttggtggtgctgatgatgatgatcaagcttgcgagaaattcagtgctcaagttgattgcactagagagataactgtggagactttcaccatacatgttgaatttttcattca

SEQ ID NO: 27330 - DNA, 240 bp, Glycine max
ggaaacaaacgaggtttgatttcatgtctggttgttccaatgaggaggaggagatttcgttctcagaatccgatcgtcacggttacgaaggaggcagtgacgatgacgattccgaaatcggaaagaatgaacatcgcagcagcagaagaagaagaatgggtagtggttttggaaaggtggtggtgcaccaattcacgaaagcgaagaagcaagtgcgcaggatcagtagcagaaagagtc

SEQ ID NO: 27331 - DNA, 374 bp, Glycine max
gaagaggaagctcagaaagaggctagccagaggtataatggaaagcagtttcatttaagccaggatcctgacgttcttgatacatggttttcttctggtctgttcccattatctgtgctgggatggcctgatgacacagaggacctgaagacattctatccaacttctgttctggaaactggccatgatatcctctttttctgggttgcccgaatggtgatgcaaggattgaagttgggtggtgatgtgccttttacgaagatttatttgcatcctatggttcgtgatgcacatggacgcaagatgttcaaagtcttatggaatgttattgatcccattgaagtgataaatgggatatcacttgaaagtctaca

SEQ ID NO: 27332 - DNA, 410 bp, Glycine max
ggggaattgggagtttcattttcattaatttttatttctccccttttctcaatgcttttcttaatgttgaatccttcacaaatcgtcaagagttagcccacccagaacaacaacgcgtttcagctggccacacacattcttaatttttttggctggcctatagtaaaaactcatatcaatgtcctcaagaacgttgaggagaagactccatcatggggatgttgatggcaaaaggcaggagcatttggagacttcgggattagattcgttgagtgagcccttgctggcagatgatgattatattgagaataagaagatatgtactcttgaagatctatgggatgatgagaggaagaaggcccagtttcattggacattcatattctcaaacctcattgcacaatgggcac

SEQ ID NO: 27333 - DNA, 369 bp, Glycine max
  modified_base (328)..(328): a, c, g, t, unknown, or other
  modified_base (357)..(357): a, c, g, t, unknown, or other
ggacacaactgcgacttagttcatcccttctcaagccaccgaagcctcactttttgaaattacttgcatagatagataatcatggctatgatgaaacgtgctgcttcctctgcgcttcgctctcttattgcctcatcctccaccttcaccagaaaccttcatgtaagcccaatcaaatgttacaaattaattgcatgtttttttttaaaaacattattattttctcaaactcatgatttttgtgtcaattatattaatttaacttaacatttcttctgggatttggtcctgtgaagtttttggtgtactttctctctcttgcatgctngatccatcatgatcacgggatgccaaagnttctctctcttt

SEQ ID NO: 27334 - DNA, 330 bp, Glycine max
gaaagaacttgtatctgagcctttaattagtcgttatggtaacgatgaaggtattcctgaactcagagcagcattagtcaaaaagttgcgtgatgaaaataatttgcacaaatcttcagtaatggttacatcaagtgccaatcaggcatttgtgaatctagttcttactctctgtgatccgggtgattccgtggttatgtttgctccttactacttcaatgcctacatgtccttccagatgactggcgttaccaatattctagttggtcctggtagctcaggcacactccatcctgatgcagattggttggaaagaatattatcagaaac

SEQ ID NO: 27335 - DNA, 333 bp, Glycine max
  modified_base (220)..(220): a, c, g, t, unknown, or other
  modified_base (265)..(265): a, c, g, t, unknown, or other
  modified_base (273)..(273): a, c, g, t, unknown, or other
  modified_base (302)..(302): a, c, g, t, unknown, or other
ggtaggaaaacatggtaagttcgcagatgttaagaatgtgcgagtgacatgcacacacacatgttctttgtttgattgaggcttctgaacagtttctgacaccgaaattcagccacaaagttgaccatcttgggatggatgagaatatcatcatgttccaccatttccccacattgatacaacaaggagattccaacaattgaaaactccttatcatctntctcttgcaacatcgtttcgcggttcctttgccgtgatttcaatngtgcatangaaacatcactcactacttcttttctctnctttttcattcaatttctctgattgacacaa

SEQ ID NO: 27336 - DNA, 400 bp, Glycine max
ggagaaaaaagattgtttgttgctgtgttgtgtgcatagagggggagagagagtgtggaggctgctatggggaacagagctatgttaacgctgctactcttcttcttctcgaccaaattgtttccttccgctctggctatctggctgtcgttacccaccactggcaccaagtgcgtctctgaagaaatccaacacaacattgtcgttttggccgattacgtcgttatccccagtgatcacacccacaaccccaccatcgccgtcaaggtgacatcaccatatggaaacaatcttcatcacaaggagaacacaacacatggtaatattgcatttacgactcaagaggctgggaactaccttgcatgcttctgggtgggtagccatagtcaaggagttggtg

SEQ ID NO: 27337 - DNA, 376 bp, Glycine max
gatggtggtaataataaaggtgaaggtgaagtcagttcaggaaagcctgcggagcaaagcgctaagccagcttcggagcctccgaagcaagactacattcacgttcgagccaggaggggtcaagccactgatagtcacagtcttgcagaacgagtaattttttgtttttattgtacttgagagggttgtgtttggaaaaatgaagtgaaaatgtgatgttattgtgagtttaccttttctgagttaaaggggtaattttgaggttattgatttgtttggattaaagttgttgactgtgattgatttctgattgggatgtttgtggatgctggacaggctcgaaaggaaaagattagtgaaaggatgaaaattcttc

SEQ ID NO: 27338 - DNA, 400 bp, Glycine max
gacagtgagtgtgggaggagagtcacaactcacaactaccagtccttgctttgcatcgtgtgagtttgggagaggaaggaagctactcggaaagtgattccttcctcggcgaaaaaaaaccaaaccattcctttataaccataaagtgccttcttttttcttcaccaccactccattactctcttcacactccacacacacacatacacacctctaccttgtgtttgagattgaggaatatcagaaaatgaaaatgggtaaagggatgatttttattgctgctctggtggtcatttgcctcggtgggaaatgggtggaagcgcaggtgcaccatgtggtcggagcagaccgtggttgggatcaaacctcagacctcgattcctgggctgcaggcacggtc

SEQ ID NO: 27339 - DNA, 390 bp, Glycine max
ggagagagagagagagaaagttttgagtgacacatcttttctcctcctcacacagcaggaacacaatggattcttcttcatcagcaagtgttagtcagcatgccaaggttgttccaaaacaatttgacatcttcttccatgcaggaaggtacccttcatctcgcaggactcattcctcttcctcctcttcctcctttgaatcattctatttcccagaggatcctcttcttagtcctgcatcccctcttagattctctggtgttccattttcttgggaacacttgcctggaattcccaagaaacaaaattctaaaaagaagctgcaagagtcttccttgaaactactaccatttgccccttcaactaccacacactgttcttctaaaaagc

SEQ ID NO: 27340 - DNA, 357 bp, Glycine max
gggggaaaagcgtagtcatcagtttgccgatagaagtagaaaatggaatcttgatcgtattatctttgttgctcatccattactccttctgcagtagaataatatataaagagagaagagtgcaatctagaaccacatagttattttactgtgtgagtgagagagagaaaattaacatgggaagaggaagggttgttctggagagaatagagaacaagatcaaccgtcaagtaacattctcaaaacgcagaagtgggttgctgaagaaggcctttgagctttctgtgctatgtgacgctgaagttgcccttatcatcttttctagccgtggcaagctttttcagtacagcagcactg

SEQ ID NO: 27341 - DNA, 360 bp, Glycine max
gtagtgaaaggcaccaaaatccaaccacatcaatagccatgaaaaccacactctcactctctcctttacttctcttcctactcttctccctagtccaaggactcacccccaaatgtgacacccaagaccatggctcaacccttgaagttttccatgtgttcagcccatgttccccatttaggccatcaaagccactctcatgggcagagagtgtcctccagctgcaggccaaggaccaagccaagctacagttcctggctagcatggtggctgggaagtcaattgtgcccattgcctcaggaaggcaaattattcaaagcccaacttacattgtgagggccaaaatagggaccccaccac

SEQ ID NO: 27342 - DNA, 325 bp, Glycine max
tgggatcacacgatggcatatttaaaggaactgccagaaagtaattggctttgttgcaatgattgcacaagaatacactctactttggagaatcttttggttaaggtggctgagagactccctgaatctatcttgggtgttataaagaagaagcaagaggatgaaggattagaaccgatcattgatgtaagatggaggcttcttaatggcaacattgcttatcctgaaactagaccattgcttctggaggctgcttgaatctttgatgaatgctttaatcctatagtcgatgcaactagtggacgtgaccttattccagccatgg

SEQ ID NO: 27343 - DNA, 390 bp, Glycine max
ggaggaggatgaagaagaggaggaggggttgaaggaagaggtggatgcaaatggggacgtgaagatgggtgagattgatgaggggcaggttcaggagttggaggagcaccgcattgagttgagtctcgggcaagataataatgttgagagggttgaagttgagaaggagcagggtggagaggagcagatgatggatgtgggttttgagcagtctaaggaggaggatatgcctggaatgtggcttttggatcagaagaactgtgtgggggagccatttttgcggccttgtcatggtggtgatgtgaagggtgtggaagttgaacaagtgagagaggacgatggagaaagtgtgcatgaacaagaggaggtggaggaagatgaagaagagga

SEQ ID NO: 27344 - DNA, 398 bp, Glycine max
  modified_base (255)..(255): a, c, g, t, unknown, or other
ggtcgtcgcaggcgcagagtagagcagcacagaagagggaaaacggcaccgccgccgtagaagaaaacaaccatggtgcacgtctccttttacaggaactatgggaagacattcaagaagccgcgtcgtccgtacgagaaggagcgtctcgacgcggagttgaagctggttggtgagtacgggcttcggtgcaagagagagctgtggagggtgcagtacgcgctcagccgcatccgcaacaacgcgcggaacctnctcaccctcgacgagaagaacccgcgccggatcttcgagggagaggcgctgctccgaaggatgttccgttacggtctcctcgatgagacacagaacaagcttgattacgtcctcgccctcaccgtcgagaactttctcgagcg

SEQ ID NO: 27345 - DNA, 268 bp, Glycine max
gacaccaatgtgaatgcattaactagagaccacaaaacagctcttgacattgctgaagaccttgccctcttcgaagaggcatcagatataaaggactgtctttctcgatatggagcacttagagctaacgagctcaaccaaccaagggacgaactgaggaaaactgttactcaaatcaagaaagatggttacacccaacttgaacggaccaagagaaccaacagaaatgttcacaatatttacaaagagctaatgaaactccacaggg

SEQ ID NO: 27346 - DNA, 372 bp, Glycine max
gatcgtgagaaaagagaaaggaaggaaaaatggagttgttcttctacgcggtgttcggcggtttgggagcggttgttgcagtgacggagctgagcaagagcaacaaggaccgaatcaacacctcttccgcattcaattccttcaagaacaactacctcatcgtctattccctcatgatggctggagattggctacaaggtccatatgtctactacctttacagtacatatggatatgggaagggagacataggacaactcttcattgctggttttgggtcttccatgctctttggaacaattgtcggatctctagctgacaaacaaggccggaagagggcttgtgtgacttactgcataacctacattttga

SEQ ID NO: 27347 - DNA, 396 bp, Glycine max
gggtgacagagagagagaagttttcagtttcagaaagaaagcaaaagcaatagcaatgggttggatcggtgagactgttgattccatcaaatctcttcagatccgccaggtcctcacccaggctgtgagcctaggcatgattgttacgtctgcactgataatatggaaggcattgatgtgcgttactggcagtgaatctcccgttgttgttgttctttctggaagcatggaacccggattcaagcggggagacatcttggtcttgcacatgagtaaagatcctattcgggcaggggagattgttgtgtttaatgttgatggacgtgagattccaattgttcatcgtgtaattaaggtacatgaaagggaagatactggggaggttgatgttctcac

SEQ ID NO: 27348 - DNA, 329 bp, Glycine max
cgggtgacagagggcgagaagttgtcagcgtcaggaagatagcattagcgctatccgcgggtcggatcggtgagactgttgatagcatcatatatgttcagatccgacaggtcctcacacaagctgtgcgcctaggcatgattgttacgactgcactgatactatgtatggcattgatgtgcgtatctggcactggatcttacggtgttggcgatctttctagaagcatctagcccatattcaagctgcgagacatgatggtcttgcacatgagtaaagatcctattatgccactagagattgtcgagcataatgtacatcgacgttag

SEQ ID NO: 27349 - DNA, 406 bp, Glycine max
  modified_base (366)..(366): a, c, g, t, unknown, or other
  modified_base (372)..(372): a, c, g, t, unknown, or other
ggtggtggaatagtccaattcggacattgaaaccatcaccagtcaccacctttctcgcatcgcttgttggatttcaaactctgccatttcgattccttcgttcactcgttattttgcatgactattgtagaggctgcagcctggatgattggtggactttaagcttgtgaaagaataattgccgaatggaacttgcaagacctgcctcaagtagaagaaaattgaaagatttattgcttcagagtgataatcgtctttgtgctgattgtaatgctccagatcctaaatgggcgtctgccaacattggagtttttatatgcttaaaatgttgtggtgtgcacagaagccttggtactcatatatcanaggttntgtctgtgacattggatgattgggcagaggatga

SEQ ID NO: 27350 - DNA, 406 bp, Glycine max
  modified_base (313)..(313): a, c, g, t, unknown, or other
ggggaatggcgagagtacgagacagagagcgaaagtgacggtgtgattagcaagtaaagacatggatggtgttaggaactgataaagctaccactctggcttagttagctaagtttggttttggttttggatgagaagaaaagtggaggaatcgacacgagtgagtgagaacaagacagtgcacttgtcatcagtcaacatacacgcatgcattcattcagttatgaggactgaataaaagattcaattttctatgacgtcgatcaaatcattgagatggctgatgagaaaaaagagtggattgtctgatggnggtaaatcaagtttcaagatgaaacagctgccttttcttgcagttttgtgcacattattgttattcattgtgtatagaactacaaagtatcag

SEQ ID NO: 27351 - DNA, 398 bp, Glycine max
ggagaacaaaacaagtgtttcgaatagattatcctaagtctttgggaatagtgctgcaatggcttcaagtcaggaggaggtgacccttttgggagctactggaagcccatttgtgtgcagggttcatattgccctcaagttgaagggagttcaatacaaatatgtcgaagaaaatttgaggaacaagagtgaactgcttctcaaatccaacccagttcacaagaaggttccagtgtttattcacaatgagaagcccatagcagagtctcttgtgattgttgaatacattgatgagacatggaagaacaaccccatcttgccttctgatccttaccaaagagccttggctcgttctggtccaaaatcattgatgataagggttttggtgctgcatggaa

SEQ ID NO: 27352 - DNA, 356 bp, Glycine max
gatagtcagcaattctgaattgtcaaattgacccgctaccttttcccgtgtacgaacgaatccaatccaccaaatcggcggcgacgcctccgctctgtctcgaaaccacagatctgcggcggaaccgccgtctccgactatctccgattgatcttccggtaaagtggaccggagatgccggttgccgcttccgccatttacttcctcaacctccgcggcgacgttctcatcaaccgcctctatcgcgacgatgtcgggggaaatatggtggatgcttttaggacgcatattatgcaaacgaagggagctggtacttgcccagtgaggcagattggtggatgctctttcttttacat

SEQ ID NO: 27353 - DNA, 421 bp, Glycine max
ggagctgaaggcaaaaaggacacaccgtttcatagtttttaagattgaggagcagcatatgcaggtcattgtggagaagcttggtgagcctgaccagggctatgaagatttcactgccagccttcctgctgacgagtgccgttatgctgtttatgattttgagtatctgactgaagggaatgtccctaacagcagaatttttttcattgcgtggtccactgacacatcaagggtgaggagctagatgatttatgcaagctccaaagacagattcaagagggagctggatggaattcaagtagagttgcaagcaactgatcctactgagatgggtcttgatgtgttcaaaagccgtgccgactaaaatgattatataaaatactaagctttctggtgggagcagcacccctgaagccttatt

SEQ ID NO: 27354 - DNA, 308 bp, Glycine max
ggagcgaagagtgaagagaatggctcccaaggggttaacctttctggctgtgttaatatgcgtttcagcactgtcactgagtccttctgttgctggggaagggcaaaataatggccttgttatgaacttgtacagggaatcatgccctcacgctgaagacatcatcacagaacaagtcgagcttctctacaagcgccacaagaacactgcattctgctggctcaggaacatctttcatgactgagctgttcagagttgtgatgcttcactgatgctggactccacatgaaggagcttgtctgagaagg

SEQ ID NO: 27355 - DNA, 398 bp, Glycine max
  modified_base (324)..(324): a, c, g, t, unknown, or other
gatactaaataataataatagatttatgactagacccatgagactcttgctagctatataaatactttcatcttgacatttctaaaaccatagcccactcatatccataaacacaaataagcactggtgaccttggagagaaaaaaaattaagatcaaaatgcctgtgttcatccctaggattgagtacaagactctgggtccgaatacaatcgtcaccgaagatcaaataagggaaatattgagaaaagcagatagtaatggagacggtcgtttgagcaaagaagaacttaagaaagctttcaaagaatttggatccaagatngcccgatggagagcatgtcgtcttctaaagaaagctgacaccaaccacgacggagtactcaccatggaaagaac

SEQ ID NO: 27356 - DNA, 396 bp, Glycine max
ggatagtgagagtgagagatggatcagctttcggggagggtgttgcctttgcttacaatccttgcttgctttgaagtgctcttctactagcaggattcttacacagcgcagttatttcctgtcataaagttaccgcgggataagtgcaaccttcttacccatcgacacttctggatatccagcaaacgtattgtgaccccacaagggatcatttctggttcagtggagataaatgatcggaaaataatatctgtcgttgatggacatgctattcatgggaagcctaagcaagtagaagtaattgactatggaaatgctgtgatcatgcctggcttgattgatggtcacgtacatcttaatgagcctggaacaactgagttgggaggatttgatact

SEQ ID NO: 27357 - DNA, 396 bp, Glycine max
ggttgcaacagagagacagaaaaaggactcacaatcacgaaggagaagaaacccaataagtgattctcatttttatggctcttgccctgaagtcaagttgcttcttgcaattgaagaaacctgaggctggtttcaatgattgtttttcatctaagaaagctataatctgcgtgaaacgacacactcccgtggctgctatcaggaccatggaagcagtgggactctctgcaacattcaccaggttgaaaaaagaaggaaaagtagctttcatcccgtatgtcactgctggtgatcctgacctttcaaccacagcagaagcactgaaagtgcttgattcatgtgggtctgacataattgagctaggtgttccatactctgatcctttagcagatggtc

SEQ ID NO: 27358 - DNA, 414 bp, Glycine max
ggttgcagggtggtggatggtgtaataatattagaacatgtgtttatcgcaagaaaacccggcgtggatcatcagatttcatggaaaaggagataccttttactggaatattaagtaataaggctgaagaaaatccagattttttcaattggaatagagtaaagcttcgttattgtgatggcgcctcatttactggggatagtgaagatgagactgcagaactgcaattcagaggacagcgtatttgggcagctgcaatggaagatttgatgtcaaaaggaatgcgttttgccaatcaggttatagacatatataatgctatttcagtaatctttcatctcatgctatgtacatctcattttgcttcaggctcttttttcgggatgctctgcgggtggcctggctactattatt

SEQ ID NO: 27359 - DNA, 347 bp, Glycine max
  modified_base (341)..(341): a, c, g, t, unknown, or other
gaagattcagagggaagaactgctttgcattttgcctgtggatatggtgaggtgaaatgtgctcaagttctccttgaggctggagcaaaagtggatgctttggataagaataagaacactgctctccattatgcagctggttatggcagaaaggaatgtgtggcccttctccttgaaaatggtgctgcagttactctccagaatatggatggtaaaactccaatagatgttgcgaagctaaacaatcaaaatgaagtcctgaagctacttgagaaagatgcttttctgtaattgcaatgcatgatgccatgctgtcaccaacaagcaaaggggaaactgangggaag

SEQ ID NO: 27360 - DNA, 203 bp, Glycine max
gttcctaaaattaaagaaacctttaccccattttaaggagggtccaatttttatttagattaaagattttgaatatctatccggatatatatatattttggttttaattaattattattagaaccttcctttttcttaaaaaaaaaaaaagttaattaaaagatttgatataatcgcgatttccattccaatatatatattcc

SEQ ID NO: 27361 - DNA, 380 bp, Glycine max
  modified_base (335)..(335): a, c, g, t, unknown, or other
ggtgggcgaggtagccagagagtgatacaatacagagtgcgttgttgctccttcgccacaactccctgccaacatgggtatctccagagattctatgcacaagaggcgtgccactggtggcaagaagaaggcatggaggaagaagagaaagtatgagcttggtcgccagcctgctaacactaagctgtcaagcaacaagacagtcaggaggatccgggttagaggtggaaatgtgaagtggagggcactgagattggatactggaaattactcctggggaagtgaagctgtaactcgcaagactcgtatactagatgtggtttacaatgcctcanacaacgagcttgtgcgtactcagactcttgtaaaaagtgctattg

SEQ ID NO: 27362 - DNA, 360 bp, Glycine max
ggagaaaaacgagccaattcatcattttctctcttctctgcttcttcttgttcaaatcttaggagctgaggagaatcaatcgagagaaatatgtctggtatcgctcgtggacgccttgctgaggaacgaaagtcatggcgcaaaaaccatccacacggtttcgttgccaagcccgagactctacctgatggcaccgtaaatttgatggtctggcattgcactattcctggcaagaccgggactgattgggagggtggatatttcccactgacaatgcacttcagtgaagattaccctagcaaggcctccaagtgcaaattccctcaaggtttctttcaccctaatgtgtatccatctgga

SEQ ID NO: 27363 - DNA, 436 bp, Glycine max
cccacgcgtccggacgacagaagggggcaatcagcttccaaaatgactcaagcccagattcaaccagttaaacttggaacccaaggctttgaggtactattaactacattacttgctcttattttgataattgatacaattaatctcattctaggtttcaaaattgggattcggatgtatgggccttactggagcgtacaatgaccctctccaagaacaggatggcatatctgttatcaagtatgcgttcagtaagggaatcacattttttgatactgcggatgtttatggagccaatgctaatgaacttttggttggaaaggctttgaagcagctgcccagagaaaagattcagatagccacaaaatttggtattgcttcacgaggttttcctgatatgaagatcaagggttcgcctgaatatgtgcgatcatgc

SEQ ID NO: 27364 - DNA, 342 bp, Glycine max
gagaattagatatacatattttatttatttgcttaggatattgtcctaaaacttacttgcttggaccccagtagttgagttgaggaagtgatggaagcagtttacaggttgaaacctcttttggatgtggttagagttgggaacgctaccacttctgagatgcgtcttgactcaacggctaattgttacctgcagctagaagctcctcaacctcaagagaataataatgtaaccgactcatcatcagatatgtcggatcggataatcaagatccagatcgccaatcaccctctttatccagatttactctctgcatatattgaatgccaaaaagttggagca

SEQ ID NO: 27365 - DNA, 340 bp, Glycine max
gcagaagaaatagcagcattggacaccattgatgggggaaagcttttcagttggtgtaaggctgtggatgttcctgaagcatccaacatcctacgttactatgccggtgctgctgataaaattcatggagatgtgttcaaaacatctcgcaacctccacttgtattctctgatggaacctgttggtgttgttggacacattatcccttggaatttccctaccgtcatgtttttcgccaaagttgccccggccttggctgctggctgcaccgtggtcatcaagccttctgagcaaacacctctgtcatcactcttttatgctcatctttctaagttggctg

SEQ ID NO: 27366 - DNA, 294 bp, Glycine max
ggagggtgtgaattctaaaaggaaagaacagctgatctggtcagaaaatcaatggcatcatccttgggttttgagttcctgacgaagaagccttacagtccttcatcctgggcattccatctccaccctttacctttccacttcttctctcttgcccatcttgccactccaattcacagatggaaccttgcctatctgcccatcaataccgagctgtggatcaagcgagacgaccttttcggaatgcatctgagtggtaacaaagtgaggaaattgggagtcctgatggccgat

SEQ ID NO: 27367 - DNA, 159 bp, Glycine max
gtattgatgaattgctagatacattctctacctgggcgaatttgggctttagtgacataaactgcaatctaagataatctgtctgataatcggtactgtgagtctgcatattcactagatgcaatcatggtatgctggtcatattctctcttatgcata

SEQ ID NO: 27368 - DNA, 414 bp, Glycine max
gattgagtaatagagaatatgataaaatattatgagttttatgttatctcagagacttagacagttagacataatgcatatggtttaatctggttatataatagtatgaatgataatactagtattagtaatatgtataattgaggatactttcctatcctaatatgattatgagattcagttatagtgtaagagaatattcttctctttatattgtcttttactgtattcttctcttgtcagttataactgtcactgtcagacagttacaactgactcctcctatgttagctggtcctgatagtatatatagggttgtaactcagtgacttttgtactttccatataagatcaatgtaagttttgtttctattttctctgtaaatctaatatatagcaatttaaattttattt

SEQ ID NO: 27369 - DNA, 360 bp, Glycine max
  modified_base (255)..(255): a, c, g, t, unknown, or other
  modified_base (277)..(277): a, c, g, t, unknown, or other
ggagaagagaaggttacagaaaaacaaaaacctgtctctgtttctccgtcgtggcaattgaaggaagcactgtctgtctctgcaactttagtcacattcacatggcagcaacaacatcagggaagattatccaaaatgtttttgtttcacactgccaccaacagaatacacggggtcgaagggactattattggtttggcccttctccgctagggaagttggcatggactgactcttccatgcaattgcgcactntattcaaaccccagaatcattntagtttccagagaaattttcactgcaatgcttctgcatctgctactgctgtgccatatctagacaagacagattttctaaagc

SEQ ID NO: 27370 - DNA, 359 bp, Glycine max
acatgaagcccttgacttcacagcaggaggaacttttgtcttctgatgaccataataatgaaataactgaacaagggaatgttgacaacacggtggaacaaggaaatggtaaaatggaaggagacgtgcccaactatgatgatgctaagccactacaccttaatactgagcaacatgatgaaataaccagttcaagtggaagtgtctccgctgagggaaatgagccttcctttgaagagcggagcattcctggaaatgacctgtttgaaaaatcatctatttcaacatcaggcaatacattggtagatgagcaggttagaaatgataattatgaggttgatgaagttaaatctgaatct

SEQ ID NO: 27371 - DNA, 391 bp, Glycine max
gggagggcgtgggcgagggatatctatcttcattttcgtcgtcgttcatttttttatttttttttctgttttccattcgcttcttctctcagaaaagctcgccaatcgatcttgctctcttctacgcttttcgaattccttccattccattatggacgcagattagattcacgttcacattcacttctcttcgtttgcttcaaccactctgctctgctctgctctactctgagatccgatcgcattttcattcagaaaggaaactcgtgtgactgatttatgcgctaattgcaattgcactgcgagcgtccctgtgccgaatcggaagatgggattagtgtttcccaaattgttttcctctcttttcggtaacaaggaagctcgaatcctc

SEQ ID NO: 27372 - DNA, 381 bp, Glycine max
tgagaggaagaattaaattatgcttagggaaacctgcagatcaaagtattgtattggtgaaattccttggcacgtttggtgggctgggagatgcagagaggcttcataaatatctttcagataataattgcagtagagctgaatatgagagagtaaaatctgaaggtattaaaagctgcaacacgggagagacagatgagggagacaaagtggagaatattctttatggttacgtggggatcgcagaggacttggacaaactagatttcaatagtaagaaatggagtatggtaaagagtaggaaagagatcgacgacctagataaagctcctgttaaaaccgatgaaaagcgatagttacagtatcggttcaggagtttca

SEQ ID NO: 27373 - DNA, 389 bp, Glycine max
gaaagaagttcaggataaaagtagtgtagaatatcaaaggttaacgtgggatgctttgagaaagagcattaatgggcttgtaaataaggttaatgctactaatataaaaaatataattccagaattgtttgcggaaaacctgattaggggaaggggactcttttgtcgttcatgtatgaagtcacagatggcatctccaggatttacagatgtttttgctgctttggttgctgtcgttaatactaagtttcctgaagtgggggatcttttgctaagaaggattgttttgcagcttaagagagcttataagcggaatgacaagcctcaattactagcagctgttaaatttatagcgcatctggtgaatcagcaagtggctcatgagatca

SEQ ID NO: 27374 - DNA, 161 bp, Glycine max
tataacacaggatacgctcgctggttcattttgccactctgatataaagctggatcagactctgtagaacagattgttcgtacaaacctgggacaatggcggcacatactaaaacgactattgactagtcaaagcacgggtacagaggaagctgctagtgc

SEQ ID NO: 27375 - DNA, 394 bp, Glycine max
ggggaggaaggacgcactttgtgcttgccattgttaggaaacttgatgagcttcaggaattaccttcagtttttatcacttttcttgcatggagcatgggggaggtcattagatattcacattatgctttcggttgtttgggaaattgtccttcttggatgacctatctcaggtacactgcgtttattgtgctgtatcctttgggagtgggtcctggtgaaatatgggctatgtaccaggctcttccagttataaaggagaagaatctctatgcagattccttttcaagcctcccatttagttattatgatttccttaaggtggtacttatagattatccatttctctggttcaaactttacctgcatatgttcaagcaacgacgtacaaaact

SEQ ID NO: 27376 - DNA, 254 bp, Glycine max
tggggccgacgcggtgcacgttagccgagctgcacgaatccctacatatataacacaccgtttccctgtactgattatttttgccactctgctgcacagctgcttcatactttgtctcgcctattaaatgtccgtcactgcttcactctgcgccactttcagaacaactttcttatcatcgaaacccgtctcgagaagaagctgcttcgtcacggataccaaaattgcgtttaacaagcttcgattcaaacccg

SEQ ID NO: 27377 - DNA, 288 bp, Glycine max
ggatgtggagggtggcaaagaccctcttagtaacggtttatcatctgtgattcctgggtggttctctgaaattagttcaatgtggcctggataggctcactccttgaaggtggaaaagattttgtttcaaggaaagtctgaataccagaatgtcatggtcttccagtcatcaacatatggcaaggttcttggtttagatggagtaattcagctaacagaaagggatgaatgtgcctaccaagaaatgatcactcatcttgctctttgctctattccaaaccccaaaaa

SEQ ID NO: 27378 - DNA, 390 bp, Glycine max
gaagtacaagcagagagttacaacacatatttctgtttcttttccctttttcctaggcacagcacacgccctctcaaatagaaactgagagatgaattctgatcagtttcagaagaacagcatgttcgtagaaacccctgaagatggtggcaaaaacttcgacgatgatggacgagtcagaagaacgggtacatggataactgcgagtgcccatatcataacggcagtgatagggtcaggagtgttgtcacttgcatgggcaattgcacaaatgggttgggtggctggccctgccgatctctatggcttctctttcatcacttacttcacttccactcttcttgccgactggtatcggtcacctgatcctggtcatggcaagcgaaactt

SEQ ID NO: 27379 - DNA, 400 bp, Glycine max
ggagcaagagtgaagagcgaagagaatggctcccaagggtttaatctttttggctgtgttatgcttctcagcactgtcactgagtcgttgtcttgcggaggataatggacttgctatgaacttctacaaggaatcatgccctcaggctgaagacatcatcaaagaacaagtcaagcttctctacaagcgccacaagaacactgctttctcctggctcagaaacatcttccatgactgtgctgttcagagttgtgatgcttcactgttgctggactccacaagaaggagcttgtctgagaaggaaacagatagaagctttgggttgagaaatttcaagtacattgagaccatcaaagaagctttggaaagggaatgcccaggaagttgttcctgtgctgat

SEQ ID NO: 27380 - DNA, 369 bp, Glycine max
gatcccaagttcaatattgtctctcctggagctgatatgtcaatatatttcccctactctgaaaagcagaacaggcttacagccctgcatggttcaattgaaaagctgttatttgatcctgagcagactgatgaatacattggttcattgaaagacaagtcaaagcccataattttctccatggcaaggctagacagagtgaaaaacataactggattggtagaatgctttggtaagaacagcaaattgagggaactggtcaaccttgttgtagtagctggttatattgatgtaaagaagtcgagtgacagagaagaaattgcagaaattgagaagatgcacgagctcatgaaaaagtataatttaaat

SEQ ID NO: 27381 - DNA, 384 bp, Glycine max
gaagaagaagaaactgcctccgaaaccctaaccgaactcaagaacaacctgaagcagttagagcaagagattaagaccttcaaagacagcacaaaagatgttaccctaaaatcagagaagaagaagcagaagatgagcttgttcgctgtgtttaccaataagcagagggaaccgaaaccaaaggaggagtcactcgctgctgctaagaagctctcccccgatgtggcggtgttcgtgcagtacttgttcaagaaggggtatttcaacgacgccaatttcgctaaggggaggaagaactttaatcctgattggttctccaatgtcttcgccttaggctatatcaagtttgccgccaacaaattcgccagagatcatcgagaaatc

SEQ ID NO: 27382 - DNA, 383 bp, Glycine max
cgtcggctggcagagacacagagggggagtagtgagaagagtgttatattgggtggcgaagaagaaaaggagcagcggtccatacaattcaggagcagctataagaatccttcaacacaagagcatcgcctacaacaatggcagataattcaactgctcaggaagcaacaccctatttctccttacaagatgcctaaattcaacctctctcatagggtggttttggctccgatgacaagatgcagagcgttgaactggattccccaggaagcacttgctgaatactacgctcaaagatcaacaccaagaggatttctcatcagcgaaagcaccttgatctctctcactgctactgggttttcacatgtgcctgggatatattc

SEQ ID NO: 27383 - DNA, 378 bp, Glycine max
gtagaagaagaagggaagcaataatggagaaatacaagaagcagcatcagcaagtagaagcagtggttggaaatgaaggaaatgacaaggatgcagacattcctaatgacatctctgaagcatgtgatggtaagactgatgatgctgattatgtggagccatcatttgctgttgggaaatctcctgaaaatgtgaatgttgcttctaagaagatatctcctgctggaggcctgggtgagggtactccaaagagtgaaaggtcagaggacaagttttgtgatgatatatttggtgagacgccaacgggagttcggaaatcaggaaaaggagatggtttgctgattgagagggttggcctacatgacaattgggacgatg

SEQ ID NO: 27384 - DNA, 359 bp, Glycine max
gggatatagatagtgtatgtgctgatatctatgagtggcaaccaaatcttgtaagttatgacatgcaagcttctggcaaagtcagaagtcctgtgagaccaaaagcacatttgtcatgtggccctggacaaaaaatctcatcaatcaagtttactagctttggcactccagtagggtcttgtggaaactaccgcgaaggaagttgtcatgctcacaagtcatatgatgctttccaaaagaattgtgttggccagagctggtgcgcagtgacagtgtctcctgaaatttttggaggagatccttgtccaagtgtcatgaagatactctcagtggaagccatttgcacctgatcatttcaa

SEQ ID NO: 27385 - DNA, 394 bp, Glycine max
  modified_base (374)..(374): a, c, g, t, unknown, or other
  modified_base (377)..(377): a, c, g, t, unknown, or other
gagagaagagctgcggaagagtggtctcctgctccgacatcactgccctcactgcacgagatgctgttttccttaatttgataaaaacagtcaggaggaccagactatgagattcctttgggaaggagagacgggctaacctttgccacaagacaagtgacattggacaacctttcaccaccttcaagcaacgcctcaaccatcctaagctccctcgtcaccaaaaacctcgacccaaccgatgtcgtagccctctcaggtggccacaccatatgcatcagccactgcggttccttcaccaacaggctctaccccacccaagaccccgtcatggacaagaccttcggcaacaacctcagacgcacgtgccccgncgncaacaccgacaacacca

SEQ ID NO: 27386 - DNA, 397 bp, Glycine max
gtttgcagattggtgtaatgatgaagcattttgacctggggggtttcacttgtgcgcaaaaggttttcatcattacttccttttcgtttctttctttttctctgatcaagttatgatggtgttttgttgtcaggggggtgtaactacctttttcttcgttcatcattagccagagatcttctcccaagtatgttttcctgtatccgatctgtctgtttctgctatgttttctcagatctggccacctttgaaactcagctaaacattctcctctttttcaagcccctcctcttcctcccccttaatttttttttcattctacctttctctctctatttagggtttcctggcctatgttctgtctctaatctctactaagatttatttatgtgataat

SEQ ID NO: 27387 - DNA, 302 bp, Glycine max
ggaccttcatttgtcattgggaattgattcctaaaattcgacgaaaagagattacagggaaagtgggaaacagtagatgatcccaatgggaattggccaaattggagatcatcgaccatagatatcaaggtctgaagttgtaccaatggattgtacagctgcaaggaaaacacaaaaggctgaccgataaatgctaatgagggatcgattcaatgtacagcttggagaactgggtaacattttagaccctgataggcccaaaaatgacatatcaatcattctaggggatacaattcaattgc

SEQ ID NO: 27388 - DNA, 406 bp, Glycine max
ggcacaagtgagtttgttgatcgagataactagaaacagtgtgatgaaaatgaaggtccttgttttcttcgttgctacaattttggtagcatggcaatgccatgcgtacgatatgttccctctccgaatgaacactggctatggtgcccgtactccggaggtgaaatgcgcaagttggaggcttgctgtggaagcacacaacatctttggctttgagaccattcctgaagagtgcgttgaagcaacaaaggaatacattcatggcgaacaatatagatcagactccaaaacagttaaccaacaagcttacttttatgccagagacctcgaagtccattccaaggacacatttgtgttcagtatagatggcaccgtactctctaatattccatactacaaaaaacat

SEQ ID NO: 27389 - DNA, 397 bp, Glycine max
gaagaaggcacagttacaaactatactttccacaaatacaagtctggctacattcatcactgtcttattgaaggccttgagtatgagactaaatactactatagaattggaaggggtgattcttctcgagaattttggttcaaaacaccttccaaagttgatccagattctccctacaaatttgggatcattggtgatttggggcaaacgtttaattctctttccacccttgagcattatatacaaagtggagcgcagactgtcttatttggtggagatctttcttatgctgataggtaccagtacaatgatgctcgtttacggtgggatacatggggacgatttgttgaaaagagtacagcatattatgcatgggtatggtctgctggaaatcacg

SEQ ID NO: 27390 - DNA, 264 bp, Glycine max
gacgacggatcgcggatacagagaatggtgaagcatgtcgacctggggagtctgacttgtgcacatatggtgcccatgattacttccttgtcgcatatttcttaagatctgatcaagtcatcatggcgccttcttgtacagttgagatgactacctcgttcttgattcatagatagccagcgatcttatcatgaggatctcgtcctggctgctatctgtctgtacaaagtctagcctatccgatctgttcatatttgaaactca

SEQ ID NO: 27391 - DNA, 360 bp, Glycine max
gatgaattagggtgggtagagagacaaagtaagagagagagaggcgtttgtgttgtgttgtgtctcataaacctcacactctccctcactattctccagcctccactcgctgaaagagactcctactcgtcaatcattgtgaagaaaagaagtgaacactgactctgttattggtctgaatttcctcaccctatacaactagttttaacgaacatggaaactgaaaagtctaatgtttcaaaggctgaagaatttaaactccttgccaatgaagcattcaatgctcgaaaattcttccaagccattgatctatatacacaagcaattgagctgaacagtcaaaatgcagtttacttttct

SEQ ID NO: 27392 - DNA, 344 bp, Glycine max
gacttcaaagtggagaaaaacacacacggttggttcattctctctcttttctttttcctcaaaaagttgaaaaagaataaagggggaacaatcgagtgaagttgttgctcttcaatagtaaacttacctatggaagagggaagggttgtgagtgagtacacaaaagatggaactgtggatcttaaagggaaacccattctcaaatccaaaagtggtggttggaaagcatgctcctttgttgttgtgtacgagatatttgaaagaatggcttattatggaatatcatcaaatttgatactgtatctgactaggaagctttaccaaagcactgtgaccttttcaac

SEQ ID NO: 27393 - DNA, 352 bp, Glycine max
  modified_base (330)..(331): a, c, g, t, unknown, or other
gggagacttaaatgaaaaggaaataatcttaagtggaaccttctgcgaaattagccttccttcgtcccttgattgaagtataaattaggggtgttgaaattcaaagccatatccgtcattaaccaaatttgtgtttctccgattgcaagcaatggactccttcaattccttcttcgattcaacaaaccgatggaattacgatactctcaaaaacttccgtcaaatttctccggtcgttcagaatcacctcaagcaggtttattttactctgtgtttcgccgtggttgctgcggctgttggggcttaccttcatgtcctcttgaacattgnnggttttcttactacagtggca

SEQ ID NO: 27394 - DNA, 199 bp, Glycine max
aagacgacagaagggggagaaagcaatgggcattgatagcgaatacgtgatatctgacaaggcctatgcgaaggtgggaatgcttgggaacccgagccatgtctactccggaaaaccaatagcgtaaacggtggccaattctttggcaacggtaaccttgggtccttcgacccagttattcttcaaacccaaccccttc

SEQ ID NO: 27395 - DNA, 411 bp, Glycine max
gagcaagagtgaagagcgaagagaatggctcccaagggtttaatctttttggctgtgttatgcttctcagcactgtcactgagtcgttgtcttgcggaggataatggacttgttatgaacttctacaaggaatcatgccctcaggctgaagacatcatcaaagaacaagtcaagcttctctacaagcgccacaagaacactgctttctcctggctcagaaacatcttccatgactgtgctgttcagagttgtgatgcttcactgttgctggactccacaagaaggagcttgtctgagaaggaaacagatagaagctttgggttgagaaatttcaggtacattgagaccatcaaagaagctttggaaagggaatgcccaggagttgtttcctgtgctgatatcctccgtctc

SEQ ID NO: 27396 - DNA, 413 bp, Glycine max
ggagcaagagtgaagagcgaagagaatggctcccaagggtttaatctttttggctgtgttatgcttctcagcactgtcactgagtcgttgtcttgcggaggataatggacttgttatgaacttctacaaggaatcatgccctcaggctgaagacatcatcaaagaacaagtcaagcttctctacaagcgccacaagaacactgctttctcctggctcagaaacatcttccatgactgtgctgttcagagttgtgatgcttcactgttgctggactccacaagaaggagcttgtctgagaaggaaacagatagaagctttgggttgagaaatttcaggtacattgagaccatcaaagaagctttggaaagggaatgcccaggagttgtttcctgtgctgatatcctcgttctct

SEQ ID NO: 27397 - DNA, 370 bp, Glycine max
aatctaagaacaaaaaaattataaaatttgataactttaaccaaaccttttgttcatcttgtacaaaatggatcataaatgcaatttttataattgatactttggaggatgtagtatatcttatttattgttttaaattgcacgttgcaattagcaacatcatgggaaattgcttacgaatatggccacaatgctttgtggagacctcaaaatattgtggtcgcaattgtgattgtggactatagtttaaaaccgctaacaacctgatgttgcttgaaacctataatttccgctaagtgattaatataagagcaacttctataaaatgggtgttgaattggatttgatcattattataacattgaaaaag

SEQ ID NO: 27398 - DNA, 321 bp, Glycine max
gtctcaaaaggctgttactgctgccacaaattataataatagggttgttgaatgccatttggcttctattgtgctcgctataaagctagggatggatccaaaagaggcaatatcaaaagtgagcacactgtctgatgttgaagggttatgcgtatcatttgctggtatttataactcatctgatcctgtacttgctgtaaaggtaattgtacctcgtatgatgtcatccttagaattagccttgtgtgacactatctttctatttgcattgagaacatttcatttcaattgatatggatttctttgaactttaatattctc

SEQ ID NO: 27399 - DNA, 296 bp, Glycine max
ggcatcaaaccagactaaactccgacgatgcctcccgtcgctcctcgatccggtgatgccatattcgccaacgtcgaacgcgtcaatgcggagctgtttactttgacgtatggcgcaattgtgcgtcaattgctcacggatctggaagaggctgaggaggttaacaagcagcttgatcaaatgggttacaatattggaatccgtttgattgatgagtctttagccaagtctaatgtcttcagatgcaacgatttcagagagacgactgatgttattgcaaaagttggttttaaaat

SEQ ID NO: 27400 - DNA, 400 bp, Glycine max
gttgcttgagttggaataaatgtgctaagaatcaaatagctagtagtgattatgaaggaattgtgactgtttgggatgtaaccactcggaaggtaaatgttgaattcaaatggtcagtttgttcttgtatcagatctttgggtatcttcattcattaatattgttttgattgtcatgtgcttgcttaagttttctacagattatttacgcatggctatcattttaactttggcagagtttaatggaatatgaagagcatgaaaagcgtgcatggagtgtagacttttcaagaacagatccctctatgcttgtatctggtagcgatgactgtaaggtcaaaatttggtgcactaatcaagaagctagtgttctaaatatagacatgaaagcaaacatatgt

SEQ ID NO: 27401 - DNA, 368 bp, Glycine max
ggaggatacactatactccggtagccgctgtgttggtgagtgagttgtggtgcttttgaaagatgaggccgattctgatgaaaggtcatgagaggccattgacgttcctgaaatacaacagggacggcgatctcctcttcttctgcgccaaggaccacaaccctaccgtctggtttgccgacaacggcgaacgcttgggcacttatcgcggccacaacggcgccgtttggacctgcgacgtctcaagagattcggcttgactcatcacgggaagtgccgatcagaccgccaagctatgggacgtgcaaagcgggctgcaattatacaccttcaacttcgatttcccggccaggttcgtcgatttctct

SEQ ID NO: 27402 - DNA, 413 bp, Glycine max
gggatttccaaagtttttaatagagggtaagtctcaaaaaatcgaggaattacagacgaatatgcaaaaaaaactgaattgtgtgaatcgaaaactaaacattgctattgtaaaagttgcaaatgcttataaacaccctaatattattgcagaatttatagctggacaattaaagaatagagtttcgtttcgtaaagcaatgaaaaaagctattgaattaactgaacaggcggtacaaaaggagttcaagtacaaattgcaggacgtatcgacggaaaagaaattgcacgtgttgaatggatcagagaaggtagagttcctctacaaaccattcgagcgaaaatcgattattggtgctatacagttcgaactatttatggggttttaaggatcaaaagttggatattttctaa

SEQ ID NO: 27403 - DNA, 354 bp, Glycine max
  modified_base (333)..(333): a, c, g, t, unknown, or other
gggtcttcagcaagaagggaagaaaactaaaggtccacttaattcaagtgacaagctttttaaggagatacgagatctcaactttgaagttgttgtccagattttgcgccaaaaagctacttccatgaagcaagactacacagaaatgacaactactacgcagacagtttccgagttgaaggactttgtgaaaaagctgaactcattgccagagatgaccaggcacataaatcttgctcagcatctatcaacattcacatcaaagccttcatttcttgggcaacttgatatggaacatacaattgtagaggcccagagttatgatatatgctntgagtatattgaagaactgat

SEQ ID NO: 27404 - DNA, 380 bp, Glycine max
ggaactatatgaagactctccaggcagttcggaatacagtacaggatcaactctcctgcctcattcagctggtgaggatttggaacactcactgcatcaggatattggaaccgaactgaatatacaaattgaagattcagaaggagttaggggatgtgaccaaggggttctttctagtgcaactctggatcaagatttattcccatcttgtgaggaacagataaacaatgatgcaattgtttctgccttatcaagttcagcggagttcagttcacctcttcaagttacccctctgtttagatccttagctgctggaattcctagcccacaattttcagaaagtgaaaggagcttccttatgaaaacactcggaatggagt

SEQ ID NO: 27405 - DNA, 339 bp, Glycine max
tcagcaaagaggtgacaaagcatgaggatgcagcagagagtgaatggaaggggtggaattggaggtcagaaggggacttgttagtaaacggtgcgtttttcacggcatcgggggctggagcctcctctagttatgcaagagcttctagcttgagtgcaaggccatcttcactggtggggtccataaccactggtgcgggtgcactcacctgtaggaagggttcccgctgctgattatgacccctccagcaagcaactgtatctgcaggccgctccattaattccaaaaaaatggaatggaatcaaaaaatcaagggggaggggaaggggaaagagaatg

SEQ ID NO: 27406 - DNA, 375 bp, Glycine max
tgtcttcagcgcgaagggaagaaaactaaaggtccacttaattcaagtgacaagctttttaaggagatacgcaatctgaactttgaagttgttgtccagattttgttccaaaaagctacttccatggagcaagactactcataaatgacaactactacgcaaacagttggcaaggtgatggactttatgaaacagctgaactcattgccagagatgacctggcacataaatcttgctcccgatgatcaacattcacatggtaggcttcatttcttgcgcaacttgatatgtgacatacgggaggattggcccagagttatgatatatgctgcgagtatattgaataactgatccatgttcacgatcttttgacaa

SEQ ID NO: 27407 - DNA, 401 bp, Glycine max
gagggaaaaaaggagatatatgaagaaagaagagaaaaactttatagcaactgaataaaaacaccattatgaggctttacatggcacaatggcattgcctctcatcatctctttaatactatctctctcccgctggttttagaaccccaagaacaagattttgaactaagattcgcggttgtttgtgtgttggttaggttgttgggatctgtgttgttcctttctctttctccctctccctctccctctctctattttctcagacacacacacacttagatacacaaaggccattatacgtgtagtagacacaaaattttcggtatctctctatatttggggtcacacatacataggtaatggcacagttaccttctaaaataccaaccacaccccaaaat

SEQ ID NO: 27408 - DNA, 408 bp, Glycine max
ggcgagaaagagaagaagaatcagagagagaaaatagagagagaaacgaaaaccccttttgaccattgcgcctcgattccatttgccccattgattattctcccaccaaaacctcttctgtatttttttccttcttcttgtgatcattcctctcatttgggggcacggttctgtttgtgatcaacctcaaaattctgatctttttcccttcctgattcggattcggataccctgttgcgtttttctttctgggtgtgttttatttcggccaaagtttctgttttgcatagtgggaagtttaaaaagggattaattctatgtgggcatcgttcatattggcaaatcaatgttaactctatcatcagtgtggttatgaagtaatatggaagtgctccttgcgcgcatagc

SEQ ID NO: 27409 - DNA, 397 bp, Glycine max
ggcacaagtgagtttgttgatcgagataactagaaacagtgtgatgaaaatgaaggtccttgttttcttcgttgctacaattttggtagcatggcaatgccatgcgtacgatatgttccctctccgaatgaacactggctatggtgcccgtactccggaggtgaaatgcgcaagttggaggcttgctgtggaagcacacaacatctttggctttgagaccattcctgaagagtgcgttgaagcaacaaaggaatacatccatggcgaacaatatagatcagactccaaaacagttaaccaacaagcttacttttatgccagagacctcgaagtccatcccaaggacacatttgtgttcagtatagatggcaccgtactctctaatattccatactac

SEQ ID NO: 27410 - DNA, 303 bp, Glycine max
gcgcgagttggtgtctagatctacatatctagaagcagtgtcaggaaactgaaagtactggctctgtctgttgctcaatgctgtagcatggcaatgccatgcgttactatatatgcgctctccattgaacactgctatactgccagataggccttgaaatgctcaagttgtgcgcttgatgcgtacgaacacaatatcttggggtacgataccatagctgaataatgcattgaagcaactccggagtacattgatgccgaacaatgtctatcagactacggaacacctaagcaacacgcttac

SEQ ID NO: 27411 - DNA, 164 bp, Glycine max
accttttaaaattccttcccacgcgttcgttccacccaattaggacaaatccacaatgcggtcttgtgtcctctttaccaaacattttcctcattttactccttcttcccttcccggctaccctgaactcctcctaccactccttcacaaataatctctacatc

SEQ ID NO: 27412 - DNA, 409 bp, Glycine max
ggtgctacaagagtttcaagcattagttatgaggaagaaatttatggaatctgtcagtggagggaattccgagttgcagtatggactaagctttcgagatatgagcattgaagatctttgtcttgattttactcttcctgggtttcctgatattgttcttgcttcagggaccgatcataccatggtaaatatgagaaacttggaggattatgtttctcttattgtcgatgcaactgtgaggtctggagtttcaagacaagtggaagcttttaaatctggctttaaccaggttttctccattgatcatcttcggattttcaatgaagaagaacttgagcgaatgctttgtggagagtatgactcttgggctgtcaacgagtttgggagatcacattaaagttgatcatgg

SEQ ID NO: 27413 - DNA, 358 bp, Glycine max
gatcgaacgagaaaaattgaatttaattaatgcaatttatacgactttggaacaattagaaaattacaaaaacgaagccattcattttgaacaacaaagagtgattaatcaagtccgacaacgggttttacaacaagccttacagggagctctaggaactctaaagagttgcttgaacaacgagttacatttacgtactgtcagtgctaatattggcatgtttgggacgatgaaagaaaaaataactgattagtctttctattataaaaatagagtatatggcattatttttttcttctaaaaaataaaattaagaaattttcatggtaaccattcgtgcagatgaaattagtaaaat

SEQ ID NO: 27414 - DNA, 418 bp, Glycine max
  modified_base (372)..(372): a, c, g, t, unknown, or other
ggggaaagcctgagaagaagaaagaaagatggtgaaagtggcgacgtacttcgcgatgacgcttggagccttcgtgttctggcagtccatggacaaactccatgtctggatcgctcttcgtcaagacgaaaagaaagagaggttggagaaggaagcggggatcagaagggttagagaagaattattgcagcagcaggccagtcagaaggattctctttcttgaattcgaattatgttgtaattttgctttgtaatttccccttgcttctgtttttccaatgcaatgtcttgtgctcaaataaaatctgctactcccgagcacttcaaatttaattgcgtggatttctattgtgttcctctacacatgcactngtttcattaactgctatgtgtcagtaattgttggaacacttctatc

SEQ ID NO: 27415 - DNA, 238 bp, Glycine max
gaaggtgaaggtgaaggtgatgatggaattggaagtcgacgagaacgacttgaaagccgccggtgctgagctcttcgtcgacggtggtcggcgcggcattcgcatcaatggctgggtgatcgagactcggaggcactccatactcaactcttccacactccaagagtgggaacagaatctcgatacgtctcatttaccagaaatggtttttggggaaaacactttgattctaaaacac

SEQ ID NO: 27416 - DNA, 393 bp, Glycine max
  modified_base (354)..(354): a, c, g, t, unknown, or other
gccggatctcgttcaaagaacaatgtgaatgagtcatatgttgttaatcacggtggcctacctgatgttgattacttggagagaaaaaatccaaaggatgaaacttttagagtaaagcccttctacaataatgcaaatccacctgcttatacaagagaggaacaatttgaaggtggtttcaatcagcatgatagttgggggaatgccagacgtgtaaaagaaagccaggacactgcaacctctaggaagtctcctggtcatgcaggatctcattcaaagaacaatgtgaacaagccatttgctgttaatcatggtggcctacctgacgttgataactctgagagaagaactcanaaggatgaaactcctagggcaaagcccttctacaataat

SEQ ID NO: 27417 - DNA, 405 bp, Glycine max
ggcacaagtgagtttgttgatcgagataactagaaacagtgtgatgaaaatgaaggtccttgttttcttcgttgctacaattttggtagcatggcaatgccatgcgtacgatatgttccctctccgaatgaacactggctatggtgcccgtactccggaggtgaaatgcgcaagttggaggcttgctgtggaagcacacaacatctttggctttgagaccattcctgaagagtgcgttgaagcaacaaaggaatacatccatggcgaacaatatagatcagactccaaaacagttaaccaacaagcttacttttatgccagagacctcgaagtccatcccaaggacacatttgtgttcagtatagatggcaccgtactctctaatattccatactacaaaaaaca

SEQ ID NO: 27418 - DNA, 419 bp, Glycine max
taccaaaagaggcacaaggaaaagttgcaaaatttgatttccatgggcagccagcagagctcaagcatggcagtgttgtgattgctgcaatcacaagctgtacaaatacatcaaacccaagtgtaatgcttggtgctggtcttgttgcaaaaaaggctcatgagcttggtttgaaggtcaagccttgggttaaaacaagtcttgctccaggctctggagttgttacaaaatatctactccagagtggactgcaaaaatatctaaatgaacaaggttttcatattgttggatttggctgtactacatgtattggcaattcaggagagctggatgagtccgttgcttctgccatctcagaaaatgacgttgtagcagctgctgtgttgtctgggaaccgtaaatttgagggtcgagtacat

SEQ ID NO: 27419 - DNA, 289 bp, Glycine max
  modified_base (260)..(260): a, c, g, t, unknown, or other
ggaagtgaagtgggaaagagacaggaccgaaaatggttgcgactttgagtcttccgatcatagacctctcttctccccatcgtctttccacagccaattccattcgtcaggcatgcgtggaatatggtttcttttaccttgtgaaccatggggtggacaccgattttgtgagcaaagtcttcgaccaaagttgcaagttcttctcgcttccggtccaacgcaaaatggacctggcccgcaaggaatatagaggctacacntctctctatgctgagacacctgatcctac

SEQ ID NO: 27420 - DNA, 404 bp, Glycine max
  modified_base (104)..(104): a, c, g, t, unknown, or other
  modified_base (165)..(165): a, c, g, t, unknown, or other
  modified_base (391)..(391): a, c, g, t, unknown, or other
gggcgtagctggtcagcactgacctccgatgtttctcggcaggagaagagccaatacaaaaatgcaataccatcaccaattaatcatcctaaaattaaccaganaaataaaatagaaatatttttcgaaactaattttgtggagatctgtcggagaagaaagcanataattatcctctttccattcattcgctgttcacttggttctggtgagcgcagcagaggggaagaaagaagctgatgagaggagctcgttggatgaatatataatataaattggtttgtttgatgggcaacacttgccgcggatctttgaaaggtaaatattctcagggcttgagccagcccgaagaccattcaaagcccaccaccacccattctgatccctcctncgaccacccctct

SEQ ID NO: 27421 - DNA, 357 bp, Glycine max
ggagagaaaattgtgagaggagttttcacgtctttgagaaatgggtgcttcgctatcggtctcggaaaaatccatccatgaattcatggtcaaggtatacttgaatctcaacaacagaaaacctcaatttttttattatttcattttttgaagaatgattatagaaatctcttattatattggtcatggttgacacaggatgctaagggcagagacgtgaacctcagcatctacaaagggaaggttcttcttgtagtaaatgtcgcttcaaaatggtatttttacacacaccctttttttctaacccaactttttccatatgcttgctgtaaaaatccaaatcttctttctttttat

SEQ ID NO: 27422 - DNA, 272 bp, Glycine max
tgagagaagattgtgatgaggagagttcacgtggctgagaaatgcgtgcttcgctatcgttctcgcaaacatccatgcatgaattcatggtcaaggcataccctaatctcaacatcagaaagcctcacttagattattatcacaaatggtcaagaatctttgtagaaagctcttaccatatggttcaacaatgactcatcaagcttatggcatagtcaccaacctcatcatctacaacggcctcgggaattttttaattgaacatggtttta

SEQ ID NO: 27423 - DNA, 422 bp, Glycine max
  modified_base (302)..(302): a, c, g, t, unknown, or other
  modified_base (311)..(311): a, c, g, t, unknown, or other
gagggcgcaatagaaaatacaagccgtagaagagggctcgctctttcgtgtttttgttcgcgaaggaaactctatccttagctatcgcgatggatcggtaccagaaggtggagaagccaagagctgaaactccaatcgatgaaaacgagatccggattactagtcagggaaggacgcgcaactacattacttatgccatgagcttgcttcaagagaaaggttctaatgaaattgttttcaaagcaatggggagagctatcaacaaaaccgtgacaattgtggagttgatcaagaggagaatngtgggcctncaccagaatacagcaattggatccactgatatcactgatccctgggagcccctagaggaaagcctccttcctttggagacgacaaggcacgtgtcaatgataacaataacc

SEQ ID NO: 27424 - DNA, 246 bp, Glycine max
gatagcgaaacagagagtggtttcagtgagtgatcggtgttcacttgatccttcataagtcgtcatcatcatcatcatcatcaccgttgattgaagaagatgccgatcagaaacatcgccatcggaaggcctgaagaggctactcaccccgacacgttgaaagcggggttggctgagttcatcttcaccttgatcttcgggttcgccggttcacgtttcggcatcgcctacaacaagctcaccgac

SEQ ID NO: 27425 - DNA, 229 bp, Glycine max
gaaatcaaagaggtcgaagaaaaacaagagcaaattgggatcgaagaatttgaagaacaccacaagcaagatgcatgttgttgtggtgctcaacacgcaatcctactgcagaggcctagaacctccttcatcttctccttccgtcgtttccaacaagggaacaaggactttgagtttcaggaggctgctgctgcgtccttctcttgggattcatttatcgcgtagcttt

SEQ ID NO: 27426 - DNA, 217 bp, Glycine max
ggggtgggtcgcgagcatcgaatttcaagggttaccggaaggccggattgatagtatactctctcgcactaacccgagcgacgtgcttatgctttgcgtaccatcaaagatcttacgataaggcgtttaatctgacactttgtggaaaccgtttctcacttgtgattaccactgcatcatttgggagagtccttggtctctcaactattcttccaag

SEQ ID NO: 27427 - DNA, 270 bp, Glycine max
gggactcggatgaatcatgtttggttaggacaaaattgccctccatcactttccttgttagagttggtttctgcaacctaccatgcaattcctcacctgaatccgctttctattgccacgttgtggaagcgtaacgaagatgaatggcattgggaaactcaaatcgtcgagttctgaattggaccttcacattgaagattacctaccttctggatccagtgttcaacaagaacggcatggcaagctccgactgtgtgatttgctagacat

SEQ ID NO: 27428 - DNA, 410 bp, Glycine max
ggcggcatgaaagtggcaaggcagctatgcatgcaggaccatctgtacaaaagccagaaaaagtatcagttgggaaagagattcgagaaaaattctctggtgctgttgaagctttctcccggaggaacccaacaagtcctagtcctcgtggtgatcactccaaacgtaggagttttgaggaagtagcagtacacaaagatgtgtatcatgatcaagagaagggacgcaattcgtcccgatatggcagcagttcaagaagacccataatctcatcgtcaaccatgccaagttcctctggtgatcatactgacagtcgtactggccggctaacctcaagtggaagccgacaatctgccacacatagagatattcaacctatgcacgagacaaaacaaccaacttacacacgc

SEQ ID NO: 27429 - DNA, 394 bp, Glycine max
tgtagtgcaaattgagagtgctgtatgtttctccacctcaaccaccgtctccagtcccagaaggttcggaggaaggatcctcacctagaggttctgtttcagagaatggaaatgccaatggttctgacttcacacaagcggcaagaggatttactgagcgacctgaatctcaagacagatctgcagaggctagagctcttatctcaaggctgactgaagaaaagaataatgcaattcaacaaaatagcaagctctgccaggaactggtgagaatttacagtatgtcattgataattttatttacttatttgtctaatctatatttattttccttttggtgatggaggattttaatctggaatatgagctcccttctatagaaagagaatgattc

SEQ ID NO: 27430 - DNA, 405 bp, Glycine max
ggttgtgtgtaagtgtgaagagaagagaatggtagtaggattgaatgtgcctcagccatttctgtcaccagtttgcaagacggcaccttacccacttgatctcatcgccaccgccgcgtccctccacttcggccaccttctccgccgccgcgcgacccaccatctccgccttggggttcttcttcactcctgtttcaagaaactcgctcctttaactcacatttttagattgaacgataagtggtgtcaaagatgctttcaactcaatgggttgaactatcttcaactgtcaaccggtgatttgacttcctcatggtcaactagtttctctttctttaatgggggaggagatggaggccgccgctatggaaaggctgggatgtccaactccaaaatgtctggaaa

SEQ ID NO: 27431 - DNA, 218 bp, Glycine max
ggatgaagagttgatgaaattttttggagaatatggtaccattactagggctggaataatgaaggacccagaccgtaaatcaaggggttttggctttgtcaattttgaaaacccagatgatgctgccaaagctgttgaaggacttaatgggaagaaagttgatgataaggagtggtatgttggaaaagcccagataaaatctgagcgtgaacaagaac

SEQ ID NO: 27432 - DNA, 369 bp, Glycine max
ggaagagtgaagagaatggctcccaagggtttaacctttctggctgtgttaatatgcgtttcaacactgtcactgagtccttctgttgcgggggaagggcaaaataatggccttgttatgaacttctacaaggaatcatgccctcaagcttgagacatcatcacagaacaagtcaagcttctctacaagcgccacaagaacactgctttctcctggctcaggaacatcttccatgactgtgctgttcagagttgtgatgcttcactgttgctggactccacaagaaggagcttgtctgagaaggaaacagatagaagcttgggttgagaaatttaggtacattgagaccatcaaagaagctttggaaag

SEQ ID NO: 27433 - DNA, 360 bp, Glycine max
  modified_base (153)..(153): a, c, g, t, unknown, or other
gagagtggtggggtgtgcagaagagcgtcgcagttgtaaccctaatcagaagaagcgcagcttcaagcgagtgacagccaccagccatgggtcgtatgcacagccgcggtaagggtatatcctcttctgctttgccctacaaaaggacacctnctagctggctcaagatctcttcgcaagatgtcgaagaaaatatctgcaagtttgcgaagaaaggtttgaccccgtctcagattggtgtcattctcagagattctcacggtattgctcaggtcaatagcgtcactggcagcaaaatccttcgcatcctcaaagctcacggacttgcgcctgaaatccagaggatctgtaccatttgat

SEQ ID NO: 27434 - DNA, 326 bp, Glycine max
gcaaaaaaaagaggtgaaaaaaatttgtctggtaaattgttaattctgttgttttgcgtgtttctggactcaggagctgcgctgttcccggggaaaagcatgtacagtatgaacactaaatgcagtgctggggattgccaattgatgtcatggtcttcaccattgccaccacagtttctttgaaactgctcaaggtctatggttctatttaacttctgcacctgagcttttatatttaagagtgtttatagatattgggctagttgatagaaatggaagcaaaaatcgcaaaggcattggatagggttgcactcaatctgaagcgc

SEQ ID NO: 27435 - DNA, 225 bp, Glycine max
gggacacagagaggggaactctgtatttcacctctttccgcgctttttgacagtgctcttccttttaccacattagggggagcacgggttgaaaattaaagggcttgttatattttttgagacacggaaagaaattgtttcttgtcaagatgctttcacaaatgggtgctttcattccaagaaaaactttatcgccgggtcttcatactcggagagtatcttctg

SEQ ID NO: 27436 - DNA, 226 bp, Glycine max
gaggcgggtttttctagggtttggaggctatgccgtaagcgggttgaataagctcatgtgaataaaatgactttcacaaagccagaccgatgcatacactgagctagctgtcaatgtactaaaaggcattgaagtgaagatgtgatattcttagtatttcataatttgaattggaatcccaagctaattgctactctatcatgtgtgtgcaaatggtatgatgatc

SEQ ID NO: 27437 - DNA, 360 bp, Glycine max
gacggtgacagcgctcgacggcgacagcactctgtttcagcgttctaacttactgcacacattccaatcccctctgttttcgtttggattgattaaaggtgtcacagcaatcaagttagcactacacaaccacactcactttttctgcttaactaaacaaaaatgttatcctttggtagaaattgctgcttcaaatattctggtacctacttcatgagggggaatgcctcaaatcatactaatactatactcttcacaaactcattttgccccaaattttctgaccccaattaccccttttgaaaaaatccacggggtactcatttctttcaccatgcccacaaactttacctcttttta

SEQ ID NO: 27438 - DNA, 385 bp, Glycine max
ggaaaaagggtttttataatttttcaagatattaaacatttcaagcagttggaagacattcgagaactaactaagcagcttggttctggcagcaaagtcatcattacagctcaagataagcatttgcttgatagatatgggattggatttgaaagtatatgtgaaataaaagggtttagtgattcagaagctgatcgattgcttgaattcaaagttcttaattctgcaactgttagtcctaagtatgtgaacattctaaaccgaatcaagtcttatgcccttggtcatccatggactttggaagtaatgtgttccaacttgagtggaaaatcaatagaagaatgtgaatctgcattactcaagtatgaatctataacagatagag

SEQ ID NO: 27439 - DNA, 367 bp, Glycine max
gggagctgagctgagaaaacccccaaccccaacctcaaccttaacctctcctcactttcttttcaaccagaactatgattaagctttttaaagtaaaggaaaaacagagagaactggcagaaaatgcgagtggcggaccacccgttaagaagcaaagtgccggcgagttgcgtcttcacaaagatataagcgagctgaatctaccaaaatcatgtaccatgcaattccccaatggcaaagatgacctgatgaactttgaagtttcaattcgacctgatgatggatattacttaggtggcacatttttggtgtcctttcaagtgtcgtccatctatccacatgaagcaccaaaggttaaatgcacgac

SEQ ID NO: 27440 - DNA, 334 bp, Glycine max
agggattggtaatactgatgctggctttgtgctgggaactgggaaacttctgcttaaggtgcccccaactttgagatttgtaatggatggagaaatgcctgattatttgctttctaaggatttgattctgcaaattattggtgaaataactgtggctggtgcaacatataaatcgatggagtttgtcggtacaactgttgaaagtttaactatggaagaacggatgacattgtgcaacatggttgttgaagctggtggaaagaatggtgttgttcctgctgacagcactacatttaaatatcttgagggcctgacatctctgccatatgaacct

SEQ ID NO: 27441 - DNA, 350 bp, Glycine max
gatgacatgggattgattgagattgccagagggtgttcgagactggttaggtttgagcttcagggttgcaggcttgtgacggagcgtggactgaggaccatggcttgtttgctcgccaggactctgattgatgtcaaggtttcttgctgcgtcaaccttgacaccgcagcgactctccgagccttggagccaattagggagcggattgagcggctccatgtggattgtgtgtggaatgggttgaaggagagtgatggcctgggacatgggtttcttaattttgatttgaatggtttggatgaaccgggtgatggtggtgaattgatggattactttgggggtggagaatg

SEQ ID NO: 27442 - DNA, 405 bp, Glycine max
ggagtaactaagatggcgcaagtgaggaacaagcaagtgcttctaaaggactatgttaccggttttcccaaagaatccgacatgaatattgtcgaaagtaccataacattgaagcttccacaaggttccaatgatgtcttgctcaaaaatttgtacttgtcttgtgatccgtatatgaggaatctcatgaacaagcccgaaggccctcccaatagtcgtgcttacactcctggctctccattaataggatatggtgtgtctaaagtcctggaatctgggcacccagattataaagaaggtgatttagtgtggggctttaccaaatgggaagagtatagcttgttaccctcagctcaaatactcttcaaaattgagcacactgatgttccacttacctactacact

SEQ ID NO: 27443 - DNA, 384 bp, Glycine max
gggaaacgcgaaagcaaatcgtgtctgggaagcagaattacctccaaatgatgatagagccggaattgagaatttcattcgcgcaaagtatgatgaaaagagatgggctccaagagatgggaattcaaaaacaccttctggatttcgggaagagaaaaggccttgacattggcagatgcctgttgagagaagcggttatgccggtgcttctgaaaataaatctgacgataggaagtatatccaaccatcaactgcaattcctgccgcacgaattaatgttcctgctacttccagagcaccttgacaggtaactgctattaccaaacctcagcatgtgtagaaagtggaatcagtagcaccacatccacaagcttgaccaccact

SEQ ID NO: 27444 - DNA, 422 bp, Glycine max
cacactcaaaaccctaatagcaataatgctattgatcaaggccaagatctcaattgggcttttccatcctccaccccagatttcagaaaaatctctgaattggtccaacaaaacaacaacaacaacaatagtagcaacaacagcatgtcagcttcagcttcttcttcttcaaccacaactacaacttccacttctcacctttctgcattggagcttcttactgggatcacttcaagttccagtgctggtttgacttctttcatgcctgtgccggttccatctgatccaaattctatctacacatgtgggtttcctctgcaagatttcaagccaaccttgaatttctctttggatgggatcggaaacgggtacacaagccttcagaatgttcaaagtgggaggctcttgtttccatctgatga

SEQ ID NO: 27445 - DNA, 340 bp, Glycine max
  modified_base (270)..(270): a, c, g, t, unknown, or other
gttccaacatattcctcaccaaagacaacaacattcggcttggtgactttggtcttgcaaagcgacttaatgcagaagaccttgcttcctcggttgttggaaccccaaattacatgtgtcctgagctcctcgctgatataccttatgggtataaatctgatatgtggtctcttggttgctgcatgtttgagattgctgcacatcaaccagcttttcgtgctccagacatggctggacttatcaataaaataaacagatcctgcatttctncactgccaattgtttattcttccacactgaaacaacttatcaagagcatgcttaggaaaaacccagaaca

SEQ ID NO: 27446 - DNA, 286 bp, Glycine max
agaagacgacagaagggggaggtaggagtaatttaagagagagaaagagagagtgggagagggagacccatccacttttttcattttcacacctttacacaacacaacataacacaaaagcgctctctctaatatctaaagacaggattttcaacacactcaccttttaaagcgcgtgcccctcaaacatgaacatcatcgtcttctttctaagacccggttcaaaatcttcggagaagagtactaaggctgatcactggatccttcaaaattggaatgatttgat

SEQ ID NO: 27447 - DNA, 179 bp, Glycine max
ggagttgaaacatataactgtgggggggtcattgggtgttgccactcttctctcttgttgtacacttgttccttttggttttgagaaagggacatggaagctgggtgtgctttttctgttggctcacttctcataccaacagcgcatgaaacatcaaactcctttaggaaatccatatt

SEQ ID NO: 27448 - DNA, 115 bp, Glycine max
cttccaacatattcctcaccaaagacaacaacgttcggcttggtgacttacgtcttgcaaagctacttaatgcattagaccttgctttctcgcatggtgtaacccaaaattacat

SEQ ID NO: 27449 - DNA, 375 bp, Glycine max
ggagacaaatgggtttgggaatgagaagagagtagaaacaaccgagagaaacacatagaaaaaggaggcatagccaacctattcaaaccatgatgcaaggctgtgaggttgatgccattggcataaactacacgatccacacacacaaatcggagcacccttttaaaatcttcagcaacaaatctgcacatcttgacactgaacaagatggtaaagagccagaagaggaagcagaagttgaacaaagttgcagtggagtaaggcatgtgctgaagaatgtgagtttccaagccaagccatgggagatcctagcaattgttgggccaagtggagctggcaaatcatcactgcttgagattcttgctggtaaacaca

SEQ ID NO: 27450 - DNA, 406 bp, Glycine max
gcgagactaatgaagctgattactgataaggagagtgctaagcgcctcgagagaaacacatagatgacggtggcgttgcccacctattcaaaccatgatgcaaggctgaccgggtgatgccattggcatatactacacgatccacacacactaatcggagcacccttttaaaatcttcagcaacaaatgtgcacatcttgacactgaacatgatggttaagagccagatgaggaagcagaagttgaacaaagttgcactggagtaaggcatgtgctgaagaatgtgagtttgcaagccaagccatgggagatcctagcaattgttgggccaagtggagctgtcaaatcatcactgcttgagattcttgctggtaaacacagccctcaaagtggaactgtgtttctg

SEQ ID NO: 27451 - DNA, 393 bp, Glycine max
gaacgtattgtttgaaagaagttaagtaaagagagagtagtgggttgtggctcggtggagaaagtagtaaagtaatggaggaatcgttagggcagaaatggaagcagcgagagttcgctttggcatcagtttccgacctctcttcggctccttcttcggcttcgccgggaattgctcgcttcgactctgacggtctccaaattcatcatcaatctcaccagattccattcaatgtcgatcctcgaactgttcagctattcaaggtgagtcctgttcaatcggtttgcgtggtggaaggatctgatgttggtaaaaagacattgtattccaggggagtcacaatccagtttagaaatgatgaggagagtgcagcctttcattgtgtagtccaac

SEQ ID NO: 27452 - DNA, 388 bp, Glycine max
ggaagagagtgatgtagtgagtagtgagtgtaaacaaggtttggtctttgctgctgatgttcatcactgcaaggtttccgcatttgggtttctctccgattgaaaaaagtaggtggctttacactaaatttgtctgctttcacttctcaccaatctgatgcattcttggattttttttttctattttaagtttgcttctcctaatgtgtatgagtggtttcggagttcactgtataggaatgtgtaatgggtttttatgaaagaaatcttttctttttttgggtaaataatcagagacccttttcaagcttttgctagattgctcgatcagattttgttctgggtaataaccagatcatgtgtaagttgatctcactggtgaattttg

SEQ ID NO: 27453 - DNA, 399 bp, Glycine max
gggctccattaaattaaagaaaatataaatatgcgtatgattctccagatctgtttatccaccttaggttgaattcatcgccgagcatcagatccgaaatgtcgatcggagatgcttttctgtgcttactgttcatcgcaacttgttggatttccgctgcttctgctgattccatctatggctgcggtggatttgtcgaggcgagctcatcgttggtgaagtcgaggaaacaaactgatgccaaattggactattccgatgtcacggttgagcttcaaactgtggatggactggtaaaggatagaacacaatgtgctcccaatggatactattttattccagtatatgacaagggttcctttgtaataaaattaatggacctcaagatggacatgggat

SEQ ID NO: 27454 - DNA, 388 bp, Glycine max
ggatgaggaaacattggtagaagaaattggagagagagagagagagagagggttggattggttttcttcttcctcttcctaaagagaatctaatctcaatcctcattacacacatatctacagatttcttcattcctctctcaatcttttctggtttcttttcccctctttgacatcctcgttttcgccgaaacaaaaacaactaagattttgttttttgttgtatttttcttcctgttgttatttgactcggttgtctgaatcagttgttgcagcagggtcgggagccacagctatgcagagccaagttgtgtgcaatggttgtaggagccttctgctttacccaagaggagcaaccaatgtctgttgtgcattgtgcaacacaatt

SEQ ID NO: 27455 - DNA, 304 bp, Glycine max
ggtggtgtggtgtggtggaggaggaatacacgaagcatatgcaatgaaatgaggcgttttgactgaccttcttggatctgatcgaatccaaacccaaaccctaatctaatcccaaaaagcttattagtctctctcgatcaatcgaaccagcgagcaagattgtctctctcctaggccatgcgaccaccctgttcctccggcatcgacctctgcagagaggtttcctttttcgttttcgccgatttctccatcgattccgtcagccatgactgccgacacccacgccgatcctaatatcaatccc

SEQ ID NO: 27456 - DNA, 347 bp, Glycine max
  modified_base (238)..(238): a, c, g, t, unknown, or other
ggtgttggagaatgaaaactgaaacagagccaaatgaaaccgagtcagattggagcgagttgactcgcgagtgcctcatcaacatcctctctcgactcagcgtcgaggatcgatggcgcggcaccatgctcgtttgcaagtcatggttcagcgtcttcaaggaaccctctcttcacttcgtcttcaacctcgaccctcaattcgactcgcccaccgaatcaactcgctggtggacccncgagttcgaggccaagatcgataacatgcttcgatctgtcgtcgaatgggcccaatcctctctacccatatacgcattcgcccactgtctgatcgttctctcgccctcg

SEQ ID NO: 27457 - DNA, 316 bp, Glycine max
ggacggagcagaggacaagatgggtagtgtgagttatagcaatctgaagaacgccatgatagcattcttggtccctctaccctccatcctattctacctctcattccaatcgggcattagtactccttcttcttggtcttctctgtggacatggtgctatcaccaccctctgctattggccaatgtccctttcttcttcaatgtgaatttcctcttctggctcatcggcctaatccaatccagccactggatgattgacccgcattggacagtgatacctgtgatgcttgttcattactattcaactcaccctttg

SEQ ID NO: 27458 - DNA, 406 bp, Glycine max
ggaggaagatgggtttcaattggtgacggggaagaagaagaaaggggggaaagggaatgtgactccggcagcgacgggttctgaggtggcggcagtggcgccaccgggagttacggtggcaactaaggataagaagacgatggggccgaagtcgaaggttccgtttcatataccaacgattaggaggccgcaggatgagtataatatagtggttaataatgcaaacatgccgtttgagcatgtttggttgcagaggagtgatgatgggttgagcttcattcatccactggaaaagctatctgttttgaattttgctgatacaaatcttggggatgttgtgcctgtgaagcctccctcgatagaaagcaccccttttaagctcgttgaggaagtcaaagatttaaag

SEQ ID NO: 27459 - DNA, 380 bp, Glycine max
ggagtgagcaagagtgaagagcgaagagaatggctcccaagggtttaatctttttggctgtgttatgcttctcagcactgtcactgagtcgttgtcttgcggaggataatggacttgttatgaacttctacaaggaatcatgccctcaggctgaagacatcatcaaagaacaagtcaagcttctctacaagcgccacaagaacactgctttctcctggctcagaaacatcttccatgactgtgctgttcagagttgtgatgcttcactgttgctggactccacaagaaggagcttgtctgagaaggaaacagatagaagctttgggttgagaaatttcaggtacattgagaccatcaaagaagctttggaaagggaatgc

SEQ ID NO: 27460 - DNA, 392 bp, Glycine max
  modified_base (347)..(347): a, c, g, t, unknown, or other
ggaaactaacaacaacaataaaagaccatgtcggtgaaggagtgcgagcaccacaaggggaagaagaggaagatcttccggcaagtgttctggtgcttagtggtgttccttttcatcgtgctggtcacaattcttttgatatgggcaatccttagacccaccaaacccaccttcacgctccaagacgtcaccgtctacgccttcaacgccaccgtggcgaacttcctcacttcgaattttcaggtcacgctcatctcgcgtaacccgaacgaccgcatcggtgtttactatgatcgcctcgaaaccttcgtgacctaccggagccagcaggtcacgtaccgaaccgncatcccttcgacatatcaaggccataaagagatcaatgtttggtc

SEQ ID NO: 27461 - DNA, 400 bp, Glycine max
tggaaactaacaacaacaataaaagaccatgggggtgaaggagtgcgagcaccacaaggggaagaagaggaagatcttccggcaagtgttctggtgcttagtggtgttccttttcatcgtgctggtcacaattcttttgatatgggcaatccttagacccaccaaacccaccttcacgctccaagacgtcaccgtctacgccttcaacgccaccgtggcgaacttcctcacttcgaattttcaggtcacgctcatctcgcgtaacccgaacgaccgcatcggtgtttactatgatcgcctcgaaaccttcgtgacctaccggagccagcaggtcacgtaccgaaccgccatccctccgacatatcaaggccataaagagatcaatgcttggtctacgttt

SEQ ID NO: 27462 - DNA, 392 bp, Glycine max
gaagacaagagataaataataactagttgtagctgctggggagagtggaacataataaacatgacaatgaagctgcttttggtagccgttgttgaagttgcatgcttagtttctgggatcttgtcctttggatctgagacactctctgagctttctttcttagaaaacgatgtcgtctcaacagcaagaccttcctcttcatttcaacctcttatggtcgacctcactctcattcaaggagctgattctaaaggagctgtctgtttggatggaacggtgcctggataccatttggatcgtggatttggatctggtgcagatagttggctaattcatttggagggaggaagatggtgtaataccatcagaaactgtgtctatagaaaaaatac

SEQ ID NO: 27463 - DNA, 387 bp, Glycine max
gaaccacaggagtagccaagcgattcactcaccctattcaccacctctgtaagctagaagctatctaagaacaggtattacgtaatttctttgcaagtttacatgtttaatgtgtgtgagaaaaatggcatgcattagcatgagcagagcaaagcacttcttcatggctttctttgtggggctactatttgctgcacgggtgagtgctcagaccagtgagatccctcatgcgccagcaccatcaccaacaatggacgctggagctggattcttggtgacttactctggagcattcgtgtgctcctcactgatcgtgtatctgattgccctgctatgccatgaattcttcatgctgcaaggagtgaaacctatctactctattcaatc

SEQ ID NO: 27464 - DNA, 319 bp, Glycine max
  modified_base (298)..(298): a, c, g, t, unknown, or other
gagaatgaggtgggaggattgattgagaatcgttcgagactgcaaaatccaaaaccaaaaccaaacacaacacagcattcgtcattcaccgccttgtctcgtcttcttctgtctccgaacacggaatctctctgaatcgcgggattaagagaggaatatgcaacagaggcttaagttgcagcaacaacaacaagccctcatgcagcaagctttgcttcaacagcagcagatgtaccaccctggcatgctcgccgctgctatgtctcagatggagcctgttccaagtggaaattgcctnctgggtttgatacgtctgcat

SEQ ID NO: 27465 - DNA, 410 bp, Glycine max
ggaggatattgagcaggaactgtccaaagtttccagggcatcaagaggacctggtgtttctcaacatatagcagttggtagcttggaagatgtactgagaaaaatggagatgagtgaaaggaattcaggatgggaggatttgatttttattccaccaggaaaaagtcgctctcaacacacacaagaacttaatgaatgattcccagggtgcgaatttaagctaaccatgatttcatgtggttttcttgagcaaattggatgttactgttgtcacaatttagtcagctagtgagatactaggacctctgccttcaaatagttgtgttcttccttcttctcaaccgaaattccttctgatgcgaatactgcactaagattctcagtggatataaggtaaatgtgtacgtgag

SEQ ID NO: 27466 - DNA, 335 bp, Glycine max
gaaagaagggctatacagaaggctacaagtgggaggaactatgtctatctgtataaagtttctctgtcgctggtttttgttttgtggggtctggtcttcctcttcagcttatggacaagccatggccatggttatggagatcatgaatctagagaagttccagttggtgtatcaaattggaatgaagatgaacacagacaatgtaaaaaatctaattctgctgatgaatatttaactaaagagactgatgatgtctacattccttctgagactttctgctctgatggtgctaaaactgatggtttaatcggtgagtcactttccagtggagaaag

SEQ ID NO: 27467 - DNA, 401 bp, Glycine max
gctctaaaccagtaagttatcttctagtatttttcaagtaacttaaggtttcaaacctaggaagttggaagtcatggcagcaacattgatggcagcaacaagttctggcactcttaaagcaactcctttcctaggccaaggcaagggtgccaatgccaatgctcttagggatgttgtttccatgggaactgggaagtacaccatgggcaatgatttgtggtatggaccagacagagtgaaatacttgggacccttttcagctcagaccccttcatacttgaaaggagaattcccaggggattatggatgggacactgctggcttatctgctgacccggaagcatttgccaagaacagggctcttgaggttatccatgggagatgggccatgcttggagcac

SEQ ID NO: 27468 - DNA, 400 bp, Glycine max
  modified_base (303)..(303): a, c, g, t, unknown, or other
  modified_base (384)..(384): a, c, g, t, unknown, or other
ggaagaaaaaaggaagggtaagtaaattgggaatggtggtggtagtgccaggtgtctgtctgaggagaaaatagaataaaaagctatgaaattttggcacaaggtctgattgtagaattgaagaagatgactggggggggtatcactatgcaatcgacgccgggaagctcaggatacttggatttgtatccagagcggaagatgtcctttttcaaaaatccttacattctcggactggctgctgtcgccggcatcggtggtctcctcttcggctacgacactggtgtgatatcaggggctctnttatacattaaggatgattttgaggaggttagaaacagcaatcttctccaggaaacaatagtcagcatggctattgccggngcaatcgtgggagcag

SEQ ID NO: 27469 - DNA, 411 bp, Glycine max
gggagggagagaggatgaacccacagcactgaaagtaacgttagaaacgagaaagtttgcattattcacaatttcgaaaactcactcagagtggagaagggagtcccacacatcctagcattaacaagaagaagaaaaaaaaatcaacgctttgggtttttctcttggctgcaacttttggtctctccgcagaatctcgttccaattggagttcatcctctaaaggggaaggtggtgtttggaatctgggaaaatgggtttgttttctgggatttttatgggggtgttgttcggcatcgcattgatggctggatgggcgcgcatgatgaagtaccgaagtgccaaacgaattgcaaaagcagctgacattaaactccttggatcccttaatagagatgatttgaagaaaat

SEQ ID NO: 27470 - DNA, 413 bp, Glycine max
gggaaagaaatggagcataatcgtgacttatgtgaagcatcgattacattggataggtcacaggcattgatgatcccggtgatgagctcttttagcttgcttttgatgttctacttgttctcatctgtctcgcagcttctcactgcattcactgctgttgcttccgcatcctctcttttcttctgcttgtctccttatgttgcctatttgaaggcacagtttggtttagcggatccatttgtttcacgctgttgctcgaaatcttttacacgactccaagcaatactattgttagtgtgctctttcactgtggctgcttggcttgtttctggtcattggatactgaacaatttgttaggcatatctatatgcatcgcgtttgtaagccatgtgcgtcttccaaacatcaaaat

SEQ ID NO: 27471 - DNA, 261 bp, Glycine max
ttccacgcttgacccacgcttgccagaagacgacaagaagacttcagatagagagcatgaactcgcacatatgggggactcatgagaaactaccaggtgttcttacatacaatcactaaaactctctcaagagtgaccaaagtataaccacacatactaacattaacactaagtaacaaggatcagtcaacgattctacctttactcttgcctgctactcatactctctaacctaattcttgattccaatggagcccattc

SEQ ID NO: 27472 - DNA, 415 bp, Glycine max
  modified_base (347)..(347): a, c, g, t, unknown, or other
gaaggaagaaacagaaaaaacagtggctgcggaatctcttgttaaggagagagaggctaggcttaactttgagaggtcacagagtacactacaggaggatcttggacgagcacaacgagagctccaaagtgcaaatcagaagatattgtcactcaatgacatgtataagcggttacaggattacataacaagcttgcagcagtacaatgggaaactccattcagagctttctacagttgaaaatgaacttaagagtgtagagaaagagaaagctactgtagtggagacccttaccatgttaaagggtcagcttactttgtctatggcttctcaagaagaggccacanaacagaaggatgcattggctagtgaagttacatctctccgagtagagttgcaacaagtgagggatgat

SEQ ID NO: 27473 - DNA, 346 bp, Glycine max
  modified_base (84)..(84): a, c, g, t, unknown, or other
gattagaggtgggccatgccttcggacggttggagaagactacggaggggggtaacagaagaggaaggcagaaaggaaagactntaccgagtccttacgcgttgattgtgtttgcatccgatggaagagaagatgagtgagaatttgatggagaaagtgagcgcactgtaagagcgcctgaaaatcgtaggcgtggaagtggcgagaaagatgagcgaggggatgagctccatgagtttcaagctcaaggagttcttccagcctggggccaatcaggccgtcaagcttgtagaggacgctacttccgaggccgtgaacgagcccgaatgggccctcaatctcgatc

SEQ ID NO: 27474 - DNA, 402 bp, Glycine max
  modified_base (380)..(380): a, c, g, t, unknown, or other
ggacttttcaaagggaatggtactaattgtgctagaattgtccctaattctgctgtgaagttcttcagttatgagcaagcttctaaaggtatactgcatctgtataagcagcaaactggaaatgaggatgctcagctgactcctcttttacgccttggagctggagcttgtgctggaataattgctatgtctgcaacttatccaatggatatggttcgaggcaggattactgtgcagactgaggcatccccatatcagtacagaggaatgtttcatgctttgtctactgtgctcagggaagaaggtgctcgtgctttatataagggttggcttccttcagttattggagttattccttatgtaggtctcaactttgctgnctatgagtctctgaaagattat

SEQ ID NO: 27475 - DNA, 415 bp, Glycine max
ggagaacaaaacaagtgtttcgaatagattatcctaagtctttgggaatagtgctgcaatggcttcaagtcaggaggaggtgacccttttgggagctactggaagcccatttgtgtgcagggttcatattgccctcaagttgaagggagttcaatacaaatatgtcgaagaaaatttgaggaacaagagtgaactgcttctcaaatccaacccagttcacaagaaggttccagtgtttattcacaatgagaagcccatagcagagtctcttgtgattgttgaatacattgatgagacatggaagaacaaccccatcttgccttctgatccttaccaaagagccttggctcgtttctggtccaaattcattgatgataaggtttttggtgctgcatggaaatcccgtttcacagct

SEQ ID NO: 27476 - DNA, 285 bp, Glycine max
gaaggaataatgattcaacaaggagtaggaagggagccggccatgatgcaacatgcacatttcacacatgccaaacagaactctatgatgtctttaaattcctttacttcaggagcagaaagttgttatgcgaatagcattccacgtgctgacaatgggagatcaaatgggaagttactacatactcatagcatactaagtgcgagccacaatgatctggatcatttctgtcaagctacgtatatggaatattctcatttccttggaccagttgactactcatct

SEQ ID NO: 27477 - DNA, 326 bp, Glycine max
gtccttagaggtgactgaaacagctcaagactgaggaggtaattcagagaaacgactcttctgctttgatctcaacgaagatggtgctgatgatatggctgtttatgtaaaagctacgtctaccccaataccagttgtctctgcttcaaggcctgagccaacttctgggttgcctgtggcccctttgcaggttgagggaacacttgcatggtacgggtcagacggcaccagtgccttccgacctgcatagtcttgtcacaatcgagataacgacaagaatctttctgctgacacgaactctgatgcttccaagcagaggcaggatt

SEQ ID NO: 27478 - DNA, 120 bp, Glycine max
gaagcgaaaagtgaagagaatggctcccaagggtttaacctttctggcttgggtaatatggcgttcagcactggcactgagtcctttctgtgcggggaaagggcaaaataatggccttgt

SEQ ID NO: 27479 - DNA, 401 bp, Glycine max
gaaggtggtccagttctcaagtttctggaaatgtttgatagctatcgagttgaacattgtttacgcctgtgccaagaatatggcattatagatgcatcggcgttcttattagaaagggttggtgatgttggtagtgctctttcacttacactttctgatctaaataataagtttgttgatcttgatgcctctgtggaagctgtagttttaaaccatcgcagagatggttcttcacatatggaaatattcaacagtgttttaaaaacaaaggaggtaaatgacatccacaatttattgcgtgcctgtattggtctgtgtcagcggaacacccctcgtctaaatcctgaggagtcagaggcacattggtttaaattacttgactcgttttgtgacccactgat

SEQ ID NO: 27480 - DNA, 413 bp, Glycine max
ggagagaaagagtgaggagagaattacagagcattttccaacacgattacacgaccgaatcaaaccctctctttctctccgaagctgcgtttaatatcttactcgccttagattgttcttctctttcattatactgttctcttttcgatttgagggaacagtacaagagtgtgaggatcggttaacccaactgcacaggtagtcactaaaataatggagtctcacgatgagactggatgccaggctcctgaacgccccattctttgcattaataattgtggcttctttggaagagcagctaccatgaacatgtgttccaagtgttacaaggacatgctgttgaagcaggagcaggacaattttgcagcatcgtcggttgaaaacattgtgaatggcagttccaatggcaatgg

SEQ ID NO: 27481 - DNA, 403 bp, Glycine max
gacggctaaaagctaaatatcatcaaagtactcaaattagcatggctgtcatggttgcattcttgaatttgatcatcatcttttcagtagtctctacaacagtaaaggatgccactgctagggacaaaactgttccagcagcaattctgcgaatgcacttccatgattgtttcgttcgggggtgtgatgcctctgtgctgctaaattcaaaaggaaacaacaaagcagaaaaagacgggccaccaaatgtttctttgcatgcattctatgtcattgatgcagcaaagaaagcactagaagcttcatgccctggtgtggtctcttgtgctgacatccttgctctggcagcaagggacgcagtttttctgtcaagaggacctacatgggatgttcctaaaggaag

SEQ ID NO: 27482 - DNA, 391 bp, Glycine max
gggggtctcattcaagttatggaagctgggcaaatgccttttggttctgggattgatctccgtgacaatccggtgggagattttctgtcgtccagggatgagccccagatgatttctggttcatcactttttggtaatggtcacaagagagacaaccttggcctggataatcatcattctctgaatggcagtaacaagcggctgagaggtgatagcccgtggaactccaagccaatggactttgaaacgtgcatagaacagatggaacattggatggggaaagctagaatgatgtttgcaacaaaagatcaggcttgcgaagaatctacaatgaatcagcaactcttgattaatgagctccagaagcgagataacatgattgagcatttgc

SEQ ID NO: 27483 - DNA, 402 bp, Glycine max
gaggaaaggagaggagaggaagaggggtcagttgttcattttcatcatttcattgtttcttttcttttccagacatcaaaccaaacactagctacgcttctctctctttccttcccagagcttcctgtggctgtggaatcatcgtatcttcttacgtccgaagtaagcctttgtcttgtgtgtgttcttcccccttccgtcaggaaaatcagatgcatcgtggtaaattttcccttacacccaagaatgaagtcaaggacttgacaggttcaagtttaaccagttacaaacatagcagtcttctggaccccatagatgtttcttcatcttcagatgatgaaaatgaccttcctaatgatgatgtgtctaatcaattagtcctttatgatcctgtggcgaatg

SEQ ID NO: 27484 - DNA, 407 bp, Glycine max
  modified_base (341)..(341): a, c, g, t, unknown, or other
ggtgtgagttcattaacatatacaaattctctgtgttgtgttgtgtacttgtgttaattgtgttgttgttgtaggaaatttaagtgaagagagaatgatgatgaagtctgctatgtgtgcattggtgcttgtggcactggttgtggttgaagtggggcccatggctgaggctgcggtgacttgcaacccaacacagttgactccttgtcttccggcaattaattcaggttctgcaccttcgagtgcttgttgccagaagctgaaggagcaaaagccatgcttctgtggctacctcaaaaaccctagcttgaagcagtatgttaactctcctaatgccaaanaaaccgttagttcttgtggtattgcctatccaacttgttaagcacctcttatatatatatataaaa

SEQ ID NO: 27485 - DNA, 233 bp, Glycine max
ggatcatgattggtgtgcagcagtgagaaaactgttgaacctactgcttgatggaactgtaaatacaggagatcatccttccttgtatctcgcgctttcagagatgggtctccttcacaaagctgtaaggagaaacagcaagcagttagtggagtgtcttttgagatatgttcctgagaatatttctgataaactaagacctgaagacaaggcactggttgatggcgagaatc

SEQ ID NO: 27486 - DNA, 419 bp, Glycine max
agaagggcattgaaagatgtgttaaggaatcccaacgagaggtcgacctaggagtttatttgaatcggttagtaatatttattatatccctgtaaacaatgtttgtgttattgatacctaattattgtcgaattcagggcccgttggcaactggttgttttgtgtcctacaaacaatgttgtcgtgtggttttgttcgttgtgtaagaagcctgatgttcatatcaaacctgcaattaataagttaagttttatattataagtcatttaatgtattttaaatatggatacatgaatagttttgtcctcatttatacgtccaaatctttctattcagtgcgttgaagacattaaagactacttctaacggtaagattgatcaacctacaccttagtggattgaagtaatgggtagtcata

SEQ ID NO: 27487 - DNA, 426 bp, Glycine max
  modified_base (43)..(43): a, c, g, t, unknown, or other
  modified_base (304)..(304): a, c, g, t, unknown, or other
  modified_base (362)..(362): a, c, g, t, unknown, or other
  modified_base (371)..(371): a, c, g, t, unknown, or other
ggcactgagtaacggcaaagtccttgctggttgcggccattcncgatggcgttgcaggagaggctagacaagttcaagaaacagcaagagaagtgccaaacgacactttcgaccattgcagctaccaaggccgccgcggcaacccaaaagtccgccacacatgcctcggcaaatggaagaaacgctgcccctgcggttaagttttccaacgacaccgagaggcttcagcatattaatagcattcgcaaggcccctgtgggtgctcagatgaagcgtgttattgatcttcttctagagacacgancagcttttacaccggagcagataaatgaggcatgctatgtcgacatgaaggctaacanagatgtctntgagaatctgaagaaaaacccaaaagtgaactatgatgggcaacgattatcttac

SEQ ID NO: 27488 - DNA, 134 bp, Glycine max
gactgaaaatttgaagaaaacactaatctaaatcctgatactgaatcaataacacactggttcaatactaccattctctaacgctatcattatcaacacatctgctcaatacactacttgcatatgatgattac

SEQ ID NO: 27489 - DNA, 371 bp, Glycine max
ggatgaccagcaagacatcacgagaggaaagggtatggttgattccctcttccaagctccacaggagactggaactcactatgcagtcatgagctcttttgagtaccttagcactggacttaaacagtataacttggataacaacatggacggtttttacattgctcctgcttttatggacaagcttgttgttcacatcaccaagaacttcatgaccctgcctaacatcaaggttcctctcattcttggtatttggggaggcaaaggtcaaggaaaatccttccaatgcgagctcgtctttgccaagatgggaatcaaccccatcatgatgagtgctggagagttggaaagtggaaatgcaggagagccag

SEQ ID NO: 27490 - DNA, 102 bp, Glycine max
aaccacacaaacggaataaagacaacttaatgagacagaaatgccgggtagggtccaaatattgcatgcgattctgccaaaaatccattcaactctcatatt

SEQ ID NO: 27491 - DNA, 350 bp, Glycine max
tgcatgcgacacaccacacacattccactttacagggggagtgtaccaaaatcacactggctccctctgtcaacgggttcactattcttcctctctctatatctctctctggacacacacatacttgctggcaaaccattcttcttgtgaaggagtagtgatagcggactaatcttttactgaataacgatacaacagcatgccatgctgactgactaactctactcacgcatacccgacacataaatccctgaatctgtattgcatacgcacactgtgactcttaaactcgtcatgatcataaaaccttctacaatcattttactcatttctttcctggcttgaatcaa

SEQ ID NO: 27492 - DNA, 439 bp, Glycine max
ggggctttggagtgtgtgttcgggtcttggccgcgaccgacgaagatgttcacttcacgattgtctccatctctcctattccccgcatttcatcacaaactttattcatttctcttctctattcgcaatcatcgctgttaactggtgcattctggaacactggctggttaatgattcatagtgttctaaaagcaagtaggtttcaaaatccacgtagagaagccctcgttttgaccattgctatcagaggttgtgtttgtcgtttagcatttagctcaatgaaagacatcaattgtaaagtggattctagttcatgtactcttgcccccaatagggaaccctgcatcacagagtccttatcagttagtgggaatggtactactacttcatctatgagtgtcaaatccacccctgaaattgaaaagaagtttggtcatca

SEQ ID NO: 27493 - DNA, 440 bp, Glycine max
ggagaaagcaatgggcattgatagtgaatgcgtggtatctcacaaggcctatgcgagggtgggattgcttgggaacccgagcgatgtctactacggcaaaacgatagcgttaagcgtcgccaacttcttcgccaccgtcacgctgcgtccctccgaccagttaatcctccaaccacaccccctccacgatctccttcatttctcatcgctccctcaattggtcaacaggttgagctcccaaggttactatggaggcgtgcgattgcttatggctatttgcaatgtcttctacgcgtattgcagagagaacgccatcgatcttggcgacgacaatttcactctctgctacgacaccaatatccctcgccaggctggtctttcgggttctagcgggatcgtgtgtgctgcgttgaactgattgttggatttctacaacgtca

SEQ ID NO: 27494 - DNA, 235 bp, Glycine max
gggtgaaatccacttggctgtgaggtttacttgttcttctttgcttaatatgatgcacatgtattcactacctttgttgccaaagatgcattatattcacccactaactgtcagccagcttgataatctgaggcatcaagctactcagattgtttcaatgagactgagtcgtgccgagccaccgctgagaaaagagatagtggaatatatgctagatgttgggttccacatgttg

SEQ ID NO: 27495 - DNA, 425 bp, Glycine max
ggaggaagaagaggttgaagaagtggaagaagaggatgcgatgcaaaatcatagcagtgatgaaacaaaggtggaagatgaggatgagaagaaaaaacatgctgaactcctttcaattcctcctcatgggtctgaagtatacattggtggcattcctcatgcctcagatgaggatttgaaatctttatgtgagcgtattggggaagttgcagaggttcgaataatgaagggaaaggattcttccgagaacaagggctttggttttgtgacctttagaagtgtggaattggcttctaaagccattgaggagctaaataataccgaattcatgggtaaaaaaattaaatgttcaaaatctcaagccaagcaccgtctttttattggcaatgttcctagaagctggggtgttgaagatctgaagaaga

SEQ ID NO: 27496 - DNA, 146 bp, Glycine max
taaaaatcatcaaactactccaatgaacatttctaaaaccggtgcattcttcaatttcatcatcatatctccattatcctctacaaacaattcactaaacttaaactactattcaaaaacattccctcatctttaattcatatctt

SEQ ID NO: 27497 - DNA, 391 bp, Glycine max
ggtcatgtgggtaatgaaatctatgggaagtttgtgtcagatgtgcttcgtgatgagggcattggtttggttgggatgattactaatgacgatatcgtcaacagctctagtggtagtgcctcttgtgaaacgcttttatgttgggttcttgttgatcctttacaaagacatggtttttgcagtcgggctgatttttgcgaggagcctatattgcattggatgagtaaattgtccagtgaagttaaaatggctattaaaaattcaaaggtcttgttctgtaatggatatggatttgatgagctctctcctggtgcactactctcagcaatggaatatgctgttgaagttggcacatcaatcttctttgatcctggaccacgtggaaagagtc

SEQ ID NO: 27498 - DNA, 419 bp, Glycine max
ggcggatgagcttgttgctgaattttctgaaccaggcaagagtgaattgccccctgatcagcaacaatatgatgaaaaaaacatccgccgaagggtctatgatgctctgaacgttctcatggcaatggatattatttccaaggacaaaaaggaaattcaatggaggggccttcctcgtactactgtgaatgatattgaagaactaaagacagagcggcttgggctcaggaatagaattgaaaagaaaacagcctatctgcaggagcttgaggagcaattcataggtcttcagaaccttattcaacgaaacgagcagttatatagctcaggaaatcctcccagtggaagtgtatctttaccttttattttggtacagacacgccctcatgcaactgtggaagtggaaatatcagaagata

SEQ ID NO: 27499 - DNA, 444 bp, Glycine max
ggatgcaatagagaataattactggtttgaattgttcatggatgatctacctttgtggggatatgttggtgagttacatcctgataagaacagtgataatggcaagcatgtcatttatacacacaaaaacattattgttaaatacaacaatgatcagattattcatgttaatctcactcaggatatcccaaagcctttggaagtgggaaaacatttggacatgacatattctatcaaatgggattctaccaatgtcacttttgggcgtcgctttgatgtctacctggatcatcctttctttgagcatcagattcattggttctccatttttaactctttcatgatggtcatcttccttactggattggtgtcaatgatattgatgcgaactctgagaaatgactatgcaaagtatgctcgggaagatgatgatttggaaagtct

SEQ ID NO: 27500 - DNA, 436 bp, Glycine max
ggtacatgatcagtagttccccaattttgagttggatagattatcacacctcgtgaacacaggttgcatttgctgcggaggatcgatctcgccaatggatttcaacaaggagcaaaagaaaaccatagaccaatccatcttattatgctgcaagttctttgtctccgaatcacgcaacaacgccaccctcaatgcaatagaacgagttgcaaggtcaaacccggaaactgtgattgtgaacatgtttcatgatcgaagttataacagggcaaggtacgaccttgtgtcatatgttttgcacgactgcacaggaaatcccatatacagccccttgcaccaaactgtcatagccatggctgaggctacattcaatgccatcaacctcgaattccatgaaggtgctcaccctcgcttgggcgcactcgacgacattatc

SEQ ID NO: 27501 - DNA, 278 bp, Glycine max
aaactgcatactgtgaataatccaacctgggaaggcatattgacccacaatatgtcaaaactacaaagtctttactgtggaccaatcatatcttacatgatgaatgtaaaagtacaggccctataccttaaggtgaacgatgaactgttgctggtccagcatataatggatcgctaggtgcaacagatttatagacagacggatcgatctcaagacatcttaccattctcagctgtagaagtcatctcaacatattgttccttgttaggataactcat

SEQ ID NO: 27502 - DNA, 432 bp, Glycine max
  modified_base (339)..(339): a, c, g, t, unknown, or other
  modified_base (372)..(372): a, c, g, t, unknown, or other
  modified_base (423)..(423): a, c, g, t, unknown, or other
gggagagtgctaagcaatcgtcttctcttctcggagcttggctttgcttatcgattctctctcctctcgtttctctaattccaaggtttgtaaaagatggcagatgccgaggatattcaaccccttgtttgcgacaatggaaccggaatggtcaaggcaggatttgctggtgacgatgctcctagggctgtctttcccagtattgttggccgacctcgacatactggtgttatggttgggatgggtcaaaaggatgcctatgttggtgatgaagcccaatccaaaagaggtattcttactctcaagtatcccattgagcatggtatagtcagcaactgngatgacatggaaaagatctggcatcacacattntataatgaacttcgtgttgctcccgaggagcacccagtgcttctcactgangcccccctc

SEQ ID NO: 27503 - DNA, 440 bp, Glycine max
ggtttctttcaatgaaataatattaatatcaatggaatgagctggtaatgtaaaatactgctaatgttaatatgaagtttggatggtcttattggcagaagatgctaggtggtgttcatcaatattctgaaaggtaaaacgattttggtttttaatgataatataaccatgaatctaacatcagatattgaacgctacacatcaaaaataaatcgagccaacgcatttaattgtaagtgtcttcatattacctgtgttctgtcacatctttttgcataatattggcactaagtcttttttgatagaaattgtgaagatgtactgttatcattgtatcaactatattgtgcccttctttttttatttgatttggcaaacacggctacttttctccaataagatggatcatttgtattgcggctttgtgcacaattatctac

SEQ ID NO: 27504 - DNA, 404 bp, Glycine max
  modified_base (199)..(199): a, c, g, t, unknown, or other
  modified_base (230)..(230): a, c, g, t, unknown, or other
ggcacgcagaagcagaagcagaagcgcaagcgcgtggaaccctaattagggtttgcaagccgatttgggattcgcctttcgcgtgatcgcagcgctggatccgtaccgtgttcctccgtctacggaagcgccttttgctcgatccttcgctgatctcggaagcatgtacggtccccgaggggcaatgttgggaagcggnggggtttcggacgggtacgaggttggctcanagagacaaagaatgatggaatccaatccatacttcgcagtgagcagcggaacaggcaacttacctttatggtatgctggtggcttccagcccccccccttttctgtggttcgtctcaagggggcttcattcaactgcactgacattgacatcttgaagttctttgctggactga

SEQ ID NO: 27505 - DNA, 316 bp, Glycine max
  modified_base (260)..(260): a, c, g, t, unknown, or other
  modified_base (263)..(263): a, c, g, t, unknown, or other
  modified_base (266)..(266): a, c, g, t, unknown, or other
  modified_base (271)..(271): a, c, g, t, unknown, or other
gacagcgaaacgtagagtgatttcagtgagtgatcggtgttcacttgatctcatcataatcgtcagcgtcaattgaagaagatgccgatcagaaacatcgccgtcggaaggcctgaagaggcgactcaccccgacacgttgaaggcggctttggctgagttcatctcaaccttcatcttcgtgttcgccggctcatgctccggcatcggctacaacaagctcaccgacaacggcgctgccacccctgccggcctcatctncgnctncatcngccatgcattcgccctcttcgtcgccgtctccgtcggcgccaaca

SEQ ID NO: 27506 - DNA, 308 bp, Glycine max
ggtagtagcaagcgagcatggctccgaagaaggtgcttgtcctttgcggggacttcatggaagactatgaagccatggttccatttcaggcattgcaagccttcggtctcgccgtcgacgccgtctgtcccggaaagaaatccggcgatgtctgccgcaccgctgtccatgtacttgccggcgcccagacttatagtgagacggttggtcacaatttttcactcaatgcaacgtttgatgaagttgatgctgcaagctatgatgggttgtgggtgccaggtgggagggctccagagtatcttgctcat

SEQ ID NO: 27507 - DNA, 373 bp, Glycine max
agagaagagaggagaaagcagggggcattgatagtgaatacgtgatatctcacaaggcctatgcgagggtgggattgcttgggaacccgagcgatgtctactacggcaaaacgatagcgttaagcgtcgccaacttcttcgccaccgtcacgctgcgtgccttcgaccagttaatccttcaaccccacccccttcacgatctccttcatttctcatcgctccctcaattggtcaacaggttgagctcccaaggttactatggaggcgtgcgattgcttatggctatttgcaatgtcttctacgcgtattgcagagagaacgccatcgatcttggcgacgacaatttcactctctcctacgacaccaatatccc

SEQ ID NO: 27508 - DNA, 445 bp, Glycine max
  modified_base (282)..(282): a, c, g, t, unknown, or other
gagccaaatgaacatatctccagctaatggaagggtgtgattatcagatacaggtgcttttggtcttgaaacaagtcacttccttgttggaagtggtgctactgctagcaatgctgcttctgtagatgttgggggattccatcatgaatttggtacaagcagaaatcctactgctccttaaaggttttcataatactcaaactcaaactgctaggggaattagaagcaactattctcagagatccacaccaacttttagggcttcttcaagcttgcgcttgngacaagtgacatctgatgatggattgcctatggtagctgaaagttactcttctagacttccaaagccattgagcaccattggcaggaggaatggtgatagaaatgggaagtcaagaatttctagtgaaagatatcgatcattggctgagagtggtctgcatga

SEQ ID NO: 27509 - DNA, 320 bp, Glycine max
cgccaacggagggggaataccggacgatcatctcatgactatgctgatgggtacactacgtacggtaccgctggacactacactactcttgcaacgacttatttggatatggatgctacacatatgtcacataaggcgaagcattcactgatgctctccggtctacagtgacaagcatcccatgttcctatcattgcagcttgaaaacacgtcattactactatagcgggcccatgaatgcacttgactctgcactcgtcagatatatcgctaccagctgcgatcgagctgttaatgccaactagacgttttatgatgaa

SEQ ID NO: 27510 - DNA, 368 bp, Glycine max
agacgtacgcgcgggtgcggcagcacgacgacaacagatggggtctcacggacgtggcattccatgaaggggcatgtgcttcactgggacttcacggcagactctgaagccatggttgcatctgacgcattgcacgccttacgtctcgccatgaccccgtcagtgccggaaagaaatccggcgatgtctgacggaccgatgtccatgtacttgccggcgcccagacttatagtgagaccgtcggccacaattgttcactcaatgcaacgtttgatgaagctgatgctgcaagctatgatgggttgtgggtgccaggtggcagggctccacagtatcttgctcatgttcctggtgttgtggaactggtg

SEQ ID NO: 27511 - DNA, 388 bp, Glycine max
ggagaaagcaatgggcattgatagtgaatgcgtgagtatctcacaaggcctatgctagggtgggatcgcttgggaacccgagctatttctactaccgcatagctatctgctacaagcgtaaccctacttcttaagccaccgtcacgcttttttcctccgaccagctaagtctcttacaccacttaattctctatcctcatcatctctaatatctccttcatttgttatacattcctagcttggacaactactttagcttctatcgttactatataggcattcgatatgcttatggctattttcaatgtattttactcctttttgcacatataacgccatctatcttttcgacgacaatttcactctcttcttactagcctattttcct

SEQ ID NO: 27512 - DNA, 426 bp, Glycine max
gatctcaaaccaagcggtgttggattggacaatggcatcaatccaaaaatctgtgattttggaatggcatggatggtagctacagaccacattcaaggatgcaccaatagagttgcgggcacatatggatatatgtctcctgaatatgcactgcatggacaattttctgagaagtctgatgtatacagttatggagttatggctcttgagatcattaatggcaagaacaactcttgttcttttgaatcatgtcgagacgctgacctattgacctatgcatggaataactggagggatgaatcaccatatcaattgctggattcaactctgctagaatcttacgttccaaacgaagtggaaaagtgtatgcatattggtttaacgtgtgtgcaagaaaatccagatgacaggccaacaatgggaaca

SEQ ID NO: 27513 - DNA, 370 bp, Glycine max
  modified_base (289)..(289): a, c, g, t, unknown, or other
gatagcagcatcatacaaagcattgaattcaaaaacttaagttcattccttgtgttttgctttcttcctcaaaaccaaacatgtcgaacacatgcggcaactgcgactgcgctgacaagactagctgcaccaagggaaacagctatggtgttattgtagagactgagaagagttacatcgagactgttgtcatggatgttccagcagctgagcatgatgggaagtgcaagtgtggcactaactgcacttgcacggactgcacctgtggccattaaggaatatgtatganaatgtaattgccatgtgtttggcaatacaaatatccaaataatgtaatcttcgtatgaataaatgtgtgtgctgttatcct

SEQ ID NO: 27514 - DNA, 399 bp, Glycine max
gatgtctcttagagagaaagaatcccttgaattgcgtatacacagtgaatcttattctgattcttctgacagcgggtgtgaagattcaatcgcaaaaaaggataacatagatgtgactgtggaacaaaactcatgtttggttgttgaaaaaaatgctatgaattcatccacctcagaagtgttgagttcccagtctcttgacggtgaagaatcaattaaagtttccttgttcagtgaatcatctgatgctgttgatgaggatacccatgacatactagctgaagtttcacctgatgcttctgtgtcaagcgaaagacctattatcacaatgacagaacctttatgctccagaaacttcataacttctgacagtctatattcaaagtcactcggaagcta

SEQ ID NO: 27515 - DNA, 310 bp, Glycine max
ggtcctgtcagaagattgagatcttagtgagtgagggaggaagcattgacagtaggtggaacttaaggaccagaatcctactgatcatcgagtattcacgatatcatggactagcctggaatctcaagcaatgcaccatagaacacgacaaaccttactgtatacgcattctatacagatgcacatacatgctttcatgatagcttccatagctaaagatatacttgtgattgcatctccatctacactgactgcagctgctgacccaattgcttctcttatagacacagcattcatacgtcatttgcat

SEQ ID NO: 27516 - DNA, 441 bp, Glycine max
gatgttattcaattggaaaatcatgttagcaatgggtttgggttcttatcaaacaaaaagccagaaaattgtgaaagaggagttatatcagcaaatcttaagaatttcacagaaaatgcacacaaagatgtgtcagagaagttcaaagctgaggagttaatagaacaacctgtggaaccagttgtttgcaattttctttccgatgatgattttatttgttcaagttctgactcagattctattagcagttctttggaggaggggtttttgtcagacacagactttggaaccactactgagtatgacacattgggaagaaatgcagcataagaggatttggactttggggatgagaaaagctatgagaatttggatgttggatatgagcctgatgattttactgaaggggatgaagatataatggatgagtttggaaaattg

SEQ ID NO: 27517 - DNA, 444 bp, Glycine max
gactacaattagagcaagcacacctatgtttctgatgtctcggaagattaaatcacttggtgtcaaatgggttatctcaggagaaggatctgatgagatctttggagggtatttgtacttccacaaggcacccaacaaggaggagttccacagagaaacatgccgcaagatcaaagcacttcaccaatatgattgcttgcgagccaataaatcaacatttgcttggggtctagaagcccgtgtaccatttttggacaaggcgtttatcaatgctgcaatgagtattgaccctgagtggaagatgataaaaagagatgaaggacgaattgagaagtggattctgaggagagcctttgatgatgaagagcatccttatctgccaaagcacattttatacaggcagaaagaacaattcagtgatggagttggctatagttggattga

SEQ ID NO: 27518 - DNA, 298 bp, Glycine max
gtagaagatggcagacactgaggatattcaacctcttgtttgtgacaatggaacaggaatggttaaggctggatttgctggagatgatgccccacgtgctgtgtttcccagcattgtaggtcgtcctcgtcacactggtgtgatggttggcatgggccaaaaagatgcatatgttggtgatgaggcacaatctaagaggggtattttgactctcaagtaccccattgaacatggaattgtgagcaattgggatgatatggaaaagatttggcatcataccttctataatgagcttcgt

SEQ ID NO: 27519 - DNA, 438 bp, Glycine max
caccccaagaagaagaaggaggacaactggtggagacaccagagtctcttcacgtgttccccgaccacgctcttgaacggccttgccaggggtgccagaggcatgcttggtctcggtaggtcccgcagttcgtttccttcgcaggttttcgacaacttcagcacgcaccgtaaactcaccctctgtctctcctcgtccaaaggggttgtcctcttgggcaacgtggccacctacgagtccgaggttctcaaatctctcaccttcacaccccttatcaccagcttccccaggcaggaatacatcatcaatgttagctccgtcaaaatcaacggcaataggttgtctttggacacttcatcatcagagtcgtccaatgaacaagatggtagtgtaggggctttaactcttttaagcacaattctgccctacaccaccatg

SEQ ID NO: 27520 - DNA, 255 bp, Glycine max
ggcacaagtgagtttgttgatcgagatagctaggggcagtgagatgaaaatgaaggtccttgttgtcttcgatgctacaattttggtagcatggcaatgccatgcgtacgatctgtcccctatgcgaatgaacactggctatggtgcccgtactccggaggcgaaatgcgcaagttggaggcttgctgtggaagcacacagcatctatggctttgagaccatacctgaagagtgcgttgaagcaactgaggaata

SEQ ID NO: 27521 - DNA, 426 bp, Glycine max
  modified_base (412)..(412): a, c, g, t, unknown, or other
ggcccaaaatattttcatagcattttcagaggaagatggcgggtacggtttcgacttgtttcttcttcgtgtttcttctttctctccttcttccttttcagatctccgctgaggaatcctcggagaaggagttcgtactcacattggatcactctaactttcacgacactgtcagcaagcacgatttcatcgtcgtcgagttctacgccccatggtgtggtcactgtaagaagcttgctccggagtatgagaaagctgcttctatcttgagtagtcatgatcctcctattgttttggctaaagtagatgccaatgaggagaagaacaaagaccttgcatcacaatatgatgttaagggattcccaacaattaatattctgagaaatgggggaaagaatgttcaggaatacanaggtccccgtgaag

SEQ ID NO: 27522 - DNA, 372 bp, Glycine max
accggacttgaatttcggggtagacgtacgcgcgcgtgcaagcgtacgaccggatgcgagaagacaacggactgatcaccacagttaatgggggctgatagcctctgcgtggcgttggatgctaacagagcaggagcctaaaacctttgtgacgagaatcttagccatgggtagcaacggaatactggtacgaattatcacaaaccggtcacatcaaattcattcttgacttcgatagacacccatccttcgacgcctacggattatagaccggtcgcatctgcattctatacgacgtcattccgatcagcgaccgccgtacctatcgtacagtctcacatccctgatcttccccagttactgatagctgtc

SEQ ID NO: 27523 - DNA, 328 bp, Glycine max
tcttaagggggaatacagattgtatatcagaagtaaaattatccacctttttgagagtattcgtctctaatctaaatcgacttgctatcgaatatgtggattcaaaaacaagtcgagtttttgttactttcttttttgtataaaaattgatttaatgtaatcatttcattatatatatctattataattatataattgattcaattttttatttttctttttttctaatatttttaaattcccatttttctactttacaaattctaaatacagagtttaaaatacattgataaaataccgagttaattttcattgacgtctttacttt

SEQ ID NO: 27524 - DNA, 414 bp, Glycine max
gggagaattttggtgtgtgagcgtcaacaatggcgtgtcttcgtcttcagaatcggcggtgtcggagcgaagaggaataccgggggctcagttcgtagaggatgtccaaacttacctcactcaatcgggtctcgatgttggttcagccctggcttttctccaagagagacttcagcagtacaaggtagtagaaatgaagcttcttgctcagcaaagggatcttcaggcaaagataccagatattgaaaagtgcttagacgtcgttgctacattgaaagctaagaagggtactggtgaggaacttattgctgattttgaggtatcagaaggcatctattcacgagcacgcatagaagaaaccaattccgtgtgtttatggctgggagctaatgttatgctggaatattcattaga

SEQ ID NO: 27525 - DNA, 393 bp, Glycine max
gacacacacaaattcacacaaacataaaaaaaaaaaaaaaaacacacacacactctcatacacacgttgtcgcgcacacattccttcattccgcagcaacaaacaaacatcttttaccttaaacaacaatggccgatgccgaggatattcaacccctcgtttgcgataatggaaccggaatggtcaaggctggttttgctggagatgatgcaccgagggctgtgttccctagcattgtggggcgtccacgtcacactggggtgatggttgggatggggcagaaagatgcgtatgttggggacgaggctcaatccaagaggggtattttgactctcaaatacccaattgagcatggaattgtgagcaattgggacgacatggagaaaaatctgc

SEQ ID NO: 27526 - DNA, 406 bp, Glycine max
gggagtgcagcggagaagaatcacattcgcattctcaatcacatccattcattcactcatccatatcccttctttccactaacttctctctctagttgatacaaataaaaaacaaagtttcatactttacgacacccttttctgcaactgatgatggaaggaagctgaaacagtgaaaaacagcaacaacgaccaccctgtctttgttttttgtttgttgagttgaaactttagagaaagtgaatagtgatatggaggcaaagggtgtgcggttcttagcgtatcaatcaatattttcgagcgttggatctggggacttcgatggggtgaagaaactggtggaagaagtgaagaaggaagaatggtcatcgctctctgatgtgatgtctcttcacaacgatgctgg

SEQ ID NO: 27527 - DNA, 444 bp, Glycine max
ataggagaaagttctaataatctcgatgaaagtgaaaaatataagcatttgtggcttgaatgcgaaaattgttatggattaaattataaaaaattttttaaatcaaaaatgaatatttgtgaatactgtggatatcatttgaaaatgggcagttcagatagaatcgagcttttgattgattcgggtacttggaatcctatggatgaagacatggtttctctggatcctattgaatttcattccgaagaggaaccttataaagatcgtattgattcttatcaaagaaaaacgggattaactgaggctgttcaaacaggtactggtcaactaaatggtattcctgtagctattggaattatggattttcagtttatggggggcagtatgggatccgcagtaggtgagaaaatcacccgtttggtagaatatgctactaatcaactt

SEQ ID NO: 27528 - DNA, 420 bp, Glycine max
gactcacaggggagagagtgttggtacgaaaaatgtcgaagctgatcttcgtgttcctttcgcttattcctcttctctgcacctccttctccccagagagaccctcagatcgacgcgtcctcgttttgctcgatgacttcgccatcaaatcctctcattctctcttcttcaactccctcaaatctcgcggcttcgatctccaattccacctcgcagacgacccccaaattgcgctccagagatacggccagtacctctacgacgccctaattctcttttcccccaccattgaacgttttggaggatccattgacgcggctgcaattttggattttggtgattcgggtcatgatttgatcgttgctgctgatagcaatgcatctgatttaatcaaggaaatcgccaccgagtgtggagtgg

SEQ ID NO: 27529 - DNA, 409 bp, Glycine max
gacggctaaaagctaaaaatcatcgaagtgctcgaattagcatggctgtcacggttgcattcttgaatttgatcatcatgttttcagtagtctctacaagcaagtcactgagcttaaactactattcaaaaacatgccctgatgtggaatgcattgttgccaaggcagtgaaggatgccactgctagggacaaaactgttccagctgcacttctgcgaatgcacttccatgactgtttcgttcggcggtgtgatgcctctgtgctgctaaattcaaaaggaagcaacagagcagaaaaagatgggccaccaaatgtttctttgcatgcattctatgtcattgatgcagcgaagaaagcactagaagcttcatgctcaggtgtggtctcttgtgctgacatccttgctct

SEQ ID NO: 27530 - DNA, 371 bp, Glycine max
gggaccctaaggcaacatgattttcgggaaggggcctctcgtcctccagctggatcgtccgcaccaggagtgtctaaatattcttcttgacttacgaagtggatctaaaaggtcactaagctgatcctactaaacatgtccttgctctaaaatcatgggatattacttcaactagaccacatttgcttctagccgatgggagtgatccctgctcacgcttatacgatagaatgatgctgccgactgttacctcatgttggacaagtatgtctccacctccttgtgtcaattattactgacgaatgcatatctctgatcatggacatacaagcttgcacttaactcatgtgacatacagtactgatggacac

SEQ ID NO: 27531 - DNA, 402 bp, Glycine max
aagagaaagtatgatgtttcgggggaggatgaagcggtttacgagcagcgtgcggcaaggccggcggcccgaggttataatggttactatgaggctgatattgatgctgaggagatattcaggaacttctttggaggaatggcccctgcagccaattttggaggattcagttttggaccagctggtttcaatgggttcaatggtcacaggcatgctgctgatcatggttctggtggttttaatgttcgcgctttaattcagttgctgcctgtgctgctgattgtgttattgaactttttgccttcatcggagcccttgtactcgctttcgaagagttatccttatgaacatcggtttaccacacccaagggtgttaactattatgtcaagtctacaaacttt

SEQ ID NO: 27532 - DNA, 391 bp, Glycine max
  modified_base (371)..(371): a, c, g, t, unknown, or other
gaaaacaacggtgacaacaacagcaatggctcttcacacacgacaacgttgctcattggctcaaagacgcatcatcattccttttacaaaagtaacaactatccattccctcattcatcatccgcggcatgctagatatatatacatatatatatagttccgagctaatatatatatgtaattaaagataggtgattagtgattattactattagagatcaatcccccatgcaccacatgctttcttatatatatgtatacttcataaatggaaagatcaattcatagagatttttctaatttgttgtaatttattttatatgtaatatatttatggtctatgcgtacattacatatgaataacaatgcanggttatcacatagttcaatc

SEQ ID NO: 27533 - DNA, 430 bp, Glycine max
  modified_base (275)..(275): a, c, g, t, unknown, or other
  modified_base (341)..(341): a, c, g, t, unknown, or other
  modified_base (353)..(353): a, c, g, t, unknown, or other
gggggaatcattgtctgcgtctgtaaattgtaagaggcatcatccctgaagctgaacctcaaaaccctagctgtccgcctgtctgcaacggcgtcgttatgatcagttgagaatccaaaggaatcgagtcgaatcatctgaccggcgacagttatgtacagagagcgaggaggcgtcggatccaaatcggaggtaacttccgttgatcggaagcgaatcaacgacgtcctcgataaacagcttgaacgttcctcgccttccacatccagagccgncgccatcaacggcaaggaccgctcctcctcttccctcttagccgccgccaaggactcccgctccgncttcgtcaccgnccctatctccaagaattccaacgcttccgacgaggaatctgaaacagacagcgaggagtctgatgttagtggctccc

SEQ ID NO: 27534 - DNA, 413 bp, Glycine max
gaggcgaattgaaagctaagctgtggtaattctaagtgttccccccgggaaaaatagagatgtctcctacgttacccgtaccatgtggaagtagcgacgtaatttcatagagtcattcagtctgaatgctacatgaagaacataagccagatgaaggaacgggaagacctaggatgtagaagatcataacatgagtgattcggcagatttggattcctatatacccactcgtgcggtacttcattgtatgatctatatctatatatctatatctatatatctatctatagatatatagatatataagatccatctgtatagatatcatcatctacatccagaaagccgtatgctttgtaagaagcttgtacagtttgggaagaggttttgattgatccaaaagaagaatctac

SEQ ID NO: 27535 - DNA, 306 bp, Glycine max
cgaaagcaaacctatttggataaacgtcttccttacaaaccgaccttgggagacaggcaatatgcattcagcgtttattttgaatgggataatgattttggaattccaagaacattttacatcaaaaattttatgcaatctgaatttttcctcgtaagtgtcactcttgaagacattccaaatcatggaaccattcactatgtttgcaactcatgggtttacaatgcacaaagttacaaaagggatcgcattttctttgctaataagacatatcttccaaatgaaactccaactccactaatgaag

SEQ ID NO: 27536 - DNA, 390 bp, Glycine max
gaagcggaaggggtttggttttgttcattatctgcttcttctgatgcgaaagtgaagactgaagagaaggtaagatcaatccaatgctggcgctacttcagaactgctccatgcccctcgcacgtgcggtacgcctaccacctcgcacgcacgtgcgaccttgtttcactgccgtgggctacgcatccatttccccacgtgccaactcccagtctcaggttctcctcggcttgtccgacaaggaactgcaacaacttgcccttgacctcggtcaggcaacatataggggcaaacaacttcatcattttttataccagaggaagctcagagaaattcaggatttcactcagttgcctcagggatttaggaatactctagaggaagctggat

SEQ ID NO: 27537 - DNA, 441 bp, Glycine max
gcaagtgatgaagtgatatctcgtagcatcaccggccttaagctttatatggtggccccatttctggcatcattgaaatcgtggatttcaatacaccaccctgcaatggctccaaggcccgatttgcctcttaaaggtaactcctatttccccccaaacactggtcggttttaaatgcctgaggtcatagggtgtagtttagttactcgatgcttggctgtgttgggatgagttaatctccagcagctagttcaatctgttgcactacattatgtgcatcgcagccttgcaggacctaatctcgaccactgaggtaccgttgacttgagaggctgaggcattagaattgagatgtgttagtattgaattgtaagctacgatattgtgcagatttctttgcttggaaagcttttcaatgcaccatttgtcaagggattcaaa

SEQ ID NO: 27538 - DNA, 394 bp, Glycine max
ggttgtgtgagtgaagaagcagagggagtagcggcattaaaaatgcagatcttcgtgaaaactctgacagggaagactataaccctcgaggtcgagagcagcgacaccatcgacaatgtcaaggccaagattcaagacaaggaaggcattcctccggatcagcagcgtttgattttcgccggaaagcagcttgaagatggaaggaccctggccgattacaacatccagaaggaatcaacccttcatctcgtcctcaggcttcgtggtggcatcattgagccttccctcatggctttggctcgcaaatacaaccaggacaagatgatttgccgcaagtgctatgcccgtctgcatcctaaggctgtgaactgccgcaagaaaaagtgcggtcata

SEQ ID NO: 27539 - DNA, 235 bp, Glycine max
ctggaggggctggcgtttgcacacccggtggctcgtctctaatacgcgatctctccatatcatgcacttattacgtttgaccgccttttgttcccagtacacggacaggagagactcaatgtcgctgatcatctacttctgcttgtacgctaatacagacattgaactacaggatatacctctacgatcgttggcattggcacttcggaggaccattgactccaaaggactgtag

SEQ ID NO: 27540 - DNA, 279 bp, Glycine max
agcagggactggctattcagcactatcagcctcatcaataatatgtgatattcgcatatcatgcacaacttacgattgagccactattattccaaggacacgctacaggtgcgacttcacgtgcatgttcaactactactgaatggcctatgctacagacacttatctgcatggaatacctaccacattgcatgcgatacgcacttgggaggagaattgacttctaatgcatgtcgtatatgctgattcacaaggactaatgaacgaacttcctcaaaa

SEQ ID NO: 27541 - DNA, 332 bp, Glycine max
  modified_base (63)..(63): a, c, g, t, unknown, or other
  modified_base (67)..(67): a, c, g, t, unknown, or other
acgcgcgggtgcacgcggacgaccggctgcgatacgacatcagcatggaggagttctaatcanagtntggtctgcaatcggacctcgctatacttcgcacctgactgactgctacggcaccggaaaaccggagatcaactgcttaagcatcatcgttatgggcaccgatttcatgctcactcagctatctcacgaactcaacgaccaacatttgcaactcacgcagagcatgccactgtccaagccacatgaccggagcttatgagagtaggctagagcgattttcacggttgaatggccagggcagactgtaaacaggcctgtgagaattt

SEQ ID NO: 27542 - DNA, 417 bp, Glycine max
ggagacagatttgtgtgttgagcgcatagaacgatgagtttggttggtagaggagcaagttttgcattgtagtagttgtagcaatagccacacaacaaaagaaaacaaaaaaccaagtcttcgtcatcttcgtatgcagagatttttcttcaacatgatgatgatgattagtttatttaccaaacaatgattgccttgccttccttcgtgagatactggtagcaatttcaaaccttttcgagtaaccaatacgataagaagagaactgacaaaagctagaagatgaagcgcatgaatgagagtaacaacaccgatgatggaaacaatcataactggttggggttctctgtatcggcccacatgaaaatggaagttactttcgcatgcacttgtttcgacaacaatgttccgacaacc

SEQ ID NO: 27543 - DNA, 433 bp, Glycine max
gccacagaaaaaaccatttatgattttactgtcaaggatattgacagaaaggatgtttctcttagcaagtttaaggggaaggttctattgattgtcaatgttgcttcacgatgtggtttgacatcatcaaattactcggagctgtcacgcttgtatgaaaaatataagaatcaaggtttggagattttagctttcccctgcaatcaatttggtatgcaggaacctggatcaaatgaagatattaagcaatttgcttgcactcgatataaagcagaatttccaatttttgataaggttgatgtcaatggaccatttacaactccagtgtaccagtttctgaaatcgagtgctggaggccttttgggtgatctttataagtggaattttgaagaaattctggttgacaaaaatggtaaagttattgaaagatccc

SEQ ID NO: 27544 - DNA, 353 bp, Glycine max
ggtgcaaatcaagcattttgcttgttatttcacgggttcgctctccaatttggacctccctttccttcgttcctcactcactgcaacggcgccggagatccgtcgctctcctcctccaccaccaccgcgatgggcgccaattccatgctcgccgagttctctcacgatctcgacgaccagatctcccagctcatgcagtgcaagccactctccgagcaacaggtccgaggtttatgtgagaaggctaaggagattttaacggatgaaggtaatgttcagcctgttaaaagccctgtgacaatttgtggcgatattcatgggcagtttcatgatcttgctgaactgtttcgaaa

SEQ ID NO: 27545 - DNA, 424 bp, Glycine max
gggagctgagctgagaaaacccccaaccccaaccgcaaccttaacctctcctcactttcttttcaaccagaactatgattaagctttttaaagtaaaggaaaaacagagagaactggcagaaaatgcgagtggcggaccacccgttaagaagcaaagtgccggcgagttgcgtcttcacaaagatataagcgagctgaatctaccaaaatcatgtaccatgcaattccccaatggcaaagatgacctgatgaactttgaagtttcaattcgacctgatgatggatattacttaggtggcacatttttgttttcctttcaagtgtctcccatctatccacatgaagcaccaaaggttaaatgcaagacaaaggtctatcatccaaatattgacttggaaagaaatgtttgtctcaacatcttacg

SEQ ID NO: 27546 - DNA, 303 bp, Glycine max
  modified_base (25)..(25): a, c, g, t, unknown, or other
gaacagaggaaatatccttgcagtnaatcaagattcggaggagtgagtggtccttggtgctgatttggcaacaacaaccacagatgagagtttgagtgtgagtgaatccagatccgagtttcgcacttttgctgagaatagaacaatggagtcggcaacggcatcatcatcggaatcggagatggcgcttcctcttcctctggcgtcggagtcacaacaaccctacgtctccgaactcctctcctttacgctcgatcgcctccacaaggagcccgaacttcttcgcgtcgacgccgaccgcat

SEQ ID NO: 27547 - DNA, 158 bp, Glycine max
tgttccaaagcgaaacagagatccaaactcagtggttcatctctatgagctcaacttgcacttcagcttcacgagcctattacatcgacaattgctgctccactcaactcatcgactgcgacagctaattcaaactctgcaccctctacaactttttc

SEQ ID NO: 27548 - DNA, 378 bp, Glycine max
ggaagcaaaaaatgaaaacccgaagtgcttctctcctctgtctttttctctctcttgctatccttttggctagtggcactgctgcaagtgcaactccaagaagcgcagtgccaagccaccatgtttcaacattcaacagaagcctttttccttccacttttctctttggaattggttcttctgcttaccaggcagaaggagcagcaagtgtagatgggagaggaccaagcatatgggacacctacactagacagcatactgaaaagatttgggatcatagcaccggtgacatgggagctgatttttatcatcgatacaagggtgacataaaaatagcgaaaggaatttggcttgactctttcagattctctatctcat

SEQ ID NO: 27549 - DNA, 360 bp, Glycine max
gagagaagagtgggcaagaatggcgacggagatgggggagctcgtctcctttctttcttccacgtcgcctcagatcacaaaagccgccgttgacatagtccgcggcttaaccggctccatggagggcttgcagtccctggcaaattactcaaacgccctcttacccgctttgtctcgcctcttaacgttacccatggaggtttcggaggctgctgcggaggcgctggtgaacctgtcgcagaattcgagcctcgcggaagcgatggttggaattggtctggtcaaaacgaccatggatgttctgtacaagcccgagtgtagcattgctcgcttgcttgacatgctgttggtcaaccttac

SEQ ID NO: 27550 - DNA, 346 bp, Glycine max
tgggaggaacacatatgcgtattgaaggacggcaacggaccaataatcttcaccatggcaaggcttgaccgtgtgaagaacatcacggggcttgtcgagtggtacgggaagaacgcacgcctccgcgagttggtgaacctggtggtggtggctggagacaggaggaaggagtcgaaggacttggaagagaaggccgagatgaagaagatgtatggcctcatcgagacctactagttgaacgggcaattcagatggatatccatttagaagaaccgtgtgaggaaccgagagctctaccgggtcatctgtgacacaaggggtgcctttgtgcagcctgcaatttatg

SEQ ID NO: 27551 - DNA, 400 bp, Glycine max
gatccatcactagttttttatatatatcggactggttgtgcttatccttattgagagaaaaaatggccaaatcaatcaaattctttgagttgaacacaggggccaagattccttctcttgggttagggacttggcaagctgaacctggtgttgcagctgaagctctcaccacagccattcaggttggatacaggcatattgactgtgctagtgcgtataagaatcaagcagagattggttctgctcttaagaagcttttagatgatggtgtggtgaagcgtgaggacttatggatcacttccaaactctggtgttcagatcatgcaccagaagatgtgccaaaagcattggataaaacattacaggaattgcaacttgactatcttgacctctatctgat

SEQ ID NO: 27552 - DNA, 359 bp, Glycine max
gaggaacacatatgcgtattgaaggaccggacggaccaataatcttcaccatggcaaggcttgaccgcgtgaagaacatcacggcgcttgtcgagcggtacgggaagaacgcacgcctacgcgagttggtgaacctggtggcggtggctggagacaggaggaatgagtctaaggacttggaagagaatgccgacatgaagaagatgtctggcctcatcgatacctacaggctgaacggacaattcagatggatatgctctcatatgaaccgtgtgaggaacggtgagctctaccgcgtcatctgtgacacatggggtgccttcgtgcatgctgcagtttatgaggcctttgggttgact

SEQ ID NO: 27553 - DNA, 246 bp, Glycine max
cgattgggacacaaggtaattacgttgtctagataactagaggcagggtcatgaatatgaacgtcctggatctgttaattgctacaaaacttgtagcatgttaatgccttgcgtacaatatgttcactcttccaatgatcactgactatagtgcccgtacttccaaagtgaaatacacaagatacatgcttgctgtagaaccgcgcaacatctatgacttatagaccattcatgatcagtgcgttg

SEQ ID NO: 27554 - DNA, 346 bp, Glycine max
tgggacacagatgaacgagtacagaaagaaggagaaggacacgcatcgcacaggtgtgaaccttctcaaactctctttcgtcaaaacgcgtccatgggatccatcaacgcacgcccaacatttactctttgagagttcacgttggtggatcttatgtcagtcctcagaggaccttcagggattatcacatgggtctgtcaaaagctcgccgctctgtttactaagcaactgcattgacgaactgtgtgatggtgatagcggcgattgagaacaagggttgctacatacgactatggctaaggctcgcgatggcatatctgcgcatggtagctgtcatggtcatgta

SEQ ID NO: 27555 - DNA, 430 bp, Glycine max
ggcacaagttagtttgttgatcgagataactagagacagggtgatgaaaatgaaggtccttgttttcttcgttgctacaattttggtagcatggcaatgccatgcgtacgatatgttccctctccgaatgaacactggctatggtgcccgtactccggaggtgaaatgcgcaagttggaggcttgctgtggaagcacacaacatctttggctttgagaccattcctgaagagtgcgttgaagcaacaaaggaatacatccatggcgaacaatatagatcagactccaaaacagttaaccaacaagcttacttttatgccagagacctcgaagtccattccaaggacacatttgtgttcaatatagatggcaccgtactctctaatattccatactacaaaaaacatggttattgggtggagaaatttaac

SEQ ID NO: 27556 - DNA, 252 bp, Glycine max
gggtaagtataaactcctatttggctctacttataaaggtctaagggataattaatctgcttagtctgatacatgttttgacacccaaactctgtttagatcatatacattaggagaataaattaatgtcgtctacagagaaaaaataattttggaatcaactcccattatgagagtgtagagccccatttccagatattacttacattgtgtggtctttcaaagcattacaaagttgttgcaccacacttt

SEQ ID NO: 27557 - DNA, 297 bp, Glycine max
gattaagaaggttgagaaggatcctggtattcgcgacgattttcccttcaaggagcaggaactcaaggccctctaggctcgaacggctaaggcaattgatgaattggaacaaaagaaagcctaacgcaaggaaaggtctcgcaaaacgaaattgggcttgctagacgatgaagataactccaaattgagtgaaatgaatactctaaaacgtaatactgttggcaagactaaacatagctcagatagggccttttacaaagatttgcttaaggtcattgaaacctctgatgtcttact

SEQ ID NO: 27558 - DNA, 407 bp, Glycine max
ggatcgaacatggatgaggagtacgatgtgatcgggttgggcacgggtctcaaggagtgcattctcagcggtcttctctccgtcgatggcctcaaggttctgcatatggataggaacgactattacggaggagaatccacttcgctcaatcttattcagctttggaagagattcaggggagatgacaagcctcctccacatttgggcgctagcagggactacaacatcgatatgaaccccaagtttattatggctaatggcaatttggtgcgggttctcatacataccgatgttacaaagtatctctatttcaaagctgtggatgggagctatgtgtttaataaaggttcataaggtgcctgcaaacgacatggaggccttgaagtccccacttatggggctatttg

SEQ ID NO: 27559 - DNA, 369 bp, Glycine max
ggtaagtggaagaagagaaagtggcatcgcttaggtgcgggtacagacacaacctggtaaaaatcccgaccccagtgccgcacaattttccttcactcgcagcggaggtttacttttgatctagtacctgctatccctatgtataagcatggacttctagcatactattgtttgattaaccaagttcttccatattggttgaggaagcctcgagtcaatatttagtttttgctgccatctgagggtttctgatggatgatgccgggcatcgtgaaaatggaacgcacaaagcagcagatcaatataaatctgctcatggacagtggttgatgcaacatcagccttccctgaagcagattatggcaatta

SEQ ID NO: 27560 - DNA, 438 bp, Glycine max
ggaattgatgagcaggaaataacatatgccttgggtcagagaaagactttacgacagctgatcaggaatggggacattgatgttgcatttggtaaattacgtgaatggtatccacagattgttgaggacaatacatcagctacatgttttctgcttcattgtcaaaaatttatcgaattagttcgggttggagcacttgaagaggctgtcaaatttggaaagatggaattgtcaagtttttatgacttgcctgtgtttaaggatttagttcaggactgtgttgctttgctggcatatgaacggcctctggaatcctccgtaggttatcttctaaaagactctcagcgtgaagttgtagctgacacagtaaatgccatgatattgtccacaaatcttaatatgaaagattcaaaacattggttgcactcttatcttgag

SEQ ID NO: 27561 - DNA, 444 bp, Glycine max
gcctcaacttatggtgcaaattgtctgaaaagtggggtactttatgaaagtgatttagctcctttcttcacgcatacaaaatactcactagtcccaattccattgagcagaaaggtatcaaatccaaaaaggtttctgattccgctgctgattcaccaatggattcaacttgtgcaatcctgagtggccgcaatctagctaaagtttgtgagggaattggaagaaacagaagaagtggcttctggggtgagagtacgaggcgaagtgtgaacacaaggcttttgagtgttcaatcatggaagacttcacgtaccagtaggaatcttagaaactccaagcctggaagtggaattgcacacgctggtctcacatcagacattaacgaagattcgatggcattttaaggggtacccacttttgaaaaacccgaactggacccaaaaa

SEQ ID NO: 27562 - DNA, 435 bp, Glycine max
ggtgcacaagtgagtttgttgatcgagataactagaagcagtgtgatgaaaatgaaggtccttgttttcttcgttgctacaattttggtagcatggcaatgccatgcgtacgatatgttccctatccgaatgaacactggctatggagcccgtactccggatgtgaaatgcgcaagttggatgcttgctgtggaagcacacaacatctttggctttgagaccattcctgaagagtgcgttgaagcaacaaaggaatacatccatggcgaacaatatatatcagactccaaagcagctaaccaacatgcttacttttatgccaaagacctcgaagtccatcccaaggacacatttgtgttcagtatagatggcaccgtactctctaatattacatactagcgaatacatggatatgcggtggagaaattaactcga

SEQ ID NO: 27563 - DNA, 421 bp, Glycine max
ggagatgatctaaaggaaagcagaatacgggagggtgacatggatatggaagatgatctaggtgatgcattacctccatttcaaggaaaagaagatgagaaagttgctgaccctcctgttggggaagatgcacgttttctaaaggctgggaagaattggcatgctgaagaggaacatccaacagaagtcagggaattcgggtaaaagcaaatggtcagaagattctggtgaagatgacattgatcaaactgaatgcatgaatggcaatcttaatgctctgtctgggttaattcatcaatatggcaaggaacgaaaatctgtacattggggtgatcatggtggcgaaacatgggtttcaataagggctgcaccggaagtaaatgctttgtcgttagcgatcggacctggtgctggatataac

SEQ ID NO: 27564 - DNA, 444 bp, Glycine max
gatatatagttattttactgtgtgagagagaaagttaaacatgggaagaggaagggttgttctggaaagaatagagaacaagatcaaccgtcaagtaacattctcaaaacgcagaagtgggttgctgaagaaggcctttgagctttctgtgctatgtgatgctgaagttggccttatcatcttttctagccgtggcaagctttttcagtacagcagcactgatattaccaaaatcattgagaggtatcgccaatgtcgttacagcaagtcacacactggtgattcattggaacacgattcacagagcgcataccatgaattcttgaaattaagagcgaaatatgaatctcttgagcggacacaaaggcattttcaaggagaagaccttgagccacttagctttaaagatttgcagagcctggagaagcaactagacataacgct

SEQ ID NO: 27565 - DNA, 235 bp, Glycine max
attacttgctttatcaggagaactctatatcctaacagaagcagaagcttaaactaatatgtgtggttccattttcactcacttcctcattctcccctcctctactactccttctctttccactctctttccatccaaatttcccaccaaacccatcaatgaatcttttccctttacccttaccttgcaaccaaatttccttccaaactcactatttcacgatcttcccaattct

SEQ ID NO: 27566 - DNA, 319 bp, Glycine max
gactatagagtgtgataggatgatgatgtagctcatgcttatcatttcgaagatcagtgttggtgcttgcagcttctcgtcacctgaagatggccagatggcttgggaactgccgctgcggatgatactgactgtgcgacaacccatgcagaggctgacacatgtacccgatacttgagctacactgagtcaaccaacagcgaaaccttcatcatgcaagtggcacctagcacggctcaatgagacggtgctgaaatgggcgttcccgatgggaaccatggatgcttatgaacaccaaactgttactgcaatggctgga

SEQ ID NO: 27567 - DNA, 369 bp, Glycine max
gagcgaccatggtggcccgggtgtggtcgctgatgaggttcctcatcaagggaagtgtggctgggggcgccgtctacctggtgtacgaccaggagctgctggggcccagcgacaagagccaggcagccctacagaaggctggggaggtggtcccccccgccatgtaccagttcagccagtacgtgtgtcagcagacaggcctgcagataccccagctcccagcccctccaaagatttactttcccatccgtgactcctggaatgcaggcatcatgacggtgatgtcagctctgtcggtggccccctccaaggcccgcgagtactccaaggaaggctgggagtatgtgaaggcgcgcaccaagtagcgag

SEQ ID NO: 27568 - DNA, 408 bp, Glycine max
ggtgacatggaatgcaacttattatttctgggtgtcctctcaagtgtcaattcttagttacagcatagagaaatggaagactatgttataaggacaattgttgttggagttgtttcatggacatcagcttttgtcctagtgagaagaatctttcccaagcgttcttttgatttctgcaaccgcgttgtgtccacgctccatgcaactttagcagtcacattggcttggctctctgttgaagattggaagtgtccaatttgtcctgtgggatcaaaatcttcacccatacagatgcaagtcctagcagttagcctttcttatctcatttatgatctagctcgttgtcaattggatgaaagagcgaatctagacaacaccggccaccatttgctaagcattgttggaatt

SEQ ID NO: 27569 - DNA, 404 bp, Glycine max
gactgcaatggctgatataattgactttcatggatggaaagaggtcattgttgtattcttggatgatgattatggaagaaatggactatctgctttgagtgatgagcttgaaaaaaggaaattgaaaatttcttataaactgcctttaagtattaagtttgatttggatgaaatcactaacttgctcaatcaatccaaggtggttggtcctcgtgtgtatgttgttcatgccaaccctgatccgagattgagaattttttttattgcccataaacttcaaatgatggccaaggattatgtctggcttgtcacagattggctctcagctacactagattcattatctccagtgaatcagacctctttcagtgttctccaagggggtgttggtctacgtcaacaca

SEQ ID NO: 27570 - DNA, 405 bp, Glycine max
gagagaaagatagagagaataacagcacctctttctctctgtctctctcccctcgttgatcccaaatctactagggattctcattcgatgcgattcggccggaagctttcgttttgcggattttttttaattattatttttcctggctatcaggaaagttgaaaaaaagatggaccatgacaagactggatgccaagctcccccagaaggtcctatattgtgcatcaacaactgcggattttttggaagtgcagctaccttgagcatgtgttctaagtgccacaaagacatgatgctgaagcatgagcatgcaaagcttgtagcatcatccattgggaatattatgaatgggtcatcaagcagcagtggaaatgaacctgtcgttgctaccagtgtggatgtttc

SEQ ID NO: 27571 - DNA, 395 bp, Glycine max
ggggaacatcatcacattacattagattgggggtaatggcagcgtcactacaagcagcagctactttcatgcaacccaccaagttgagcaggagcaacactttgcagcaaaagtctactcagtccatttccaaggcttttggtttggaacctgttggagctaaaaaggtcacatgctcccttcaggctgatcttaaggacttggctcacaagtgtgttgatgctaccaaaattgcaggattcccccttgccacctctgccctcgttgtctctggggcaagtgctgaaggtgttccaaagaggctaaccttcgacgaaatccagagcaagacctacttggaagtgaaggggacaggaacagcaaaccagtgcccaacaattgatggtggattggac

SEQ ID NO: 27572 - DNA, 379 bp, Glycine max
  modified_base (331)..(331): a, c, g, t, unknown, or other
  modified_base (362)..(362): a, c, g, t, unknown, or other
ggagagagaagcctccatttataaaacatcgtgtgcgcactctctcttctcctaggtttcgctcccatcaacagcaacgatggtgcagaggctcacttatcgcaagcgccatagctatgctaccaaatccaaccagcaccgggttgttaagacccctggtgggaagttggtgtaccagaccactaagaagagagcaagtggacctaagtgccctgtcactggcaagaggatccaagggattccacacttaagacctgctgaatacaagaggtctagattgcctaggaaccgcaggaccgtaaaccgagcctatggaggtgttttatccggnggagctgttagagaaaggattattcgcgctntccttgttgaagagcag

SEQ ID NO: 27573 - DNA, 128 bp, Glycine max
acgggatccgggggacgtgcttcatgctaaatgcaaagaccatgatccgctgcccttgaaatagatccaggctcattcgcacatgaaaaaaaactgctaggcagaagctaatgtaacgacacctaaag

SEQ ID NO: 27574 - DNA, 412 bp, Glycine max
  modified_base (392)..(392): a, c, g, t, unknown, or other
gggagccaaatcgaactgaaacgtttcgaaattcattttttttttctaacatacttaaagagagagagagagagagagagagaggggagggttgcaaattccatgagagcagaagaggtgccccttactcgtctcgtctttcaccgttacgagtgagttcgaccccccctcttgctcttccttctcttctcttctcttctcttctcatatcaaagcaataaccctagaacatggaagagagcttcgttttccagtggagcgtcatcagatctctcttgtccatccttcagtggtgggcgttcaatgtcaccgtcatcatcgtcaacaagtggatcttccagaaattggatttcaagtttcccctatcagtttcctgtgtccactttatctgntcatccattggagcttatgt

SEQ ID NO: 27575 - DNA, 259 bp, Glycine max
gttggggctggccctcttgggcattgggggtaaaatttgggttaactttcccaagggggaaacaaattttgcctccgaaaaccccctaaaccgctttgggtgggtcttttctggcatcgtaagaagtggcctgctgatgctcctgccagcatttgtcttcattgggctggaacaggattactgctgtggctgctttggccatgaaaactgtggcaaacgatgtgcgatgctttcttctgtattggctgctctcattgga

SEQ ID NO: 27576 - DNA, 379 bp, Glycine max
gtgtgaaagtagtagtagcagagtcacatgggaaggttgcagcgtcttgctcgacatcaacgacggtgaccgtctcgttttcgctcgtctctcccccgctgcaaaattgaagattgggaataagaactgctctctgcaaccgttaattggctgtcccttcggtactgtttttcaagtcgatggacctttcctctctcccgcacaagttaatggtaataatgctgaagaagtaagagatggtcaagtaagtgtcgagtccagggacaaagttaataatgataataatcctgaagaagtgagagatggtcgagcaaatgttgattcgagggacaatcgtgccttggttgacaataacacggcacagagcctgactggtgag

SEQ ID NO: 27577 - DNA, 378 bp, Glycine max
ttcgactagaggggaatgatggaagaaaagaaataggataaagtaaataaaaatgcagtagaagagtcctgattccaaacgaaaaaattcaaacttgattgaaaaggatctttctgattattgaagaatgggacaaaggattgatcgcgaaaaagatttcttgttcttattagaagatcgtgattggatccacatatgtttggtaaaaagaaagaaaaatatgcttctttgagaataatagaaaaggaaagtgttcaattggaacatgaaaacgtgacagaattggtcctagttactcttcggaacggaatagaagaaggggagagattctcgaaccgaactaggaaacggatccaatgacttcaaaggaattgaacg

SEQ ID NO: 27578 - DNA, 308 bp, Glycine max
ggacacagcacatcatgatgactttcatcagcctaactttggtggttcttcaataaaaaaaggtggtccaagggaaccttggcacgacatccattctcgacttgaaggccctattgcttgggatgactggttcaactttgagcagagatggaggaagcagggagtgaaaggacttacttgttccactgagagactcttgaagatgtcattattccatcatacccggtaacttacatagatgatcatgagacatgtaatgtgcaagtattgagatccattgatggtgaagctgctttagagttcccaga

SEQ ID NO: 27579 - DNA, 400 bp, Glycine max
tgggtcacaagaaagaaaaaaaacatgactgagtcatctttctcaaacatgaagaatgagttatctagtaacctcttctctatcttcttccacttctgtttctccattttttctcaccctttatacttctcctacttcatcttcttctccccttacctactcaggatcctgtctttcctctcccctttgatcatcaccacaactcttctacttgcgacccttctgactttcactcccaacaatcttgatcaggaaaagggtggttctgagctttctgagtccaaatggagcattctgctgtctgttttgcaatcttttctagcatggcttcattccaaagctgatgagatagatgaggaaatggcgctcctaggtgaggtcgaggcatatctagtcatgt

SEQ ID NO: 27580 - DNA, 314 bp, Glycine max
gatccagaagatgaggaagcggagaatatcaggaaaaagatggagttaacccgagaccaattggcagatgcactgtaccaaaaggggcttgcgctggcagagattgagtctttaaagttggcagacttgacttggtgtatattgtcaaaggacgtagataagtccccgactttggctgccacagaaggggcaaaagaagacatagaaaataaaaaatctacggatggtcgcagtcaaggagatttgtttgaagagaattttaaagaactgaagaaatgggttaatgtgaagtcaactaaatatgggatcctttt

SEQ ID NO: 27581 - DNA, 291 bp, Glycine max
catgggaagagagtgtcctacagctacaagccaaggaccaagccaggatgcagtacctttctaacttggtggctagaagatccattggtccaattggcttagggagacaaattacacagagccctacatacatagtgagggccaagtttggtaccccagcacagacccttctcttggccatggacactatcaatgatgctgcctgggtcccttacactgtctgtgttgggtgctcaacaaccacacactttgctcctctcaagtgcaccactttcaagagagttggatgtg

SEQ ID NO: 27582 - DNA, 410 bp, Glycine max
gactggaaagaggatctctactccttcagaggcaatatatcttggccttggaacacactatgtgccatctggaaagttaggttcattcaaggaggccctcttggccacaaacttttcccaggatccacatcaggacatcaaagtacttttagcaagatatgagtccaaccctgagtctgaggcacagttgaaattgcttttaccccagatagtttctacatttggaggaaataaatcagtcactgaaatcattgaggagctaaaaaaacaccagtcaagcactgaccctaatgtcgtggagtgggttaatgaagctctccaaggccttggaaaaggtgctcccttttcccttttcttgaccaacaagtacttctctttgggtgcctctgcagtggggaataatgacggcg

SEQ ID NO: 27583 - DNA, 154 bp, Glycine max
agagtatcggggttcaacgattcctgctgcatggtctccgcgtacttggcttgcgtaaaaattggttcaacctttctatcacatgaaaagatctcagtctacaacttccaatcttacggctcacaaaggtgattctacgaacccatgaaccgtc

SEQ ID NO: 27584 - DNA, 411 bp, Glycine max
gatacaaagttacaactcaaatttctattttcatacaaagttacaatttgttacttacactactacactttagttgttccaacacaagtgtttgtggcaacaactttgatttgaggttctacttttttttgtgtaatcaagaatatttaaggtttttatttgatattcgtcgagtcagtccattttttgtttttttgagtaaagtgatatcctctgcttcttcattcttaactccaaactttagacgctccaccgtgtttttttgttacctatactacaccctttaagtgtttgtagcaaggacttttgtgtgaggtttgtcataatcaagagatatctaatccttctatttgatactcaattactcttctggtcaggctattttgagggtaagtgatatctttaatcgca

SEQ ID NO: 27585 - DNA, 312 bp, Glycine max
ggcggggacggttgccaattttgcaggactgggccaaatcaagggtcgagatcttgaacggtagaagaagggggaactgctgaatccaatgtaccacctgaaaggtgggctgtcccagttacgcctgggcaaatttacaaagcggccggtctgcaaactatctaaaatccacttagatcggaaatccattggacgtattctaacagttattaaccagactcagacagagaacctaaagaaattgtacatgggcaagaattacaagcccctgaacctgttgcctaagatgacacttgccatgcgctgtcggtt

SEQ ID NO: 27586 - DNA, 391 bp, Glycine max
  modified_base (382)..(382): a, c, g, t, unknown, or other
ggtatgaagatgttttcagttcccaatcaagcaatttcagtttccatgggacatccatccctaaagaatcattttgcaactgttggtcagaatatgaatgttgctactgtgaagcaaccactactcggaggaatacctgttacggtgcctcattcagttcatcccattgttggtgctgttgctggaatgaccgaaacacgcgtgaaaccatccgtacctgctcctaaacttacaatcttctatgcgggcactgtgaatgtctttgaagatatctcccctgagaaggcacaagctatcgtgttgttggctgggaatggcttatcagctggttctaatgaggcatcacccaatgttcaagcgccctgcttgaaagttgcagtangtgatggtg

SEQ ID NO: 27587 - DNA, 404 bp, Glycine max
  modified_base (394)..(394): a, c, g, t, unknown, or other
gcagtgagttggaattgataatctagagagtgactactgatcgccgacagcgagctttttccgtgtaatggcgacctccgtcgcagtcgccggcgctttgacggcgcacgatcgccgggttctgacggcggtgaacgccggagcctcgagcctgtcgttagccggttccagcttcattgtagtgtgctacctcctcttcaaggagctccgcaagttctccttcaagctcgtcttctacctcgctctctctgtatgcttcttttttctctctttccgtgttcctcttcttcagatctaaaacttgcgtttttactttttaacgttccttcgaattgactcattcgttagtttagtaacacttatcagtaatcacgattggcagaaacgatacggntaaacgcgct

SEQ ID NO: 27588 - DNA, 370 bp, Glycine max
aggcgttcgaagacgactgcaggcggagtcaatatggcatctgagaagtcagatcaaactttagtgacacagatgccatgcggaacgctagaagttggtctgatcagggctaaaggaatgaatgtcatggatatgatgtgtaagcactatactctatatgcatagctgacgtgaatgtcagatgctgcgtatgtcactgatcctgtttcatcaactttgagacgcatcgaaagtgctctgacttcacgatggactgatctagactagatctttcgcgattgaaatctgaggcaattagctcctgtatatgcagattggacatcataaagtacacctgatgctggtttgatctcgttatgtgctgaaagga

SEQ ID NO: 27589 - DNA, 307 bp, Glycine max
ttatgggggatagtgagagtgagtgattggcgaaaccggctcacaattttggcatgaaattttgaaaagcacacagcacacagcacactttcaagtttcacccttaagcgcgccctctcatcaaactccaatttacattcatttcgagattccctcctttctttctctctatattctaattctaattccaatcacacccagattctattccctcccttacaattctagggtttctctctccgatagggttcccaatttctctcccttttaccaccaaaaacatggccaccgacactctagacgacac

SEQ ID NO: 27590 - DNA, 348 bp, Glycine max
ggagttgagtagcagaagagaagagaagatgggatctgtatgtatctgagactgtgcatcaccccattccctgttgcggttgattcttgaggacaggcagagataggattaacttaatatgacgacacgacaccattgcaatttaccattctacatttaggcaatgccagccacccaatagataatagcaataagtctttcttcacttcaactcgcactggtatttaaacaagtctgatgggttcaagattcccatctcatcagctcagcaatggcctgtatgtatcaggtcggcctgaacagccgtaagacagaactccaacaatgagctcagttgccatgccttac

SEQ ID NO: 27591 - DNA, 118 bp, Glycine max
ctaggaaaggggtccctatgtactggcgccagaacctcgttttggtaaaggaccagatgtcccttaagatccggaatctgctatacctacacacaagccgtcacatttagatgatacg

SEQ ID NO: 27592 - DNA, 397 bp, Glycine max
gatgaaagaattgactaaaaggactcaggactgtttagtctcctttggagaatgcatgtcgactaggatctttgctgcatatcttaacaaaataggtgtcaaggcacgccaatacgatgcatttgagattggttttataacaactgatgacttcacaaatgcggacattttggaagcaacttatccggcagtcgccaagagattacatggtgattggctctctgatcctgcaattgcaattgttacaggcttccttggaaaggcccagaaatcatgtgcagtgacaacactgggtagagggggcagtgatttgacagctacagcaattgggaaagcactagggttacctgagatccaggtatggaaagatgttgatggtgtcctaacctgtgatcca

SEQ ID NO: 27593 - DNA, 355 bp, Glycine max
aggaaagagaaagaataagggttaatttggcctaattgaaattcggagtgaaactcgggatctcgtccaggcttccatggaattgaattaataattcaattccatttctattaataaaagagtgaaagcagaaatttaaatggaatgtatagggggggggcaacaatatcattaaaaatacttagttaaaaaaccgaaattctgtattgcaattggattgcaattcggaacgaaatatagttcgagatcattgattatttttgtactataataatcttaatcttaattggaacgaaaatcttcaaaattggatttctaattcttaattgatattttcgtgttttccgtctttttc

SEQ ID NO: 27594 - DNA, 386 bp, Glycine max
  modified_base (367)..(367): a, c, g, t, unknown, or other
ggcacaaaaatacaatacaaaacaaaacagagcaaagagagagtgtgtgaaaagtgaaacaaaaaacagaacaacaatggcgacacttaaggttcctcagcctcttccccccgttgcagatgattgtgagcagctccgaaaagccttctcaggttggggaactaacgaggagctgattgtatcgatcttggctcataggaatgctgctcagaggaggcttatcagagaaacttatgcccagacctatggagaagatctcctcaaggccttggacaaagaactcacgagtgattttgagaggctggttcatctttggacacttgattctgctgaacgtgatgcatttttggcaaacgaggcgactaanaaatggacttcaagcaatc

SEQ ID NO: 27595 - DNA, 213 bp, Glycine max
gatttcattttgtctaataatctgttttttcagggttttgctttgtgctttaattttttcttcttctttcgtttgtaccattttctatattgctttctgttcttctctatttttggttttttctttcttcctctaactatggatgcaggatctttgagttcttccttaaccctcacttcacgattcactgtctcctttcaagagctatttatt

SEQ ID NO: 27596 - DNA, 377 bp, Glycine max
ggacacgatggtgttctacttcaaagcgcgccccgaagccggcgatttcaccatcttcatgggcctagacaagtacgagaacgaggaactcatcaaatacgggtttcccgaagacatgtggatccatgtcgataaaatgtcttcagcccatgtctatgtcaggttgcacaaaggccataccatcgatgacatgagtgagggtttactggatgactgtgctcagcttgtcaaagcagattcaattcatggaaatagagcgaacaatgtctatgttgattacacaccctggactaacttacagataactgctacaacggatgttggccaagatggttatcacagctcacagatggttcgaactgtaagagttgagaaga

SEQ ID NO: 27597 - DNA, 300 bp, Glycine max
gggcgtcaagattgatagttatccataagtgatgtttatccttaatttcattattgaggagttatatcaatttttttctaacacattttgttaatacattttttctaattagtatatattataatattatgagaaaaatttattaaataaggtgtgagcgtctaaaatcatgtgattttcatacatttcttaataagaaaaaagtgttcttagcacttctatttattacttagtacaggattttaattttaacgcttaaaatgtgacacaatttacatgtgaatctggacaagttcatgc

SEQ ID NO: 27598 - DNA, 145 bp, Glycine max
ggtggcacataaatacaatacaaaacaaaacagagcaaaaagagaatgggggaaaaggggaaccaaaaaccgaacaacaatggcgacacttaaggttcctcagcctcttccccccggtgcaaaatgattggggcagcttcgaaaa

SEQ ID NO: 27599 - DNA, 386 bp, Glycine max
ggttgtcgtcgtcatatgttacatgttccaattacctcggtggcaatcagtgaacaacgccaaatcttaaacttgttcttttgtttctcttttgtactactagttctgaacatggagctgttgtctctgagactcaccccttcaccttctgcttcgacttcatcgcttcctgcagcacttgctcactgctccaagctatgtgagtttcaaccgcggaagaagaagaaggtgtgtttcgacgcgcctaggcttgcggtgcggtgtgtgaaagcctcggcgcagcgaaccggtgatactatcgacgatggagagactcggactgggttcaccacacctgccatggaagtcaccacattcaatcgaaccactttcaccgatgctgctga

SEQ ID NO: 27600 - DNA, 72 bp, Glycine max
gccgaagcaggcacgcaggttgtccccgtttccccttccccttcccttctccggttgccttcccgggcccct

SEQ ID NO: 27601 - DNA, 412 bp, Glycine max
gagagtgaatccatgaccgtgaccatggcggctgcgtttacaagtacaagtgcaacactgagactgtcaaatgttggagagagcagaggtttgcagctgcgtaagtgtaaccctaatcctaataagctgaaggttatgggggggtttggaggttgttctggagtggcagtgggtgtgagagaaagaaaaggaattggaagggttagggttcgggttcgggcgagttcttcgtcggacgaggcagtgagtgcgcagtcaaaagtgactcagaaagtattctttgacgtcagtattggaaatccagttgggaagcttgtgggacgtattgtgattggactgtacggcgacgatgtccttcaaacggccgagaactttcgtgccctttgtactggagagaagggctttggctata

SEQ ID NO: 27602 - DNA, 406 bp, Glycine max
gcattgaagagttctacagtcaagttgttcaaacacatggctcagcaaagaatttgcctacatcctgcacttcaagactcagaccagggctgtgctttttccctcaaaatgtcgtgtcccaaatcagtaccccaatcttctttgtaaatgcagcctatgactcatggcagatcaaaaacattttggcaccaggtgctgctgattcccgtggccaatggcgtgaatgcaagcttgatatcaaaaactgctcacctaatcaactcagtgtaatgcaaggattcaggacagatttcttaagggcatttagtgtggttggcaacgccgcatctaaagggcattttatagatggttgctatgcacactgccaaactggaatacaagagacatggctgagaaatgactcccc

SEQ ID NO: 27603 - DNA, 348 bp, Glycine max
gggcgcgagttgaaaaccctagtgagttccaatgatctccactcccttaaccccatgcaacacaccatgtgcgtctcgcaatctcctccaattcaattggtttgtgtgttcgttaattgattgaaatgtgtttcagattgggaaggttgcaggatagcaatgcggtgttgtcgcatttcaacgacttctctcagcactgctttgctgagatttccggcgacatcgctagaaacacgcgtgttttgaggtctgtcaagtccgaccttgattatatctttcagaagctcaggtattcttttttaggagggtagtttgtcctgaaaactgcatatttgttgagatgttttt

SEQ ID NO: 27604 - DNA, 361 bp, Glycine max
  modified_base (263)..(263): a, c, g, t, unknown, or other
gatgttgaagtacatagcacgtgataaagagtttcgcagaatccctgttataatgatgcccgcacaagatgaggtatccattgttgttaagtgcttgagacttggagcagcagactatctagtaaagcctttacgcactaatgaactattaaatttgtggacgcacatgtggagacggaggcgcatgcttggacttgtagagaagaacatcttgaattacgattttgatctggtagtatctgaccctagtgatgccaacacanacagtaccaccttgttctctgatgacacagatgacaagtccaagagaagcactaatccagaggcaggaatatcagtccaacaggaacaagagtctact

SEQ ID NO: 27605 - DNA, 369 bp, Glycine max
ggtgttgaatgggtggaattggaaatcgaagtgaaaagaacggttgaaagtgaaagagtaagatgctattgcaattgcgctgctctcattctcaccacaaactgacacttgcctgcagttgaagatctgatgaattaattgagcatctgagtgcagaaagaatagaggatcgtggtcgatggcgtctgctagccttggaagtggtggggtcggcagttcgaggtctgttaatggtggcttcaggggttcttccagttccgtcgattggcttggcggagagatgcttgagatgaggttgagagaccacgaagacgatagagatagtgagcctgacatcattgatggtgtgggtgctgagacaggtcacgt

SEQ ID NO: 27606 - DNA, 355 bp, Glycine max
gggttcaagggtatgatgcttgctggattcattctcttgctgaaatgcagtctttctagaaagtttgttcaactgtcccattattggcgttagctatgctacccactggagcataagagacccaattacgtgagagcaacagtcataaggtccatcctcaaccaatagaagaggccatgaatcagaatccagaagcaatggaaaccctaatatctaaagtttttatgaatatctcttccttgaagtcagcttatattgagcttcaagctgctcatactccctacgaccctagtaaaattcacactgctgataaacttgttattagtgagctgaacaatctgcttgaactcaagca

SEQ ID NO: 27607 - DNA, 412 bp, Glycine max
  modified_base (334)..(334): a, c, g, t, unknown, or other
  modified_base (362)..(362): a, c, g, t, unknown, or other
gatatccaaagggacaaaaatattattaagatgatcaacattattggagcacttgttctactctttgcatttctcttcctcagttgtgtgtatgcacaagacacaacaacccttgtgcctgcaatcataacttttggtgattctgctgtggatgtagggaacaatgactatcttcccacccttttcaaggctgattaccctccttatgggagggactttgttaaccaccaacctactgggaggttttgcaatggcaaattagctactgatttcactgctgacacattgggtttcaagacctatgctccagcatatcttagcccacatgcatcanggaaaaacctccttattggagcaaactntgcttcagctgcatctggttatgatgaaaatgctgctactttgaatcacg

SEQ ID NO: 27608 - DNA, 351 bp, Glycine max
accgaaccaaggacccaacttctctgtactcttatccctttatcctctgtcactgcttatcacctatcttgcgtatatctggatctccattcctacattctcgtccaaatcatgaaatgtttggccttaatcatgtctatccgaacataactccgagcacccatgtccacagggaagcagctgggatcttgcaaacctggtctctagaatttcaaacctggcttcttacacgtggttgcctgacactaatgtagtggcgacaggatagagctgaaggactattcaaattacgaaataagtcaaggcgggctttgaaaatgggacccatatactacaagcaaaaagcatgct

SEQ ID NO: 27609 - DNA, 200 bp, Glycine max
ttgtttgaaattaaactgattggtaacctaatttgtggcctcatgacttttaaggaaaacgtgtgcatacattacacacatcctaaagctagtaagagattgactcgtcattgccttcattccttaaaattaaaaacctacaaaagttggtgttaatgtgtatatgttatttaccttaagatttaaattgaaatctgaac

SEQ ID NO: 27610 - DNA, 375 bp, Glycine max
cgggggatcggctgtgggagagaggctaggcctctgaggaggcgaatccggcgggtatcagagccatcagaaccgccaccatgacggtgggcaagagcagcaagatgctgcagcatattgattacaggatgaggtgcatcctgcaggacggccggatcttcattggcaccttcaaggcttttgacaagcacatgaatttgatcctctgtgactgtgatgagttcagaaagatcaagccaaagaactccaaacaagcagaaagggaagagaagcgagtcctcggtctggtgctgctgcgaggggagaatctggtctcaatgacagtagagggacctcctcccaaagatactggtattgctcgagttccacttgctg

SEQ ID NO: 27611 - DNA, 90 bp, Glycine max
atgggaaatgtctaaaaactagacgcgttacttatcaccagtcaaatcccaaaactatccaacctattacaatcaaactcacggcctcaa

SEQ ID NO: 27612 - DNA, 358 bp, Glycine max
tgttagaaagaaagaaggaaagcaaagtagacgagtgattgcgttgcgattgacgacgacgaggaatcatgtcttccggcggcggcggtggtaagccgttcttctgccacgtgtgcagtcagaggattacgtgctccgatgagtcggaaccattctgcccgatgtgtatggaaagtttcgtagaagaatgcaaccctaacaatcccaaccctaatctcttccccgacagtgatgaatcttcggatcccgaactccccttccaccgcttctcacctctccctctcttgctctcatcagtctctaggtcccgatccgaacccgacgtgttcgacccgatggtcttcctccagaaccacct

SEQ ID NO: 27613 - DNA, 327 bp, Glycine max
ggcacaagtgagtatggtgatcgagataactagaaacagagtgatgaaaatgaacgtccttgttatcttagatgctacactattggtagcatgccaatgccatgcgtacgatatgttagctttacgaatgaacactggctatggtgcccgtacttaggatgtgaaatgcgcaagttggaggcttgcatgtggaagcacacaacatctttggctctgagaccattcctgaacagtgcttataatcatcaaaggaatacatccatggcgaacaatatagatcagactacaacacagctaaccaacaagcttacttttatgccatacacc

SEQ ID NO: 27614 - DNA, 399 bp, Glycine max
ggatttagtttggagagaaggatcattccaagggctcttgttgtccagtatttagtcgctaaaggcttgaggaaaaagagtgccagcatgattgtcccatttgctgtttctgataaggagtttcttgaaaagtatgtgatgcgatttaaggaggaagaagcggaactattaaagctgtaccagggaaaaatgagtggtcatggaaataaggaggatggtgcagctcctttaaccgtagtgtaatttaaaaaatatctaggtccatatttaatttattccatgttagtggaaataatgtcaagtgaaggcaaagtttgagtgattgatatgtttttcagacgtttagctgggaaatatatcatataacagctttcggatacagcattataggctagagct

SEQ ID NO: 27615 - DNA, 415 bp, Glycine max
  modified_base (349)..(349): a, c, g, t, unknown, or other
  modified_base (356)..(356): a, c, g, t, unknown, or other
ggtaactgaaaatggcagagacttccaacggcaacggcgtctacgtcgatgaagaagaacaagaagtagtaaagttgaagcagaaaacgcaaagagtgaaagaaaccttgccggaggtccttaaccgcatcgcctccgccattctcttcccggaacctgcctactccggatccctacttcgtcggatcaaactctccgtcgccgaccacgctcctctccttcccgaagcttccaaaaactccgcccgcgacgttctcctctggactcgccgcggcactcccttccgcccgctcttcgtcatctccgttgggacggttacttttgttgctttgacagcactgcttgtatntatgctnttctttctagctgcaaccataaatgccattgtcatatcgctgctgatatctttggcagc

SEQ ID NO: 27616 - DNA, 354 bp, Glycine max
gatgagaagagtgtcttgttcacaccagatgatgctaagaatgatgttggtgttggattaaggtatgactacgggatattctatgcatccaagacgttttatgatcagaataaggagaggagacttttgtggggttggattggagagtctgacagtgaatatgctgatgtagccaaaggttgggcttcagttcagagtattcctagaactgtggagcttgataggaagactggcagcaacttgcttcagtggcctgttgctgaggtggagagtttgagattgagaagtgatgaattcaaaaatttgaaggctaaaccagggtcagtcgtgtcaatagatattgaaacagccaca

SEQ ID NO: 27617 - DNA, 387 bp, Glycine max
  modified_base (320)..(320): a, c, g, t, unknown, or other
gaaggtgcaagagtttgttgtgagctataagctagtttatcgtgaggagaatatgaagttgtttgttttctttgttgctgcagtagttttggtagcatggccatgccatggcgcaggctaccaaaggttccctctccgaatgaaaactggctatggtgagcgttcttcggaggtaaaatgcgcaagttttaggcttgctgtggaagcacacaacatccgagcctttaaaaccattcctgaagagtgcgttgaaccaacaaaggactacattaatggcgaacaatttagatcagactctaaaacagttaaccaacaagctntcttttatgttagtgaacgcgaagtccatcacaacgacatatttatattcggcatagataacaccgt

SEQ ID NO: 27618 - DNA, 419 bp, Glycine max
  modified_base (394)..(394): a, c, g, t, unknown, or other
ttgagcgaagagtgaagagaatggctcccaagggtttaacctttctggctgtgttaatatgcgtttcagcactgtcactgagtccttctgttgcgggggaagggcaaaataatggccttgttatgaacttctacaaggaatcatgccctcaggctgaagacatcatcacagaacaagtcaagcttctctacaagcgccacaagaacactgctttctcctggctcaggaacatcttccatgactgtgctgttcagagttgtgatgcttcactgttgctggactccacaagaaggagcttgtctgagaaggaaacagatagaagctttgggttgagaaatttcaggtacattgagaccatcaaagaagctttggaaagagaatgctctggagttgnttcatgtgctgatatcctcgttctc

SEQ ID NO: 27619 - DNA, 391 bp, Glycine max
  modified_base (373)..(373): a, c, g, t, unknown, or other
ggagagtcttgtgttgttcacctgtaacgtaacaagtaagctccagcactgtcttttattctctttcctttgatccatggaagcctgtgatctcatgtgatagttggtgtgctgcataggaaaggctttctaacgtgtcttctaaggtggtttcactgctccacggttgccgaatctagcttcttgcttctttctccttccaagatatcctttgattcaactttggatcttcacctctgatttcctttcatcgttgggtttatacacccttggggtttaccctcctcacccaactgtgtgcaacaaccacagagtgtataccgagtgttcttcctagaggggagaaaaaatggccacactttcagatattggngttgcagctggcttaaac

SEQ ID NO: 27620 - DNA, 404 bp, Glycine max
gataaatgaagaggtgaaagaaagagagaaaaaaaatcaatgatatagaattctaatatgtaaaggtctatgggttatctcataaaaggtagtgtaataaagcatcaatctaaatcaattcatatctatttatatatgaattaatttataacgtaaacaaattaagagctctgaatcaataaaaactgagaatattgattcacgaaaaaacaaatcaatattcgaaaaaaaagattattaattttaagatatgagaaaggctccattgtcgaattcagacctaaccattaatcgagaagtgatgggaacgacgaaacctgcaaatacttaagattttattaaaaacatatcttaatgattcattaggtgggatggcggaagaaaccaaaaagcaatcctttttt

SEQ ID NO: 27621 - DNA, 416 bp, Glycine max
gggtaccaagacaataacgaggtttgtatagagttacttaaaacaaaagacggaatcgattctttagctctatacagctcatctgtcggaaggtttcccaatgctcctggggctttgctttatcctatttatggtgagggagaactaccacaagccttttgtcgccgtgctgctgtcaaaggttgcatttatgttctaagaatgtcggttgtttctctgcttatggataaggttacggggtcttataaaggtgttagattagcttcaggtcaggatttatatagccaccaactaatcctggacccatccttcatgattccatcaccattgtcttcgtctccaagagattttcccagtgaaaagctccaaatgttgggtcagagagatattaaaggaatggtggctaggggaatatg

SEQ ID NO: 27622 - DNA, 268 bp, Glycine max
acaagaataaatgtgagggccccatgaaaacagggatacggcaagggttgatcagcggatcaggatttggggtttcatttttcttactgttttgtgtttatgcaaccagtttctacgcaagagctagacttgtggatgctgggaaggcaacattctcagatgttttccgggttttctttgcattaactattgcagctattggagtttcccaatcaagcttctttgcttctgacttaagcaaagccaagtcagctactggttccatatt

SEQ ID NO: 27623 - DNA, 400 bp, Glycine max
  modified_base (320)..(320): a, c, g, t, unknown, or other
  modified_base (341)..(341): a, c, g, t, unknown, or other
  modified_base (392)..(392): a, c, g, t, unknown, or other
gaagcaagcaacgtgaagaaaacagcaaacatggcaaataacatggttacgatggtattcctcatattgatgttgatttcatcaatcactccaacagaaattgatgcaaggaatcaagacctcgttgcagccactaaggagatgcaaaaggcaaattactttacatttgtaatgctcatcaacatgtctccacttgacacaattgagggaaatgtgacattcttgatgcccaatgatcgaatgctggctaacatggtcttacaagaagggtccatttcaagcttcttacttaggcattcaatcccatcaccaatgctctntgatgtcttggaacaattccncacagggacaaccattcccacatcactgccaaattgcatgctaagagtctncaacaatg

SEQ ID NO: 27624 - DNA, 412 bp, Glycine max
gagtgagtgagggaataatgttgcggattgctcccaaattcttcaccacggttcctcttcggaccatttcacccttcgcatgtcgcttctcagtccgttccatcgctgactcttctcctttcaacaaaatccgcattcaaagggatgatactgttagtcataatcacaacccattcaaagggttgctttgctttgccgcattttgtcgttaattttccgtcttctttcgtctgcaaaatagaatttttctaactgtctttactttagtaatgggtttctgagttgaacttggaacgtattgatgagactctgcagtgacaaagagtaaggttagaacttttcagcatcactttggttgtggctattattgactggaaacagtgaattggagctacagcttaaagctgattgt

SEQ ID NO: 27625 - DNA, 106 bp, Glycine max
ctcacacgttcgaacaccacagtattgacaccataccgcggatatgatacagggaccgggtccaatactctggctgcgatcctcatccttacaccgacgctgattt

SEQ ID NO: 27626 - DNA, 394 bp, Glycine max
gaaagtaatgatgggtacatcgccattgcaatgctattgggtctgttgaaccaaccactttatttgaggagcatagcccaccttgagcagctgctagatttactggatgttatcattgacagtgctggaaacaagtcatctggcaaattcttgatacctactaacccatcatcagctccacaaatttctgctgcggaagccgatgcgaatgcagattctaacaatttaccttctgcggatgatgcatctaaagttgatggttcctccaaaccgacagtctctggcattaatgttgaatgtgagttacatggagtgttgagtaatcttacaaaagcagaacttcgggtcctgtgctcactgcttgctcaagaaggtttgtcagataatgcgtata

SEQ ID NO: 27627 - DNA, 193 bp, Glycine max
cacaaatccccgctacgttgcgacccccttgaccctccgataaacccatcattctccatttccaacttccaccccatttcagtgacttggtaattcattaaggggttttaatcagcaactctaataacacttgcttatataatagcaacataaatcacattttggtaaaatgaaaaatgcctttctaccaaca

SEQ ID NO: 27628 - DNA, 328 bp, Glycine max
gtcgcgcggaggctgatgcttgggtgcgttcaagattcaacttcacccgtaacccaccgccatggccgaggaaggcattgctgctggaggtgtaatggacgttaatactgctttacaagaggttctgaagactgccctcatccacgatggcctagcacgtggaattcgcgaagctgccaaagccttagacaagcgccaagcccatctttgtgtgcttgcatccaactgtgatgagcctatgtatgtcaagttggtggaggccctttgtgctgaacaccaaatcaacctaattaaggttgatgacaacaagaaactatgagaatgggta

SEQ ID NO: 27629 - DNA, 419 bp, Glycine max
ggggactgaagcttcacgtggcagagattggaagtggctccaaaacagtggtattcttgcatggattcccagagatctggtacacatggaggcaccaaatgatttctgtggcaaacgctggttatagggctattgcctttgatttcagaggctatggactttctcagcaaccagcagagcctgaaaaggaaaccatgtttgatctggttcatgaaattgtaggccttttggatgctttgaacatctccaaggccttccttgttggaaaggattttggtgccattccaggacatcttactactgcagtgcacccagaaagagtagctggtatcataactttaggcattcccttcatgcttccgggtccctctgctgtggagaaccaccttcagcttcccaaaggggtttatattactaga

SEQ ID NO: 27630 - DNA, 305 bp, Glycine max
  modified_base (139)..(139): a, c, g, t, unknown, or other
gatcacaaaccagacaacttctaacacatacactactctctctctctctcttattgtatggccgccaattccagtagccgagggatcaccgccttagggaagcgagtcgccaaccggatctggacttccaacgcacctnctctcacttcaaggaggggagcatacagtagcggctcagtgtacgacatgaaccctgatgaagagatccagtctgggcaagtcccagacgatgtgaaccaagcggcaacacaatccgggaaatactgggccccacattcacagacttggggtattgggccccccgg

SEQ ID NO: 27631 - DNA, 423 bp, Glycine max
ggaagaggattgtggatgatttgttgaagaaggggaagatgaagaattgtttggctgtttgtgacgtgtctgggagtatgagtggggtccccatggaggtttctgtcgcattggggttgttggtgtctgagttgtgtgaggagccttggaaggggaaggttgtaactttcagtgaaaaccctcagcttcatttgattgaaggggatgatctcgggtccaagactgaatttattaggaacatggagtgggggatgaacactgattttcagaaggtgtttgatctcttgttggaggtggctgtgagtgggaatctgaagcctgatcagatgatcaagaggttgtttgtgtttagtgacatggagtttgatcaagcatcagcaaacccttgggagacagattaccaagcaatcactagaaagtttg

SEQ ID NO: 27632 - DNA, 395 bp, Glycine max
ggagagagagagagagaaagtgagagatggagagaatgttccctcccaagaagccctctactatgaattcccatgacagacccatgtgtgttcaaggagactcgggtcttgtcctcaccactgaccctaaacctcgcctccgttggactgttgagctccatgaacgctttgttgatgctgttactcagcttggagggcctgataaggccactcctaaaaccatcatgagggttatgggggtgaagggtctcaccctttaccacctcaagagccaccttcagaaatttaggcttggcaagcagccccacaaggaattcaatgatcactcgattaaggatggtatgagagcttcggctttagaactgcagcgaaacactgcttcgtcttctgccatg

SEQ ID NO: 27633 - DNA, 414 bp, Glycine max
ggaagaaaactaaggaaggaaggaaggaaggaagagtgagcgtgaaagatgccttcggcgaggctttcagggtcaccaaggctcgacgttgctattgacatgggcaatccatttctcaatctcactgttgatggtttccttaagatcggagctgtcgcagtcacgcgatcagctgctgaagatacttatcatattatccgaaacgggaatatctcaagtcatgatttcgagaaaacgttgaagaagatgtgtaaagaaggtgtatattggggaactttagctggtgtttatcttggaatggaatatggggtagagaggatccgtggcaccagagattggaagaatgccatgattgggggtgcagtaactgcgactctgttatctggtgccaccaccaccatcaaagacaaaatt

SEQ ID NO: 27634 - DNA, 145 bp, Glycine max
tcccaggcttcgggccacgcgttcgagcgccagatgttcatactcattgccttctgttctgcccacgatcccctttcccaaaatactctttatggggaaaaagggcttgggcatggcacgcttggtgaccgactaccccagtccc

SEQ ID NO: 27635 - DNA, 289 bp, Glycine max
ggaggaaagaaattgatatcgcttacagtaagaggtgagaaagagagacaaatcggcagaagcaaggaggctgagagcgagagagcaactgcacgcactgtaactcctaacttcccagatcgtcttcttcctcttttctctccggtgattgttggaactcagagagcttctttgatggaacagtacgagaaggttgagaagataggcgaaggaacatacggcgtcgtttacaagggtcgcgaccgcgtcaccaacgagaccatcgcgttgaagaagatttcgctcgagc

SEQ ID NO: 27636 - DNA, 315 bp, Glycine max
  modified_base (229)..(229): a, c, g, t, unknown, or other
  modified_base (273)..(273): a, c, g, t, unknown, or other
gaaaggatgcgagaataagaatagctttatagttagacacacttcgtcttgttgctgagacaagagtcataatcttggctgtaacaggttgaacactgcatagcaaattctgaatggaaatgtgtggagccacagctctgacatggtctcacaccatctgtccatcgcttcaccttcctcgatccgtctctccattcattccattttactagaccagggaggctaggangagcttcaggtgttggtgtgtctctgatcaagactccagggganattaaatgatcatatctgtaacttgaacaacaaggtttaatg

SEQ ID NO: 27637 - DNA, 216 bp, Glycine max
  modified_base (188)..(188): a, c, g, t, unknown, or other
  modified_base (191)..(191): a, c, g, t, unknown, or other
gggactgatcgtgtgcatgtggttggagctcgaggtgcttctgggtttgcattacctgttggaattgaggcatttgaagagtcgggtcggtcacttgtacgtggaactttggattatctgcaaggtctcaagatgcttggagtcaagagaattgaacgggtacttccagttggaactttcttgactgntgntggtgaagctgctaaagatgatgtt

SEQ ID NO: 27638 - DNA, 248 bp, Glycine max
gttagaaaatttgaagaagacagttctggaaatatgagtgctggatctttaatctcttcggaaaatatgactgaagaagatgtcaactttaaggattcatctgctgtagatgcttgtggaattgatgataaccaagttgtttctgaaacaagatcagaaaatggattggaatatgagaattatcagacaggacaaagagctgcaaaaagaattcggagacctacgaagagatatattgaagagctctc

SEQ ID NO: 27639 - DNA, 324 bp, Glycine max
  modified_base (283)..(283): a, c, g, t, unknown, or other
gacttcaaagtggagaaaaacacacacggttggtggattcgctctcttttctttttcctcaaaaagttgaaaaagaataaagggggaacaatcgagtgaagttgttgctcttcaatagtaaacttacctatggaagagggaagggttgtgagtgagtacacaaaagatggaactgtggatcttaaagggaaacccattctcaaatccaaaagtggtggctggaaagcatgctcctttgttgatggtatctctctctctcactataaattgtatatggtcattntcatcttgttatggacattaatttcaaaagcaatttcccaa

SEQ ID NO: 27640 - DNA, 207 bp, Glycine max
gataaccagcagcaaataaaccctttttaaaaacggattgtcaagtcatgatgcgtctattcaatccccggaaaaccacattgctttttggtatacgtgataaaacaaagaccccacttgaaaatttggagcctattctaagagaagatattcagaagatttgggatggcatttcaaaacccgaagcccatcaacatactcctcttt

SEQ ID NO: 27641 - DNA, 338 bp, Glycine max
gtatggagaaattaaagagttcccattaccatcaggaggagttgtgataagcggaacaacactgttgactggctaaactatgatggtataattgtgagctctcttgaagccaagagtgccttttcttgctttttgcagggacctttcaagtctatccctcttatatggattgggcatgaaaatgctcttgcttatcgatcaagacaatatactactaatgggcagattgaacttttgaatgaaaagggaatagttttcaatcggtcaacagctgttgtctttccaaactatgccttgccgatgatttactccacatttgatgcttgaaattttaatgt

SEQ ID NO: 27642 - DNA, 369 bp, Glycine max
ggtacgcaagcactctactgatgccctgcactcgtcacttctcattctctctcttaatatcttcctttctctttctctttctagtttttctctttcactctctttctttcggttttctctgcctttgaaatttgccagcgacgaaccttcggaaccttggaagaattaaacgagtcaaacatgtcgcccaacaacgtggaatctgggacaacggatgatacagaagtagtaggacaacaacaacgtcatagtccaatacatgatattgccttgcagataccgacacaggctccggtggaaacccatgggctataccaaacaaatgatgttcatacgcgttcgatgggcatggccgcgatatgacgcgat

SEQ ID NO: 27643 - DNA, 184 bp, Glycine max
gacacaagagaaagcagaaaccagagaaccatgaagtctctgaggtccatcttagcaacttttggggttctattatcaatttcactcactatctcactttcaattgaagaagctttcaaccattggctaacacaacacttttagacttcaaaccaatttcccttataaatctacacttacacca

SEQ ID NO: 27644 - DNA, 104 bp, Glycine max
ggaggagaaagcaatgggcattgatagtgaatacgtgatatctcacaaggcctatgcgaaggtgggattgcttgggaacccgagcgatgtctactacggcaaaa

SEQ ID NO: 27645 - DNA, 290 bp, Glycine max
ggaggcaagaagttgtattttggcatcgccgtggcttcaagaagagaatctcaatggatgcccaggagctgaagcgcgtgttccagatgttcgaccgcaacggcgacgggagaataacgaagaatgtgctgaacgactcgctggagaacctgggcatcttcatctctgacaaggacctgagccaaatgatccagaggatcgacgtcaacggcgacggttgcgtggacatgaacgagtgtggcgagctgtatcagaccataatggacgagcgcgacaatgaggaggacatg

SEQ ID NO: 27646 - DNA, 350 bp, Glycine max
  modified_base (243)..(243): a, c, g, t, unknown, or other
  modified_base (251)..(251): a, c, g, t, unknown, or other
gactgaaaaaaagtgagaaacacgaacctcaaacctgagacagaaccaaaaacacacttcttctcttcttccattctctaacgctatcagcatcaacacagtgtcacatccattaacgtgctatggtgtttagttaggaaacaccggtggtaaaattgtacgaagcaggaagaacatggctccgtctagcaaggctgagaaaaaggctgccgtggatgcagctgcatggatgttcaatgttgntacatctngtggaatcatcattggaaacaaaagcttgatggcctcttatggcttcaagtttgccacaacattaacaggcatgcactttgctaccacaactttgatga

SEQ ID NO: 27647 - DNA, 248 bp, Glycine max
ggtggagaagaaggtgaagggaggagttgagtagagccgagtgtgaagcaaaaaccatcccgaagttttcatctttcaatcaaagggtcctcaaagaatgctctgaaccgtcgttatcttcttttccttcttttctaagtccccaatcactctcacacaatgcctcgcccttgtttcgacaagcttgttctccccaccactcttcaatccagacaactgaggattccggataattttctgagaaaata

SEQ ID NO: 27648 - DNA, 265 bp, Glycine max
  modified_base (235)..(236): a, c, g, t, unknown, or other
gacggctaaaagctaaaaatcatcgaagtactcaaatgagcatggctgtcacggttgcattcttgaatttgatcatcatgttttcagtagtctctacaagcaagtcactgagcttaaactactattcaaaaacatgccctgatgtggaatgcattgttgccaaggcagtgaaggatgccactgctagggacaaaactgttccagctgcacttctgcgaatgcacttccatgactnngttcgttcggggtgtgatgcctctgtgct

SEQ ID NO: 27649 - DNA, 206 bp, Glycine max
tattttgggatcgcctaagcttcaagaagagaatctcaatgtatgcctattagctgatgcgcgatgttcagatgttcgaccgcaacggcgacgggagaataacgaagaaggatctgaacgactcgctggagaacctgggcatcttcaatattgacaaggacctgagccaaatgatccagaggatcgacgtcaacggcgactgttgc

SEQ ID NO: 27650 - DNA, 336 bp, Glycine max
  modified_base (63)..(63): a, c, g, t, unknown, or other
gggcaaggaagagttttaagaactttgaatacctgtgctacctttccccctgccaacgaattntgttactgttcaccagaacttgttggacataaacttgtaccgaattccaagttatggttcatcatcatgttgagctctgatcattcccatccagcttccacaaagaacagaaagaaacactttgtcccttccaccatagtccaacacttctattgtcatcttccactttcatctcccagttactttcatacttcctcagcaaagctctacctccatctattgcatcttctccaaatacttcctccacaaaccctgcttctttcattctctcac

SEQ ID NO: 27651 - DNA, 361 bp, Glycine max
  modified_base (259)..(259): a, c, g, t, unknown, or other
ggcacaacagggggtaggtgaggaaaactttggacaaaaaatggagtgctacacaaggccaaacaggagtgacatccacctctcagcagaggaagaagccaccatagaagcaaagaccagagagtactttgatggagtcgcaccacaacgccacacaaagcctcaacgaagtgactattcagctcaatatgtcgatgctttctccaatgcccatcactcttctttaactataccagaattaacacaattccaactcctncagaatgatccccaagagaaggttggttcctaatatcatctctaatagtttcttcttcataatttcacttttatggaataatacccaaagaagtattaaaaa

SEQ ID NO: 27652 - DNA, 401 bp, Glycine max
ggtggaagatttgagcagaagaagacatgtagagattggaatcatccgtgtccctctctctcatctctctttctctctcttcccttggtttccttactaattactttaacccaataatccaataactacatacaaagttgaacaataccaccatcatagcgcatcatcatcagaattccaaggggaattgttgatgtggtggtgagaatgatgtatggggagtagaactacctggagggttgttggtgttgaagatgacaagggagctgaaagaggaatgccgagcttcaattctgagttacccaattccaattcatgctatacagaggggaacacagttgattcttttcgtgtttctgactttggagcatttgatcagtcatatcacatagaggatgctg

SEQ ID NO: 27653 - DNA, 375 bp, Glycine max
ggcagcgcttgagaccaagccccactcaggcacgggaccactctctctgctcttcttctacctttcaagtttttaaagtattaagatggcagagacattcctatttacctcagagtcagtgaacgagggacaccctgacaagctctgcgaccaaatctccgatgctgtcctcgacgcttgccttgaacaggacccagacagcaaggttgcctgcgaaacatgcaccaagaccaacttggtcatggtcttcggagagatcaccaccaaggccaacgttgactacgagaagatcgtgcgtgacacctgcaggaacatcggcttagtctcaaacgatgtgggactagatgctgacaactgcaaggtccttgtaaacat

SEQ ID NO: 27654 - DNA, 425 bp, Glycine max
ggattggaaaattttcctcttttcttttatgtgagtttaactggcggtctttaaattggtgactgagacatgtggggatgggttctctctgagtaggattttagattgatacctcacacaaagcaaagtggcatcaagttggactttcattataagctacttgtttgatggtcgactttggtaatgatttgaggctcttatcccatgttgctatagatatctttatatttttttcccccaaaaatccaagatccaacctttgcttctaatatctgagatatcaatcttcatatatttgcttttggtaaggatattgattaggagaactcggtgttttttgttttattgggtgtgtcagaaacttgttttaaggagaagctactgagagagcttgtatatgaggttcgaagctttgctatgccatg

SEQ ID NO: 27655 - DNA, 225 bp, Glycine max
ggagaaaaggaggaagcagagagggaggagggtagtgaggaggaagggcccaaagggtggaagggttattgtctctggggctatgctggttgaggttgagactgttcttcagactcaggaaccagtgataaaaccaatttggaatacatttgctagcagtctcagtggaatttggaagggtgtaggtgctgtgttttctcccatcacagctgaaatggaaccaat

SEQ ID NO: 27656 - DNA, 235 bp, Glycine max
ggaaagaaagaaggaaagcaaagtagacgagtgatggcgttgcgattgacgacgacgaggaatcatgtcttccggcggcggcggtggtaagccgttcttctgccacgtgtgcagtcagaggattacgtgctccgatgagtcggaaccattctgcccgatgtgtatggaaagtttcgtagaagaatgcaaccctaacaatcccaaccctaatctcttccccgacagtgatgaatct

SEQ ID NO: 27657 - DNA, 366 bp, Glycine max
  modified_base (259)..(259): a, c, g, t, unknown, or other
ggtgggattttgagagagagaaatagagagagaacttcgagtgatggtgagagtgacacaaatctagagagagcactagtactctaaaagtctattatattcttcaaaatatgaccatgcatcgcgagtcttgggcttttgtcttcggcgttatgggcaacatcatctcctttggagtgttccttgctccattgccaaccttttaccaaatctacaagaagaaatccactgaaggtttccagtcacttccttatgttgntgcactggtcagtgcaatgctttggatttactatgctttcgtgaaaagggaaactgcccttcttctcattaccattaacacattttgaaattgtgtggagtcaattt

SEQ ID NO: 27658 - DNA, 410 bp, Glycine max
ccacacaagtaacggagaacatactaaagctttggagtgtgattttcgggcgctcgagcgaaacccattcttaccccaagcttttaataatatggccgtgatctgtcattaccgaggagaacaggccattcgacagggagactcggaagttgcggagtcttggtttaatcaagccgctgaatattggaaacaagctatagccctaacccctggtaattatattgaagcccagaattgggtgaagatcacaggacgttttgaataagaaccaccttgttttttatttttcttatattttcttcttaaattatatctatctatctataattctatctatatagatagatagatatctataagtatcaaattttggcttggtgttcccatcaatcaaattaaaaactcttttc

SEQ ID NO: 27659 - DNA, 279 bp, Glycine max
gacagacaagggtttggtccgggttcacgtttcacaatcactttttgcgcttctctcactcactcactcttcttcttcctcttcgtgtggttttctttctcgaactcgaacgaagatgcgtgagattcttcacatccagggagggcaatgcgggaaccagatcggagccaagttctgggaggtggtgtgcgcggagcacgggatcgattcaacggggaggtaccaaggggacaacgagttgcaactcgagcgagtcaacgtctactacaatgaaacgag

SEQ ID NO: 27660 - DNA, 326 bp, Glycine max
ggaggaggagcaagagatgtttcgttaaggtcatgggatggtggtagctgcaagttgaacttttctgtggcttctgcgtccactagctagaaccatgagaagagcaccttacaaaataataataacgcttctactggtactagaggggaaggtaccgtggattcatggatttgctcttctgaatagactaaaccgggtacagaaacttgttatcattacatggtagaatatgatgctgcaatgaattaagatcgtgatcatgatgatgctgatgatagtgggtggttgctggttagaatttgcagctaacatctttcttcttttct

SEQ ID NO: 27661 - DNA, 399 bp, Glycine max
acacgtgatcgctcaagaagcttatcaaactcttgaatgagagatttgtaatttactgattgcatttccatgttgttattgcgtgtttctatctggacataagaaaagttattaagaccaaacaaagtaagaatccagtgctttgaaagaactcctacacctgaaattatatcacctagaaaagcaaatagaactgaaatagtgaaatctcattaagcagaaagcaacttcgacagcaccacaaaatggtcactgtagaaataattgtgaccataattcaactttacaaaggtaaaatccaattcatataaatatcattttaaactcaatgaaaattttgggcatgacccaactgtccaaaaactaatttaaaatttaattttaaaggaaattaggaaa

SEQ ID NO: 27662 - DNA, 252 bp, Glycine max
gggacaacagcatgttgtcttggcagagggctgcgtttcatttccaaccagagaaagactggatgaacgatcccaatggtcctatgtactacaagggatggtatcactttttctaccaatacaacccgaacggtgcagtttggggtgacatagtttggggacatgcagtttcaagggacatgatccattggcttcaccttccactggcaatggtggctgatcaatggtatgacatgcaaagtgtgtggacag

SEQ ID NO: 27663 - DNA, 416 bp, Glycine max
ggtgaaggcctaggattgctgagtcaaacttgagttgaaggtgaagaaggagatggcagcaacttcttccttgtgttcatcgaccctccaatcccaaatcaatggattctgccttcacaaaacctctctttcccatcctcgttccctcactttctccaggaagaaaatttcaaccacagtgaaggctacatctcgtgttgacaagttttcaaaaaacgatatcattgtttctccatccattctttctgcaaactttgcaaaattgggagagcaggtgaaagcagtggagttggctggttgtgattggattcacgttgatgtaatggatggccgttttgttccaaatattacaattggacctcttgtggttgatgcattgcgccctgtgacagatcttcctttggatgtacacctga

SEQ ID NO: 27664 - DNA, 331 bp, Glycine max
gacacaaaaatagtgatggaaaggttgtattgtatgagtatattaatgtctctttccatacatagtcatttctgcaagttgggtttggttttctcttcctcgttcgtttcatttcgtttcgttgaagagcaacttttctctctctgtctctgtacaattctcccttttcttccctcgtagatcgaaagggaatattcttccatggcctccaagcggattctgaaggagctcaaggacctacagaaagacccttcaacctcttgcagtgccggtcccgtagcagaagatatgtttcattggcaagcaactataatgggtccccctgatagcc

SEQ ID NO: 27665 - DNA, 236 bp, Glycine max
gatagacaggagattagagtgcacatctctttcatgggaaagttatctttctaataatccatggtctgttggatcttttggaaagaaatatgcggaggttctcaataattctaaagctaattctgctgttagcccaggatgtacaaagtctgagattcctcagaaagtgttggaatctttgtttaacattcccaaaagcactgaacatgacaaaaataccatgaattggagaaatg

SEQ ID NO: 27666 - DNA, 365 bp, Glycine max
  modified_base (336)..(336): a, c, g, t, unknown, or other
ggatagaaagtgagagagaattacagagcattttgcaacgcgattacacgaccgaatcaaacccctctttctctccgaagctgcttttaatatcgtactggccttcgattgttctcctctttaatacatactgttctctattcgatttgagggaacagtacaagagtctgatcatcggttaacccaactgcacaggtagtctccaaataatggagcctcatgatgagactggatgccaggctcctgaacgccccattctttgcattaataattgtggcttctttggaagagcagctaccatgaacatgtgttccaagtgttacaaggacatgctgntgaagcaggagcaggacaaaattgcagca

SEQ ID NO: 27667 - DNA, 403 bp, Glycine max
  modified_base (306)..(306): a, c, g, t, unknown, or other
ggaggctactgaaatcattacttatactagttttcggcgattattcatagtgaggcaatagtagcaacaattcacactggtctttgcttctcgttactcatttctcacctaactttctattcttctcagtctcagatcagaaccttagccatggcagcgttccagaagatcaaggtcgccaaccccatcgtcgagatggacggagatgaaatgactagggttatctggaagtcaatcaaggacaagctcattttgccctttcttgagttggacatcaagtattatgacttaaggctttcttaccgngatgagaccgatgataaagtaccaattgaagtgcggaagcactctcaagataatgtggcattaagtgccgcactattactccagatgaagctcgtgt

SEQ ID NO: 27668 - DNA, 398 bp, Glycine max
  modified_base (293)..(293): a, c, g, t, unknown, or other
  modified_base (370)..(370): a, c, g, t, unknown, or other
  modified_base (383)..(383): a, c, g, t, unknown, or other
gggggtgtggatgacttgtatatagatttctaaaacgcttttctcttttatccccccgctctcttgttctattcatacctaatttttcttatttcttgttgtttatatagaatgataggatgtagttttctatagccagaaaaagaaatgaaatttgcatcgatcttcaaaacaaaatgaaaaaatgtatagagataaaagatagaatataggaaaaagaaaaaaaatagtcactaaatgaagtaattggactttataatagattaatagattacccctattgaagtactttnttttttaatggttcttaatatttttgattttaatatcatttctttttaataccaactcgctctttattattttcagntactaatcctagntatttgatttatata

SEQ ID NO: 27669 - DNA, 145 bp, Glycine max
atatatatcaacatacaaaataagaactttataacaactaaataaaaacaccattatgatgctatacatcacacaattacatttcctatcataatctctacaatactatctctcacccgattcacttaaaaccccaacaacaata

SEQ ID NO: 27670 - DNA, 337 bp, Glycine max
ggggggaaggaaagaaattagaaatatttattcagtgtcgccaaatcttgttccctgcaagagaaagaaagaagggagagaagaagttgttgggttgagttggattggatttctaatctaatctatacctttcttttttcctatgcttttaaggcacaaacccttctttcttccctcttctttcttcttcttattgttattccttgcctttaccctttagggaaggaagaaggaacaactatactactattatccttattattgttattattgtaattaatctttgtattatagttaatcggtgttgttattattcctcaaaatatggattcgttgt

SEQ ID NO: 27671 - DNA, 313 bp, Glycine max
ggaattgtgaaagtaagcaaagatggctttcacggaatcggctctcctccttccttcggtttcaggaaccaacaagaacaagaacaaggttccagaagacaaatggtatttagcctacattgtgtattttaccctgggtctcggttaccttctcccatggaacgctttcatcaccgacgttgattacttctcctttctctaccctgacgccagcgttgaccgcatcttcgccgtggtttacatgatagtcggactggtggggatctccctcataatcctctacagccacaagtctgacgcctatgtgaggatc

SEQ ID NO: 27672 - DNA, 426 bp, Glycine max
gacgacaacagataatagaatagtgattttgactgtactttatcttggtactaatccaattcctcgagggaaacgtgaagatgatcatccacaaccacagcatcatttccaaacaaaaccaaatttgatttcccgtttcattggtattgatggatccggagcagactttcatacgcgtgcaggagaggttttctcagatgctgacgcccaaagtcagagttgctttggagtatctctacctgttcatcgccataaccttattctgcattctcgttgttatgcacgccaattacgttcaacagcctgggtgttcaagtgagctatccggagtagtgacatcagaagcccaacttattcagattaagataaccagtgccggcctgtggtctcataatgattctgattcaaacagaatagatccccctg

SEQ ID NO: 27673 - DNA, 315 bp, Glycine max
ggaagagtgaagagaatggctcccaagggtttaaggtttctggctgtgttaatatgcgtttcagcactgtcactgagtccttctgttgcgggggaagggcaaaataatggccttgttatgaacttctacaaggaatcatgccctcaggctgaagacatcatcacagaacaagtcaagcttctctacaagcgccacaagaacactgctttctcctggctcaggaacatcttccatgactgtgctgttcagagttgtgatgcttcactgttgctggactccacaagaaggagcttgtctgagaaggaaacagataga

SEQ ID NO: 27674 - DNA, 110 bp, Glycine max
gatgtgcgataatgatagaaaagtgcagggggcggatcagatcatcccgcgaacgaaccaggcttggtcacttgcgcttctgactacttgcgagcggaatcaactgcatt

SEQ ID NO: 27675 - DNA, 384 bp, Glycine max
ggacttcgatgaagatgtagatgggagaacagagagaaatagagtactttcaggttcccttgacaattccattatctaccttcgcaatctccgtaaggtatattttgaggagaagcatcatgggagaaaggttgcagtagattcattaactttctcagttcaggaaggagaatgttttggctttttaggaacaaatggagctggaaagaccacaactatttctatgctatgtggggaagaatgtccttctgatgggactgcttttatttttggcaaagatatatgttcccatccgaaggctgctcgccgatatattggatattgtccacaatttgatgctctattggaattcttaactgtccgagaacatcttgagctttatgc

SEQ ID NO: 27676 - DNA, 361 bp, Glycine max
gaggctcaagacttacatgtgtcagagaattccgagatccgtgatgcctatgttaagctacagattggtaaccagattttgaagacaagaccagttcaatcaaggactatgattctgcgttgggatcaagagctgatgtttgttgctgctgaacccttcgaggaacctctgattgtttcagtggaaaatcgagttggtcccaacaaagatgagactattggagctgttgttattcctttaaaccaaactgataagcgagctgatgatagacttatccttactaggtggtatcaccttgaagagtccatgccatctgcgatgaatggggaacagggaaaaatgagaaagataaatttttagt

SEQ ID NO: 27677 - DNA, 267 bp, Glycine max
gaggattgtggtgtgttgttgttgtattgtaggtatgcgtggctgaaatcaaaaaccctagccctcactctcatcactttttttgagctatgtttcaagagagttagttagggataatagggcagggaagaataacagggatgtacaaagaacgagagcgagttggtgtttctgtttccgcttccaaatcggaggatcggaagcgaatcaacgacgttctcgataagcactttgaacgatcctctccttccacttctcgccccatca

SEQ ID NO: 27678 - DNA, 376 bp, Glycine max
gagggccaagagtgaggaagaggaagatgggttgggcttcagcaacagcatgtgcgtcgctctcctctccgctgtctcgacttccaccgtctcgcactcgcactcgcacgtccattcccagttcgttttcattttcatggctttcttcatttcccactttaactttaagtgcttctcgctcttcctcctccggcataaaccctcccaatccctcacgctcccatgattctttcattcgagctgcctggacccgaagatctcgaggtgaagctgcaaagaaacctaacaggaaatcgtggaagcagaggacagacatgtacatgagaccgttcttattaaatggtttcttctccaaaagatttattcatgcaaaagt

SEQ ID NO: 27679 - DNA, 267 bp, Glycine max
gggaggtaatgctatgcaacaactttagtttcggggttcagactcactcaccgtcgggatgtcgccggagcccggagcacacgcatcccttctgccgggatccaaagatgttcctccggcaactgtgtccggtgccgggttcaatgtcgccaacagtataatcggcgccggaataattgtctttccggcgattcttaaggtcctcggcgtgattctggcgttggtgctgattctcgtgattgcgtatcttgccgaactatcggtgga

SEQ ID NO: 27680 - DNA, 343 bp, Glycine max
aatgtaaatgatatgatgcgctgcatctagatttagtgggtatagaccttatacaactatgactgtacatgtatcatattatacatgcttatcataagtatggagactcagatggatagtcatcatgggcaaaatgaattctagaactgaattgagcaattggatcggattatcaagttaattaggtcaatcatccaatgaatattcctactacatattgctcatattgctaatccctgccagttgctctgttctgtctctaaataaagtaatgcatacaaagaatactctgcaccttcatactaggagttagagtttttaagctaggtttgacacaccaaac

SEQ ID NO: 27681 - DNA, 355 bp, Glycine max
ggcactgttgtttagttatttcagtgttgctggtagttgtattgtagtattatatccgttttgtaaagcataaagctttaagctgataggaaattggaggagcgattggggtgagatgatgatgatggtaaggataggatgttttatggggaactgggttcttctactctttagttatcccatcgctgcaataactctacactttcacatatacacaaacatccctctcctctaatatctccaaactatgctgctactcacactcacaacaaacgattagttgcttctgcttcttcagctccatcagttagcggttcaggtgctgagtattccgagcagatggtgggtgtgggag

SEQ ID NO: 27682 - DNA, 347 bp, Glycine max
ggggcgagatttgccttgggtgcgctttccgggtgaggtttaataaaaaagtcaagtaggacagcggtgaccgcgaatggctatagttcgtcacttgcggtataaaaagaaaagtcaggagctttgaagatcagccctaagctaaagcgctttctttctagtttgagagatggaaatgcctaatcaagtagccaagaatcatcgatttcggaggggaaatgaatttaggaaggatccgatcccaagtgacattgaatcagttgggggtataagcgctgctatttcagcagttggtgttggaggactgaatgccagtcgaaaggcgcatctatgacttaatacctaat

SEQ ID NO: 27683 - DNA, 388 bp, Glycine max
gacggctaaaagctaaaaatcatcgaagtactcggattagcatggctgtcacggttgcattcttgaatttgatcatcatgttttcagtagtctctacaagcaagtcactgagcttaaactactattcaaaaacatgccctgatgtggaatgcattgttgccaaggcagtgaatgatgccactgctagggacaaaactgttccagctgcacttctgcgaatgcacttccatgactgtttcagtcgggggtgtgatgcctctgtgctgctaaattcaaaaggaagcaacatagcagaaaaagatgggccaccaaatgtttctttgcatgcattctatgtcattgatgcagcgaagaaagcactagaagcttcatgccccagtgtgggctc

SEQ ID NO: 27684 - DNA, 368 bp, Glycine max
gatctcgacccgaacgtcacggacgcccagctgtgtgatttgttcaaccaattggggcaagtcgtatccgttagggtttgcagggacttgaccagtaggagatcgctcggttatggttatgtcaactttagcaacccgcaagatgctgccagagctttggatgttttgaacttcactcctctcaataacaggcccatccgtatcatgtattcgcatcgtgatcccagtatccgtataagtgggcatggaaatatatttattaagaatttggatagggcaattgaccacaaggcgttgcatgatactttttctacatttgggaatatcctttcgtgcaaggtagctacagattcatctgggcaatcaaa

SEQ ID NO: 27685 - DNA, 362 bp, Glycine max
ggacattgggagatgggaaaactgccaaagtttgggagtacccatcgccacgatctactgatggttcattcgtcaccaaccccattattgatggtctggaggacttatcagttgaggctttggtagacccttttcaacaaagtcctggaacaaaattattctaaatgaccttttcacagcagaggatgtcactagaattctttcaatgccaacctatttcagggatgaactagacaagcttacatggatgtttagtagagatggattttacacagtcaaatccgcatactttcatgctacacagagtatggtagacaactcaagtctgcctgaaaaatgaccgtagatggatatattgcaac

SEQ ID NO: 27686 - DNA, 333 bp, Glycine max
gacacacttttctttcattcttggtgtctgaattcttggattcatctgacaaacatcttcaaccttcaaaaacatcatcctgtttacatctagaaccaggttttaactagtctctggtattactcattcaactaggttagaaaactctgttcaagttctagttaaccctttacatgctttctttctttccaactatccactgatttgaagcttgttattcaaatgaaatcaggggtctgaatttttgtagctgatatatccagaagagaaataggaaattggagaattaagtattctcgttgcatgatcaatgatgaactaaaatatctatat

SEQ ID NO: 27687 - DNA, 439 bp, Glycine max
agaagggggatgtaaggaagtagtcacatctgaagagagacaagagcgggcttctttcatagaagaaatcagtagaacagcaccaattaagtatcttcacaagtatcttgcatccaagcaaattgtatcagggaattaccaagatttcaaaagaatgattaccagtctgtggtttgacctttatggccgtggtggcacttctggttcctcttctgcttttgaacatgtttttgttggagaaaccaaacaatgtggtgaagtttctggctttcataactggctgcagttttaccttgaagagcaaaggggagaggtgattatcaaggatatatttttccccgtcgacggggagaaactcctgactcttgagctcagcttctgactattcagtttgaatggaatggtgtcctaaaatctgtatccagcacttttggttgga

SEQ ID NO: 27688 - DNA, 318 bp, Glycine max
ggagttggttaatactgtaaactcgatttctgaatcttaagcttttctctctctttcatttttgaaatccttttaaatgctaaagtaaccctatatatgcttcctattttttttccacttctatgaatatcttctattgttgaactcaattatccatttaaattctttctctctttttccttcttcttatctctttttttgttgctcagatctccaatatatcattctatttcgtccattcttttgtgttggatagttaaacctctaagagaactacttgaatttgatctttagtatctgcatttcagtgttaccatt

SEQ ID NO: 27689 - DNA, 313 bp, Glycine max
  modified_base (307)..(307): a, c, g, t, unknown, or other
gggaggtggaaagaggaagaggcaaaagagagaagcagaggtttgcagaagaaaaaaaaaattatatatataaaagagagaagagaaggtgcagtgagtcacagtcatagaaaagaagcagaggcaccattttcgttttccaacaacctctaccctaacgccgtcataacggtttgtgcttccgcgacgcgacgcttcaactgtgaaacgcacgcgacgtagtttatataaagcgccgtccctttccgtttgagcagtcagcaagacgatgacctgtgccaaattattttccgtcttttctctcagnttctaa

SEQ ID NO: 27690 - DNA, 313 bp, Glycine max
gatggccgtgtcattgtttggaaggagggcaacggaaaatgaatggactcaagctcatgtgtttgatgaccacaagtcatctgtgaattcggttgcttgggcgcctcacgagttgggtctttgcttggcttgtggctcgtctgatgggaatatatctgttctgactgcaagagcagacggtggctgggacactgtgagaattgatcaggctcatccagttggtgtcacttcggtgtcatggacgccatcgatggcacccggagcccttgtcggtgcaaggttgcttgatccagtacagaagctgtgctctggt

SEQ ID NO: 27691 - DNA, 409 bp, Glycine max
ggaccttcacctgtgcagcaattctctgtcggcaaagttgatctttctttatttccttctttggcgggaatgacataaacgggggtttctgataatttcaagggcttaatactggcgatgggttctagtgcattcatcgattccagtttcatcttgaagaagaagggtcttaagcgtgctgctgcacgcggtactcgtgcaggagttggtggctatacttatctactagagccgctttggtgggctggtatgttgacaatgattattggggagattgcaaactttgttgcttatatctatgctccggcagttctggttactcccctgagtgcacttagtattattggcagtgctgttttgtctcacttcttgttgaaggaacggctttcgaagatgggggtattggggt

SEQ ID NO: 27692 - DNA, 73 bp, Glycine max
cccacgcgtccgcccacgcgtccgcccacgcgtccgcccacgcgtccgcccacgcgtccgccgaggcgtccgt

SEQ ID NO: 27693 - DNA, 319 bp, Glycine max
gggcgcgaacgagttccagacggagatcaagatggtctcgcgcttccgccacgcgcacttggtctcactcatcgggtactgcaacgatggcggagaaatgatcctcgtctacgatttcatggcgcgtgggaccctacgcgaccacttgtacggttcggagctgtcgtgggagaggaggctgaacatatgtcttgaggcggcgcgtgggcttcacttcctccacgcgggcgtggacaagcagagcgtgatacaccgcgacgtgaagagcacgaacatcctgctggacaaggattgggtggcaaaggtgtcggatttgggg

SEQ ID NO: 27694 - DNA, 380 bp, Glycine max
ttggggcgcattgaacgaaaattagggtttcgagtgtatcaggaacaagcagcaatggctccgaaggtaacacgcaaggttagcagaaaccccgaattgataaggggaattggaaagtactcgaggtcgcagatgtaccacaagaggggcatttgggctatcaaggccaaaaatggtggcgttttacctcgccacgaccctaaacccaaacctgaaacacccgctgaaaaaccacccaaattttaccctgctgatgatatcaagaagccccttgtcaacaagcacaaacccaaacccgctaagctcaaggctagcattactccgggaacagtgtcgattcttcttgctggtagatttaacggaaagagggtagtcttttt

SEQ ID NO: 27695 - DNA, 327 bp, Glycine max
ggaactgtgaagtgtatttggtcactgacctatcttgggagagatttgaagtttaaaccttcaaattaatcaaaccattttaatttgcctatagattctgagtcactgctgctatggcgctacgcgtacttcttgtgttggggatgttgctgatgttgtgccttgttaaggtttcatctgatccaaagatagaagaagaaatactggaagcagaagaagaactgcagttttccgataacgagccacttatcgtgagagacgcgaacagaaagctaatgcaagatatggattgtggtggggtgtgcaagacgaggtgcaatgcacatt

SEQ ID NO: 27696 - DNA, 355 bp, Glycine max
ggagtgagacaatatcacacataatataattccaaaatcactcctattgctatagcaatatgatgggtgacactgagatcaaaccatcagttgaagtagtcatatgtgcttccatgaacaataacaatagcgcaaacaaccacaccctcccaaccgacatcaccaagtcatcacaatcacacttaccaatcttgaccaagctccatgctggttactttttcatatgcctttcctttggtgcacaagctttgctctggaagagtttgagtaaacacaacaaggactcacaaactctctggcatggattcaatttgatgccttccattgcggttctactactttggtgtgtggcact

SEQ ID NO: 27697 - DNA, 316 bp, Glycine max
ggagatcttggatggcaaagaaatagacagatgggttgaaatatagatgagcatactaaacctatacattcactttccaagatccacgtgaagctgcaatacttccatgtttcaaaagacttgagctggggccaaggcattggaagtcctaaattccccggagtgccttacacttctcacacagagacaagggtgtaaggcttctctgtaccaagatgctcatgtcccagacaactttgtccctaaaataccacttgctggaggccacacttaccaacctgatagatgttgtaaagatgtttttgatgaaatcaat

SEQ ID NO: 27698 - DNA, 357 bp, Glycine max
gggttggtggtggtgcctgccggaagtgaattgaattgaagagagatgttgtttcaggtgggcgggcaaggcagtcgccccaccttcttcgagatggcggcggttcaacaactgccggcgagcctccgcgccgctttgacatactccatcggcgtcttggccttacggagacccttccttcacaaactcctcgacttcgaagacgaatccttcgccttactcatgctcgtcctcgaatcccacaccttacgaaccacagatgcttccttttcggaatctctctacggcctccgaagaaggcccgccaatatcgccctcaggaatgacgacgccactaccaccaacaccagcagcagc

SEQ ID NO: 27699 - DNA, 367 bp, Glycine max
gatcccaagagagttggaaaagaaaggatagagtgaaagaatgggtgagaaaagcaagattttgatcataggaggcaccggctacatcggcaaacatatagtggaagcaagcgcaaaggctggaaatcccacttttgctttggtgagggaatccacactctctgacccctccaaggcacaactcatccacaattttgaggctttgggcgttaatttggtccgcggggatctgaacgatcatgagaagttggtgaaagctatcaagcaagtagatgtcgtcatatccacgctgggtcacctgcagcttgccgatcagctcaagatcatcgctgccattaaggaagccggtaatgttaagaggtttttc

SEQ ID NO: 27700 - DNA, 388 bp, Glycine max
ggaggaaggattagacagtctaatgaaatccatgagaagtgcaatctatttaagcctctggatgcaaaacttggtgagccagttggtatctccacaaaaatttcaaagctgactgcaaatactttcatccataagcttcttgcttcatcaattacaataatggcactgcacctgcaatatgttaatggagatccaaattcagtcttaagttggttggagcgctggtcagcatcttacttttggaaaccagttccccaacccaagaaaattcgagactctaaatctcagagaaagcagggtaatgtttcaaatggggaagctcaaattaccaagtcaaaacgcactaccaggaagcttcctattgcaaattttgaaacagccctggagc

SEQ ID NO: 27701 - DNA, 341 bp, Glycine max
ggttcttgaaattatatgaccatgcgtcggattgggatgctgcactcattctgcgtcgtgctcctgtactgggtctacgtattctcatgaactccctcttaaatccgtgattaattagatctatctccttagtttatccctgtcttttccaataattaattagatctgtagttcctttttggattagtttcttttttggttctgttatcaaatcaaataaaaaatctccttctcggaaatggcatcaccgatccaacaacaacaacgctcgactactacaagttctggatctgaaggaggagatccgcatatcatcgattataggaagcggaagaggatgc

SEQ ID NO: 27702 - DNA, 327 bp, Glycine max
cgggaagcgaagaaggaccagcacaaccagagcccaggccatagccaccgaaaggctcaacggagcgcaagacaagagcaaaccagactcgaggcacagctccaaacggccgcaaccagcacacccagacgccattacaaaagggtgagcagccacaaggtaacaagcacaggagagagacagaaaaaactccactcccaaaggcagcacgtcagcatcatcaacagcagcacctaagcctgcttcaggaacaaggggcatccagcacaagacggacgcatactggaactacaggaagctccccattgtggacgaccacatcataaa

SEQ ID NO: 27703 - DNA, 265 bp, Glycine max
ggactctactagtacatcgtaaaaggatgcattgatgagttttacttgttgcccgatgctttcaaggtgatcaagcagattggtgttatcggttgtggatctcagggacctgcgcatgctcagaatctactgtactcacttgctgaagcaaagtctgatattgtgatcaagattgtactcaagaatggtactagttcctttgctgaagcttacgcaattggattttctgaagagaatggcactttatgtgatatatgggaaactg

SEQ ID NO: 27704 - DNA, 251 bp, Glycine max
agttgtaagaacacgtccgagggggcatgagatgaatgctacaagctacatcaggtagggaatggtccttgtaacttatggatcataaaaaggcttcaattgcaacctcatgatccttcgacgtctgaagttaagatatacctgtgaagctctatgtatcattcacgtgaatatcaagctaatcgtatagtgtggacgttaatgattctacaactagttgtcaggatatgaatcttatgacactcaattgc

SEQ ID NO: 27705 - DNA, 333 bp, Glycine max
cggtttaagtaattcgaaacaagcaaactagtcaagctgaatgttatgggtttattgagtttaatagtcgtgctggagctgagagaattcttcaaacatataatggggcaataatgccaaatggggggcagagtttcaggttgaattgggcaacttttagtgctggtgagaggtcgcgccacgacgattctccagattacaccatatttgttggtgacttggctgcagatgttactgattatcttcttcaggagacatttagggctcgttataactcggtgaagggtgcaaaagttgtcattgataggctaactggccggaccaagggatatg

SEQ ID NO: 27706 - DNA, 312 bp, Glycine max
ggttctagtgtgtgattgtttgttgtcgtaactggttcttcttcttttgttggtctgtgtttgtgtttgttttttctctcacctgaaaatgtcttgctgcggtggtaactgtggttgcggaagctcctgcaagtgcggcaacggctgcggaggctgcaagatgtacccagacttgagctacactgagtcaaccaccaccgagaccttggtcatgggagtggcacctgttaaggctcaatttgagggtgctgaaatgggtgtgcccgctgagaacgatggctgcaaatgtggaccaaactgctcctgcaaccc

SEQ ID NO: 27707 - DNA, 291 bp, Glycine max
cccacacatgcgtaaaggtgcgaaaagaccacacaaggggagaatacaatgaaacgccgtggtatcttcaaaatgaacagggcaaatacgtgaaaatagattgagtgctatacagggcctgactttctagaaccccctttcaatccacggggagggaccaaccctatgcataaactccagtcacacatacacggttacacccttaaattaacgatcgacggtatggcaaatccctataccatttaacactcaaagagctcaaccgaaacgattaaggtcaaaaaaaattca

SEQ ID NO: 27708 - DNA, 204 bp, Glycine max
gcacattaatctggtatgttcatggttaaccaaacgagtgtcattgttttgtgctgcaaatgtggaattccaatgcaaccaaatgctgctaatatgtgtgttaagtgtctgcgctcggaattcgatattacataatgacttctgaatcttcttatgcttgtgcattgccccgagtgtgatatttactttcaaccaccaagaatt

SEQ ID NO: 27709 - DNA, 414 bp, Glycine max
gaagccaaagaaaggaacaagaacaagaacaacaaagtggcgtgaaagagagagagatggaggcgattgttccagtggtggatttccagaggctttcagaggaagaggagcgcaagaagctgagaaaaacatgtgagaaaccagggtgtttcagaatcatcaaccactcaattccactaacactcatggctgacatgaagtcagtggttaaatacttgcatgaccttcccacggaaatcaaaatgcgcaacaaaccctccgtccctgagagtggctatagggcggcaatgccaacaagtcctctatacgagggcatgggaatatatgacatgcatgcctcaccacaagcatttgaagatttctgctccaacttgaatgtgtcaccccgtcacaggcaaataataaaggaatatg

SEQ ID NO: 27710 - DNA, 344 bp, Glycine max
gaatacaagacgtgtctataaaaagttaacatgacctgttccaatgagcaacaaagagagcaaggagagaggagatgtcggtggagcagaaagcagcagggaaggaggaggagggaaaactgcagaagggaattgcagagttctacgacgagtcgtctggcatatgggagaacatttggggcgatcacatgcaccacggcttttatgacccggattccaccgtttctgtttctgatcatcgcgctgctcagatccgaatgatccaagaatctcttcgttttgcctctctgctttctgagaacccttctaaatggcccaagagtatagttgatgttgggtgttgc

SEQ ID NO: 27711 - DNA, 335 bp, Glycine max
ggaacaaagtttgatgtcattcttgtagatcccccatgggaggagtatgtgcaccgtgcccctggtgttgctgatcacatggagtactggacatttgaagaaataatgaatctcaagattgaggccatagcagatacgccatctttcatcttcctttgggtgggtgatggtgtaggccttgaacaaggtcgccaatgtctaaaaaagtggggctttcgtaggtgtgaagatatatgttgggtaaagacatacaaaagtaatgcaactccaggactgcggcatgattctcatactttatttcaacattcaaaggaacactgcttgatgggcataaa

SEQ ID NO: 27712 - DNA, 402 bp, Glycine max
ttgtggagagggagaagagtacgacggtgttcaatgccggcgtcaacttcaacgaggacttctccgccgcgatgcagcgcgtggtgaaaaccgtcgacacgtatctcgccgagatcgccgcgtacggcgaactctccatctcgaaattcaacggcatcgcaatcctcattcccaaaggctcgagaaaatccgacgacgatctataccgcgccgtcgatatctacctcaaggtgcacccgaacctggacgagatagagaaggagaaagtgtgcagcgtattggacccgttaaaattgtcctacgaggcgcgtgtgcacgcgtcaaagaacaagcgcttgccgctgcagatcgtgcttcacgcgctgtactacgatcagctacatataaggagcgggacggcgg

SEQ ID NO: 27713 - DNA, 315 bp, Glycine max
ggagtgagacaatatcacacataatataattccaaaatcactcctattgctatagcaatatgatgggtgacactgagatcaaaccatcagttgaagtagtcatatgtgcttccatgaacaataacaatagcgcaaacaaccacaccctcccaaccgacatcaccaagtcatcacaatcacacttaccaatcttgaccaagctccatgctggttactttttcatatgcctttcctttggtgcacaagctttgctctggaagagtttgagtaaacacaacaaggactcacaaactctctggcatggattcaatttga

SEQ ID NO: 27714 - DNA, 248 bp, Glycine max
ggtagttccaccgagtagcaacaatgtcgaagcgaggtcgcggaggatcggcagggaacaagttccgcatgtcactgggtctgccggtggcggcgacggtgaactgcgccgacaacaccggcgcgaagaatctctacatcatatcagtgaaggggatcaagggaaggctgaatcggttgccgtcagcttgcgtgggtgacatggttatggccaccgtcaaagaagggaaagcctgatcttccgaaaaa

SEQ ID NO: 27715 - DNA, 387 bp, Glycine max
ggagtgagacatcactaattccaaaatcacactcctatatatcttcctatagcaatatatatgatgggtgacactgagatcaagccatcagttgaagtagtcgtatgtgctttcatgaacaataataatagcgcaaacaaccacacccttccaaccgacattaccaagccatcacaattaccaatcttgaccaggctccatgctgggtactttttcatatgcctttcctttggagcacaagctttgctctggaagagtttgagtaaacacaacaaggactcacaaagtctctggcatggattcaacttgatgccttccattgcatttctacttctttggtgtgtgtcactgctgactgccactagattgtctttactttacgtgctc

SEQ ID NO: 27716 - DNA, 413 bp, Glycine max
  modified_base (321)..(321): a, c, g, t, unknown, or other
ggagagaagggaagagaagagggagaagacgaagaagaatccaaaagcaatcccatctgtgtgtttgcacatcagaagggagggctatcaaactcaaagtggttgtgttggatgctataaaaggcctacactgagtgctactgtggatgtgccatcgaaagggttggcaacacaaggtaacggagtgaggaaaccaagttcatcagaagatttttggaccactagcacgcatgatatggacaacagcgctgtccagtcacaagggagcatctcttcagccagtctaacaaaaccaagctgggttcttcatgctggttcttncaaaagcagcaccaaccccactgaatttgtaaatcacggtgtaattctttggaatcaagactcgcaacgatgggttggaaataaaaagctcg

SEQ ID NO: 27717 - DNA, 381 bp, Glycine max
ggattggccattgatgcatatggtccaagcagtgacgatgctggaggtattgctgaaatggctggtatgagtcacagaattagagagagaactgatgcccttgatgctgccggaaacacgactgccgctattgggaagggatttgccattggttctgctgcccttgtatcactggccctctttggtgcctttgtgagccgagctgctattacaactgctgatgtgttgactccaaaggttttcattggtttgattgtgggtgcaatgcttccttactggttttctgctatgactatgaagagtgtgggaagtgctgctctgaaaatggttgaagaagtacgcatgcaattcaacaccattcccaggttgaaggaaggaact

SEQ ID NO: 27718 - DNA, 364 bp, Glycine max
gattgaagatggtgtctgacgcgagcaagaagaaggctgcgcagaagaaggcggcggcagcggccaagagaggaggcaaagcagcagctgcttcgtcgaaaacgacgtcgtcggagaaggccgccgacaagcttgccaacggaattggggaaattcagatatccgatcgaacctgcaccggtgtcctctgctcgcatcctctttccagggatattaggatagaatctctgtcagttacttttcatggacatgatttgatagttgattccgaattggagctaaattatggaagacgttatggcttgcttggattaaatggttgtgggaagtctaccctgcttacggcaataggttgtcgagagct

SEQ ID NO: 27719 - DNA, 307 bp, Glycine max
gggattagaatttgtgaagtgttattctacagggaaagatctgattgaaaccagtggaacctatgctactgctgagcatattgcatggatggtttctggtgcatctgatacttttgtcagaagagagtcagaagggacgtccttttgcgggccttatgttttattacttgtaccctatcaagaaaaatctacccaggatcgaacagcttgcatgcctataaaatctgcaggaatacatacagtgagtattcatccatgtgcttgcttagatcatcagattcaatgtctgaaaacttgtgagcctgag

SEQ ID NO: 27720 - DNA, 408 bp, Glycine max
gggattagaatttttgaagtgttattctacagggaaagatctgatagaaaccagtggaacctctgctactgctgagcaaattgcatggatggtttctggtgcagctgatacttttgtcagaaaagagaaagaagggttgtcctttcccgggccttttcttttattccttgtaccctcccaagaaaaatctacccaggttcgaacagtttgcaagcctttaaaatctgttggaatacatacagtgagtattcatccaggtgcttccttagatcatcagattcaaggtctgaaaacttgtgagcctgagtttcttggttctactcctgagaggctattggagcttggttctacgaaggcaattgatatttctggggtatccatgctggttattgatggggctaatactat

SEQ ID NO: 27721 - DNA, 336 bp, Glycine max
gcgtgaacagattgctgaaaaacgaaggagagacttgactctcagggctcgtgtggctgctaagacagaagaaaagaaattggagctgctgtttcttcagtggagtgagcatcgtaaaagactaagcaattttataaggactaaagcagagcctccaatctactatttgcctaacaagcccttggatgaagatcctacattacttgagaagcgcaaagaagaggctttccttgaatggaagaatgctagaagagaggaagtgtctgagtatcagaaacagattggggagcagtatcttgccaatgttgagaaagaattggagagatggcagaatgc

SEQ ID NO: 27722 - DNA, 341 bp, Glycine max
  modified_base (318)..(318): a, c, g, t, unknown, or other
gggcgcgggtgaggtagaacccttccactgtggtgactctgcgatggatctgatgcctgaattgaacgattatttggtttaattgttctgctggagctttcttaagaaggtttggggttttaacgccaaagccaaaacaggagaaagaacatcatctcttcgctaacttgaactagcatggatgtttgctactgtgcccccatttttttgtttccattttgcttcatgactctatatttgaatctaggctttatatttggtccatggtcgcgcttttttttttgcttgccatttttcttttatgaaatggccattggntcttatctatgtttctcatattc

SEQ ID NO: 27723 - DNA, 319 bp, Glycine max
  modified_base (302)..(302): a, c, g, t, unknown, or other
gaggtactggaataatgaggaggttttgcagaagttgggacaagccatgggtcttgccaattcgggagatgcaggtgcctctgctgaaaattctggggcagatgagaccgaagatttgggaaatgaagatgaatcaattgttcatcatactgctagtgttggtgatgtggagggcttgaaaaatgcactagcctctggtgctgacaaggatgaagaagattcatagggaagaactgctttgcattttgcctgtggatatggcgaggtaaaatgtgctcacgttctcctcgaggctggagcanaagtggatgctttggat

SEQ ID NO: 27724 - DNA, 391 bp, Glycine max
ggccggagacagaggtagtttccacgacggtgcgggtcgcgacacgaaggggcttcttgcggcgtgagatcgtgcgattataccgatcctaacagagggttacataatgaccaagaagaagaaacaaaatggggttgttgttggagagggtgatggtgttggtggtgttgtagatttggagtctgtcatacacaaccacgctcttttttttcgacaagttgattgaattgattcccgccaagttctatctgccaactgatgacaaggagaagccatggtttcagggtctaaacaaggctgcaaaagctaaggcaaagaaagagaccaaggagaatatcaagaagtctcggagggaccgtttagaccctgacaaaccttctgcaactaccct

SEQ ID NO: 27725 - DNA, 54 bp, Glycine max
tgggtgtttaaaattgacgaaaaaaataaaaaggatgcttaaaaaagtattccc

SEQ ID NO: 27726 - DNA, 203 bp, Glycine max
ggacaaagggagcgtgttgtacaaagggcaattttttcaaaacctttttctttttcgcaacctcacctttttcttcttcaatctctttcggaatttcccaaaatccttaatgggaagaaaaaatggttctgactcaaaagcttcacgaaaccttcaaaagcaccggcgaaaagattactggccccccgacccgttccgccttt

SEQ ID NO: 27727 - DNA, 323 bp, Glycine max
gagagaacctaagagatataaataagccataataaggattcgattcggaaaagaagaaaagacattcaacaaacaacgcaatgggtattccgtcggaactgagggacatgttgttgcccaacaaaaaaggcgtcctcgttgcctctcccgcaaaggacaggaagactttgaggtccaagcaatgcactaaggaaggtgtgcgagctggattcaaggctgcttccattgctggtgttgccagtgctgtgcctacattggctgcagttcgtatgattccatgggcaaaggcaaacctcaattatactgctcaggcacttatcata

SEQ ID NO: 27728 - DNA, 416 bp, Glycine max
ggagcacaagcaatccataacgtaaaggtgccgccggaaacacaactaacacaacctttgctaatgaaaaatatctccttttttcatttgcaacggttgctttgaatgaaggaagcagtaacggctatattataatttgtgaggaggcattgatgtggaagaacaagaacacgtgaaggagtttgtgttgtgttgtagagaggaaaaattattgagagggcaagatggattttacttcgatcttgacgtccctgcggacttcgtttgtgatatttctggttttgatgattgagtttgcgtatatatcaagtcagcctgggaacaatgtggtgtactaccccaacaggatcttgaaggggttggaaggagggtacaagagccgcaaccctttctcttggatcaaagacgctgtgtct

SEQ ID NO: 27729 - DNA, 407 bp, Glycine max
catatagatggttggtatctaagataagaaaatttatgataccgatgtaaattcaggtcttcatggtttaacgaaaatcatagtttttcaatttctacgcaaatcaagataaagaaaaggcagttttccaatcattgactcaaacccattgttgaaccgaatcccactgagtggaatatggaggtacttatggcagaacgggccaatctagtctttcacaataaagtgataggtggaactgccattaaacgacttattagcagattaatagatcactttggaatggcatatacatcacatatcctggatcaagtaaagactctgggattccgtcaagctacggatacatccatttcattaggaattgatgaccttttaacaataccttctaaaggatggctagtcca

SEQ ID NO: 27730 - DNA, 401 bp, Glycine max
gatgaagtaactgtggcgggatttgaagttccaaaatctcctgattctagttataacaatgtctaccctggaaatgaagatgaggcaagggatccacctatggtcccttcacatttacagcatactttgctaaattatcctgctaatagagacactgcaggaactgttccattgcctcagaatgtgattctaaatcatctttacatcgagaatagagaatcaccaagatctgtggtggcgttgggattcactcatcgtttccactctaaatatgttacagtcgtgctttacaaaccagtccaaagaaggggaaatacaagcatttagtgtgcataatattaaaaacctcgatcaccgatggtttgtaatgatttattgtagactccatattctaattactg

SEQ ID NO: 27731 - DNA, 360 bp, Glycine max
cggagaaacatgaaggcctaagctatgttgggattcacattccagttggtagagtccaagcagatgacatggatgagttggctacgttagcctacgaatacaccaccggtgagctcatgctcacagtggagcagaacattataatcccaaatgtggacaataacaaaattgatggcttgctcaatgagcctctctcgaaggggagattctcacccgaaccttctctattgatgaagactctggtggcatgcactggtaatcaatattgtggacaagctataattgagacacatgaaagggcattggaagtgactgatgaagtggagaggcaaagtgctgtgactaggcctgtgagaatgc

SEQ ID NO: 27732 - DNA, 344 bp, Glycine max
ggggggaagctttgataaatttaagtttggcgttgcggtgctgagttctgatctgctttaaactgaagaactttaaggggttttctcgcaaatggaggtgctgtgggtcacaaggcatggacgaatgtttgaggggagggtgttagtgctcttggctttgttcttgtggattcccgcacaggtggtggtgggaaggacaagaactaccatcacaaactctactgcttcttcagcaccaagagttttaagaagtggagcactgtttactcttaattctataattggaagatcggcgaaacctgcacttatggctgctttcgaagatgttaatgctgattcgagtg

SEQ ID NO: 27733 - DNA, 378 bp, Glycine max
gtagtgaaacatggcatagtaaagcttttggatggcattgagaaatatgaggatggaaccttctattttgatgagaaatgtgttggtggacatgagcaacggggttctctttccacaacttcttcagttgttagaggggttactgcatttgctgctgtaacttctggaaaaataaatcttccaggggataaaatattgggtctggcaaaatttttcttgggcattggaatccctggagatgccaaggacttgttcaatcaagttgagtcattagcttttctagagagcaacaggatttccattccatcgatattgtcactgccagaaacagcttattcattggccatgaaaggccagcttaaggtcgaggtgaataca

SEQ ID NO: 27734 - DNA, 422 bp, Glycine max
ggttctagtgtgtgattgtttgttgttgtaactcgttcttcttcttttgttggtctgtgtttgtgtttgttttttctctcacctgaaaatgtcttgctgcggtggtaactgtggttgcggaagctcctgcaagtgcggcaacggctgcggaggctgcaagatgtacccagacttgagctacactgagtcaaccaccaccgagaccttggtcatgggagtggcacctgttaaggctcaatttgagggtgctgaaatgggtgtgcccgctgagaacgatggctgcaaatgtggaccaaactgctcctgcaacccctgcacttgcaagtgaggtgttgggagagcaagcttcaagcaaagatagcccttaattaggaataatgataaactattaatgtgtagctaaaaacttatgtattatgtct

SEQ ID NO: 27735 - DNA, 391 bp, Glycine max
gagggatagggatagggatggagaaagtgaaggtgcttcggcgactcctcgagacaccaggggttcaccaggggccagcctgtttcgacgctctgggtgcgaagctcatagaatccgctggcttcccctactgcatcaccagtggcttctccatcgccgcttccaggttggctctgcccgacaccggcttcatcttctacggcgaaatgctggagcagggccaactcatcacccaagccgtttccattcccgtcattggcgacgccgacaacggttacggcaatgccatgaacctcaagcgaaccgtcaagggtttcattgccgccggtttcgcaagaatcattctggaagaccagattgcgccgaaagcgtgtgggcacacgcgcgggag

SEQ ID NO: 27736 - DNA, 238 bp, Glycine max
gggtgcaagtgggaagaaatattcgggttgcttggcggtccctttacccaacgaaagccgagagcgaaaaatggcgttggaactctcgtcactatctcttcactcctctgtccgccaccagcaccctaattcgtcgattcaaaccatcgcattccccttcgtttctttgcaccttcccttactcccacttcgtgtctctccggcgcagcctcagtctccacatttcatcgcactctct

SEQ ID NO: 27737 - DNA, 102 bp, Glycine max
ggatcaatgaatgttgggaacaatagtcaagctggcctagcgggaaatggctttggttgtttttcgaatattgggagtgaggctctagttactatctaatca

SEQ ID NO: 27738 - DNA, 345 bp, Glycine max
ggaagcagttgaagatggagcacgacgaagacgaagagccacctcttgctgttcagattcaagggaatgatgaatccgtttctcagcaatcttcttctgttggggtcactctcatcaccggttatcttggttcgggcaagtccactctagtgaatcatattttgaattcgcaacatgggaagaggattgctgtcattttaaatgagtttggtgaggaaattggcgtcgaaagagcgatgatcaatgaaagagataagggtgcattggttgaataatgggttgagcttgccaatgggtgtatatgttgcacagtcaagcatagtttggttcaagcacttgaacaac

SEQ ID NO: 27739 - DNA, 395 bp, Glycine max
gaacatgaagaagagaagttgctcaagggactcgtgctcatttgttggtgattatctggaattgcgtaagcatgcaaggagagttcatcctacttctcgtccctctaatgttgatcctacaagagaaagagcctggcgacattttgagcgccaaagagaatatggtgatattgtgagtgctattcagtctgccatgcctggagctgtgctagttggggactatgctcttgagaacggagatggtattggtaggttacaagatgaacgtgttgaaggcaacattgacaatgctaacaagccttggttagccaccactatcttgtttcagatgatggatagcaccattgaaattgttagggaaccaagagcacattcgagtgcatggacaaggcacc

SEQ ID NO: 27740 - DNA, 342 bp, Glycine max
gggcaactggatggttgcatgatcgaatacgtgttgtggtctcaagtttctttgtgaaggttctgcagcttccttggagatggggaatgaagtatttctgggacacccttttggatgcagatcttgagagtgatgctcttggttggcagtacatatctggcactctccctgatggtcgcgaatttgaccgaatagataatccacagcttgtggtctacaaatgtgacccaaatggagaatatgtgcgacgctgtcttcctgaacttgctagattaccaactgaatggatacaccatccatggaatgcaccagagtctggactccaagctgctggaattgaac

SEQ ID NO: 27741 - DNA, 403 bp, Glycine max
gagcgaaacagagagtgatttcagtgagtgatcggtgttcacttgatctcatcataatcgtcagcgtcaattgaagaagatgccgatcagaaacatcgccgtcggaaggcctgaagaggcgactcaccccgacacgttgaaggcggctttggccgagttcatctcaaccttcatcttcgtgttcgccggctcaggctccggcatcgcctacaacaagctcaccgacaacggcgctgccacccctgccggcctcatctccgcctccatcgcccatgcattcgccctcttcgtcgccgtctccgtcggcgccaacatctccggcggccacgtcaaccccgccgtcaccttcggcgccttcgtcggcggcaacatcaccttccttccgcgcatcgtctacgtcatc

SEQ ID NO: 27742 - DNA, 327 bp, Glycine max
ggagcaagagtgaagagcgaagagaatggctcccaagggtttaatctttttggctgtgttatgcttctcagcactgtcactgagtcgttgtcttgcggaggataatggacttgttatgaacttctacaaggaatcatgccctcaggctgaagacatcatcaaagaacaagtcaagcttctctacaagcgccacaagaacactgctttctcctggctcagaaacatcttccatgactgtgctgttcagagttgtgatgcttcactgttgctggactccacaagaaggagcttgtctgagaaggaaacagatagaagctttgggttgag

SEQ ID NO: 27743 - DNA, 404 bp, Glycine max
  modified_base (365)..(365): a, c, g, t, unknown, or other
gagagagaagaagaagaaaaggatattcctcttcaccctttttgattctcaaacccaaacactgcatttgcaggggtttatctttatctagaaccagcatcagagtcaaatccacttcactctttgaagttcctcttcactctacagcgacttcttccttttttgagttttcaccaggagtgttcttaaagtagttagaggatcctttgatcgagatggctcaattgctatcctcttcttgctccttgactgtctgctctagaaataaaccttacttaaaaccctttgacaaatgttcaacaccgttttctatgaaggttgcttgcaataattccaaatctccatttagaaagggctttctgcangaacagatgcctaagaaagattctctagtagtacatgct

SEQ ID NO: 27744 - DNA, 364 bp, Glycine max
ggagaagaacaagtgaaggacaacaacaacaacaacttatacgacgccgttcagcgtctgatcttggaaccttccaagatcaaggcctccctcatccctctcttccccgaagcttctagaacctactctcgccaactcctccactggtcccgtcaaggttctcccctccgacgcatcctcttcatctccattgggatagttgcacttgttgctctctcaggacttgttgcttttacgctcttttttctggctgctactgtaaatgccattttcgtctcccttctcatttctttggctgtggctggaggcttcttggttctggtctttgcttttgtgacagctatatatattggagcactatcac

SEQ ID NO: 27745 - DNA, 376 bp, Glycine max
gggatggagaaagtgaaggtgcttcggcgactcctcgagacaccaggggttcaccaggggtcagcctgtttcgacgctctgggtgcgaagctcatagaatccgctggcttcccctactgcatcaccagtggcttctccatcgccgctttcaggttggctctgcccgacaccggcttcatctgctacggcgaaatgctggagcagggccaactcatcacccaagccgtttccattcccgtcattggcgacgccgacaacggctacggcaatgccatgaacctcaagcgaaccgtcaagggtttcattgccgccggtttcgcaggaatcattctggaagaccagattgcgccgaaagcgtgtgggcacacgcgcggga

SEQ ID NO: 27746 - DNA, 411 bp, Glycine max
ggaagaaaggcagagttattgccattgcctctgcctcttgcaacaccaaactgatacacacttaataatattatagtaaaaattagccaccaaagtacactaaccccttttttcatacaactcaatagctggattggagcaaggtgaaagtaaaatcatttgcaaccaatgccgttgaacatatttcaggacaaagatggattgccacggattatattgactgagccaaagggttcatcagctgaggttcttctttatggagggcagattatttcttggaagaatcatcgaaaggaagaacttctttttatgagcagtaaggctaacaagaaacagcataaagcaatcagaggaggaatatcagcttgcctagcacggtttggtgatctcagttcacttgaacaacatgga

SEQ ID NO: 27747 - DNA, 332 bp, Glycine max
gacggcggggacgtgagaaatgtaatggcttctgaaacggaatgatttgacctgtgtctacccacacatttaacttatgttgactgggataatgcatatcatccaacgtcggttgctgctaatttgagacaaggtagctatgttctagagaaagactagcaagaacggcgtgagacgactgatactcttgcactgcctacgtgggcgatcttccacattaagatgttttgttcgctcgtcgaatactgtgattgtaccatctacggcgctatttatgagtacaagcctccatcatatatgtgcaacgacaccttacatagaagtgcacgtta

SEQ ID NO: 27748 - DNA, 334 bp, Glycine max
tgaatacaagacgtgtctataaaaagttaacgtgacctgttccaatgagcaacaaagagagcaaggagagaggagatgtcggtggagcaaaaagcagcatggaaggaggaggagggaaaactgcagaagggaattgcagagttctacgacgagtcgtctggcatatgggagaacatttggggcgatcacatgcaccacggcttttatgacccggattccaccgtttctgtttctgatcatcgcgctgctcagatccgaatgatccaagaatctcttcgttttgcctctctgctttctgagaacccttctaaatggtccaagagtatagttgatg

SEQ ID NO: 27749 - DNA, 333 bp, Glycine max
  modified_base (283)..(283): a, c, g, t, unknown, or other
ggagagaaagtgagagagaattacagagcattttccaacacgattacacgaccgaatcaaacccctctttctctccgaagctgcttttaatatcgtactggccttcgattgttctcctctttaatacatactgttctctcttcgatttgagggaacagtacaagagtctgagcatcggttaacccaactgcacaggtagtctccaaataatggagcctcatgatgagactggatgccaggctcctgaacgccccattctttgcattaataaatgtggcttctntggaagagcagctaccatgaacatgtgttccaagtgttacaaggacatgc

SEQ ID NO: 27750 - DNA, 387 bp, Glycine max
cttgagagaaatggatatcttctgttgaatgaaaaaggagagaaaatgaaggagcaacttgcagttgataggaccaactgtattgattgtatataccgtacatatgtatctcagagcatgataggctgtaatatgttgtaatataagtttagaaggcttggtgtctttggtgctgaagaaaccattagttcacattcaaatatggatgaaaactttaagatctcgtggactaatcatgaggatgatataagtatacaatactcaggaactactgctcttaaacgagactttgacagatttaggcaccgcacaattgaagggatactacaagatggtgtcaatgctcttctacgatattatttcaataattctgatgatggaacgaat

SEQ ID NO: 27751 - DNA, 387 bp, Glycine max
ggcagtgttgccattaacacaaacatcttcaatcttcatctccacctgcattcccaattcctctctctatccatggccgattcaacctcaagcgattcactctcactcgacatcgattccttttctccttcacctcaggaacatatcatcagaacacgtcacggttctgtatctgttgctgtatatggagaccaggataagccagctctaatcacatatccggatttggctttaaattatgtctcctgctttcaggggttattattttgtcccgaggcatattaccttctgctccacaatttctgcatttatcatattagtccacctgggcatgagttgggagctgctgcaatcgatcaagatcacccaattctttctgtagatgat

SEQ ID NO: 27752 - DNA, 192 bp, Glycine max
ggggttggcattctggtgcaagctgatgatgatgttagcatggcccaaagcaacagagattctaggaagagatgttacatttctgatggaaaatgggtttatgatgactcttaccctctctatgactctaggtgtccatatcttaactctgcagttacttgtcaaaggaatgggagacctgattctgactat

SEQ ID NO: 27753 - DNA, 333 bp, Glycine max
aggccgtgtacgagataaacaaacatttggcgcgcctaacactacggctctgctaactccaagcggtgtcgattcaccacttccttcattgctctatatctctgagtctgctagatgaagttaacgacacctgcgcttctcagccttgtcattctctgccatctgcttctctgtcttccctcattcactatctctctcatagccaatgacgctgaccccgatacggagcttctactttccggagactacgcgaccggactacttaatgcctcgcttgcgagatccgacgatggtagcttgaccaacatgattgatcgggctctcgaaagagag

SEQ ID NO: 27754 - DNA, 357 bp, Glycine max
ggcagcgcttgagaccaagccccactcaaccaccacaccactctctctgctcttcttctacctttcaagtttttaaagtattaagatggcagagacattcctatttacctcagagtcagtgaacgagggacaccctgacaagctctgcgaccaaatctccgatgctgtcctcgacgcttgccttgaacaggacccagacagcaaggttgcctgcgaaacatgcaccaagaccaacttggtcatggtcttcggagagatcaccaccaaggccaacgttgactacgagaagatcgtgcgtgacacctgcaggaacatcggcttcgtctcaaacgatgtgggacttgatgctgacaactg

SEQ ID NO: 27755 - DNA, 312 bp, Glycine max
ggcataacaaagattggaaaggattgatgaggggagaagctgaatcaccttccattcgaagctctgtggttgacaatgctcatttggagcttgaagccaatcaggggccaaggtccctatctcctaagcctccagttcagaagaaaaggggccgagctgatgaacaaccgaggatgaagagggatgttgtctcacaagtaaatattgctgctccacggaggctgcttcaatttgcagtgcgagatgcagtagcgacttcaaggacagccacaggcatgtcagtggagccttccctaaaaacgtctttcggtc

SEQ ID NO: 27756 - DNA, 422 bp, Glycine max
ggttctagtgtgtgattgtttgttgttgtaactcgtgcttcttcttttgctgttctgtgtttgtgtttgttttttctctcacctgaaaatgtcttgctgcggtggtaactgtggttgcggaagctcctgcaagtgctgcaacggctgcggaggctgctagatgtacccagacttgagctacacttgagtcaaccaccaccgagaccttgttcatgggagtggtacctgttaatgctcaatttgagggtgctgaaatgggtgtgcccgctgagaacgatggctgcaaatgttgaccaaactgctcctgcaacccctgcacttgcaagtgaggtgttgggagagcaagcttcaagccagatagcccttaattacgaataatgatgaactattaatgtgtagctaaaaacttatgtattatgtct

SEQ ID NO: 27757 - DNA, 407 bp, Glycine max
ggcacaagtgagtttgttgatcgagataactagaaacagtgtgatgaaaatgaaggtccttgttttcttcgttgctacaattttggtagcatggcaatgccatgcgtacgatatgttccctctccgaatgaacactggctatggtgcccgtactccggaggtgaaatgcgcaagttggaggcttgctgtggaagcacacaacatctttggctttgagaccattcctgaagagtgcgttgaagcaacaaaggaatacatccatggcgaacaatatagatcagactccaaaacagttaaccaacaagcttacttttatgccagagacctcgaagtccatcccaaggacacatttgtgttcagtatagatggcaccgtactctctaatattccatactacaaaaaacatg

SEQ ID NO: 27758 - DNA, 93 bp, Glycine max
aggcgacagagggattggaattaaaacctaaacggggccgggtcattgggtggcggccggcttctctgatgctggccacgagctacttttgga

SEQ ID NO: 27759 - DNA, 61 bp, Glycine max
gagggccaccaccaccaaaaaaaggtaaggatttggtttggcaaggaagaaagtagaaatt

SEQ ID NO: 27760 - DNA, 427 bp, Glycine max
ggctgcagatttgtgcgttagggaaaaaaataaataaaaaatagatatcatggcagcgagtgggggttgcagcagcagcttcttaacattgtcttgtgcaggtgcggcgcaaaatcaacacgcgtcacaccctagaacgttttttggagttcctcacaagaatcagagaaagaggaaaacaccgcataggttagttgtggttgcggtgactcaaggctctgctgaatcaagcaagtccgacgaaaaaatcccttcgtgggccaaaccggactccgatgaaccaccgccatgggtccgggatgagcccaacaacaaaaacagcaacaattcgcaacaagaagaagaatttgagatccccttctatgcttatttgcttgcctctgccatcactgcaattgccgctataggttccattttcgaatatgtg

SEQ ID NO: 27761 - DNA, 427 bp, Glycine max
ggagaagcattagcaaaagcaagaagaactagtctaagcagaaatggcctcttcagtgatggcatctgtggccctcaaacctgcccctttcactgttgagaagtcctcagttagaggccttccctccctctcaaggaactcctcttcattcagagttgtggccagtggtggcaagaagatcaagactgacaagccttatggaattaatggtggcatggctttgagggaaggagttgatgcatctggcaggaaaggaaagggaaagggcgtttaccagtttgtagacaaatacggtgctaatgtcgatggttacagtcctatctacgacaccaaggactggtctccaaccggtgatgtctacgctggcggtacgactggcttggctatctgggctgtgactctacttggtcttcttgctggtggtgca

SEQ ID NO: 27762 - DNA, 382 bp, Glycine max
ggtgggaggcgaggaaagaaaagcattagaatagcgttggaggaggatccgtcatccctcgcaaagtattacttttgcagagctcatcaaaccgaaccttcattcccgccttcacgttttctttcctttcaccaacaacaacttttgtttcttttcctttttattgtattggtgaagcttcaccataattcaattatgagctccaccacttcgaaagccacgtccacgatttgattcctggatccaacgcatccattaagctttcgcgatggcgtggtttagtgggaaaaatacatggggaaacttccctgatttggcgggagccgtcaataagcttcaggagagtgtgaaagtcatcgagaaggattttgaatctgctctt

SEQ ID NO: 27763 - DNA, 417 bp, Glycine max
gatgatgatgatgattcagatgatgactttagtgatgatgaagagttgcagtccccaattgacgatgttgatccttttgttttctttgtggatacaatcaaagtgatacaatcatcggatccatcgaggtttgtgaaccttacccaaacgcttgagtttaattatcaagctctcgctaatggtgttgcccaccatgctgagcagagaagggcagaaattgaaaaggagaaaatagagaagtcaacggctgccacagcttcttaagcttctgaatgtacattattactgttgcttttttaattctcaagttctcagttacccattctttatgaaaatcagagggttgcctatatttgaggcatttgtcggctttctggtcaccagatgttggtctttgatcatgaagagttgcagtat

SEQ ID NO: 27764 - DNA, 386 bp, Glycine max
  modified_base (365)..(365): a, c, g, t, unknown, or other
ggtggcgtcgtgggctgatggccggcacgagcctctctcacgtgatccaatcgacggtcctagaattgcccagaaccacccgccacgtcagaatctccgccaagagccaccgcgtctccgccacctctgaccaacgccccgcgggaccctgctgcatctacgttggccccctcgaaaccgctaacaaagagaacctcgaagccctttattgccaagcacgggatgcttattatagtggtcaacctctgatagtggatgacatgtttgatagagtagagttaaggctaagatggtttggttcaaagtcagttgtaaagtatcctcggtgcagtattaggagggcatccacatttgctgatgctgangaagatctgtctatggttttt

SEQ ID NO: 27765 - DNA, 372 bp, Glycine max
ggttggaaggatcagcacgacactgagcatcagcaatggcaagcgcaagtgttggtaaagaactgacgctgtattcgtattggaggagctcttgttcccaccgagtccgaatcgctctcaacctcaaagggcttaaatacgaatacaggcccgtcaatctgctcaagggagaacaatctcgccctgagtttctccagctcaatcctgttggttgtgtccccgttctagtggatgaccacgttgttctctatgactctttcgccattattatgtatttggaagataagtatcctcacaatcctttgctccctcatgatatttacaagagagcaatcaattttcaggctgctagtggtgtttcctcaacaatac

SEQ ID NO: 27766 - DNA, 209 bp, Glycine max
attaggaaggagttgtagggcactgctctaccaaaagggtagaggtaagtttgtggcactcacttactatgctctgaaaatgtgagcactctgatgtcaaacttatctactacactataatccttgaaatgccaaaagtgactgcctatcccggtctactacaattgggatatatagctaccggagagcttgtacttctgactgctgtc

SEQ ID NO: 27767 - DNA, 414 bp, Glycine max
  modified_base (352)..(352): a, c, g, t, unknown, or other
gaggtgtgaagatggatgtggcagctaagtctgagtcaaaggacaaccttcccttgttactcacccaatctgctgaccctctcaaaaggacagggacggtgtggacagcagtggcacacatagtgacaggggtgataggatcgggagtgctgtctctgccatggagcactgcacagcttggctggcttgcaggcccattctccatccttctcattgcttccatcactctcttctcttcttttctcctatgcaacacttatcgccatccccatcccgaatatggtcccaataggagtgcctcctaccttgatgttgttcatttgcatttaagaataagcaatggacggctcancggccttcttgtgaatataagtctgtatgggtttgcaattgccttcgtcatcacaacagcta

SEQ ID NO: 27768 - DNA, 426 bp, Glycine max
gatgatgattctgaaacagataggaacttgagtggtaaagagcacagaaaggcccactatgatgaatttcttaaagtcaaagagctgcaagagacgggttctcttgaggatgaaagtgacgaggatcataattctcaacccagtaaggcggagaaatgtgagtcgtcttcactgagtcatagtgtaaaagagatggtcattgagggtaagaagtcttcaacgcctccagctaatggttcttagacagtgatcaacaaataaaatccactgtcttttcattagtttcattttgtgtattgaagaaaactaaatgattcactgtattgtatcatttgtatgtaaatagtttctttcttcatcatgcttattatgatcccgtcacactttggttgtattctggcaaattggtttatgtttcgcatcttc

SEQ ID NO: 27769 - DNA, 339 bp, Glycine max
  modified_base (242)..(242): a, c, g, t, unknown, or other
ggaggcaatagtagcagcaattcacactggtctttgcttctcgttactcatttctcacctaactttctattcttctcagtctcagatcagaaccttagccatggcagcgttccagaagatcaaggtcgccaaccccatcgtcgagatggacggagatgaaatgactagggttatctggaagtcaatcaaggacaagctcattttgcccttcttggagttggacatcaagtattatgacttangccttccttaccgtgatgagaccgatgataaagttacaattgaaagtgcggaagcaactctcaagtataatgtggcaattaagtgcgcaactattac

SEQ ID NO: 27770 - DNA, 388 bp, Glycine max
gggttctagtgagtgattgattgttggtgtaactcgttcttcttcttttaacgctctgagatcgtgtttggttcttctctcacctaaaaaattctagctgcagtggtaactgtggttgcggaagcttcttcaagggcttctacggctgcataggcttcaaaacatactctgacttgagctacactgagttaactaccacctagaccttggttatggtagctgcacctgctaatgctcaatatgaagttgctgaaataggcgtgcccgataagaacgattgctgcaaatgtggaccaaactgctactgcaactcctgcacttgcaagtgaggtgttgggagagcaagcttaaagcagagattggccctaattatgaataatgataaact

SEQ ID NO: 27771 - DNA, 287 bp, Glycine max
ggtggacaggaggttagaaaggactgcagaatgatcaattaataagtcttaaatcaattcaagttaaattgatgttccaaacaagttggatcaaatttcctagatgccaagaatattatgtctttttcctctattaaagaaatatgtatatttatctgaagttaataaaatctcaagcatgtcttgggaaattaatttaaaaaaaaaaatagaaaaaaaaaataaaaaaaataaatttataatttaaataacataaattgaggtgaactctataaaaaaaaattgaa

SEQ ID NO: 27772 - DNA, 426 bp, Glycine max
ggatccaatcaagaatacaataacatagcgtagagtgagaagtgagaagagaaaaatggcaatctccatacccagtagacaacttttcatagatggagagtggaaagtccctcttctcaacaatcggtttccgatcatcaaccccgctactgaagacatcatagggcatattccagccgctactaaggaagatgttgaccttgcggtggatgctgctaaaagagccttttcccataacaaaggcaaagattggtcttcagctcctggctctgttcgtgctcgctatcttcgagccatcgcttcaaagataacagagaaaaaggatgaactaggaaagcttgaagcaattgattgtggaaaaccactagatgaagcactggcagacctggatgatgttattggttgttttaactactatgccgagct

SEQ ID NO: 27773 - DNA, 391 bp, Glycine max
ggattctaccaaacgaataaaaaagtgttaatggagacagcaaggatatttgtatcctggttcctaatagtagtagttattatttgcaattaaaatctcttcatttttctctctttattacattttcattatggtgaccaagatatgatctgttatcaatatatattcaatgacattcacagtcccgagtcctaacctgagtttaaagcttcagatcacaaccgatccaccattcaccactttctcttcacaagctcaagttactgacaggcaaatctaacaagaaaagtagtctctgaagtcgatccagtgccttgtgaatttggaattggtggtgaatgtagatctaaaagccatagcaatgtcttttatcggtacccagcaaaagtgc

SEQ ID NO: 27774 - DNA, 364 bp, Glycine max
  modified_base (325)..(325): a, c, g, t, unknown, or other
gaagaggaggaggagttgaagaagaaggagccctttgggttctctcgctccaacaacaaggctgcttctaagcctctctctcgtggagcaacaactgtgaaatctgtggaatcaaaggggcaagctgagaagtgcgccaagagaaagaggaagaaccagtatcgcggaatccgccagcgtccatggggaaagtgggctgctgagattcgcgacccaagaaagggggttcgtgttaggcttggaactttcagcactgctgaagaagctgcaagagcttacgatgctgaagcaaggaagatccgtggcaagaaagccaaagtgaatntccctgatgagccttcaggcgctgctttctcaaaacgtc

SEQ ID NO: 27775 - DNA, 391 bp, Glycine max
gaaggagaaaagagtgacactaatttcaaatggaaattgctctctcataacagaattcaagaggaggaagaacaagtatataaaaactatatctacatagttatatctctctcttgagatttcaaacgtagagatatggaatggaggaagtgctacttggatgtgatattggtgcccttgggatttctaacaagcattgggtaccatttctggctatggcacaaggttcgaactcagccacacacaaccatcattggcatcaatgctagtggccgtagaaattgggttaatggcatgatgaaggacaatgacaagaaaaacattctgactgttcaatcactaaggaacacaataatgggtgctactctaatggccacagcccccatcctac

SEQ ID NO: 27776 - DNA, 358 bp, Glycine max
  modified_base (326)..(326): a, c, g, t, unknown, or other
gacccaccaaacattctcaaaccaaagccatgaccaatatggaatccaccacacctatactcactcctctagtgctcctcctcctcttctctctagccaaagggcttcacaaccccaaatgtgatgctgcctatcaacatgaccatgatggctcaaccctccaagtgttccatgtgttcagcccttgttccccattcaggccctcaaaaccaatgtcatgggaagagagtgtcctacagctacaagccaaggaccaagccaggatgcagtacctttctaacttggtggctagaagatccattgtcccaattgcctcagggagacanatcacacagagccctacatacttagtgagggc

SEQ ID NO: 27777 - DNA, 342 bp, Glycine max
ataaggaaggtgatttagtgtggggctttaccaaatgggaagagtattgcttggtacccttagctcaaatactcttcaaaattgagcacactgatgttccacttacctactacactggaattcttggtatgccaagagtgactgcatatgcaagtctatttgaagtaagatctcttcagaaaggagaaaatgtttttgtttcggctgtctctgtgcgcacatggtcaacttgttgggcaatttgctaaactgaatggttgttatgtagttggaagtgctggatctaaagagaaagtggatctgctgacaaataaatttggatttgatggagggtttaactac

SEQ ID NO: 27778 - DNA, 355 bp, Glycine max
gaggagaagaaggagtaaacaacacaaccaacaaacatcttcgatcttattctagggtttcaattgtgatgtgaatctaatgaatgtaacgggaaaagactgtagatagatgagctccagcaatttgacggggtttgtgttggccgtgctttccagcgctttcattggctccagcttcatcatcaagaaaaagggtctccaactcgccagtgccaatggcccacgtgccagtgttggtggctatggctacttgcttcaacctctctggtgggtcggaatgattaccatgattgttggagagattgctaattttgtagcctacatttatgcccctgctgttcttgttactccactc

SEQ ID NO: 27779 - DNA, 409 bp, Glycine max
gacagtgagtgagcatagaggaaatcactatccaattatgcatctgcatgagcgtagccttagtgtgttagcttgccgttatgttgatgaagttattattggttcaccttgggaaattacaaacgacatgatcaccactttcaatatctcagtagttgtgcatggtactgtttctgagaagtcattaaattgtgaactagatccatatgagatccctaagagcatgggaatattccgcttgctcgaaagcccaaaagatattactactgccacagttgcccaaaagataatggctaatcatgaagcttatgtgaaacgcaatgctaagaaaactaggagtgagcagagatactatgaggagaaaaaatacgtctctggagactagagtgtatataatgatctttacatt

SEQ ID NO: 27780 - DNA, 395 bp, Glycine max
gggaaagtgaaagagtaagacaccacaaagtgtaacttgagtgattatatctgatgagtgcagaaagaagggaggattgttggtggtcgatcatcgatcatcgatcatcgatcatcgatggcgtctgctagccttggaagtggtggggtgggcagttccaggtctgttaatggtggcttcaggggttcttccagttccgtcgattggcttggcagagagatgcttgagatgtctttgagagaccacgaggacgatagagatagtgagcctgacatcattgatggtttgggtgctgagactggtcacgtgataagaaccagcgttggtggccgaaatggtcaatctaagcagaatgttagttatatttctgagcatgttgtgggaacaggctcttt

SEQ ID NO: 27781 - DNA, 185 bp, Glycine max
gagagaaagggagagctgtgagtactaaggaaggtgcgactcaaattgcagaaacgcaacaacagcgtgttggagagtataaagagagagaccgtacgcattagtgaatactgaggtttctcaaaatcttaataatccctttgttgaaaccaaaacgacgacgcgtaaattgactttcatgtata

SEQ ID NO: 27782 - DNA, 170 bp, Glycine max
atatcctaaagcatcattggcttcaaaactcatagagagagagaggagagagagcttaaaggtagtcgtttgtatgtttttattttccctcttgttaggttgggagaatgcctatcctttgcaaaccagtgtacattgttgtgacttcattttatgtttatgttcttcaa

SEQ ID NO: 27783 - DNA, 422 bp, Glycine max
gttgatgaagaaggagtatgggtattccatgagggtgctttctttccagatacagacttcggatatcatacctgcttttccctatgtggcgccattttcgtccactgtgccagattgttgtaggattgtgcggtccttcattgaggattctgtgagtttcatgtcatatggagggcagcttgagttctatgaagttgttaagaagtatttacacaggcttttgagtgaggttttggatgaatctttagtgaagcttatcaatacatcaattaatggggtttcccaggcaatgcagatggcagcgaatatggctgtcttggagcgcgcttgtgatttattctttcgccatgctgcacagctttcaagtgttcccttgagaatggtggagagaagcagaatgaacttccctctaagaaaagctc

SEQ ID NO: 27784 - DNA, 417 bp, Glycine max
gggaagagagtggagtatggacgtgtgttagttggctaatgaggagtcctcatttttcttcatctgtatctgaaccctaatcccttcggaattggaaagaataagaatcatcaatggagggagtgctgtccgcgaatgagcaacagagcatggtctcttctttcctggaggtcgctcagggccagaccgccgagactgcgcgccagttcctccaagccacaagttggaagcttgaagaagctcttcagctgtttctgatacggagtgaatgtggggccgtgccgttgccggtgccgccgcctccgttgttgcacactccgcctttggaaaatgtcgattcctggaccgatcaacagcctttgagtgaaccgaagaaggacgctgcggctgcaagtgaaagtattggcctcaatgatg

SEQ ID NO: 27785 - DNA, 239 bp, Glycine max
ggcgacccgcaccgaccctcacacattcgtatcatttctaaaaaaccttctatatagacaaccagttaaccttaattgaagcgctttttaaatattccacttcaactaccaaaccctatatttttaaccttcccataatttcaataaactattaatcgttcaactttggaaaatttcaaactccttttcaccacattcaaaaaactaaatattttttctcatacccctttttaaaaatc

SEQ ID NO: 27786 - DNA, 278 bp, Glycine max
tggtgatggagctggggtgacatgcttcgcttgcagttataggaatgaatgtttgttttattattgtgcagactgtcaacttcaattcttaacaaccctaatcatatcaacatgacattctcttcataatttctgaaccctacaggctttactttactgctgattctcctgtctatgcttctaccaatgccataagcttgctactgcaccactcttcatcctgtttaagccatcaaacaacctgttctgaacccgctattgagcttttctagctcctt

SEQ ID NO: 27787 - DNA, 297 bp, Glycine max
tactgcgatgaggaaatcaaaagcaggggagaagattgtcagctacaacgatgtggcgctcacgcgatctgatttacacatccttagtggtccatattttttgaatgatcggattatcgagtcttatttcagctgtctttctttacgtcatgcctatcaggatatcctgctgcttccaccatccattgcactttggataatacaatgccctgttgctgacgctattggtgattatatagaacccgttcatttgcctgatacgacactgggtatacttcccgtcaatgtctatgatga

SEQ ID NO: 27788 - DNA, 316 bp, Glycine max
ggagagagagagagagagaggcacttggaatccaaaaatgagagaaatcatcagcattcacataggtcaggccgggatccaggttggcaactcctgctgggaactctactgcctggaacatggcatccagcccgatggcatgatgccaagtgactcctccttcggtgtagcccacgacgccttcaacaccttcttcagcgaaaccggatccggcaagcacgtccctcgcgccgtcttcgtcgatctcgagcccaccgtcatcgacgaagtccgttgtggcacttaccgtcaactcttccaccccgaacaactcatc

SEQ ID NO: 27789 - DNA, 384 bp, Glycine max
ggaggcaagaagttgtattttggcatccccgtggcttcaagaagagaatctcaatggaggcccaggagctgaagcgcgtgttccagatgttcgaccgcaacggcgacgggagaataacgaagaaggagctgaacgactcgctggagaacctgggcatcttcatctctgacaaggacctgagccaaatgatccagaggatcgacgtcaacggcgacggttgcgtggacatggacgagtttggggagctgtatcagaccataatggacgagcgcgacaatgaggaggacatgagggaggccttcaacgtcttcgaccagaacgccgacggcttcatcaccgtcgacgagttgaagaccgtcttgtcctccctcggcttggagcaag

SEQ ID NO: 27790 - DNA, 369 bp, Glycine max
ggagagagcacaatcacttgcttaaacttcactccgagagttacgattatggcattgaatttgagcatgttaccattgctctgcgttttgtctctttttgttacctcggccatcacaattactctttccaagagcgttgcacccattcatgacgtttcttatctcaaccggagcagtttcccgcaaggctttattttcgggtcagcatcctcagcatatcagtatgaaggtgctgcaagggaaggtggaaaaggaccgagtatatgggatactttcactcataaatacccagaaaaaataaaagatggaagtaatggagatgtagcggacgactcatatcatcggtataaggaggatattggaatcatg

SEQ ID NO: 27791 - DNA, 417 bp, Glycine max
ggggagaagcagagaagagaagaagacaacataggatggccgaggttgctgtgtcaacggtcgttaccaagctgacggggctgctggtggaacaagcagtagtggcggcggtgtctgtttcacagctggcaggggtaagagagcaagtggagaatttgaagaacgaattggggtggatgcagagctttctgagggacgcagatgcaaaacaagaaggcaacgaccgcgttcgcatgtgggtgtcggaaatccgagacgtggctttcgaagcagaggaactcatagaaacctacgtgtacaagaccaccatgcagggaagcttagacaaggtcttcagaccctgtcatctctacaaggtcaggaccaggatcgacaagatcctctccaagatcaagagcatatccgacaggcgcgaga

SEQ ID NO: 27792 - DNA, 204 bp, Glycine max
ggggagaagcacagaagggtggaggacaacatatgatggccgacgttgctgtgtcaacagtcgttaccaaactgacggggctgctggtggaacaagcattactggcggcggtgtctgtttcacacttggcaagcggaagatagcaatttgtgaatttgaacaacgaaatgtggtgcatgccaaactttttgatggacacagatg

SEQ ID NO: 27793 - DNA, 416 bp, Glycine max
ggtgacaaatggagggtccttagttctggtggtctttcttctctctgttctctcaaccaagttctcaattcaatcttcttcacccttttgatctgctaattctcaaggtattcaaaattgggaggttttcgtttgaattgtgatgtccaagccactgctaggcataggggaggaggaaggtcaaagcaatgtcactttgttggtttcttcctcagtcatcatggaaagtgtgtgcctgaatagctcaaaattgaaagagcgcaactacatggggttatctgattgttcatctgtggacagctccgcgccgtccttctcagatgagactaaaagcaatctgaaccttaaggctactgagctgagactgggacttccgggattgcagtctcccgaacgagattcagatctttgcttga

SEQ ID NO: 27794 - DNA, 358 bp, Glycine max
gaatgtaacacttttgagttgcattgttgcatcaccgcaagtccacaacatggctgccactgccgctgcaggcatagcttacttgttttcttcttctattaacagcgtcaaatgtcttcgttcctccaagaactgctccattatagacccccttataaccacagtgccctcaaaccgaggcatgtttgtgtcacacttggtggaacctttgaccattgggggtgccattaattcgcacaagttgtgggggcctataatttctgctgctgttgcacaagatgaggctgttgttgtcgctgatgatgaagtaaatgatggcgctggattaggtgaacaagagatagggatgagaatgaac

SEQ ID NO: 27795 - DNA, 327 bp, Glycine max
ggaatttccgtggcgacccatcggacgctcgtccgacgcatcaacactacggccgactggaggcgacttgaatgaaagggaggtaatcttaagtggaaccgtttgcaaaattacccgttcctcgtacctcgaatgcagtctaaacttggggtcgctgaagtcacagccatatacgacactagacatatttgtgtgtctcccattgcaggcaatggactcctttaagttgttcttcgattcaacaaaccgctggacttactagactcttcaaaacttgccgcaaatttctccggtcgttcagaattacctcaagcgggtgtattttac

SEQ ID NO: 27796 - DNA, 373 bp, Glycine max
gtacttggaagaggtaaaacaagagccaaacaatagctcccaggataacaacaacacaaaaggatcaaatgaatcaagcaaggagttatggtcagaagctaatgctgctgcacaagaatcaggtgcaatgagatttgatcagattaacattctccaatcaaaggcagaaagcttcaagaacaaccaagccacttccccaacagagatctccaattccaactcactccaatctggtttccatcttgctgacatgcaaagtccaaacaagccaaaaagcacttctgagatgcatcaaaattctccaggtagcattcttttagtggacatggaaatgaagcctcatcatcatggaaaaacaaattatatcactaga

SEQ ID NO: 27797 - DNA, 332 bp, Glycine max
gatggcacagtttggaaggcaatgaaagaatcccctgcatctgtgatactaatggcttattgtttcatctctttgtggtttgttggtggactgactggttttcatttataccttataggcttaaatcagactacctatgaaaatttccggtacagagctgaacgcaggatcaatgtttttaaccggggttgtttaaataattttctggaagtgttttgcacaaaagtaaagccctcaaggaacaatttcagggcatttgctcgagaggaggtaccaccgagacctctggctccgatcattccccgggatcgtgaagacttgggtggagacca

SEQ ID NO: 27798 - DNA, 318 bp, Glycine max
ggaggataatggactggttatgaacttctacaaggaatcatgccctcaggctgaagacatcatcaaagaacaagtcaagcttctctacaagcgccacaagaacactgctttctcctggctcagaaacatcttccatgactgtgctgttcagagttgtgatgcttcactgttgctggactccacaagaaggagcttgtctgagaaggaaacagatagaagctttgggttgagaaagttcaggtacattgagaccatcaaagaagctttggaaagggaatgcccaggagttgtttcctgtgctgatatcctcgttctctc

SEQ ID NO: 27799 - DNA, 304 bp, Glycine max
tcggtgacagctcgtcgtggaagacagaaggatcagttaccattggaagagagacaacagagtgggactttgtactgataagccgtttaaggtctattactgtgtgccatttttgttgaccgttaatatactgggagaggtggaagcactgaacattatcttgatactcgctttgttgacatctgctaaaactacaacattaaaccggtgcggggtatgccatgatatttttaattatatgaacacatagaggtgttataaatactagcactctgatcaggcttggtggagtggctgagaatta

SEQ ID NO: 27800 - DNA, 336 bp, Glycine max
gtagtagtgaagaaaatgaaagtccttgttttctgtgttgctatagttctagcagcatggcattgccatggctcagaccatgaccatgaccatggccacacctaccaaattttccctctgagaatgaaaactggccatggtggccactacattccggaggtatcatgccaaagttggaggcttggtgtggaagcacacaacgtcattgactggaaaaccgttcctcaagattgcgagggatatattgggaactacatgcttggcgaacaatatagatcagactccaaaatagttaaccaacaagcttatttctatgctaaaaccctcaatatcact

SEQ ID NO: 27801 - DNA, 386 bp, Glycine max
ggcggcataaaggaccaaccatgtcgcctagtttcgtcttcgacccgcctagcgacgaagaaatcgaacactctgaacacgaagaagaagaagaatccgaagaagaaccagagtcaggatcaggaacaggatcagaatcagagtcagaaggagaaggagaagaagaagaagggcacgaagaagcgcgggttccgaagaagaagaagaagaaaacgcagtctccatgggactttgctaaatacacggaatcagtggcggaggaacacgctcgcaggagcacaacctcggtcgacgagaaaatctccaaagcactcaaacaacgttccacgccgctcgttgctgagctggaccacagctccgagtccgaacctgatgaacaagaagat

SEQ ID NO: 27802 - DNA, 351 bp, Glycine max
gacactaaacaaggtaaaagaagagcatcactgtgctaacaaagcaaccctatgtcgaaggtggtttgtgtcaccggagccagcggcgccatcggatcatgggtggtcctactcctcctccagcgtggttacaccgtccatgccaccgtccaagatatcaaggatgaaaatgagacgaaacatttggcggaaatggacggagcacagagtcatctacatttttttcgaaatggatcttcttgacatcgactccattgccgctgccataaagggttgatcctgcgtaatccaccttgcatgtcctaacatcattggtcaagtcgctgatcccgagaaacggatatttggacc

SEQ ID NO: 27803 - DNA, 402 bp, Glycine max
gtctccagtatttgtagcctccacacttttggatgatggtggagttccacatggcgtgagtcctgcatcacttttaaaagaagccatccaggtcatcagttgtggttatgaagacaaaacagaatggggaaaagaagttgggtggatatatggttctgtgacagaggatatcttgactggatttaaaatgcattgccatggttggcggtctgtgtattgcattcctaagcggcctgcatttaaggggtctgcgcctatcaacctttcagatcgtctgcaccaagttcttcggtgggctcttgggtctgttgagatttttttcagcagacattgttcaatctggtatggctatggtggtggaatgaaattggtggaccaattttccacattaactcgggcgta

SEQ ID NO: 27804 - DNA, 317 bp, Glycine max
agaagggggaagcagtgtagtggtaactcttgtcaatctttccgcgtttgacagtgccgacgcctccagataaacaaccttaactttcccacaacaccacccatcattctttttctctctctagatttcatttagttgttgctgtcttcttctgtttgtgtgtgccaacacagagcgaaaaacatggctctgaaccaatcaaaagccgtgttgttgagggtgagtttggtggtggtggcgctcttcatagcagggtacatagtgggtccccctctctactggcatttcgttgaaggtttggctgcggtcaaccactc

SEQ ID NO: 27805 - DNA, 406 bp, Glycine max
gggtgaccccagatgaaccagggactcgccatgtgcaatatggcacatcaaaggataagtttaaaactagtgcagaaggcacagttgcaaactacactttctataactacaagtctggctacattcatcattgtcttattgaaggccttgagtataagacaaaatactactatagaattggaagtggtgattctgctcgagacttttggttcgaaacacctcctaaagttgggccagatactccctacaaatttgggatcattggtgatttggggcaaacgtttaattctctttcgacccttgagcattatttggagagtggaggagaggctgtgttatatgttggagatctttctcattctgatgaacatgactacaaaaatttgggtttacggtgggatacatg

SEQ ID NO: 27806 - DNA, 363 bp, Glycine max
cggttgacgtgtggcatgaaattggggggtcctttagaattgaaaagcagccatcaaaggttatggtttatgtgcaaggtcctgcttctggtgtggacttaatggttgctggacttcaaatttttcctgtggatagacacacaagatttagatatttaaagatccaaactgataagattcgtaaacgcgatgttatcctgaaattctctggactggactctggcagctatgctaacacctcggttaaagttatacaaacacataatgatttccctattggaacatgcattatctgaacgaacattgacaaccaggactttggttacttcattgtgaagcattttaactgggcctggggtttgg

SEQ ID NO: 27807 - DNA, 396 bp, Glycine max
ggtcgaaacggggttcctctgtggtagttggaaggtcgcaccgtgccactattgcaccaggctgcctcgtcatcggagggggtcacggtgaagtgtattctgcttttgtgtatgttataatttcaataggaattcagatcttataatcctcagtttgatcctatgaaggacagacacttgaagaaaagaatcaaaagattgaaagacatggttgagccagataaaaattgcgagactagggttgaagatgttgcttggccttgctccctttcagagtctgagattgcttggctaatgtattccgatcacattgggatggcaaacgtgtgcttattattccaaaatgtctaaaaaatttctgacgataagtattcatatctaatcatggtagttgag

SEQ ID NO: 27808 - DNA, 340 bp, Glycine max
cagataatgaagttataatggtccaacatcgccattgtttggaaacagccttccaatgcatagaagatcatcttgtaggttagaatacttacatgttataagctataatctttttttggattgaagtatattttagtccttagagtttccccttatttggtttttggtccttacatatatatttttttggtttttgttcttatttgtccctgtcattaagtatcagttcttatatttttcagtaatttaagttttagtccctttagcttttattcttcaaaattaaatggtccttatattccatgatgaacaggtctctatagtttattattaagatatc

SEQ ID NO: 27809 - DNA, 313 bp, Glycine max
tggggggggagaagagtttgctgaataagagaccatcggggatttactaactatgaattgaactttcttaatacctcacattcccaacctaaacattgctgctgtcaatctcacattcattaacgagcattcgcaaaaagagctccttaacatcctcaataatgttcgaagaaagaagtgtttagtcattgatcccaatctcagagactctctctcgcttatcatacagacatccattcttcaggatcatgacattgaattgctgcatctttccgggcacccaattaaaacttacttgctgaaagtaaattta

SEQ ID NO: 27810 - DNA, 381 bp, Glycine max
  modified_base (346)..(346): a, c, g, t, unknown, or other
gattccaagttctaccatatagtgtaaagcaagaagacacaaacaatggagttgtggaagctcttcgtaactgcattaatgccagttcttaaggtgctcctcattactgctgttggcacatttcttgctctgcaccgctttaatatactgagggagagtgctaggaagcacttgaatacaatagtatactttgtattcactccggctcttgtttgcagcatcctggctaaaactacaacatttaagagcctggttgcggtgtggttcatgccattgaatattcttctcacatttatcattggaacaacactaagatggttgtttatgaaaataactaaagcacctnctgatatgcaaggccttgtgttgggatgttgtgct

SEQ ID NO: 27811 - DNA, 323 bp, Glycine max
ggcggcaatagagagtagagagtaaacagaaaatctgaggcgcgagtggctggtgaaggcagcgactgcgagggaagggaagcatctttagctccaaatccaatggcggatacctcaagccgatcaagagacctcgacaagctccttctccgccctggcaatctcgtcggtcctaggttcgaacctggccctgagttgcgagatgaccttcaggccttcgccaaagtgttggtggttggggctggtggcttgggttgcgaattgttgaaggatttagccccctctggtttccgaaaccttgaggtcattgacatggatcgcat

SEQ ID NO: 27812 - DNA, 406 bp, Glycine max
ggcacaagtgagtttgttgatcgagataactagaaacagtgtgatgaaaatgaaggtccttgttttcttcgttgctacaattttggtagcatggcaatgccatgcgtacgatatgttccctctccgaatgaacactggctatggtgcccgtactccggaggtgaaatgcgcaagttggaggcttgctgtggaagcacacaacatctttggctttgagaccattcctgaagagtgcgttgaagcaacaaaggaatacatccatggcgaacaatatagatcagactccaaaacagttaaccaacaagcttacttttatgccagagacctcgaagtccatcccaaggacacatttgtgttcagtatagatggcaccgtactctctatttttcatactacaaaaaacatg

SEQ ID NO: 27813 - DNA, 394 bp, Glycine max
gaagaaagagatgagaacaaacaagaatcaagagagagaggtgttactacgttagtctatgaacagtcaccccgagagactgaaatttccagaccctcaaatcaaactcttctattctctcatcaatcaatcaatccagttccctctcggataggaatgggaatatatctcagcactccaaaaactgaaaagttttctgaagatggtgaaaatgactgtcttagatatggtttatcatccatgcaagggtggcgtgcaacaatggaagatgctcatgctgcatatactgatctggatgagtccacttcattttttggtgtctatgatggccatggaggtaagggtggtgcaaagttttgtgccaagtttcttcatcaacaggtgttcaaaagtg

SEQ ID NO: 27814 - DNA, 350 bp, Glycine max
gacagcagtgaagtgagttaaaagaaccgataatagttgttccttcactctccgctctctctgccactgagccaagaagatggcctcacaggtttgcaaatctgcttccagagccgcgaggtcccttctatcctctcgttttcactctcaaggacgtgcgcttggggctgctgcggctgtttcattgagcagcaaagtgcctcttttttacggaaagaacggttctggaaatggatccgcttcttcatcatcatcatcatcatggatttcaggagctcttgctcttcctgccgcagcttacatgttccaagatcaggaggtgcaagcagctgagctggagcgcactttca

SEQ ID NO: 27815 - DNA, 309 bp, Glycine max
gattcttagtgtcttactccgaacagtgaaccctgacctagcaatcaaccctaccattccaaagctcgaaggtgaacagtgagtgagtgagttattcagaacccaggatttggcgaaagtgaagcgatgagcagtgataggaatattggggttgccttggacttttccaaaggaagcaaaatcgctctcaaatggtctattggcaatcttctccgcatcggtgacatactctacatcgtccacatcaagccttccggaggaagtgaattccgaaatcttctctggccaacactggttcacctctaattc

SEQ ID NO: 27816 - DNA, 410 bp, Glycine max
gattggtggtttggtatacaactaaatccacagttcatgggtatcgacctcaaatttttctttgttagagctggaatgatgggatggctacttatcaatttatctattcttatgaagagcattcaagatggtactttgagccagtcaatgattctctaccagctattctgtgcactatacatcctggactattttgtacatgaagagtacatgacatccacctgggacataattgcagagagactgggcttcatgttggtctttggagatttagtgtggattcctttctctttcagcatacagggatggtggctcttgatgaacagggtggagttaacaccagctgccattgtagctaattgctttgtgttcctgattggatacatggtatttcgaggagcaaacaagca

SEQ ID NO: 27817 - DNA, 378 bp, Glycine max
ggaccaagtatagtttcttcagctcagccttcacaagcacctcataaggatgttgaagtggttcaggtatcttcaacatcatctcctgagccatctgtgccagtttctgctgaaactcaaccaccaatactgccattgccagtaacatcacggcccagttacaggcccggtggagctcctagccaaactcatcatggctataattatagaggacgtggaagaggaaggggaactgggggtttacacccagtcacaaaattcactgaggattttgatttcatggcaatgaatgagaagttcaaaaaggatgaagtatggggccatcttggtaaaagtaagtctcattcaaaagaaaaagatggggaagaaaatgccttt

SEQ ID NO: 27818 - DNA, 407 bp, Glycine max
ggggcatttaaagctaaaattaattatttaagccgaaaagagcatccgactcgtgcttgctctctctgtggttttgggtctctctcactcacaggcacagcatcagcaccatggaaggcgcaacgatgttactgttgtcgccaatatcgagctgcaacgtgcgcagtaagcatttaaactactcactcagaaggcgtagctgttattcttctcccagggcactgaaaatagtgagcatggcgaatgagggaagcgacaccggcaacggcgtgggtgaaaaagcagccatagcgggtggattgatctcaaccccagtaattgcttggtctttctatactctcaaaacaacaaggtgcggtcttccccaggaccaggtgggtcaattggagcattggagggtgtgagct

SEQ ID NO: 27819 - DNA, 337 bp, Glycine max
tggggagccagagtgaagagcgaagagaatggctcccaagggtttaatctttttggctgtgttatgcttctcagcactgtcactgagtcgttgtcttgcggaggataatggacttggtatgaacttctacaaggaatcatgccctcaggctgaagacatcatcaaagaacaagtcaagcttctctacaagcgccacaagaacactgctttctcctggctcaaaaacatcttccatgactgtgctgttcaaagttgtgatgcttcactggtgctggactccacaagaaggagcttgtctgagaaggaaacagattgaagccttgggttgagaaatttc

SEQ ID NO: 27820 - DNA, 352 bp, Glycine max
caacggggcgacagagggtgatacagggagcaaaagggtgactcgtgagtccttagtatcgggtggtgacaaagaaagagctcaaaaacccgatgatgtaatgtcgactctcgcatggaataagccatgattctcttgcgtctgaatgcattaggttttcgagtcaaaccttcgtatattgctttttgagggaaaatctttatgtattgatacatggcgaatgaattcacattgtctttactagaaaatgaatgttaaggagatatatattgggcttttcacgagaccaatggtctataattaactgttctacatttataacttggataaaatatttgatgcatgcctaggc

SEQ ID NO: 27821 - DNA, 337 bp, Glycine max
ggccttggtattgggaaagttattgaaaatggaggagttggaggaagcctaaccgggataacaattggtaccgtgacccaaactgataaagtttggagaaccatgcaagctcttggtgacatagcctttgcttattcatactccctcatccttatagaaattcaggacacagtgaaatcccctccatcagagtcaaaaacaatgaagaaggctagtttcatcagtgttgcagtaactagcattttctacatgctttgtggttgctttggttatgctgcttttggagatgcaagccctggaaaccttctcactggttttggcttctacaacccatact

SEQ ID NO: 27822 - DNA, 357 bp, Glycine max
ggaggcaaggagttgtattttggcatccccgtggcttcaagaagagaatctcaatggaggcccaggagctgaagcgcgtgttccagatgttcgaccgcaacggcgacgggagaataacgaagaaggagctgaacgactcgctggagaacctgggcatcttcatctctgacaaggacctgagccaaatgatccagaggatcgacgtcaacggcgacggttgcgtggacatggacgagtttggggagctgtatcagaccataatggacgagcgcgacaatgaggaggacatgagggaggccttcaacgtcttcgaccagaacgccgacggcttcatcaccgtcgacgagttgaggaccg

SEQ ID NO: 27823 - DNA, 418 bp, Glycine max
gattcatcttcaacttatattctgcataaacacatcaaactattagcaatttagcaccttctactactttgtaatcgttcaagagttgtgaactgtgaagaatgagttcaacaagccgtgcttggacttggagcgtggcagcaagtgttggagtggtggaggccttgaaggaccagggtatatgcaggtggaacagtgtgatgagatcagcacaacaacatgctaaacataatatgaggtctttgtctcaaaccaagaagttttcttttcaatcatctgcgatggcttctgccaaattgaaagatgagaaagctaagcagtcagaggagtctttgagaacagttatgtacttgagttgctggggtcccaactaaacaaagatgctaagacttcatgcaattttggatttccctttttt

SEQ ID NO: 27824 - DNA, 414 bp, Glycine max
  modified_base (391)..(391): a, c, g, t, unknown, or other
ggactcaaagtgtaagtgctgctccgacaacagaggtgaaacaaaccaactacccacctatggcggcctctgttgtagtgtctacctctctgtctgtgtgtttcaactatggctatcatcgtcgtccatccatttccgctctctcttgtcattcgaattccatcaccaaaacaaacctaaaactcagttcgcaatgtttctccaactcgaattcggtagccccgatttattgccgcaagtttgttgctcgcacttcaattggagaaaacgagagcgagagcgagaaggagttagggttcgtgggggaggactctgcggtgtttgaattgggcaaacagaaagtatcttcgtggatttatttcaccgctattttgggagtcgttctctatgntcttaacgtcgcatggattgata

SEQ ID NO: 27825 - DNA, 183 bp, Glycine max
gctacacgaaggtgggatcattcgtcaatggagccagtgtggtgattatcttccatcccaacacggttaactcatgtggtggtgatcttgcgatcccattatgaccaaggcttctattagctcgaaacacactacatctttggccacagcactgtctcatcatcatgagatctgaattgactg

SEQ ID NO: 27826 - DNA, 399 bp, Glycine max
  modified_base (335)..(335): a, c, g, t, unknown, or other
gttgccaagaaatttggtgttaagctaaccatgttccatggtcgcggtggaactgttggaagaggaggtggacctactcatcttgctattctgtctcaacctccagacacaatccatggatcacttcgtgtgacagtccaaggtgaagtcattgagcaatcatttggagaacaacacttgtgctttagaacactacaacgtttcactgccgccactctagaacatggcatgcaccccccaatttcgccaaaaccagaatggcgtgctttgatggatcagatggctgtcattgctactgaggaataccgttccattgtattcaaggaaccacgctntgttgagtatttccgcctggctacaccaagagtggagtatggaaggatgaatattggaagtcga

SEQ ID NO: 27827 - DNA, 325 bp, Glycine max
ggcggccaagaaaagaaaatcctcacccattttcttcgtagccaaacactctgaaattctcagttatgtcgtggcaagcgtatgtggatgatcacctactgtgtgaaatcgaaggtaaccacctcactcacgccgctatcatcggccaagacggaagcgtttgggctcagagcaccaacttccctcagttcaaacctgaggaaataactgccatcaataatgactttaatgagcctggatcacttgctccaactggattgtatatcggtggcaccaaatacatggtcatccagggtgagcctggtgctgtcattcgagggaagaa

SEQ ID NO: 27828 - DNA, 397 bp, Glycine max
ggagcaagagtgaagagcgaagagaatggctcccaagggtttaatctttttggctgtgttatgcttctcagcactgtcactgagtcgttgtcttgcggaggataatggacttgttatgaacttctacaaggaatcatgccctcaggctgaagacatcatcaaagaacaagtcaagcttctctacaagcgccacaagaacactgctttctcctggctcagaaacatcttccatgactgtgctgttcagagttgtgatgcttcactgttgctggactccacaagaaggagcttgtctgagaaggaaacagatagaagctttgggttgagaaatttcaggtacattgagaccatcaaagaagctttggaaaggggatgcccaggagttgtttcctgtgct

SEQ ID NO: 27829 - DNA, 384 bp, Glycine max
ggacctggggttggtcaaggcactgctgcagggcaagctgtagaagggattgcacgacaaccggaggcagagggaaaaatacgaggtactttattgcttagtttggcttttatggaagctttaacaatttatggactggttgtagcattagcacttttatttgctaatccttttgtttaatcctaaaaaaatagaaatacatatccttttttccgtggacttgctttaccggtcttgctttttcgaattctatttatattaatatttcactcctataattctttatccgttcggacaagaacacaggggaaggactaattgaaaggtgaagaattcacatactgattcgccctctttcttctcttttttaggccaatgaccccc

SEQ ID NO: 27830 - DNA, 381 bp, Glycine max
ggggaacagcaaacaataaggccattcgccagttactgcactttgctgtgtctgatgtgagtgatgatgtcaggaggactgcagttctagcattagggtttgtgttgtactctgatccagagcagactccacgaattgtttccctcctatcagaatcttacaatccacatgttcgatatggagcagctcttgctgtgggtatttcctgtgcgggtacaggtctcagcgaggctatctctttattggagcctttgacatcggatgttgttgattttgttcgtcaaggtgcccttatagcaatggctatggtcatggttcagatcagtgaagctagtgactcacgcgttggaacatttaggcgacaattggagaaaattattc

SEQ ID NO: 27831 - DNA, 414 bp, Glycine max
gaatgaatcgaagctgaaacgcttcatcaccggattctcgctctcaactcagataccaactcggagtttcggactcatcgcctccgattcaaaaccctaactcggacctcaaactcaatcgatttcatacaacatggcttcggatgctgatatggaggactatggatttgagtactcagatgaggagcaagaggaacgggatgttgatattgagaatcaatattacaattcaaaaggtttggtcgaaagtgatccagaaggtgcacttgctggttttgctgaggtagtgcgcatggaacaagagaaggcagaatggggatttaaagctctaaagcaaactgtgaagctctattatagacttggaaggtataaagagatgatggaagcctacagggagatgttgacttacattaa

SEQ ID NO: 27832 - DNA, 316 bp, Glycine max
  modified_base (262)..(262): a, c, g, t, unknown, or other
gatgatatgaagtggaaaacgctgcctccaatgccaaaagcaaactcacatattgaatttgcttgggcgcttgtaaataactccattgtcattgttggaggcacaacagagaagcaccctataaccaagaagatggttttaaacggagaagtagtccagtttaacttgaatactttgaagtggtcagtgattggaaaattaccataccgggtgaaaaccactctagttggattttggaatggatggttgtatttcacttcangacagagagacatgggacctgatgatccatcaccaaaaaaggtcattggggaga

SEQ ID NO: 27833 - DNA, 349 bp, Glycine max
tgtccaaaggaatgcagaaagccgatcaggcacttctctctggatgctctgcgggtggtctggcatccataatacactgtgatgagttcgggagcttgtttggaaaatcttccaaagttaaatgtttgagcgatggaggtttttttcttgatgcaatggatgtatctgggggacgcacactgaggactcttttcggaggtgtggttcagttgcaggatgtacaaaaaaatctgccaaaaagttgtctcgaccaactagacccaacttcgtgcttctttcctcagaatatgatcgaacatgttgagaccccattgtttctactcaatgctgcttatgatgtgtggcaagt

SEQ ID NO: 27834 - DNA, 375 bp, Glycine max
gatggatgacaagtgctaactaagcactttcttcttcttcttcttcatcccttcatcgccaaacacaatgaaggaattgggcgtggttgcaatcctcttttcaatagagttcttggacgttatcgtctacactgtaagcaaagcagccatgaagaagggcatgaatgactttgtctttgtcatgtactccaatgccttcgcaacttgcctcctccttcccataaccttcttcttttacaggaaaagacctcttcctccactcacatatttcatagttgcccaattgtttattaatggctttttaagttgcagtgttcaaatgctcaagttttttggaataggttacagctctcccactttggccactgctatgtc

SEQ ID NO: 27835 - DNA, 345 bp, Glycine max
gaaggcaaaggcagctcctccatctgtaagtgagcccccaaagaagcgtactaaaagatcatcagcctcacaaaaggaaacttcccaggaagaaaaagaacaggagataaaggaagcggaaatgcaagaagctgatgacaccactaaggatgataatgatatagggaaggaaaaggatgttgtaaaggaaaatcaagatgacaagtgtgtggaagatacagatgtcaacaaatccactaattctggagaagaagctaaagctgtagaaaatgttgaggtacctattgacgagaagtccaatgctgctgatggagaactacctgcattgaaagataaagttgatga

SEQ ID NO: 27836 - DNA, 324 bp, Glycine max
tcgctggagagacacgagggggagcgagagaagggggaacgaagaactcagctcagctgaacagagctcttcgactacattatgcgataacttattttctgagaggtcttttttctctctcttcttcacggattcaccatttccatatgattttgtccaaactaaatcgtgatttttacaggaaaatccggagattgactgagcgtgtataggagccggtatcatagggcgcttggctatgatgttttattggaaggactagtagtattgctgtagcacctcacattgtattgtgacaagagtctgagggactattacgatcga

SEQ ID NO: 27837 - DNA, 338 bp, Glycine max
ggacatgtggacagtagcgtgagcttagagggtgtttccattcctcgtctagatgtaaacggtttgatgccatcagagcatttaaatggtactgaaggctatgtaaatgacaaagagcatccttctgaattggaacgtaatcatcactcagctgaagatgtaaagattaactctatggcagacacaggacccagcattcctcaaattcttcatatgatatgcagtgggggtgatggaagccctatttcaagtaaacggactgctcttcaacaattggttgaagcttctataacaaatggtcattctgtttggaccaagtacttcaatcagattttgac

SEQ ID NO: 27838 - DNA, 362 bp, Glycine max
gggggaccttgagttttcggagaaatcaaagaaggagaaggtgagaagcttgagcgctgttgatgaagctttatcaatgggttgccgtgtctctcactctcataaaccaaccaagaaatttaagcttcccagaaagtttctgaaggactgcaatggcgttgatcatgcctctgttccacggaagatacgttcagctgtgaagaaacggggtcgcgaatccatctttggtgattctgaaaaggtgaaccataggatgaacggaatggaatctccccaaaaagatggcataaagaaatccaaaaaacaaagaaccccgggctggtccacgaggctagtctcaccggggcccatcacaaaggatg

SEQ ID NO: 27839 - DNA, 384 bp, Glycine max
agggggagaaagtgtgaaaagggtcgaacaactggtgaagtcattgatggctacagaggaagagagtgcggtgaaggagcctttggatctcattaggctcagcctcgacgagcgtatctatgtcaaactccgttccgacagagagcttcgtggcaaacttcacgcttatgatcagcatcttaatatgattcttggtgatgttgaagaaattgttactacagtggaaatcgatgatgagacatacgaagaaattgtgaggactacaaagcggacagttcctttcctgtttgtcaggggagatggggtgatattggtttccccgccattgaggactgcatgactggactgatgaactatgtgatcattttaataacatgtgtcact

SEQ ID NO: 27840 - DNA, 382 bp, Glycine max
gaggatcagaaggaattttacttttgttcaatatgaatcagaggatgatgctagcagagcactggaagctacaaatatgagcaagttactggatcgagttatttctgtcgagtttgctgttaaagatgatgatgataggagaaatggatatagccctgagagaggccgtgatcgtcaacgtgatagaagccgtgatggaaggcgatcacccagtccttatcgtaaagaaaggggtagtcctgattatggtcgtgggcccagtccatatcagagagagaggggtagccctgactatggccgtgaccgtagccgtagcagaagcccccctaggagggagagagctagccctgcttatggacgtaaaagcattagtccatataga

SEQ ID NO: 27841 - DNA, 358 bp, Glycine max
ggaagaaaataatacgtgcatacatagctatctatttatctatagcaagtgcgtcaagagacacgtggtaccctagctagagtgccattctgtggtttctttctttctttctttctgcatcacatcacaatttgcattgcctcgtgtcctttttcttctttgctctccaaaaatctcacacacacaggtatctagcaaatgggttctcaccaacaagaaccatggctattggagaatgggaaaccaagggttttgaccaaggagaccaggcatggccgttctgcacacagaatgtcctccacctctttgcgcaagaaatctagccgaactcttgtctcaaaagttccatgtgccactc

SEQ ID NO: 27842 - DNA, 396 bp, Glycine max
gacgcagaggggctgaaagctgatgtgaaaaaattcctttacgatcttcggatgcaagcagaagtctttgtcataacgatgaaatgggatgcacagatggatggtggtgggtctcctgcacaagatgagtcaatggatgcatttactagtgctcagcaaagaattgatgattacttaacccaaatgaaggcgacggcgaagagagaaggtactcctctaatggcagatggcaagcccgtggttgtgaacgagaagcaggtcgagaagtttctttacacgacacttaagctcaattcgaccattttgagatattcaagaatggctgctgctgtgttggtgagtctacctccacctccagtgagccacccatcatatttctatatggagtacatggat

SEQ ID NO: 27843 - DNA, 397 bp, Glycine max
gatagcagcatcatacaaagcattgaattcaaaaactaagttcatttcttgtgctttgctttattcctcaaaaccaaacatgtcgaacacatgcggcaactgtgactgcgctgacaagactaactgcaccaagggaaacagctatggtgttatagtagagactgagaagagctacatcgagactgttgacatggatgttccagcagctgagcatgatgggaagtgcaagtgtggcactaactgcacttgcacggactgcacttgtggccattaaggaatatgtatgaaaatgtaattgccatgtgtttggcaatacaaatctccaaataatgtaatctttgtatgaataaatgtgtgctggtatcctacttccaagtctgtgtagtcatgcagtctg

SEQ ID NO: 27844 - DNA, 325 bp, Glycine max
gggggaagaggagttggttcaagcagctgagtatttttgtaggtttggtgcgaagaaggaggatgtggcacgattgattgtagacggaccggagttgttggagcttgatttggaggcatgggtggttgatgtggtgaagctgttgaagtactttggaatgagatcggatgatgtcgaggatgttaggagggattatgctcatgtattggggacagttaagatgggtaatctgcccaatgtgatgagagcgttaggtttacgtgagtggttctttgataagatcaaggatgggaatcatcaattggtagttagttttgcacgagct

SEQ ID NO: 27845 - DNA, 381 bp, Glycine max
ggttttctttctgttattacacaacacactctgtgaaaaagggggagtttcttattccttctagacgcttccattgatcggcgatttctgatacatggcggagcatcacgaacacgaggaagtgaagggtgagtccttgttggagaagatttctgggaagatccacgaccacgattcctcgtcttcgtcggattccgacaacgacaaaaccagcgccactgattccttcaagtctaatgttttcaggcttttcggcagagaaaagcccattcatcatgttcttggcggtggaaaaccggctgatgtttttttatggagaaacaagaaaatatccgcatcgacactcggagttgcgaccggtatatgggttctgtttgaatt

SEQ ID NO: 27846 - DNA, 366 bp, Glycine max
gaaggtgcaagagtttgttgtgagctataagctagtttatcgtgaggagaatatgaagttgtttgttttctttgttgctgcagtagttttggtagcatggccatgccatggcgcaggctaccaaaggttccctctccgaatgaaaactggctatggtgagcgttcttcggaggtaaaatgcgcaagttttaggcttgctgtggaagcacacaacatccgagcctttaaaaccattcctgaagagtgcgttgaaccaacaaaggactacattaatggcgaacaatttagatcagactctaaaacagttaaccaacaagctttcttttatgctagtgaacgcgaagtccatcacaacgacatatttat

SEQ ID NO: 27847 - DNA, 357 bp, Glycine max
gggggcaattttttcaaaacctttttctctctcgcaacctcacctcttcctccttcaatctctttcggaatttcccaaaatccttagtgggaggaagagatggttctgactcagaagcttcacgaagccttcaaaggcaccgtcgagaggattactggcccccgaaccgtttccgccttcaaagaaaaaggagttctcagtgtctctgagttcgtcaccgctggcgataatctcgttgccaaatgccccacctggtcctgggaatcgggtgatccaggcaagaggaagccatacttgccacctgagaaacagttcttgattactaaaaatgtgccttgtcttcggagagctgcatct

SEQ ID NO: 27848 - DNA, 358 bp, Glycine max
gattcacaacacgagcatttgtttcaattccaaagcaaagaggtcgaagaaaaacaagagcaaattgggatcgaagaatttgaagaacaccacaagcaagatgcatgttgttgtggtgctcaacacgcaatcctactgcagaggcctagaacctccttcatcttctccttccgtcgtttccaacaagggaacaaggactttgagtttcaggaggctgctgctgcgtccttctcttgggattcatttatcgcgtagctttgctttaaagtgtgttgttactccgaacccagctgtggaattgccattaactgctgaaaatgtagaaagtgtattggatgaaattcgaccctatctcatt

SEQ ID NO: 27849 - DNA, 305 bp, Glycine max
gcagacattaaattcacagatatcttcagtgggggatgagaagaacgtgctcaatgaaactaatcagaatttaaagaaggaacttcagtctctgatatttgaccttgaagagaagctgaaggaacaacagaaaattgaaggttccctgagatctgaggttgaaactctcaaagttgaggttgctgagaaatctacattgcaaagtcagctggaggaaattgaagggaaactggcacaagctgaatctagactaaatgaagaagttgaaagtggtcaagctgctgcttctcaacgagaagcagatt

SEQ ID NO: 27850 - DNA, 397 bp, Glycine max
ggagggagacggtagcagataagcctaaacacgagactcgcagattccctcaacactggagtcgctggaaaattcattctgggactcaggttacgtttctcccttcctcaatattccatttttctcattctaagaaggcactgcataatctcagtcattatctcacaatgcgattcggatccttaaatcggtgcttggtttgaaccaaacgataagcagtgatatgactatgatggcgtgcatttttaattatttatttgatatccgtttccggcatatctttcaactgttaaccgctaatttaaattcccagggctgttcttcttgttctcattgggactgctatatactgtgttggtcaatcagctgaactgaccaagcatgattcaaaaagggt

SEQ ID NO: 27851 - DNA, 268 bp, Glycine max
gacggaccaactggctagcacattctgtggagagcattcgattttcgagagcgttctgacttcccctagcgcattctatccaagcattacgaacaatgcagttattgatttgccttttgggggactgatggccctaatggccgttctgaacaacatgtgactgctaatatgttgctgatgacatctaacattgacccgcccgacaccatgaaaaccatgcttgaatatgacaacctaatgttctattgtatggtcttacctcacaact

SEQ ID NO: 27852 - DNA, 96 bp, Glycine max
taccgtccggttcccgtcgaccacgcgtcgtacggtgaaagacacgaggggagggacaaaaaaaggggagatggggcgttaaatcaagctacgtac

SEQ ID NO: 27853 - DNA, 315 bp, Glycine max
gattcgagtgtgaggaagtcgtttagttatgggaaactggcgtatgccaatgctgggggggctttttactccagcatgagggtgaatggtgagggtgaggactggttttactacagcaatcacagatcagatgttggggtttcgcataaagaggattctttgaccgtgtcagtgactgatccttatgtgttgcaaagctcaaggcgtattatactgccttggaggaagaggaagttgagtttcagatctcctaaatctaaggtggagccattgctgaaaaatgcttatggcgaaaaatgcggttatgacattgat

SEQ ID NO: 27854 - DNA, 405 bp, Glycine max
ggacacacatgggcaaaaaagaagtgtccaggttcatcctcctgaaccagtctctgtcgaagaaggaaggccctttatatataaaaacctaaactcgtattgttctgagcaacccaggttgtctgttacggattagcatcaaagcaagttaacaaaatttgggtgcgtcctggattgacccttttgccccctctccctcaccctccactaactcctcctttttggtttttataaagcacattcccaatagaggagggtccctacacaacacaacccttcaatgacgtccatggccactttcttcgcccaaaccttctttccctcccactctctctccaaaaccttcgatacccatttcggcccttgcccgaaagtcaacgtctttgtgaacttcaaggcgaggag

SEQ ID NO: 27855 - DNA, 367 bp, Glycine max
ggagatagctgcaaatttgaccatcctgtttgggttccagagggtggaatcccggattggaaagaggctccaaatgttgttacaagtgaaactcctcctgagagaccaggggaaccggattgtccatactttctgaaaactcaaagatgcaagtttggttcaaagtgcaaatttaatcatcccaaggtttcctctgaaaatgctgatgtttcttctggcttacctgagaggccatctgagcccccttgcgcgttctacatgaaaactggaaaatgtagatatggcactgcttgtaaattccatcaccccaaggatatccagattcagttgtctgacgacttgagtcaaaatgttgcacagacacaaa

SEQ ID NO: 27856 - DNA, 367 bp, Glycine max
ggttggaaggatcagcacgacactgatcatcagcaatggcacgcgcacgtgttggtaaagaactgacgctgtattcgtattggaggagctcttgttcccaccgagtacgaatcgctctcaacctcaaagggcttaaatacgaatacaggcccgccaatctgctcaagggagaacaatctcgccctgagtttctacagctcaatcctgttggttgtgtccccgttctagtggatgaccacgttggtctctatgactctttcaccattattatacatttggaagataagtatcctcacaatcctttgctccctcatgttatttacaagagagcaatcaatttccttgctgctttggttgtttactcaac

SEQ ID NO: 27857 - DNA, 265 bp, Glycine max
gacggcacagaggggaagaagaagatggtgtccttgaagcttcagaagcgcctcgccgctagcgtcctaaagtgcggcaagggcagggtctggcttgatccaaatgaagtcaatgaaatctccatggccaattctcgacaaaacataaggaagttggttaaggatgggtttattatcaggaagccgactaagattcactctcgctcccgtgctcgtcgaatgaaggaggccaagagaaaggggcgtcactctggttatggtaagc

SEQ ID NO: 27858 - DNA, 403 bp, Glycine max
ggagattgggaagcattggtggctagccaagctaagctaaaactaaactctttcagtttgttttagcttcagcttcttctgcttcttttgctttttccaccacaaccacaaccatgtcttctgccactgcctccaacactttcttccttcactcttgtttcctcctcttctgtctcctctcggctccttcctgtgtttccatgttctctggtattgagacaggagatttagaaaaaagagatgatttgtttccacagattctaagagacgaggcagtggcagggctttatgagcttgggaaggtgagtgatgctagcggttatttggagaggacattcttgagtcctgcatccatgagggcaatcaatcttattcgtaaatggatggaggatgctgggttgag

SEQ ID NO: 27859 - DNA, 397 bp, Glycine max
gagaggttcaatgtgatgcttcatgaactaaagattgaacacccaaaaggaggaattgctaggagtgaaactgatgcacttgccattgcagcagatattggatacccagttgttgttcgtccttcttatgttttgggtggtcgagcaatggagattgtgtatactgatgataagctggtcacttaccttgaaaatgctgttgaggtggatccagaacgccctgtattaattgacaagtatttatctgatgcctgtgagattgatgttgatgcactggctgactcacaaggtaatgtagtcattggtgggataatggagcacattgaacaggctgggatacattctggtgactctgcctgctctaattccaccagaactgttccttcttcttgcttgg

SEQ ID NO: 27860 - DNA, 405 bp, Glycine max
ggtgatgaggcagtgtctgaaatgtgaaacttgattaggcaaaatggtgagtgaaaatggtgaatagattcctcattctaaaattaacttcatcttttccattcaccaaatccattttctttctctgctgcaacatacatagcccaatgctctctttttctttaacccattcactttagggtttgtttggtaggatgaatggagaagaaaaaacaccggctttggctccaaagagattcatcaatcatcagatacatcaaatgctgtccttagtcttctgaaaacctacggatgctccgaaagccagttctctgtcttgccaagaggttactctcattgctcttaatcaaatctcactacattaaattctgtgagcgaagtaatggggtctaattttcttctcat

SEQ ID NO: 27861 - DNA, 108 bp, Glycine max
tatagggattgaacaactgtctgtaataaacggtcttgagcaaaggtatctggccaaacgtatacctaacactaggcataggttgctgataatttccgctatcaccgt

SEQ ID NO: 27862 - DNA, 264 bp, Glycine max
gacagatcggacggatggcactgacggtttagggcaatctgattccgagaaagttaagactacccctgctggtaaatatctcactgctgccctgaatgactttaatcctgaacaatatgagggactggctgccatttctgatggtgcgaacaaactgatgatgctgattctggatgatgacatcaaagctgtgtgcctccagagaacatgagagccttgctggaactagacatgctgaactcttatttattcgtaatatggcac

SEQ ID NO: 27863 - DNA, 390 bp, Glycine max
gggaccaagtgttgaaaatgcgaaggcctataacgggaacctgattgctcatcttagatcattggttgggacacctttgatgcctgggaagtctgtggacacttacatttttgcactctatgatgaggatctaaaaccaggcccatgatctgaacgtgcatttggtatgttcaaaactgatcgcaccgtgttgtacgatgttggattaaccaagtctagccagcagactccaacaactgcggtaactccagcaccaaacactgctggatggtgtgtagcgaaagctggagtttctgatgctcatgtgcaggccaacattgactacgcctgtagccaacgtattgattgccggccaattcaaccaagatgctcttgttttgagcctaacac

SEQ ID NO: 27864 - DNA, 204 bp, Glycine max
ggcccgaggggattagtgactctctctcctctgtgttctacgcgtttagagagagagaggggggctcatttttcaatcttgcccgcatctttttgcgacttcttatttttcttccgctcctttccttttcttttttttgccactacttccaactccttccattcttatctttctttcactctctatggatgaattggccgctca

SEQ ID NO: 27865 - DNA, 274 bp, Glycine max
cccacgcgtgctgacacccgagaggacgacttaaggggacggctgaaatctaataatcatcgacattcgtcagattatcaacgctgtcacggttgcatccttgaatttgatcatacacgattataagaagatgtacaagcagatcactgagcttaaactactattcaaaaacatgccctcatgtggaatgcattgctgacaaagcagtgaatgacgccactgctagagacaaaactgttccacctgcactgctgcgaatgcacttacatgactg

SEQ ID NO: 27866 - DNA, 348 bp, Glycine max
gatccagagagagatgcaaaagccataaagatttttcttgaggatggtcatttaataggacttgctcagtcatatgcaaaaaatatgggactgtatggccagcgagcaggaagcctgagtgtgctttgtgaagatgagaaacaagctgtggctgtaaaaagtcagttgcagctgattgctagacccatgtacagtaacccacctctccatggagcacttatagtttctactgtccttggtgatccagatttgaagaagttatggcttaaagaagtcaaggttatggcagaccgcatcatcggaatgaggactacactacgagaaaacttataaaagaaggggtctact

SEQ ID NO: 27867 - DNA, 373 bp, Glycine max
ggtgtttggaggtggaaacttagggttgttggagaaattgttctgttggggggatatgatgtcgatggagaaggaagcttcaagctccacacctacgcgcaaattgtcgtgcactgcatgcttcgacgctgtctatttctgctactcgccggttcatcaaatgcagcagtattacaggcttggtaaatttgacaattgttccggcaaatggaaagcgatggttgattgcttaatgctcaagaccaaacccacatctcaagtccaggaagttctggatactgaagagaaatcaaagtttaagtcacatatctggacctttcggacaccagaagaagcttcttactactggcaagaactttatggtcatttggat

SEQ ID NO: 27868 - DNA, 412 bp, Glycine max
gactgtaagataatgtcaatgaagagagaggtttctattttacagagagaaactctttagagatagaaagtcagtgacaagcaccagaagaagtgcctagcacccaaaaacgacaccagattctggataaaaatctaatcttcatcgctcttagatccattgagtttgttcttgcacatcatgattttccccgggtcaacaaccggttgagcacacagaagaaagagaagggtgtgaagagatgggtttgatcatgacccttttgatgagtcacatgcccacctagctcactagttttaatcgcgttctttttcgtgtatgttatgaaatttgttcatgtgggtcatgctaattcccttcgatcgacgagataattcaccttctggttccattcagaattgggttttctttt

SEQ ID NO: 27869 - DNA, 362 bp, Glycine max
gccagtgggacgtgttgagaccggtgtcttgaagcctggaagggtggtgacttttgcaccaactggactgacaactgaagtcaagtctgtggagatgcaccatgaatctcttacagaggcacatcctggtgacaatgtgggattcaatgttaagaatgttgctgttaaggatttgaagcgtggttatgttgcctcaaactcaaaggatgaccctgcaaaggaggctgctaacttcacagaccaagtcatcatcatgaaccaccctggtcagattggaaatggctatgcccctgtcctcgactgccacacttttcacattgctgtcaagtttgctgaactcatgaccaagattgacaggcgat

SEQ ID NO: 27870 - DNA, 361 bp, Glycine max
gagagaaagagggtctctttcgttttggagtattgggtcacagcctcttttaggaatgccaaagttactcaacaacacctcacgctctctgaaaatgctgcaggcatgaaaccgctcattccaaccttcacctccttcttccaaacctctccttcacttgttagatttgttcacattgcaaagggaactttgttgctatggggttgatcgatctgaacaccacggaggatgatgaagctgctccattatctgcttcttcttctcactcggggataagcacttctgcttcaaccttggttggttctcctcctccttctgtgtgcttggaactgtggcacgcgtgtgcgggccctttgatctc

SEQ ID NO: 27871 - DNA, 376 bp, Glycine max
ggacccaggatgaggatcgcgtgagcactcctgtgcagatccgcacaagcattgcatatcaaatcaagcatcctgttccttatctctgtctctgcatttcccttccttcttcttctctctctctctctaaaaccctaattctatacatggaagggaaatctcaaatctaatgactaattaattaatccatcgatcaagcatggagtccgaactcaaagacctcaattcgaagccgccgaacggcaacggcaacagcgttcgcgatgaccgtcctctgctgaagccggagcctccggtctccgccgacagcatcgccgatatggagaagaagttcgccgcttacgttcgccgcgacgtgtacggcaccatgggacgc

SEQ ID NO: 27872 - DNA, 279 bp, Glycine max
gagggaacgactgtctgtaatgaactgctttcagcaaaggagtctgcccaaatgtatgcaaaacacttggcagagcttgctgttaatttaagctttgacgggtggctgttgaatatggaggtatcattgaagccggaacagatttctaacttaaaagagtttgtcaatcatctatcattaacaactcattctttagcgcccggatcaatggtgatatgggttgacagtgacactattaacggggatctatgggggcaaaatgaacttaatgagcattat

SEQ ID NO: 27873 - DNA, 153 bp, Glycine max
gaatgagcggacgtctaaactaaacggactagagcaatttggtttggacaaacttatacctaccactaaggtaaggtatctcaaaaatacaaataacgctaattgtcgaatatcatatcggcgatcggaggacgtatctaaagttgtgacaaa

SEQ ID NO: 27874 - DNA, 313 bp, Glycine max
gatacagactagaccgagctcggttactggttcggactcctctcccgccggcgatcaggatggaggttcgtgttggtgtgggggattcacagtatggggtatgggtagcggaagagatagggcttgaagtcgggtcggcccggaatagaactgcgctgtctgaagggtggtcggaggagatcctttcggaggatgtcggagatgctgacgacgccatcaatgacggcgacactcagccttcctgcttgccggaaccgccccatgggaaacggacaccgtccgatatccaaggggtagagggggagactaacgg

SEQ ID NO: 27875 - DNA, 369 bp, Glycine max
gacggctaaaagctaaaaatcatcgaagtactcaaattagcatggctgtcacggttgcattcttgaatttgatcatcatgttttcagtagtctctacaagcaagtcactgagcttaaactactattcaaaaacatgccctgatgtggaatgcattgttgccaaggcagtgaaggatgccactgctagggacaaaactgttccagctgcacttctgcgaatgcacttccatgactgtttcgttcgggggtgtgatgcctctgtgctgctaaattcaaaaggaagcaacaaagcagaaaaagatgggccaccaaatgttttcttgcatgcattctatgtcattgatgcagcgaaaaaagcactagaagctt

SEQ ID NO: 27876 - DNA, 390 bp, Glycine max
gtacgtcagggctcagaaatcaaaagcctacttcaagagatatcaagtcaagttcaagagaagaagagagggaaaaaccgattatcgtgccaggattcggttgattaatcaggacaagaacaaatataacactccgaaataccgatttgttgttcgctttagcaacaaggacattgttgcacaaataatatctgctagcatcgctggcgatattgctcttgctgcagcatatgcacatgagctgccacaatatggtcttggagtagggcttacaaattatgctgcagcttattgcactggtctcctgttggcccgaagagtcctcaatacacttgaaatggatgaggagtatgaacgaaatgttgaggcttctggagaggattattccgt

SEQ ID NO: 27877 - DNA, 275 bp, Glycine max
ggtgtgtgggatgagaagatgatgaggaaacattggtagaagaaattgaagagagagagagagagagagagagagagagagagggttggattggttttcttcttccttttctctaaagagaatctaatctcaatcctcattacagatttcttcattcctctctcagtcttttctgttttccccctttgacattctcgttttcgccgaaacaaaaacaactaagattttttgtttgttttgtttttcttctccttgttgttatttgactcggttgt

SEQ ID NO: 27878 - DNA, 211 bp, Glycine max
gaggcaggggatgaaggtcctattgtgactgaagctgacatacagcatattgtctcatcctggactggtattcctgttgagaaagtctcaacagatgaatctgatcgcctcctgaagatggaagagactttacataagcgagtcattggtcaggatgaagcaattaaagccattagtcgggctattccgccagcgctggttggaactaaaa

SEQ ID NO: 27879 - DNA, 323 bp, Glycine max
tacgtgttgtagttgctagtttctttgtgaaggttctgcagcttccttggagatggggaatgaagtatttctgggatacccttttggatgccgatcttgagagtgatgctcttggttggcagtacatatctggtagtctccctgatggtcgtgaaattgaccgaatagataatccacagtttgagggctacaaattcggcccaaatggagaatacgtgcgacgctggcttccagaactttcaagattacccactgagtggatacatcattcttggaatgcaccatagtcagtgctacaagctgctggaattgagctaggatcg

SEQ ID NO: 27880 - DNA, 406 bp, Glycine max
gagccttgagtttgataattttgctgaagtgcacaaactctatgaaggtggagttacactacctacaaactttcttagcaagatcgcccctataccagtgatcaaggaaatttttcgaactgatggcgaacagttcctcaagtatccaccacctaaagtgatgcaggtggataagtctgcatggatgactgatgaagaatttgcaagagaaacgattgctggtttaaatccaaatgtcattaagattatagaggagttcccactaagtagcaagctagatactcaagcctatggtgatcatacctgtataatagcaaaagaacatttggagcctaacttatgtgggctcacttgtgagcaagctattcaaaacaaagaagttgttcattttaaatcaccatgacta

SEQ ID NO: 27881 - DNA, 338 bp, Glycine max
ggaagaaaggcagagttattgccattgcctctgcctcttgcaacaccaaactgatacacacttaataatattatagtaaaaattagccaccaaagtacactaaccccttttttcatacaactcaatagctggattggagcaaggtgaaagtaaaatcatttgcaaccaatgccgttgaacatatttcaggacaaagatggattgccacggattatattgactgagccaaagggttcatcagctgaggttcttctttatggagggcagattatttcttggaagaatcatcgaaaggaagaacttctttttatgagcaagtaggctaacaagaaacagca

SEQ ID NO: 27882 - DNA, 340 bp, Glycine max
ggtgcacaagtgagtttgttgatcgagataactagaaacagtgtgatgaaaatgaaggtccttgttttcttcgttgctacaattttggtagcatggcaatgccatgcgtacgatatgttccctctccgaatgaacactggctatggtgcccgtactccggaggtgaaatgcgcaagttggaggcttgctgtggaagcacacaacatctttggctttgagaccattcctgaagagtgcgttgaagcaacaaaggaatacattcatggcgaacaatatagatcagacttcaaaacagttaaccaacaagcttacttttatgccagagacctcgaagtccatt

SEQ ID NO: 27883 - DNA, 427 bp, Glycine max
ggaacaagggagaacttctgagtttcctgactgaaatcactgcagatatatttggaattaaggatgatcagggagatggatatcttgttgacaaggtcctagacaagactggcatgaaaggcactggtaagtggactgttcagcaagctgctgaattatcaattgctgctcccactattgaagcatcattggatgcaaggttcctgagtgggttgaatgaggaaagagttgaagctgcataggtctttaaatcaggtggtattggtgatatcgcgactgatcaacctgtagactagaaaaaattgatcgatgatgttaggaatgctctatatgcagccaaaatctgtagttatgcacaaggaatgaatttgatccgtgcaaagagtattgaaaagggttgggacttgaagttgggtgaactggcccg

SEQ ID NO: 27884 - DNA, 429 bp, Glycine max
ggttgtgaatcaacataaatattccgttttgcgtttctctgcctaaaaggattgaaagatgggtcaagcactaggttgctatcaagttgatcagtcaaatgtggttatcaaggagcattttggaaaatttgatgatgtcctagaacctggatgtcattgcctgccttggtgtcttgggtaccagattgctggtagtttgtcactgcgtgtgcagcaacttgatgttcgatgtgagacgaaaaccaaggacaatgtctttgtcactgtggttgcatctgtgcaataccgagctgtgtctgagaaagcatctgatgcattctataggcttaccaacacaagggagcagatccaatcatatgtttttgatgtcatcagggccagtgtaccaaagttggagttggattctgtctttgagcagaagaatgatat

SEQ ID NO: 27885 - DNA, 376 bp, Glycine max
gtgtgcagtggtggttgtagcacttcttcttctggcggaggtggggcccatggctgaggctgtgacatgcaccccaacagagttgagtccgtgtcttccagcaatcacttccggtgctaaaccttccaatgcttgttgcacgaagctgaagcagcaaaaaccatgcttatgtggctacctcaaaaacgctagcttgaagcagtatgttaactctcctaatgcccgaaaaaccgttgcttcttgtgggattccctttccaacttgttaattaattaagccttcttataattaaagtgtgggatatatatatatatatagataaacagtttaatttatacacactttgatcctaacaagcatcttgacacaagcattc

SEQ ID NO: 27886 - DNA, 216 bp, Glycine max
gatggtcagtagtaggtaacttggtttctcttcctcgatgtgatcgatcgttccttctctctcttgtgtttatgccaggaatgacagcgtatcagtggcagtgcaggaaacgagagggagagttttcattgggaaggtaaaagcctttgtttgtagcaatgccttacatgaacccttgccccccttcttttggtcggtaccactaacttatcgttt

SEQ ID NO: 27887 - DNA, 366 bp, Glycine max
gaattgacccatcgacccacccagacgaccacacacgcgtacggtcacttgtacgtttcttggtttctcttcctccatttgatcgagcgatccttctctgtcttgtggttatgccatcaatgacaccgtatcagtggcactgcactaaacgagattgagagctttcattgtgcaagtaaaagcctatgttcgtaccattgcctcacattaacccttgtcccccttatctcgttctataccactaactcatcggattctcaatgcgccccgcgtacgttctgctgtgaactctcactcactattgtcaccgtgtaaccactagaatcatacttagtggcatggcaagaattaatttatgattaacct

SEQ ID NO: 27888 - DNA, 332 bp, Glycine max
ggccaaagggaatggataaaagtttgcagtcaacaggtagaggacgtgaagttactgtcacgaatgatggcgctacaatcttgaagtccctccatattgataacccagctgctaaagtccttgttgacatatcaaaagttcaagatgatgaagttggggatggaactacctcagttgttgtgttggctggtgaacttttaagggaggcagaaaagctggttgcaaccaagattcatccgatgacaataatatcaggttttcgaatggcagcagagtgtgctcgtaatgctttgttggagaaggttgtggacaataaagcagattctgagaaa

SEQ ID NO: 27889 - DNA, 327 bp, Glycine max
gaagcctttgatatataccgatcatgtttgagaatcacaagaatatggtgcaactcaaggtcgtagcctcaaccttggtggtgttgtggtcatggtggagctttgatggtgcaattggagaccctcaactctttttactcaaatgggagtgcagcgtagtcgcagtacacgacttgctcaacttcaaccaaaatctaaacgcacgtttggtcgaccttagagcacaagtgagcaaccaaagaaaacactttgccacggctcaatcaaccagcggagcagacccagtccatgccatgttccaatgcaagaactacctcttcatcaatg

SEQ ID NO: 27890 - DNA, 365 bp, Glycine max
gaagagggtgtttgcaaacatgcctttgagttgatttttgcatttgatgaagtcatctctcttgggcacaaggaaaatgtgactgttgcacaagtgaagcaatactgtgagatggagagtcatgaagagaagctgcacaagttggttttgcagagcaagattaatgaaactaaggatgttatgaagcgaaaagctagtgagattgataaaagcaagattgaaaagaacagaggtgataaaggaagatttggtccattacagtcaatgggctctggaagaattgaaaatagctttagtgatttgagcatatctagcagttgaactggttttggaagtggctctggttttggattgacttctgatgt

SEQ ID NO: 27891 - DNA, 418 bp, Glycine max
  modified_base (386)..(386): a, c, g, t, unknown, or other
ggagcgaagagtgaagagaatggctcccaagggtgtaacctttctggctgtgttaatatgcgtttcagcactgtcactgagtccttctgttgcgggggaagggcaaaataatggccttgttatgaacttctacaaggaatcatgccctcaggctgaagacatcatcacagaacaagtcaagcttctctacaagcgccacaagaacactgctttctcctggctcaggaacatcttccatgactgtgctgttcagagttgtgatgcttcactgttgctggactccacaagaaggagcttgtctgagaaggaaacagatagaagctttgggttgagaaatttcaggtacattgagaccatcaaagaagctttggaaagagaatgccctnggagttgttcatgtgctgatatcctcggtctc

SEQ ID NO: 27892 - DNA, 350 bp, Glycine max
ggacaaatgattgatttacctattcaaagcaatttgcgcgaagggctttctttaacagaatatataatttcttgctacggagctcgtaaaggggttgtagatactgctgtacgaacatcagatgctggatatcttacacgcagacttgttgaagtggttcaacacattgttgtacgtcgaacggattgtggtaccattcaaggaatttcggtgaatacccagaatggaatgatgccggaaagaatatggatacaaacattaattggtcgtgtattagcagacgatatatacagaggttcacgatgcattgccgttagaaatcaagatattggaattggacttatcaatcg

SEQ ID NO: 27893 - DNA, 413 bp, Glycine max
gactgattgaatattttcagaatatacctggggtgccaaagatcaaggacaattataatcctgcaacctggatgttggaaactacctctgcatctgtagaagcataacttaaaatagattttgcacaaatatataaagagtcacacctttgccgggatacccttgaattggtgagagagttgagtgaaccaccgccaggtacaaaagacttgcacttttcaactcgcttcccacaaaatagtttgggacagtttatggcatgcctttggaagcaacacttgtcttattggagaagtgctgagtacaacttaactacgttcattttcatgattggttgtgcaatcatgtttggagcagtattctggcagaaagggaataaaatgaacaatcagcaggatttgctcaacgtactt

SEQ ID NO: 27894 - DNA, 373 bp, Glycine max
ggctgtgagtgagattacccatagatagagagcgcggcatagcctaaacttacccttcttctctctgtgtgtgtgcgcatcaaacgcaaccagaagcagccatggccactgcaagaactgtgaaggacgtttctcctcatgagttcgtcaaagcttactcttctcacctcaagcgatctggcaagatggagctgccagagtggactgatattgtgaaaactgcaagatttaaggagttggctccttatgatcctgactggtactatgtcagagctgcttccatggcaagaaagatctacttgagaggaggacttggtgtcggtgcctttcagaggatttatggtgggagcaagaggaatggtagccgccctcc

SEQ ID NO: 27895 - DNA, 274 bp, Glycine max
ggccttcaccttgatctatcttgtcagcacaggaaatagtatcttcgtttgttcaatatgtttggttcatcaggcatggcacaggaatctggtatgttcatggttagccagacaattggcagtgttttgtgctgcaaatgtggaattccaatgcaacccaatgctgctaatatgtgtgtcaagtgtctgcgatcggaagttgatattacagaaggactgctgaagcgtcttgtgctggtgcattgccctgagtgtgagagttacttgcagccac

SEQ ID NO: 27896 - DNA, 411 bp, Glycine max
gatggtcagtagtaggtaacttgttttctcttcctcgatttgatcgatcgttccttctctctcttgtgtttatgccaggaatgacagcgtatcagtggcagtgcaggaaacgagagggagagttttcattgggaaggtaaaagcctttgtttgtagcagtgccttacatgaaccctcgccccccttctcttgttcgctaccactaactcatcgttttctcagtgtgccccgcgtgcgttctgctgtgtcctctcactcacaggtgtaaccgtgtaaccactagaatcatacttagtggcatggaaagaaagaaagaaagattaacctaaaaaccctgtgcaggctttcccagaaaagccaagtgagaaaaccaaaccctctattaccacttactacttacttcatgtaact

SEQ ID NO: 27897 - DNA, 324 bp, Glycine max
ggaggcaagaagttgtattttggcatccccgtggcttcaagaagagaatctcaatggaggcccaggagctgaagcgcgtgttccagatgttcgaccgcaacggcgacgggagaataacgaagaaggagctgaacgactcgctggagaacctgggcatcttcatctctgacaaggacctgagccaaatgatccagaggatcgacgtcaacggcgacggttgcgtggacatggacgagtttggggagctgtatcagaccataatggacgagcgcgacaatgaggaggacatgagggaggccttcaacgtcttcgaccagaacgccg

SEQ ID NO: 27898 - DNA, 335 bp, Glycine max
  modified_base (305)..(305): a, c, g, t, unknown, or other
gggggcagagactgatatatggtatggtcgtctctgagtctgaagatctgtgagttaattgcatttgcagagagagagagagagagggaagacggttgtggggattcgatgggggccaccgttcactcgccgctagtcacttatgcttccgtcatatctctgcttacactctgccctccgtttgtcatacttctatggtacaccatgactcttgctgacggatctgtttccgagacattccattatttaaggcagaatgggttgcaaggtttgctacatatatggcccacccccacttccaccgnctgcaaaatcattgcagtctatgctgcatt

SEQ ID NO: 27899 - DNA, 283 bp, Glycine max
gactcagcaggagtatgtgatcaactgtacgagagactatcttgaggagaatatgacgctatttgcattggctgatacagcaatagtaacaccatgatgacgcgcccacgatacactctaccaagaaatccacactgtcatgagaaccggttctatatacatgatcttcgccgtaaaaatggcatcaactatgatcagctgatgttctctcttcgacacatcgtctagaatggtcactgtagcgtgcaacgaatcaacctaggactacatctatggcaaacac

SEQ ID NO: 27900 - DNA, 330 bp, Glycine max
ggagggagacggagacgattttacaaggaagatctgaaattctgaattcttaactggaatcagggttttggttttttttcattatcttcctcagtaagcaatgtcttctcccgcggagttttatcactctcttccgccaataacgaaggcatatggcaccgtttgcctgttggctaccgcaacttaccatcttggattatatcatccagcttacattgcactattctacgataaagtgttctacggttttcaggtttggaggttgttcacaaacttatttttccttggaccattctctatcaattttgggatccgtctcctaatgatagt

SEQ ID NO: 27901 - DNA, 402 bp, Glycine max
  modified_base (376)..(376): a, c, g, t, unknown, or other
gaagacaagagtgattagggttttggtttggtgtttttcttaagcttgagatcaggaattaatttcagaggttcagagaatggcaacggattcttctaatggtaatggacatcaccaaacaacaacaaagcaacctcctttgccgtctcccctgcgcttttccaaattttttcagtccaacatgagaatcttggttactggaggagctggattcattgggtctcacttagttgacagattgatggaaaatgaaaaaaatgaggtaattgttgctgacaactacttcactggatccaaggacaacctcaaaaaatggataggtcatccaagatttgagcttatccgtcatgatgtcacggagcctttattgatcgangttgatcagatctaccatcttgcatg

SEQ ID NO: 27902 - DNA, 343 bp, Glycine max
ggaggttgcagacttagaaagagagagagagagagaatgggtctcatctcaatgcaatttaggttctgaaaaccaaagcttttcataggaaaagttgtgctaagatgccagggaaacctgacactgatgattggcgtgtagagcgtggggagcagattcagtttcagtcttccatttactctcatcatcagccttggtggcgcggagtgggggaaaatgcctccaaatcatcttcagatgatcagttaaatggttcaatcgtgaatggtatcacgcggtctgagaccaatgataagtcaggcggaagtgttgccaaagaataccaaaacatcaaacatgccat

SEQ ID NO: 27903 - DNA, 415 bp, Glycine max
ggagacagagagaatgagtacggtgggagaagggaaggtgagtagtaatggtcatggatgttgcaaatcagggccaggctatgcttccccactggaagccatttctggtcccagagagtctctcatttatgtaacctctgtctacacagggaccggaatagagaagccagactatttggcgacagtggatgtggatccaaactctccaacttattccaaagtcatccataggcttcctgttccttatttaggtgacgaattgcatcacacaggctggaattcatgcagctcttgccatggagacccctcagcagaccgacgatttctcatcgtacctgcactcgtatcaggtcgagtatatgtggttgatgtgaaaacaaatccaaaggctccatctttgcccaaagttgtcgag

SEQ ID NO: 27904 - DNA, 367 bp, Glycine max
ggcagcgcttgatttgaggccaggcaagccccactcaaccaccacacctctcctcgttcacgctacccctttctgctcttcttctacctttcaagttttaaaagtataaagatggcagagacattcctatttacctcagagtcggtgaacgagggacaccctgacaagctctgcgaccaaatctccgatgctgtcctcgacgcttgcctcgagcaggacccagacagcaaagttgcctgcgaaacatgcaccaaaaccaacttggtcatggccttcggagaaatcacgaccaaggccaacgttgactacgagaagatagtgcgtgacacctgcaggaacatcggcttcgtctcaaatgatgtgggac

SEQ ID NO: 27905 - DNA, 162 bp, Glycine max
gactgaagtatcagctaggagctagctcatgaggggggggtacttggccttgtgatgcaggagatcgctctcataaatgctgcgcttgtgtgcgtcaatatgttgaatccgaatgattgtgagcactctggagctgaacactttgttcaatggccatccata

SEQ ID NO: 27906 - DNA, 351 bp, Glycine max
gactccgatatcgctcaagttttgtcctccatgggagggtccattgactatttcacgactggtgcgggttgaacctgcccttattttgtgtgcgtcaccgtctctgatctgcctgctgtgcacacgatagacatggatgcactctacaacgtccagagatagcacccttacactgtttcttttactgcggatcaccccacttttacggcgctgtttaaaatgccacctatggaggatgaccccacttatggtcctattatttgcagcattgctctcatgaagctagctactgcccttgaacgccaagccaacgcaatgatcaatgtaggttctgaacaactcacattgatg

SEQ ID NO: 27907 - DNA, 281 bp, Glycine max
gacctgaaaatctagtttcttacaaggctctactctactgcttcaccttctgctctagaaaattcagtggtgatacatggcttcggctactctctctgtagccaaaccagcccttcaggcaaatgggaaaggcttctctgaattctctggcctccgcagctcatcaggcttccttcccttttctagaaaatcttcagaggatttccattctgtcgttgccttccagacctatgcagttggaagcagtggaggatacaagaaaggtgtgacagaagcaaaac

SEQ ID NO: 27908 - DNA, 410 bp, Glycine max
ggacacgacgagtacatcgtaaaaggaggcagggatttgtttcacttgttgcccgatgctttcaaggggatcaagcagattggtgttatcggttggggatctcagggacctgcgcaggctcagaatctacgggactcacttgctgaagcaaagtctgatattgtggtcaagattggactcaggaagggttctcgttcctttgctgaagctcgcgcagctgggttttctgaggagaatgggactctaggtgatatatgggaaactgtctctggaagtgatcttgtgatgctggtaatttctgattctgcacaggctgataactatgagaagatattgtctcacatgaagcccaacagtatacttgggctttcccatgggtttcttctttggcatttacaatcattgggact

SEQ ID NO: 27909 - DNA, 286 bp, Glycine max
  modified_base (243)..(243): a, c, g, t, unknown, or other
ggagagtgagtgagatagagagagacgcctcgcaaatctcaatcgaatctcagaaaaatgagagaaatcatcagcattcacataggtcaggccgggatccaagtcggaaactcctactgggaactctactgcctcgaacatggcatccagcccgacggcatgatgccttctgactccaccttcggtgtagcccacgacgccttcaacaccttcttcagcgaaaccggatctggcaagcacgtnccccgtgctgtcttcgtcgacctcgaacccaccgtcatcgacg

SEQ ID NO: 27910 - DNA, 393 bp, Glycine max
ggcctacgcagagagaaattgagtttctgagataaccacttttctctttgattcatcaatggcaaccgcgaggaccgtgaaggatgtttcgcctcacgatttcgtgaaggcttacgcctcccatctcaagcgttccggcaagatggagcttcctgagtggactgatattgtaaaaacagcaaaatttaaggaattggctccatatgatcctgactggtattatgttagggctgcctcaatggcaagaaagatttatttgagaggcggtcttggtgttggggttttccagaggatctatggtggaagcaagagaaatggaagccgtcccccacatttctgcaagagcagtggggctattgcaagacacattctgcaacaattgcaaaacatgag

SEQ ID NO: 27911 - DNA, 335 bp, Glycine max
  modified_base (277)..(277): a, c, g, t, unknown, or other
gacggctaaaagctaaaaatcatcgaagtactccaattagcatggctgtcacgggtgcattcttggatttgatcatcatggtttcaagaatctttaccagccaggcacttgacctaaacctccattcaaaaacctgcccttgatgtgaaatgcatggttgccaagcaggtgaaggatgccactgctaggggacaaaactgttccagctgcacttctgcgaatgcaacttcatgactgtttcgttcggggtgtgatgcctctgtgctgctaaattcanaaggaagcatcaaagcagaaaaagatgggccaccaaatgttccttgcatgcattctat

SEQ ID NO: 27912 - DNA, 348 bp, Glycine max
ggaaggagtgaggtagcaacagcactgccactgccactaccaatagcagaatgggaaccttgggcagagctttctacgccgtcggattttggatccgcgagaccggccaagccatcgatcgcctcggctctcgtctccaaggcaactacctctttcaagaacagctatctaggcatcgacctctgatgaatctgttcgacaaagctccctcggttcacagggatgcatttgtggcccccagtgcctccctcctcggcgatgtccacgttggcccagcttcctccatttggtatggatgcgttctcagaggtgatgttaacagcattactattggatctggaactaata

SEQ ID NO: 27913 - DNA, 296 bp, Glycine max
  modified_base (118)..(118): a, c, g, t, unknown, or other
  modified_base (152)..(152): a, c, g, t, unknown, or other
  modified_base (161)..(161): a, c, g, t, unknown, or other
  modified_base (251)..(251): a, c, g, t, unknown, or other
ggcacaagccggatatggttggtggaccttggtctggacccagaggatgtgaattgtgctaatgatacacctaaacttgtaattctgacccacttgatttagctcattgagcattgtngatgttactatggaactcatcgcttatggccaangaagcgcangatgtctgaaagagatgcagcttttgggttgaatacttctgtgggcttgggaggttatcttggtataatgggttctcgaagagatgttgntactgcaacgtggaaaactggcctttgaggggtctggtacaagtg

SEQ ID NO: 27914 - DNA, 381 bp, Glycine max
gggcgtgttatagatgttaaaggcacaacagttcgtgttgagttggaatcccaaatgaaggttgtgacagttgaccggaaccatatatctgacaatgtggctgtaaccccatatcgtgatacatctcgctatggaatgggaagtgaaacaccaatgcatccttctcgaactcccttacatccatatatgactccaatgagagatcctggagcaacacctattcatgatggaatgagaacacctatgcatagccgagcatggaatccttatactccaatgagtcctgcaagggataactgggaagatggaaatccaggctcttggggagccagtccacagtatcagcctggaagccctacttcacgggcatatgaagcccca

SEQ ID NO: 27915 - DNA, 428 bp, Glycine max
gacgccgagatcagccaggagctgccggttgagaagggttccatttactcgctcacgttttgtgcggctcgcacctgcgcgcagtttgagtccatcaacgtctcggttctgcctgcgtcgcagacgatagacctgcagacactctacaacgtccagggatggaacccttacgcggtttctttcaatgcggatcaggacacttttaggttgctatttaagaatcccggcatggaggatgaccccacttgtggccccatcattgacaacattgctatcaagaagcttttcactcctcttaaacccaaagacaatgcagtgatcaatggggattttgaagagggtccatggatgttcaggaacacttcactgggtgtgttgcttcccacaaatttggatgaagaaacttcatcactgccaggttggatagt

SEQ ID NO: 27916 - DNA, 338 bp, Glycine max
ggagcgagtgatgctcatcacatcatgtgcttccaaaactgatctatttcccttctccttcttacttctgtcgttctctctgctgcaaatccaaaaaccaccaaatcgcggttccaaattgcaatttctcgagcgaactttgcgagttctagggttcccccactgccatggaccaggccgaattaacctccgaacaggttctgaggagggacatcccatgggagacctacatgtccaccaagctcatctcaggcaccagccttcagctcttaaggcgctacgatcaccggccagagagtcacagagcacagttgctcgatgatgatggtccctcttat

SEQ ID NO: 27917 - DNA, 408 bp, Glycine max
gagagcgaagagtgaagagaatggctcccaagggtttaacctttctggctgtgttaatatgcgtttcagcactgtcactgagtccttctgttgcgggggaagggcaaaataatggccttgttatgaacttctacaaggaatcatgccctcaggctgaagacatcatcacagaacaagtcaagcttctctacaagcgccacaagaacactgctttctcctggctcaggaacatcttccatgactgtgctgttcagagttgtgatgcttcactgttgctggactccacaagaaggaacttgtctgagaaagaaacagatagaagctttgggttgagaaatttcaagtaccttgagaccatcaaagaagctttggaaagagaatgccctggagttgtttcatgtgctgata

SEQ ID NO: 27918 - DNA, 423 bp, Glycine max
ggatgaggaaccaggcgatgatgaagaaagcagtggccaaagacaatacaagcttcccatggcaaatatcattcctttccccaagagtaatgatccttctagcgctcctgatttccctcctggaaaacatgttttggcggtctatccaggaactactgcactttataaagcaacagttgttcaaggccctcgcagaaggaagaccgaggattatgtgttggaatttgatgatgatgaggaagatggatctttacctcaaaggacagtgccattccgcaaagtggttcctcttccagaaagacatcgccaatgagtttgagtataagctatttattatggttgtgtataaagcagaaactagaccattgcatatgtgccacttgtgtaatatgctccgtgtgatgtggtttgtaagaatgacat

SEQ ID NO: 27919 - DNA, 381 bp, Glycine max
  modified_base (289)..(289): a, c, g, t, unknown, or other
ggcggcgcggcagagcaaatacattgcaggttatctttcatctcagaacgtctgatttgagcctctctcagtgacaacagtttctgagtcttactgatcttttcttctctctaatctcttgtgatttttcttctctctaatctcttggttgcgtggcagactaaatgattttgtgtttttggttctcttttaggtgcgattctgattctcttctcttaaatcattggctttgattgtattcattggtgccatggcgtttcccagtttgattacaacaatcattaagtcngtgttgggtctttgattttccttttctttttcatggaatggtacgaataggcttcaagtttttcaatatcctacttgcaaccaggtctggtt

SEQ ID NO: 27920 - DNA, 321 bp, Glycine max
gctggaaatgttgataaaactgttgaaatttggtcaaggagcctgtcaaatgagaccgagggaaaatcttatgttgaccttcttcaggatttaatggaaaagactattgttcttgccttggcaactgggcagaagcggtttagtgcttctctgtgcaagcttgttgagaaatatgctgaaattttagcaagtcaagggctgttgactacagcgatggagtatttaaaacttttgggttctgaagaactgtcgcctgaacttacaatcttaaaggatcgaattgcactttctacagaacctgagaaagacttcaaaactact

SEQ ID NO: 27921 - DNA, 362 bp, Glycine max
gactattcaaggaagcaaaagacagggattctagtgggaagaaatgggatgatcaccctgcaataatggctgttggtgtggttgatggaacttcagaagccatcttccagactcttatgtcgcttggtccttcaagatcagaatgggatttctgtttctacaaaggaaatgtggtggagcacttggatggtcacactgacattattcacaaacaactatttagcgattggttgccttggggaatgaaacgaagagatctcttgttgcggcgttattggaggagagaagatgatggaacttatgttattctttaccattccatgtttcacaagaagtgcccttcccagaaaggctatgtgcgt

SEQ ID NO: 27922 - DNA, 373 bp, Glycine max
ggaacaaaacaagtgtttcgaatagattatcctgagtctttgggaatagagctgcaatggcttcaagtcaggaggaggtgacccttttgggagctactggaagcccatttgtgtgcagggctcatattgccctcaagttgaagggagttcaatacaaatatgtcgaacaaaatttgaggaacaagagtgaactgcttctcaaattcaacccagtttacaagaaggttccagtgtttattcacaatgagaagcccatagcagagtctcttgcgattgatgaatacattgatgagacatggaagaacaaccccatcttgccttctgatccttaccaaagagccttggctcgtttctggtgcaaattcaatgatga

SEQ ID NO: 27923 - DNA, 341 bp, Glycine max
gggaacaccaattgtattgttaaagaggatgtgaatgatgattcgatatccattggatcagtatcagaagattcaatgaactctgtgtgttcatcttcttcatcagaattggctgaggatgcatcatcctcttcagcatcttatttgtcaacctcatcatcgcattcaaacggccctttgtttgaactatcagagctaatgagtcaactccctatcaagagaggcttgtctatgttttatcaagggaaggctcagtctttcagttctctagcaagcgtggagagcataggggatcttcctaagaagaaagagagattttacaggaagaaaatgaaatcatg

SEQ ID NO: 27924 - DNA, 399 bp, Glycine max
ggagagaaagaatggggataggaatacagagcattttgcaacacgattacacgaccgaattaaaccctgtttttctttccgaaagctggcgttaataatttaactcgcttaaaatgggtcttctcttcaataatactggtcattttttcgattggggggaacagtacaagagtgtgagggatcgggtaaaccaaactgcacaggtagtcacttaaaataatggaagtctcacgatgagactggatgccaggctcctgaacgccccattctttggattaataaatagggcttcttttgaaaaagcactccaatgaacatgtgttccaagggtacaaggacatgctgttgaagcaagagcaggacaattttgcagcatcgtcggttgaaaacattgtgaat

SEQ ID NO: 27925 - DNA, 334 bp, Glycine max
ggaaaccgagaagaagaagatggagatgtatcagatctggagcaggagaatagcgttgggagcgttcgcgtttgttctgcttttcctatcggcctcagcagacgacgtcgttgtgctctctgaagataacttcgagaaggaagttggtcaggacagaggagctctcgttgagttctatgctccttggtgtggacactgcaaaaagcttgctccagaatatgaaaagcttggtagcagcttcaagaaagccaaatctgttttaatcggcaaggttgactgtgatgagcacaagagtttgtgcagcaaatatggagtctctgggtacccaacaatt

SEQ ID NO: 27926 - DNA, 425 bp, Glycine max
gcacccaaaggtgcacaaatattaagatgataaacattggagcacttgttgtactctttgcatttctcttcctcagttgtgcctatgcacaagacacaacaacccttgtgcctgcaatcataacttttggtgactcagccgtggatgtagggaataatgactatcttcccacccttttcaaggctgattaccctccttatgggagggactttgctaaccaccaacctactgggaggttttgcaatggcaaattagctactgattttactgctgacactttgggttttaagacctatgctccagcatatcttagcccacaggcatcatggaaaaacctacttattggagcaaactttgcttctgctgcatctgggtatgatgaaaatgctgctactttgaatcatgcgaatccgttgtcccaacag

SEQ ID NO: 27927 - DNA, 260 bp, Glycine max
  modified_base (191)..(191): a, c, g, t, unknown, or other
ggacgagcgagggtgcgactatgacctgcgacttcgatctccggcaatccgcggcgaggttcgtccagtaaaacggcgccgtatagcgggatctgcgacgctgggcggagtggctatggagggcgagaacgcgagcaacaaggtgatcgagttgatgaacgagatagccagcatctccgattacaggcctncggtgaagaagcagtactgcaacttggcgcggaggctgaagcttctgatcccgatgttcgaggagatta

SEQ ID NO: 27928 - DNA, 377 bp, Glycine max
ggcgtctgaaatttggagtgttttttcgtttgctgtgttcagctccttatggagctctcactctctccaacttcacatcgtgttccttccacaattcccactttgaatttcgctaaactatcatccactaaggccacaacgtcccaacctttgttcttaggattttccaaacacttcaactcaattgggttgaaccatcacagttacagatgctgctcaaatgctgttcctaagagaccccaaagacccagttccataagggcctgcactggagttggagctgctggttctgatcgtccattagctgaaagacttctagatttgaaagatgcttgctgcagatttttagggcacatactatacgtggtacagcacta

SEQ ID NO: 27929 - DNA, 348 bp, Glycine max
gtccaaaggaatgcagaaagccgatcaggcacttgtctctggatgttctgcgggtggtctggcatccataatacactgtgatgagttcgggagcttgtttggaaaatcttccaaagttaaatgtttgagcgatggaggtttttttcttgatgcaatggatgtatctgggggacgcacactgaggactcttttcggaggtgtggttcagttgcaggatgtacaaaaaaatctgccaaaaagttgtctcgaccaactagacccaacttcgtgcttctttcctcagaatatgatcgaacatgttgagaccccattgtttctactcaatgctgcttatgatgtgtggcaagt

SEQ ID NO: 27930 - DNA, 73 bp, Glycine max
gggtttggatatgaagatatatatgttctacttgcattcagaaaatcagataattgtataatgttttcttttc

SEQ ID NO: 27931 - DNA, 294 bp, Glycine max
gaagtctatgttcttgaaccaggccacagatcgaccttgcaatgcaaaatgattgattattccataccagacagtgttttagttatccgaaatgtctcacatgtggagtttgaatgtgaagtaggccttgttgctgatccagctaaattgaaaggtgatcttgtatcattcttgaaggctgtgaacgaatagttggagtcataactgagctaggtgaaacagcatgctcttaaactaaagcgagatctggtaggagctgagtttcgtaactctgacctttacaaggagctctaa

SEQ ID NO: 27932 - DNA, 412 bp, Glycine max
gagtgcacaagtgagtttgttgatcgagataactagaaacagtgtgatgaaaatgaaggtccttgttttcttcgttgctacaattttggtagcatggcaatgccatgcgtacgatatgttccctctccgaatgaacactggctatggtgcccgtactccggaggtgaaatgcgcaagttggaggcttgctgtggaagcacacaacatctttggctttgagaccattcctgaagagtgcgttgaagcaacaaaggaatacatccatggcgaacaatatagatcagactccaaaacagttaaccaacaagcttacttttatgccagagacctcgaagtccatcccaaggacacatttgtgttcagtatagatggcaccgtactctctaatattccatactacaaaaaacatgga

SEQ ID NO: 27933 - DNA, 362 bp, Glycine max
atgaatcaaaatcaaatgaaactcctgcattcggtagctcaaactctcagataactcaagcagtgtttgagaaggagaaaggagagttccaggtgaaggttgttaagcagatcttatgggtaaatggaatgaggtatgaacttcaggagatatatggtattggaaattcagtggagagtgatgtggatgggaatgacccgggaaaagagtgtgttatatgcttgtcagagcctcgggacacaactgtccttccatgtcgccacatgtgtatgtgtagcggttgtgcgaaggttttgaggttccagacaaatagatgtccaatctgcagacaaccagtcgagaggcttttggagatcaaagtt

SEQ ID NO: 27934 - DNA, 351 bp, Glycine max
  modified_base (317)..(317): a, c, g, t, unknown, or other
ggagaaaatgttgaggaaggaggagtggaggggaacggatctgctgggtgggactagataaagtgaagcaagctgacaagactaagggaagattggatggtggaaatggaatcggcagctgaaaaccctaattacccggcggtggactacaagcgaccttccatcttgtcatttcctcgggggcccgccctcagagttacatccgagttcgatagtgaaagcgcagtcttcttccataagatttcctgcaagttgttggacagccttgccaagttcaagttttcgttcaaccacagcggtaaaggcggcgacatctncgaacctcaattcagctttgtctccaagcacctt

SEQ ID NO: 27935 - DNA, 358 bp, Glycine max
attgaaacatatgatgtgactacaattagagcaagcacacctatgtttctcatgtctcggaagattaaatcacttggtgtcaaatgggttatctcaggagaaggatctgatgagatctttggagggtatttgtacttccacaaggcacccaacaaggaggagttccacagagaaacatgccgcaagatcaaagcacttcaccaatatgattgcttgcgagccaataaatcaacatttgcttggggtctagaagcccgtgtaccatttttggacaaggcgtttatcaatgctgcaatgagtattgaccctgagtggaagatgattaaaagagatgaaagacgaattgagaagtggattc

SEQ ID NO: 27936 - DNA, 298 bp, Glycine max
gggagaggagaagtaaaccctagagtagagaatggaaggtgagggtggggagaggaaaagaggcgcacgtttatgctgcgtgtgcaagaaatcaagagcttcggtgaagaggccgaaaaccctagagcagatatgcagggagtgcttctacgatgcttttgagtctgagatccatcaggtaattcttgagaatcagctcttcagccctggtgaacgcgtcgcaatcggcgcttctggcggaaaggattccaccgtccttgcctacgtcctctccaagctcaaccgcctccacaattac

SEQ ID NO: 27937 - DNA, 267 bp, Glycine max
ggggcaatgtacagatcacagagcattacgatattatccatgctggttctcagagcaaaggagaattttctaggcttgactatcagaccaggccatttttaagaggtgcatcagcctttaggcgtcttgttgccaagctacctccaagagctcattctgtgtactacagggatgaaattggcaacatttccacttctagtttatggggtgactcaaaaaaggtggatattttcacatttgataaatttttactgtgaaatacttttt

SEQ ID NO: 27938 - DNA, 310 bp, Glycine max
ggggtaatcgattcactgatgtgtgaaaagcatgcacggctcattgaaaggccttctgaactggttttcagacgttgtgctataattgccagagaatcttctgtaagtggcttaaccatcatatcttagaatgattggtaatgctactgcgaataatggagtggtattgagaccaaaggaatatctgcaagaattgagaatgttaatgattcagacaatgctttgactggatcctgcagatagatgccaacttgcgaggactaacttaacacttgggataaagctaattatgattgtggtattggacaca

SEQ ID NO: 27939 - DNA, 356 bp, Glycine max
ttattggggtttagaaatgtgacttttctaaatggggttgtggcagcgtgcgtgagttagtagattttccaaacacccttcccgcataagtctatgaaccttgagttgttgactttataatataattcttcaaaatcaagcgcttcccattcatatagtatcgcctcatcgtgaccggaattcaacggaaccgcttctttatcctccaccgtcctgggtaagctaagctagctgccatgtctaaggataaagactctaccaatctctcacgcaccttcaagtacctattagctactcagatcttgtcaacaggaattccatttatattcaatacatggattgtaaggcatcttact

SEQ ID NO: 27940 - DNA, 352 bp, Glycine max
ggagggtgtgaattctaaaaggaaagaacagctgagctggtcagaaaatcaatggcatcatccttgggttttgagttcctgacgaagaagccttacagtcctccatcctgggcatcccatctccaccctttaccttcccacttcttctctcttgcccatcttcccactccaattcacagatggaaccttcccaatctgcccaccaataccgagctgtggatcaagcgagacgacctttccggaatgcagctgagtggtaacaaagtgaggaaattggagttcctgatggccgatgccattgcgcaaggcgccgactctatcatcacaatcggaagcattcagagcaaccact

SEQ ID NO: 27941 - DNA, 410 bp, Glycine max
gagtgtgtgagttcattaacatatacagattctctgtgttgtgttgtgtacttgtgttaattgtgttgttgttgtaggaaatttaagtgaagagagaatgatgatgaagtctgctatgtgtgcattggtgcttgtggcactggttgtggttgaagtggggcccatggctgaggctgcggtgacttgcaacccaacacagttgactccttgtcttccggcaattaattcaggttctgcaccttcgagtgcttgttgccagaagctgaaggagcaaaagccatgcttctgtggctaccttaaaaaccctagcttgaagcagtatgttaactcttctaatgccaaaaaaaccggtagttcttgtggtattggctattcaactttgtaagcacctcttatatatatatataaaa

SEQ ID NO: 27942 - DNA, 409 bp, Glycine max
ggagagaaatgtgacttttctaaattgtattgtagcagcgtgcgtgagttagtaatttcgccaaacacccttcccgcagaagtctatgaaccttgagttgtggactttataatataattcttcaaaatcaagcgcttcccattcatatagtatcgcctcatcgtgaccggaattcaacggaaccgcttcttcatcctccaccgtcctgggtaagctaagctagctgccatgtcgaaggataaagacgctaccaatctctcacgcaccttcaagtacctattagctactcagttcttgtcaagaggaattccatttatattcaatacatggattgtaaggcatcttactcaagaggactatgcgctgtatgcagttgcagttcatttgctagtcacatgtattttatttc

SEQ ID NO: 27943 - DNA, 388 bp, Glycine max
catattgaattgacctgttagtggattgccatgttgctggtctaagccatgtagaaagtctatacatttttggcatttttgtagaaaaaatgaagatgaattatttcaagttgtttttgttgaactgaaatctttttgattcattgagtgcattacaaggttgcaggcactgttttttttttcccttacatttttcacttcagtgtattaggatatttcaagaaatcaagaaactgtatgtaagtaaccggagaattgtagaagatattgtaattatgtaattagctgtaattatccaaatcagcataaattaggtagctataatcttggatatatttgtgcctttgataatcaatacacacacaagtttttccaattgtgaatacta

SEQ ID NO: 27944 - DNA, 174 bp, Glycine max
  modified_base (29)..(29): a, c, g, t, unknown, or other
  modified_base (38)..(38): a, c, g, t, unknown, or other
gactcggaaaaggggttacttttagtgangtggtgacnggtgtacacaggttttctaaagccctaaaaactcttggtctgaagaaagggcatgttgtgaatggaatgcttccaaatgtggtagaatatgccattggtgctttggggataatggctgcttgtggggtgttctcaa

SEQ ID NO: 27945 - DNA, 352 bp, Glycine max
gatgataattctgttcatggttcacctgtgaatgcaaatgggaagcaagaaaattctgctaatggtgattatacagttgaggatgaatcctatgcacacagtgaagatgacctggcaagaatcccccatagtctagctgggaggagtacggtggagagtccttctcaagacttttcaaattctcattttggaaaaagttttgaagcagatgcagaaacacacagaagttttgatgaatcaacctggggtgcatttgacaacaacgatgatgtggactcagtgtggggttttaacaccaagaccaaggactctgacttcgagcagagagatttctttaaatctgatgattttg

SEQ ID NO: 27946 - DNA, 376 bp, Glycine max
gatactggttacgacaacacatcatattccaagccttctgatgactatgactctggtttcaacaagccatcgtatgagtcttctggcggtggctatgaaggtggttacaacaaaacatcttattctagtgatgagccagcttctggtggtggctatgaaggtgggtacaagaaaacaggttattctggtggcattgatgagacttctggtggctatggcgctggtggtggtggatactctgacgtcactgatggtggctacggcaaaccaagtggtggctatggcgccgctggtggtggtggtgtgtaccctgacactaccactgatggtgggtacagcaaaacaagtggtggtgggtatgatgatgaagttgact

SEQ ID NO: 27947 - DNA, 310 bp, Glycine max
gggagaaagggtgggtattgcttcacacaaacacaacagtgtctgctgcaccttgcaatggtttcgctatcaacatggtttcgctacattgcccacaagctcgaatactccttctccctcagctggaagaactacaaaggaggtcaaattacagacagggaggtacgtgatgttgtttggaaaaacttctttcaaggaaagctgacgtacttgcactggaataaaggagaggagatggcccctactattgatggaaaagcagtaactcttgttcggaaattaccagttgtagacccaacgcgtgtttttg

SEQ ID NO: 27948 - DNA, 380 bp, Glycine max
ggcgcaaatctagattagaaatgggttctgataagctaaggtcctctgcttgcccagttcgtttgtgcgtagatgagcacgtgacaaggatttataatgcattccgtcctatcctttatcaatttgttggggaagaattaacaaagtcggaagctgttgaagtactcaggattactaaaggaattcttttggatcttagcaagtccccctataaaacaagaaggacctccattgactcagttctagataacccaaaatttcagaaactattgccatcttttgatgacttacttggtgctctttcactggagaaaaaagtgaatacagatgggagagttgaattttggttggttggtgaccctgtagtaacttctttagca

SEQ ID NO: 27949 - DNA, 396 bp, Glycine max
gacacacagatcgggaaagcgcctttttactctggtctctgctttggtagagctctctcacaagtacacagatcttggctgggcctgggcctacggggatagaaggaactggagcctttggtacatgccccggggggcatagcagcattattactcctaaatttttcatgcttatcttgtgctacacactctctctctctctgctagagcgcgcgctaaaactgtaataagtttaagaagagcaggcaaaagtgaatgtatctatctatctgaaacagcattattatttgttcgctctgtgcaactgcaactgcaactgcaaccaaccgcgctttaccgaatgccaacaaataaagctgtgggtagtgaagatctgggaataatcttagagtaaga

SEQ ID NO: 27950 - DNA, 376 bp, Glycine max
ggctgcaaatgtggaccaaactgctcctgcaacgccctgcacttgcaagtgaggtgttgggagagcaagcttcaagcagagatagcccttaattaggaataatgataaactattaatgtgtagctaaaaacttatgtattatgtctgtgatggttttcgtgcactctggtgttttgtgttaaacaaacatccttagaataaagtggtcatgtcttgcctttcagcaagttcaagtgttttggacttgtgatgggtgtgttaagctcatggttgcttctttttttttttttttaatgtttggtaattggtcgcttctgtataaagttcggctaatctgaattatgaatctctgcttataatattaaatactattacc

SEQ ID NO: 27951 - DNA, 389 bp, Glycine max
  modified_base (361)..(361): a, c, g, t, unknown, or other
ggggtgttgtgtcggtaggtttgtggtggagaagaacagtttgaaggtgacttctccgaaatcgttgaagggtacgtatgaatgtgcaattgggaattttggggttcccaagtatggaggaacgttggttggttctgttctgtacccaaaggtgaatcagaaagggtgcaccaacttcagtgatgtcaattttcagtccaagccaggagggtttcccacttttcttcttgttgatcgtggagattgctacttcactttgaaggcgtggaatgcacagaatggtggagcagcagctattcttgtagctgatgaccaggcagaaacgttgatcactatggacactcctgaagaagggaagcanatgatgattatgtggacaagattagtat

SEQ ID NO: 27952 - DNA, 407 bp, Glycine max
ggaatgaatgaacacaacacaagtacttacagagagtacatactctctcaatttctctctcttcttactttttctctccaaaccttacatgcacaaagttgtgtacccatggaatttgcttgcttagactaatcaaccaagttttgcattttgtgtaaccaaaactctatctctttattttttttcttctggggttggcaaagtcagcatgcaagagcaagatttctaggctggttgatggtttgagttccaaaaaattgaactttttgttgaattgaaatttgggttggtgaaaggggtgttgatgaacagatgaagaacgaagagcaggctcgtagtttgtttggaatttcactctctgacagacccagatggcagcaattcctcatttggtcatcagggttctt

SEQ ID NO: 27953 - DNA, 367 bp, Glycine max
gaatacaaggagtggaatgacaagaatccacaggtgacaacatgcaataaagataccaagaatttgatgcaaggtagtactgtcccacaagaagttgatacaagcaaggatattgtattcacatatgatgtttccttcacggaaagtgatatcaaatgggcatcacggtgggacacatatcttttaatgaatgatgatcagatccactggttctccatcattaactctctgatgattgttcttttcctgtctggaatggtggcaatgatcatgatgagaactcttttcagagacattgccaattataatcagctagaaacccaagatgaggcccaagaagaaacagggtggaaacttgttcatggag

SEQ ID NO: 27954 - DNA, 389 bp, Glycine max
ggacgaaggatggggaaggcaaaagaagcggcggtggtggcgggagccctagcattcgcgtggctcgctatagagctcgctctcaaacccttccttaccaaggcacgtgcttccatcgacaagtccgacccggcacgtgaccccgacgacgatgctcttcctaaaaccaccgccgacgacgttcccgaagcctccgctgacgacgtgcctgtcgctgctgataccaaaaccaccgacgacgcctgaacttatctcattcatgttattttgaatgtcctgaaaattactgtccaaatgaaataatgttgctagcctctttgtgtttctgttaattttgtgtatattgtgttgtcagtatttttggtctggtttgtttggttttaggattg

SEQ ID NO: 27955 - DNA, 419 bp, Glycine max
  modified_base (375)..(375): a, c, g, t, unknown, or other
ggagaaacagaactttcagaagcggaatcgctcactattgatccgattccaccgtcatcggatctttctgcagccaccgtctatcgcacttcgttgccgtcattggcgccggaattctgaatgttaatgaatttgtgaagtaatgatgagtggaagagctatccaataacatgacatgaactgcaaattcttgtatacttgaaggttaagacagcttaaacaatacaaggatgttttcgttgttttatggactatggaagtacttgttcagcaagatggagcttcatgtactcattctggggattgacaaggctggcaaaacgactttgctggagaagatgaagtcggtgtactcaaatatagaaggcattcctnctgatcgaattattccaacagtgggattgaatattggtcgcatt

SEQ ID NO: 27956 - DNA, 389 bp, Glycine max
gacggcgatgatgatgcagatcaacatcacctggaccacctcaatcgtcacggcgttctcttcggatcattccccgaatgttctaccttgagccatgtccaacctcgttcagattcgcgtcggcgccgacgctagcgatggcttcgactctccggcgaagcagaaagcagccaaccgcagctcctacagcaatcgcccctttctgtccctccgccgcgccaaacagttcctcggcgccgccaagttcaagctcttcttagttctttgtgctctctccatcgtcgttattgtctccttcagactcagttcgtggatgggatggaaccctcaccactcctgttcagtttcctgcacttcaaggggtggctatactgtgcttataaacactt

SEQ ID NO: 27957 - DNA, 334 bp, Glycine max
ggagcaagagtgaagagcgaagagaatggctcccaagggtttaatctttttggctgtgttatgcttctcagcactgtcactgagtcgttgtcttgcggaggataatggacttgttatgaacttctacaaggaatcatgccctcaggctgaagacatcatcaaagaacaagtcaagcttctctacaagcgccacaagaacactgctttctcctggctcagaaacatcttccatgactgtgctgttcagagttgtgatgcttcactgttgctggactccacaagaaggagcttgtctgagaaggaaacagatagaagctttgggttgagaaatttc

SEQ ID NO: 27958 - DNA, 338 bp, Glycine max
gaatgaaaggagtgatatattgtctttggaatttgactgtgttgtcttcttctttgtgactcactctctcttcagctcttgaatttgatccacctgtgttgcttttcccaccaaaccaaacaaaataacctgatattaacgtaatagtagttcttttatcgaacattgtgccatgacattcgacgaggtttccatggaacacggcaagagcttcatcttcgccttgcaggaacttaagaacctgaggcctcaactctattctgctgcagactactgtgagaaatcttatctcaatagtgataaaaaaccaatggtacttgacaacatgaaagattatg

SEQ ID NO: 27959 - DNA, 385 bp, Glycine max
ggaatcgccattgagctcatagtcatgtacccgattcaggaccgcaggtacagggaaggaattgacaacctgttagtgctcttgattggaggaattcccattgccatgccaactgtgttgtctgtcactatggctattggttcccacaggctttctcagcagggtgccatcacaaaaagaatgacagctattgaggaaatggcagggatggatgtcctatgcagtgacaaaactgggactctcaccttaaataagttgagtgttgacaggaacttgattgaggtgtttgctaagggtgttgagaaagagtatgttatccttcttgcagcaagagcttctaggactgaaaatcaagatgccatagatgctgcaattgttggcatgc

SEQ ID NO: 27960 - DNA, 53 bp, Glycine max
gacacacaacattttcagtgaaactgaaaaggggaagaagagagtgaaatggg

SEQ ID NO: 27961 - DNA, 299 bp, Glycine max
ggttctagtgtgtgattgtttgttgttgtaactcgttcttcttcttttgttgttctgtgtttgtgtttgttttttctctcacctgaaaatgtcttgctgcggtggtaactgtggttgcggaagctcctgcaagtgcggcaacggctgcggaggctgcaagatgtacccagacttgagctacactgagtcaaccaccaccgagaccttggtcatgggagtggcacctgttaaggctcaatttgagggtgctgaaatgggtgtgcccgctgagaacgatggctgcaaatgtggaccaaact

SEQ ID NO: 27962 - DNA, 344 bp, Glycine max
  modified_base (278)..(278): a, c, g, t, unknown, or other
ggagagaagagaagcaaacgatggctacttttctttccaaccaatctctgatgggttcttgtccttgctctactcccttctcttcaaagccctttcaaaccctaaaaccccaaatcttatcttttccatctcgcgggtttccgcgccccctaatttcctcagtcaatcgaagaacccaattgaagtcttcccaagatttccctccaactacaaatgatgaaacagaggagacccagaatgatgtaagagggacaaatgatgatgaagatgaaaaacangtacctagtttaatgatcctccttgaagcatacaaagaagccttttttaatggcgaccaaaatacc

SEQ ID NO: 27963 - DNA, 249 bp, Glycine max
gagggagcgaaggtatgaagccttcaacaggctgagaatattccaagttgtaagtgtcgcttttctaggtggactattgtggtggcatactccagagtcacacattgatgatcgggttgccttgctctttttcttttctgttttctggggattctaccctctctacaatgcagttttaacattccctcaagagaggagaatgctgatcaaggaacggtcttcgggaatgtaccgcctttcttcctactt

SEQ ID NO: 27964 - DNA, 343 bp, Glycine max
cagaatgtgaactacaagtggaccaaaatctcaaaaggcaagctaaattcaaaacgcggaataagtacaataaactcgcgtcctgtggtgaatcaaattcaatccgcagaagaaaacatgttactctttgcaacacttcttctcttttctctgcaatcgactatcttaacaccgattccagtaaaacccactaaactctcttcgaatctctccgtcaccaactccgcctcttactgcgagagaatcagcattagcacgcgccggagaaccatttcacccttcgaatcccgaatctcactcattttcgccctcgctcctcaagccaacactctctcccagcgac

SEQ ID NO: 27965 - DNA, 277 bp, Glycine max
aaaaacgaaaaaaaataaaaaaataaacaaaaacaaaaaaaaaaaaaaataaaaaaagaaaaaaagaagaagaaaaaaaaaaaaaaaaacaaagaaaagagaaaaaaaaaaaaaaaaagaaaaataaaaaaaagaaaaaaaaaaaagagaaataaaaaaaaaaaaaaaaaaacaaaaaaaaaaaaagaaaaagaagaaaataaagaaacaaaaaagaaaaaaaaaacaaacacaaaagaaaacaaggaaaaaaaaaataaaaaatgaaaaaaaaaaa

SEQ ID NO: 27966 - DNA, 345 bp, Glycine max
aaaaaaaaaataaaaaaaaataaaagaaagaaaaaaaaaaaaaaatataaaaaaaaaaaaataaaaataaaaaagaaaaaaaaagaacaaaaaaaaaaaaaaaaaaaaaaaaaataaaaaaaaaaaagaaaaaaaaaaaaaaaaaaaagaaaaaataaaaaaaaaaaataaaaataaaaaaaaaaaaaaaaaaaaaaaaaaaaaccacaaagaaaaatacaaacaaaaaataaaaaaaaaaaaaaaaaaaaaaaaaaaataaaataaaaaagaaagaaaaaaaaaaaaaaaaaaaataaaaataaaaataaagaaataaaaaataaatataaaaaaaaaaaaaaa

SEQ ID NO: 27967 - DNA, 345 bp, Glycine max
aaaaaataaaaaaataaaaaataaataaaaaaaaaaaaaaataaaaaaaaaaaaaaaaaaataaaaaaaataaaaatcaacacaaaaaaaataaaaaaataataagaaaaaaaataaaaaaaaataaaaaaataaaacataaaagaataaaaataaaaaaaaaaaaaataaaaaaaaaaaataagaataaaaaaaaaaatacccacccaaccaaaaatagaattaaaacagaaataaaaaaataaaaaaaaataaagaaaaaaaaaataaaaaaaataaataaaaaaaacattaaaaataaaaaaaaaaaaaaaatataaaaaaaaaatataaataaaaaaataa

SEQ ID NO: 27968 - DNA, 197 bp, Glycine max
aaaaaaaaaaaaaaaaaaaaaaaaaaaaaaaaaaaaaaaaaaaaaaaaaaaagaaaaaaaaaaaaaaggaaaaaaaaaaaaaaaaaaaaaaaaaaaacccaaaaaaaaaaacaaaaaaaaaaaaaaaaaaaaaaaaaaaaaaaaaaaaaaaaagaagaagaaaaaaaaaaaaaaaaagaaaaaaaaaaaaaaaaaaa

SEQ ID NO: 27969 - DNA, 428 bp, Glycine max
  modified_base (17)..(17): a, c, g, t, unknown, or other
  modified_base (66)..(66): a, c, g, t, unknown, or other
  modified_base (178)..(178): a, c, g, t, unknown, or other
ccgacccacgcgtacgnacaggcagttttaagacgacgagaggaagattgaaaccacggggaaganacaaggaagaagggaggcggccaagaagaagcggaagcccaccgaggaagcagacgaaaaacaccaccaagaaacgaagggagaagaggcgacgaagaagagacgacgacangcagccacaaaacaaaaagcagaaggcaccagcagccagacgaacacaacaacgaggcaaaccggacaaaacaaacacagaacgggggaccaaaggacagaaacaacaaaaagggaccaacagacaaagcgaaacaaacagagaacaaccagcggaaaacaaaaaggcaggcgccgacgaggaaaaagaaaaagccaccaaaggagaacaaaaaaaaaacaaaagaacaggaaggaagaaagggccaaag

SEQ ID NO: 27970 - DNA, 349 bp, Glycine max
aaaaaacaaaaaaaaaaaaaaaaaaataaaaaaaaaaaaaaaaaaaaaaaaaaaaagaaagaaaaataaaaaaaaaaaaaaaaaaaaaaaaaaaaaaaaaaaaaaaaaaaaaaaagaaaaaaaaaaaaaaaaaaaataaaagaaaaaaaaaaaaaaaaaaaaaaaaaaaaaaaaaaaaagaaaaaaaaaaataaaaaaaaagaaaaaaaaaaaaaaaaaaaaaaaaaaaaaaataaaaaaaaaaaaaaaaaaaataaatataaaaaaaaaaaaataaaaaaaagaaaataaaaaaaaaaaataataaataaaaaaaaaaaaaaaaaaataaaaaaaaaaaaaaaaaaaa

SEQ ID NO: 27971 - DNA, 395 bp, Glycine max
aaaaaaaaaaaaaaaaaaaaaataaaaaaaaaaaaaaaaaaaaaaaaaaaaaaaaaaaaaaaaaaaaaaaagaaaaaaaaaataataaagaaataaaaaaaaaaaaaaaaaaaaaaaaaaagaaaaaaaaaaaaaaaaaaaaaaaaaaaaaaaaaaaaaaataataataaaaaaaaaataaaaaaaaaaaaaaaagaaaaaaagaaaaaaaataaaaaaaaaaaaaaataagaaaaaagaaaaaaaaaaaaaaaagaaaaaaaaaaaaaaaaagaaaataaaaaaaaaaaaaaaaaataaaaagaaaagaaaaaaaaaaaaaagaaaataaaaaaaaaataaaaaaaaagaaaaatataaaaaaaaagaaaaaaaaaaaaaaaaataaaaaaaaa

SEQ ID NO: 27972 - DNA, 293 bp, Glycine max
agcagaagaattaaaaaagagagtaaattaaaaaaaaaaacgagcggtcccacaaaaccaagggaacccacaaaaacatgcaacgacataccaaaaaaataggaaaacacaaaagaaaaatacagaccagagaaaaacaaacaaaacgaaaagaaaaaaaacataacaaaaaaaaagaaaaaaacacacaaagaaaaaaatacacaaaaaaacacagaaagaaaacaaaaacaaaaaaagacaaaaaccaaaaaaaaaatacaaaaaaaaaaaaacaacacaaaaaaagaaaa

SEQ ID NO: 27973 - DNA, 227 bp, Glycine max
tctgagatagcacttttctctgtgattcatcaatggcaaccgcgaggaccgtgaaggatgtttcgcctcacgatttcgtgaaggcttacgccttccatctcaagcgttccggcaagatggagcttcctgagtggactgatattgtaaaaacatcataatttaaggaattggctccatatgatcctgactggtattatgtttaggctggctcaatggcaagaaagatt

SEQ ID NO: 27974 - DNA, 380 bp, Glycine max
cctgcatgtaccggtccggccatgccgtgccgaccgacgcgtgcagtccgcgaagacggacactattcaaggacaccaattgcatggattctagggggaaaaaatgggatcatcatccttcattcatggtgaagatcatgacgacttaaaacatttctactttattacttgccctcagatcaaatggattctgctcctcatatgaaatgtggtcgagcacttggatggtcacactgacattattcacaaactactttttaacaattgcttgcctttgggaatgatacgaagagatctcttgtcgcggcgttattggaggagagaagatgatggaacttatgttattctttaccattccatgtctcacaagaagtgccctc

SEQ ID NO: 27975 - DNA, 403 bp, Glycine max
gggcactcgtccttgcactcatacgtacgttcgccagtgaccaccgaaggggcaggagcggaagtgtgaagccttcacaggctgagaatgttggaagtcgcatgggcaggccttctaggtggactattgcggtggctactgcatagtcacacattgatgatcgggttgccttgctctttttcttttctgttttctggggattctaccctctgtacaatgcagctttcacattccctcaagagaggagaatgctgatcaaggaacggtcttcgggaatgtaccgcctttcttcctactttctggctagaacaataggagacttgcctctggagcttgcactaccaactgcatttgtcttcataatctattggatgggagggcttaaacctgatcctatgacttt

SEQ ID NO: 27976 - DNA, 227 bp, Glycine max
cgataagacaacacaacgggacacaagtgagtatgttgatcgatatagctagaggcagtgtgatgaatatgaaggtgcttgtaatattcgttgctacaatattgggagcatgggaatgccatgcgtacgatatgttccctctccgaatgaacactggctatggtgcccgtactcctgaagtgaaatgcgcacgttagaagcttgctgaggaagcacacaacatcttt

SEQ ID NO: 27977 - DNA, 406 bp, Glycine max
ggagtagcgatggagaagaagaagggtgagctaaagtcaatgttccttcctttcctttccactagtcacataatcccgctagtggacatggccagactcttcgccttgcacgacgtcgacgtcaccatcatcaccaccgcacataacgccaccgttttccaaaagtccatcgatttagatgcgagtcgcggtcgccccatcagaacgcacgttgtcaacttccccgccgcacaagtgggtctccccgttgggatccgagccttcaacgtcgatacgcctcgggaaatgacccccaaaatctacatgggcctatcccttctccaacaagtcttcgaaaaactcttccatgacttggaaccggatttcatcgtcaccgacatgttccacccttggagtgtcgatgctg

SEQ ID NO: 27978 - DNA, 306 bp, Glycine max
ggttaaaaaaaagtgcaattagcaacaaatcttgcaaatccacacccaccacttgctcctgagccatacaatacaaaaaaaaaagccgcttttttttaattgttctttccaatcatggctggtgtgaaccccgaagcaggagggtggaaggcttatccttctgttatggagactgctcttggtagtagtggtgatggaaggcgtggccataacatgaatgatgatgggtcggtgatgcatttctatgctacaaggccagtggcagtgccatcatctggacagaataaagtagcatctagtccaact

SEQ ID NO: 27979 - DNA, 368 bp, Glycine max
ggagtgagtgagttacaaaatgaagagtgacgaagccattttcgccattatcactcctctcgcaccaaaagcgatgaagctctaggtttacattttaggagtagctgaatcatatgaggcagatggtcttttgttaattacctcaacttagactgcagattacttgtctaccagaaaggattcaaaatgagttggaacccacacaatggaggccaattccattaccattagtaatccctttaatccagcaggaagcttaattgaaatattttgaaggctcaaccttataacaatgtaactactttttcttggtgcatcacatgcttagggagagttcttacccttcaaattcaagcttttacaagttt

SEQ ID NO: 27980 - DNA, 104 bp, Glycine max
gaacacaatgttcttgttgatttctataaggtagaaagaaaggtgggaacaggcccaagccagaaggaacgaattaaattgaaaatgggtcctttggtccgaaa

SEQ ID NO: 27981 - DNA, 315 bp, Glycine max
gggttgaacacaatgttcttgttgattgctatgaggtagaaggaagggtgggagcagcggcaagcctgaggtagcgaatcatattgagatggggtcgataggtcggataagcatgtccactgtggtgaaagcggtgtatgaaatcaccggcactggcaacacctagatccgcgaatctttcagagagctctgcaccttactacgcatccctcgccaatctcaatccgaaagcgctctaattctcttcaagctcatgatactctataatttaaagagttacggcattatcaaggacacgatttgggagcataaatt

SEQ ID NO: 27982 - DNA, 56 bp, Glycine max
aaaaaccccacaaaggggataccgagaagctcttgacagtctaattcctgggaacc

SEQ ID NO: 27983 - DNA, 234 bp, Glycine max
aagtttcaatggcgttgctctgaaatcgaagcgtacggtattgtaaacgcaggttatacatagatagatcatgatagagatagggttaaggccatggagcgcatcatcgactccaagttcaagctacgacgcacgatcgcaagcgtatccttcggcgaattctacctacacattcatattggttccttcaagatcgtcggcagtaagagtgtaaacggtctaacgaagcattcg

SEQ ID NO: 27984 - DNA, 399 bp, Glycine max
gacggctaaaagctaaaaatcatcgaagtactcaaattagcatggctgtcacggttgcattcttgaatttgatcatcatgttttcagtagtctctacaagcaagtcactgagcttaaactactattcaaaaacatgccctgatgtggaatgcattgttgccaaggcagtgaaggatgccactgctagggacaaaactgttccagctgcacttctgcgaatgcacttccatgactgtttcgttcgggggtgtgatgcctctgtgctgctaaattcaaaaggaagcaacaaagcagaaaaagatgggccaccaaatgtttctttgcatgcattctatgtcattgatgcagcgaagaaagcactagaagcttcatgcccaggtgtggtctcttgtgctgaca

SEQ ID NO: 27985 - DNA, 390 bp, Glycine max
gggaagtgaaggaggagagggagaagaagaagaagtaggaggaagaaaaggggaaaacgcaaagaaaaaaagaggaagatagatcaagatctcccttgcgtttgtctcagttgaagaaattcaagagcagaacgagactaactcaacggtatcagacgtttcagggtttcagcacttccattttttttttttccggatttgagttggaagaagatcaaagaggttcctagttgcttggattgttcctctgggtggtggagactttgtgtatttttaaaatattgacaattcaaaatgccaaaggagagaagggataggtctttgtcacatgaaagtagcagagcctcaccttaccctagcagctctagtcgtgttggaagatcttctctt

SEQ ID NO: 27986 - DNA, 366 bp, Glycine max
ggttgttcatttctgctcagtgagagaaactctgtctctaggaaccctattggacggtttggaatccaacttgaccatgggccacaagaaccttcctcgaagaatcatcaaggaaacgcaacgtttgctcagtgagccagcaccaggaattagtgcctccccttctgaagagaatatgcgatatttcaatgtgatgatccttgggccaacccagtcgccttatgaaggaggagttttcaagttagaactatttttgccagaagaatatccaatggctgctccaaaggttaggtttctaacaaaaatatatcatccaaacattgataagcttggcaggatttgtcttgatattctgaaagataagtg

SEQ ID NO: 27987 - DNA, 415 bp, Glycine max
  modified_base (380)..(380): a, c, g, t, unknown, or other
gacgacagaagggggcacaaaaatacaatacaaaacaaaacagagcaaagagagagtgtgtgaaaagtgaaacaaaagacagaacaacaatggcgacacttaaggttcctcagcctcttccccccgttgcagatgattgtgagcagctccgaaaagccttctcaggttggggaactaacgaggagctgattgtatcgatcttggctcataggaatgctgctcagaggaagcttatcagagaaacttatgcccagacctatggagaagatctcctcaaggccttggacaaagaactcacgagtgattttgagaggctggttcatctttggacacttgattctgctgaacgtgatgcatttttggcaaacgaggcgactaanaaatggacttcaagcaatcaggttctggtggaaat

SEQ ID NO: 27988 - DNA, 373 bp, Glycine max
ggtatgataatgagatgataaagtgtgtggctgggccagatcatgaagaagaagagggaggcaacccaccagaagatttcttcgccatagaatcggccatggagaacagcagcatcacaactcacttggaagcactgctccatagcctggccgcagagggaggtcacgtggcctgcttggtggatgacttattggcatcttgggccatacaagtatccgataggcttgccatcccttgtgctggcttttggcccgccatgtttctcacatacctatttattgctgccatacaacactttctgcaaactcgcctcattttaaaactcttgactttcacatcacgaatgaaaaatttgccctagaccttaacttc

SEQ ID NO: 27989 - DNA, 418 bp, Glycine max
gaaggtgcaagagtttgttgtgagctataagctagtttatcgtgaggagaatatgaagttgtttgttttctttgttgctgcagtagttttggtagcatggccatgccatggcgcaggctaccaaaggttccctctccgaatgaaaactggctgtggtgagcgttcttcggaggtaaaatgcgcaagttttaggcttgctgtggaagcacacaacatccgagcctttaaaaccattcctgaagagtgcgttgaaccaacaaaggactacattaatggcgaacaatttagatcagactctaaaacagttaaccaacaagctttcttttatgctagtgaacgcgaagtccatcacaacgacatatttatattcggcatagataacaccgtactctctaatatcccatactatgaaaaacat

SEQ ID NO: 27990 - DNA, 261 bp, Glycine max
ggcacaagtgagtttggtgatcgagataactagaaacagtgtgatgaaaatgaaggtccttggtttcttcgttgctacaattttggtagcatggcaatgccatgcgtacgatatgttccctcttcgaatgaacactggctatggtgcccgtactccggaagtgaaatgcgcaagttggaagcttgctgtggaagcacacaacatctttggctttgaaaacatttcttgaaaagtgcgttaaaccaccaaaggattccttcc

SEQ ID NO: 27991 - DNA, 363 bp, Glycine max
gaagacatgggaagaagaagcacacatagagcaagcgttgcatgatcattttctcttccgaaaacttactgattctcagtgccatggtttattggattgcatgcaaagagtggaggtccaacctggggatattatagtcaaacagggtggtgaaggtgactgtttttatgttgttggtagtggagaatttgaggtcttggcgactcaggaagaaaaagatggggaggtgcctagggttttgcagcgctacacagctgaaaaactttcatgctttggagaacttgctctaatgtataataaacccctccaggcttctgtacgtgctgtaacaaaaggaactctttgggctttaaaacgagaaga

SEQ ID NO: 27992 - DNA, 302 bp, Glycine max
  modified_base (222)..(222): a, c, g, t, unknown, or other
gagagtgagtttgataattatggttttcccatgttgtcttgtgacatctcttgggtaggtgtccatcgttgcccaataatatatttttgttattatttgagctacatctggactccacaacgcaaaacctcagccctttgcctttgttccttcaacaaaatttttctttattacttgtgctattaaaatttagaattcctattatcgtggtaaaatacctgntatttttcttaccagacatagtcaggtgtctgctttgtttggagtttggtagagaccgttacatgtctggggacataaat

SEQ ID NO: 27993 - DNA, 323 bp, Glycine max
gcccgaacaagagagcatggccgtagctgatcccaagcctgactccgaacctaaggtctggaacttcttcaagcttccgttccgccattccgtcgtcaccaatacgacgccgacttacgataaccttcaccatcttcatcatcaccataaccaccaccaccaccaccaccaccaccacaaccctaataatctaccactcgagggatccacttcccacacctgcaattccgtttactccgtcgagagatctcttctgccaacacgacatcgtctcaagctcgatcccttcaacaagctctactttccttatgagccgggcaaac

SEQ ID NO: 27994 - DNA, 371 bp, Glycine max
gtcaacactctaagcaaggcacccatgaagaaggccatgaatgactttgtattcatcatgtactccaatgccttcgctgcatgcctcctccttctcttagccttattcttttataggaaaagaacacttccgccactctcctgtaacacccttggcctattccttgttgttggcatgctcagttgcattaatcagtcgatcaagtttttcggcataggttacagctctccaactttggcctcagcactgtccgatttggtgcccgcctttaccttcatacttgccgtcatcttcaggatggaaaaattagatcggaaagctaatagcactctggccaagtccattggcacagtggtatcgatcgctggggc

SEQ ID NO: 27995 - DNA, 178 bp, Glycine max
tatagggatcaacactacaagcgaagcatccgggaagaacctcatgaatgactgcgtattcataatttactccaacgcctttcatgaatgcctgctacttactttatgcctatgcctttatactagacgatcacctttcgacactctcctgtgaccacactttgcctataaacttgct

SEQ ID NO: 27996 - DNA, 395 bp, Glycine max
ggagaaagacggaaggcgaagggttggggaagcgcggtgagggaactgactcaggcgattctgaaattcggtgaggcttatgaacaagcagagagttcgaagctgcagcaggtggtggagatggagaagcagaggatgaagttcgcgaaggatttggagttgcagagaatgcagtttttcttgaagacgcagctggagatttcgcagctcaagcttggaaggaaaggtggtaaccctagcaacaatctcaatggcaccaccaacaataacaacaacaatcataacaataatagtgacagtgaatgaatgtgtgagagtcaggaagggataactaggttgaggtaaagtttagattggaattgcatcagcctaatagccttgtggtgtatgtgttt

SEQ ID NO: 27997 - DNA, 371 bp, Glycine max
gtcaacactctaagcaaagcagccatgaagaagggcatgaatgactttgtattcatcatgtactccaatgccttcgctgcatgcctcctccttctcttagccttattcttttataggaaaagaacacttccgccactctcctgtaacacccttggcctattccttgttgttggcatgctcagttgcattaatcagtcgatcaagtttttcggcataggttacagctctccaactttggcctcagcactgtccgatttggtgcccgcctttaccttcatacttgccgtcatcttcaggatggaaaaattagattggaaagctaatagcactctggccaagtccattggcacagtggtatcgatcgctggggc

SEQ ID NO: 27998 - DNA, 352 bp, Glycine max
  modified_base (332)..(332): a, c, g, t, unknown, or other
ggatgagaatgagatgataaagtgggtggctctgccagatcatgaagaagaagaaggaagcaacccaccagaagatttcttcgccatagaatcggccatggagaacagcagcatcacaactcacttggaagcactgctccatagcctggccgcagagggaggtcacgtggcctgcttggtggttgacttattggcatcttgggccatacaagtatccgataggcttgccatcccttgtgctggcttttggcccgccatgttcgccacatacctcttcatttctgccataccccactttctgcaaactcgcctcatttcaaactctggacttncacaacacgagggaaaattt

SEQ ID NO: 27999 - DNA, 390 bp, Glycine max
gaaggaagagatgaatattgatattggaagcaaagacacaggtttcacaaatggagcagtggtaaaatggcccttcatgaacaaagtatatgtccatcctcttttgatgtcattcaatcctcctcaggtgaattctgtgaaccatcctcatggtatgaagatgttttcagttcccaatcaagcaatttcagtttccatgggacatccatccctaaagaatcattttgcaactgttggtcagaatatgaatgttgctactgtgaagcaaccactactcggaggaatacctgttacggtgcctcattcagttcatcccattgttggtgctgttgctggaatgaccgaaacacgcgtgaaaccatccgtacctgctcctaaacttacaatctt

SEQ ID NO: 28000 - DNA, 236 bp, Glycine max
ggtgagagagagagcgagcaggttcagacacagagagaggggtttgggattggagggattgacgctgcgtctcttcctcttctctttcgatccatccctcattcctaatcctccaatccaaccacctcagcctcacactcacatatacacatatctgaacgcgtatcgtccctcctatggcttcaaagcgcatcctcaaggagctcaaggacttgcagaaagacccaccaacttct

SEQ ID NO: 28001 - DNA, 264 bp, Glycine max
acgcgtacgaacacctccgatattacgttagaatgagttcagagagagaacgggcagggtgttacacagagagaggatgttgcaaatcaaggccttgacattctttctcactctcaaccatttctatccatacataatttctaattcatctatcctatcacttcacactgacactaatatatacacatatactatactcgtatcgtgcatgctaatcctaactatccatccatttcgaactcatccatttgcttactgaccctt

SEQ ID NO: 28002 - DNA, 408 bp, Glycine max
tatgcaaagattgaaaatatagagggaatgaaacattttgatgaaatattgagagaagcagatggtatcatcctcgctcgtggaaatttagggatagaactcccacctgagaaggttttcttattccaaaaggctgctatttacaagtgtaacatggttggaaagccagttgttgttacacgtgttgtggactctatgactgataatctaagacctactcgtgctgaagcaacagatgttgccaatgcagtgttggaatgaagtgacgcaattcttcttggagcaaagaaccttgcgggaacataccctggagagaccatttctattggtggaaaaatatgtgctgaggcagagaaaggtcataatcaagaattggatttcaagaaggctcgtaaatatgtgggagag

SEQ ID NO: 28003 - DNA, 242 bp, Glycine max
gatccttgagttggataaggcaagtcggaacttctatcatcttgattttgcaggatttgaatcatctaaatgtgcagagtacatttcaaaggataaaatgtaataacaattgttatcaatgattgagattttaataaaaatatgtgtaaaataaattgaaatttattacaatctcaatcgttgattaatcagcaattactattctctactttattctatgtagtgtacaatttagagtcaac

SEQ ID NO: 28004 - DNA, 334 bp, Glycine max
acccagcgtccacccagcgtccgacggatagacaaagacgtaagggaggggtggaatgaaagggacaagcaacagttcatagaggattggggcactgacataaaaactggagataaattgccttggactcaccgaacctcgctcttgtaggcatattctgattgatatccccgtactcgtctacacgggcatcgtccgtgaattccatatgcaagatttggataatggtcggtcgtacaggaagttcacgtgagagagtctggagagccttgggtaataattcgttaagttagacctggatattatgaggctacaaaccatgttattttttcct

SEQ ID NO: 28005 - DNA, 371 bp, Glycine max
gaaggtgcaagagtttgttgtgagctataagctagtttatcgtgaggagaatatgaagttgtttgttttctttgttgctgcagtagttttggtagcatggccatgccatggcgcaggctaccaaaggttccctctccgaatgaaaactggctatggtgagcgttcttcggaggtaaaatgcgcaagttttaggcttgctgtggaagcacacaacatccgagcctttaaaaccattcctgaagagtgcgttgaaccaacaaaggactacattaatggcgaacaatttagatcagactctaaaacagttaaccaacaagctttcttttatgctagtgaacgcgaagtccatcacaacgacatatttatattcg

SEQ ID NO: 28006 - DNA, 356 bp, Glycine max
tccggaattgacggatgcatccacgcatgcgtacggatgggtgagacaacagacagaatgggtggggaggaatggagacgaacaagcgcaggttcatagaggataggagcactggcataaagaatctggagatagatttgcgttgaactcaccgcaaccttgctcttgttggcatcttcggcatcgatattccagtactcgtctacaaggtcatcgctcgtgaattccatatgcaagacgaggataatggtcggccgtacaggacgttcatgtgagagagtatggagagtctttggtaataattcgtcaagttagaccttgatattatgaggctacaaaccatgttcatttttcct

SEQ ID NO: 28007 - DNA, 401 bp, Glycine max
  modified_base (385)..(385): a, c, g, t, unknown, or other
gatgattaaggaccgtaccatcgtctacattgtccactgcttaacctccatttccataaagggagatcaaacttaatagtaaataacataatgcggcatttgctgcacgggaggctcgatgtgatcatacgtgagatcgacacattaccaagtcttaacgagtggaatttcaatctctgctgcaagggtacaagtagaagcgtgaggaagagatttctttcccaactcaagagttgtttgctctgtcaatgctaatgccagcccgagtttgtcgagacgggtctctatgcgacaggtgatttagatgaggcaagggttggaaggactaaactgttaaatgatcaatcctacaatcccacatggaatgagacctttcacatatatngtgcccatttgatctc

SEQ ID NO: 28008 - DNA, 393 bp, Glycine max
ggttctagtgtgtgattgtttgttgttgtaactcgttcttcttcttttgttgttctgtgtttgtgtttgttttttctctcacctgaaaatgtcttgctgcggtggtaactgtggttgcggaagctcctgcaagtgcggcaacggctgcggaggctgcaagatgtacccagacttgagctacactgagtcaaccaccaccgagaccttggtcatgggagtggcacctgttaaggctcaatttgagggtgctgaaatgggtgtgcccgctgagaacgatggctgcaaatgtggaccaaactgctcctgcaacccctgcacttgcaagtgaagtgttgggagagcaagcttcaagcagagatagcccttaattaggaataatgataaactattaat

SEQ ID NO: 28009 - DNA, 283 bp, Glycine max
  modified_base (201)..(201): a, c, g, t, unknown, or other
gagagagaatgagtacggtgggagaagggaaggcgagtagtaatggtcatggatgttgcaaatcagggccaggctatgcttccccactggaagccatttctggtcccagagagtctctcatttatgtaacctctgtctacacagggaccggaatagaaaagcccgactatttggcgacagtggatgtggatccaaactctncaacttattccaaagtcatccataggcttcctggtccttatttaggtgacgaattgatcacacaggctggaattcatgcagc

SEQ ID NO: 28010 - DNA, 387 bp, Glycine max
gaaggtgcaagagtttgttgtgagctataagctagtttatcgtgaggagaatatgaagttgtttgttttctttgttgctgcagtagttttggtagcatggccatgccatggcgcaggctaccaaaggttccctctccgaatgaaaactggctatggtgagcgttcttcggaggtaaaatgcgcaagttttaggcttgctgtggaagcacacaacatccgagcctttaaaaccattcctgaagagtgcgttgaaccaacaaaggactacattaatggcgaacaatttagatcagactctaaaacagttaaccaacaagctttcttttatgctagtgaacgcgaagtccatcacaacgacatatttatattcggcatagataacaccgt

SEQ ID NO: 28011 - DNA, 418 bp, Glycine max
gaagaagaagaagaagaagaagaagaagggttgggtggtcccattccataggaagagatcaaagagaagagaaaagatgtttgagccgaatcagctatacactcgagcgaagaccgaggaattcgacctcgaatcaggggaaaccctctacccagggctgagcgtcggcgagaaccagctccgatggggcttcatccgcaaggtctacggcatcctctccgtccagatcgtcctcaccaccctcgtctatgtcaccaccgatttctatactccaatcaatgacctcctcaagggcaattccaccctcctcctcatcctgctcttccttcctttcatctttttgaatcccctgctgaagtaccagcagaagcatcctcataattacatattgcttgcactcttcaccgtgtctatcaac

SEQ ID NO: 28012 - DNA, 261 bp, Glycine max
gggctcaaggaatttcgcttagttctttgcagagaaatcagtgcagatgagagcaaattgaatttagaagccaagatcaagatcagtatggaatatcctctaaggcctcctctttttgcattgagcattagttgtatatcttctggggaaaaccatgatgagacaggtttggagtggtacaatgaacttcgtgcaatggaagcagctgtcaatctacacatactaaagatgttacttgtcaatcaacaaaattatgtattg

SEQ ID NO: 28013 - DNA, 351 bp, Glycine max
cgcgagaagacgacagcagggggagaaaaacgagccaattcatcattatctctctgctctgcttcttcttgttcaaatcttaggagctgaggagaatcaatcgagagaaatatgtctggtatcgctcgtggacgccttgctgaggaacgaaagtcatggcgcaaaaaccatccacacggtttcgttgccaagcccgagactctacctgatggcaccgtaaatttgatggtctggcattgcactattcctggcaagaccgggactgattgtgacggtggatatttcccactgacaatgcacttcagtgaagattaccctagcaagccttcccagggcaaatcccctcaaggt

SEQ ID NO: 28014 - DNA, 397 bp, Glycine max
  modified_base (368)..(368): a, c, g, t, unknown, or other
ggcaaaagaaagagagagaaatggcactgagggcagccgtgctccgccacgttcgtgtgccactccaagccgctccaaaactgcagccatggcgtgccatgtcatcacacggcgacgatcatctctccaaagaggaggtcgtcgaaagagtcctcgccgtcgtcaaagatttccccaaagtcgatccttccagggtgagtccagatgtacatttccagaaggatttgggtttggatagcttggacaatgtggaaattgtaatggcactagaagaggagttcaagctagagatcccagacaaggaagctgataaaattgactcttgtcatcttgctattgagtacatttctaaccatcccatggctggntaaactaatgtgtccttttcctatttggc

SEQ ID NO: 28015 - DNA, 390 bp, Glycine max
ggttttgagcatgagtagattgggtggagttggtgcagtggcgccactggtaactgatatcccattatcgtcagtcgaggaagaaggcggtgagggaagaaaccagccagcctgggagaagtggtcaaatgatggcacagaaagacaggtagccaagcttatggaagaaaatgtgggtgctgccatgcagtttcttcaatcaaaagcactctgcatcatgcccgtctcactagcttcagcaatataccagtcacaaccctcaggcacttctagtatagttaagcctgaaactaatcctccttcataatcatagtcagaactctggcacagatgcaccatccagtggtcccatcaagggctcacctaacactgctaggacccacgtgtaat

SEQ ID NO: 28016 - DNA, 397 bp, Glycine max
ggatgtggaatgtgggaaaccacgaagtagagtttttgcctgaagtgggagaagttgaacctttcaaaaactatctttaccgatatactactccctattcggcttccaaaagcaccagccccctctggtatgcagtcaggcgtgcctctgctcatatcattgtgctatcaagctattctccatttgtgaagtacacgcctcaatacatatggcttaaagaagagctggcgcgggttgatagaaagaagacaccttggctcattgtgctcgtgcacaagccactctacagcagcaacgtagctcactacatggagggtgaagccatgcgatcagtttttgagacatggttcgtccaatacaaagttgatgtcatctttgccggccatgtccatgctta

SEQ ID NO: 28017 - DNA, 334 bp, Glycine max
ggagagtgagtgagatagagagagacgcctggcaaatctcaatcgaatctcagaaaaatgagagaaatcatcagcattcacataggtcaggccgggatccaggtcggaaactcctactgggaactctactggctcgaacatggcatccagcccgacggcatgatgccttctgactccaccttcggtgtagcccacgacgccttcaacaccttcttcagcgaaaccggatctggcaagcacgttccccgtgctgtcttcgtcgacctcgaacccaccgtcatcgacgaggtccgctgcggcacctaccgtcaactctttcaccccgaacaactca

SEQ ID NO: 28018 - DNA, 399 bp, Glycine max
ggaagcagctcaggatatggaggaggatggagctgataagggaacttttccaagtacaaggagtgttgagaaggtgggggacatgaagcaagtaaatgatgctgtgaatttgagttttgctactaaggattccgaggaattgaagtcaaggttgagtataatggatgcaaagctaagagaggctgaaggaaccatcatgaagttgaatgaagagaggcgcaggaacatccgagaaaaagatttgctgaagcaagagttggagatgttgaagaagaaaattaagatgaaaagagctcaggagggattcccgttactgtttgtctgtgtggtttcgattgtcagtatggcagtcggatattatattcatccataagggggaattgagtatagtcacagatg

SEQ ID NO: 28019 - DNA, 399 bp, Glycine max
ggagtgcggtgttggttaaacatgtggaagtttggtgcttgaacttgaacgccgaacattgcgattcagagagagagagagaagagaatggccatggcccgaagagtccctcgtaatgttttgggattggtcaaaaggaacatgtccttcaaatctttggatcccccttcctccctcacccacggaatccacgtctttcattgccccgatgccgttggaattgtagccaagctatccgactgtattgcctctagaggtggaaacattctcgccgctgatgtttttgttcctgaaaataaacatgtcttctactccagaagtgattttgttttcgatcctgttaaatggccacgggtgcaaatggaagaggacttcctaaagctttcacaaacattcaaa

SEQ ID NO: 28020 - DNA, 411 bp, Glycine max
ggagacatttttttttcctcaccctcaaaatacgtttctttgagtccaaagcgcgcactgtggaaattcttaacacatcgtttggccaaaaccgaaattaacaaaaactcatttttccaatggagtgccagtttttccttcctccttaaaattgttccttcccccattcaatccctttctgcacttcagatctaagaccataattgggttcctcgctctctaaagaacaagggactccaatttgggtactgtactagtttataaagatttcatttttattataaaatatttaagggtgggggctagagaaggagaggaatggggttagttggggtccaagaaaacgggaacggtaatggagatggaatctctgagattccgttggggactaaaacaaaatacattaagatg

SEQ ID NO: 28021 - DNA, 389 bp, Glycine max
gatacaacagttatagtgtgaactcaactaagaataataataaaaaaagaagaaaaagaagcggaacaatggagctaactcctgcgagtgttgtttggtgacagttgaagtcgaacaaaagacggctagaaacgcggcatggcgtcgtcgaagcttgtctcgacgaatccggatctgccacgggacccttcttcttctatatctcccctttcttctcttctctccgatctgcaccccatggacgacctcctcaagtccatcacccccaattccgtcgacgacttctggaaggggatcgctgccgcctccaccgacaatgccggcggcgtgaccctcgaggatttcctcaccaaggccatccccgtcacagaggaagacgtcagaggtgc

SEQ ID NO: 28022 - DNA, 318 bp, Glycine max
gggaacagagcgagcgagatcaaaaaatggcatcctctgcttgtaccaaacccatcttcccctctgccttcaccgtctctaagtcaaagctctctcgtcatgttcatgtctccttcacctcccccaaacccatctactaccactacagaaagctctctcatgcctctcaacgttccttggtggtcaacagcgttttgaaaacagttgacccgacacaaacctttttggcggaaacccacctccaaggatgttgggcctttggaaaaaaagccaaccttcctggcttccagaaaactggaaaaggcaggcttgcagggg

SEQ ID NO: 28023 - DNA, 224 bp, Glycine max
agagaagagaggagaaagcaatgggcattgatagtgaatacgtgatatctcacaaggcctatgcgagggtgggattgcttgggaacccgagcgatgtctactacggcaaaacgatagcgttaagcgtcgccaacttcttcgccaccgtcacgctgcgtcccttcgaccagttaatccttcaaccccacccccttcaagatctccttcatttcttaatggttcct

SEQ ID NO: 28024 - DNA, 295 bp, Glycine max
ggaaacaatggaagctgttgagttagaaaagcagaaacataataatactagaatggaagttcttgcacgtttagctaaactggagactgccaatgctgatcttgcaagatcccttgcagctgtgcagtggaaccttgaagttgaggttaaacaggtggcagaactcagacaggaaatcactttgaaaggattggtttacgaaaaacttaaaaagggaatggccaattcttggcaaacttggactttaccaaatcaaattggtttaaaagggggttaagttgaaacggaaaatttt

SEQ ID NO: 28025 - DNA, 270 bp, Glycine max
tgtgatacaacagttatagtgcgaacggaactagaaataatattacggaaagaagaaaaagaagcggcacaatggagctaactcctgcgagtgttgattggtgacagctgaagtcgaacaaaataccgctagaaacgcagcatggcgttgcctaagcttgtctcgactaatccagatctgccactaaaccctagtccttctatatcacccctttcttctctactatccgatctgtaccacatacacaacctgcttaattacattaccccc

SEQ ID NO: 28026 - DNA, 271 bp, Glycine max
tatgttaaactatttattgtaatgaattattgtattgttaatttttttatttatatgtaaatatttggtccctaaaaaagttaataagaaaaccaagattatatgaaaaaaaaacaaattttctttgttgtttaaaaagaatattcttaaataaaatatttaaatattaaaaaaattaaaaaatataagcttatttaatttaattataatctataaaaaatgaacattttatttaaaatcatattagttgataaaaatacttaaatatgta

SEQ ID NO: 28027 - DNA, 348 bp, Glycine max
gggagtgaagaagattaacgaaggatggaagctgggtctagcgaaggagaagaggtgcagcatcgcgtgccgttgagggagagagtggagtggtcagatgttacttcggttcctcaaaacgacggccctaaccctgtcgttccgatccagtacactgaagaggtttccgaagttatggattactttcgcgccgtttaccttaccgatgaacgctcccctcgcgccctcgctctcacagtcgaagccgttcaattcaacttcggcaactacactgtgtggcatttccgacggctgttacttgagtcgctaaaagtcgactcgaacgatgaactggagtttgaggagcgt

SEQ ID NO: 28028 - DNA, 390 bp, Glycine max
gggctcaaggaatttcgcttagttctttgcagaaaaagcagtgcagatgagagcaaattgaatttagaagccaagatcaagatcagtatggaatatcctctaaggcctcctctttttgcattgagcattagttgtatatcttctggggaaaaccatgatgagacaggtttggagtggtacaatgaacttcgtgcaatggaagcagctgtcaatctacacatactaaagatgttacttgtcaatcaacaaaattatgtattggctcatcaagtgaattgtcttgctatgttgttcgactattatttggacgaggcatccccatcatctgaaaggacaaattgtacttccgtggttgatattggcttatgcaagcctgttactggtagattc

SEQ ID NO: 28029 - DNA, 362 bp, Glycine max
ggggcgaggtagccagagagtgatacaatacagagtgcgttgttgctccttcgccacaactccctgccaacatgggtatctccagagattctatgcacaagaggcgtgccactggtggcaagaagaaggcatggaggaagaagagaaagtatgagcttggtcgccagcctgctaacactaagctgtcaagcaacaagacagtcaggaggatccgggttagaggtggaaatgtgaagtggagggcactgagattggatactggaaattactcctggggaagtgaagctgtaactcgcaagactcgtatactaaatgtggtttacaatgcctcaaacaacgagcttgtgcgtactcagactctt

SEQ ID NO: 28030 - DNA, 231 bp, Glycine max
tttaggcaatagtagcagcaattcacactggtgtttgcttctcgttactcatttctcacctaactttctattcttctcagtctcagatcagaaccttagccatggcagcgttccagaagatcaaagtcgccaaccccatcgtcgagatggacggagatgaaatgactaaggttatctggaagtcaatcaaggacaagctcattttgcccttcttggagttggacatcaagt

SEQ ID NO: 28031 - DNA, 120 bp, Glycine max
atcatcttagcgctcatatgatacccgacatgcacaatgaggccgttgatatcgccgttcacccgtttgagaagtacaatgtgcagaaagacgtttcggagcagataaagaagctcccct

SEQ ID NO: 28032 - DNA, 232 bp, Glycine max
gagcttcaggtcagagagagtgagagacggcaaagacggaggagaggtcgcaaacgcaaaaatggtgaagtttctgaaaccaaacaaggccgtcattgtccttcagggacgctacgccggcaagaaagccgtgatcgttcgaaccttcgacgaaggaactcgcgagcgcccctacggccactgtttggtggcggggataaagaagtaccctgcgaaagtgatcaagaaagac

SEQ ID NO: 28033 - DNA, 377 bp, Glycine max
ggagcaagagtgaagagcgaagagaatggctcccaagggtttaatctttttggctgtgttatgcttctcagcactgtcactgagtcgttgtcttgcggaggataatggacttgttatgaacttctacaaggaatcatgccctcaggctgaagacatcatcaaagaacaagtcaagcttctctacaagcgccacaagaacactgctttctcctggctcagaaacatcttccatgactgtgctgttcaaagttgggatgcttcactggtgctggactccaccagaaagaacttggcttagaagggaaccgattgaagctctgggttgagaaatttcaaggaccttgagacccttcaagaagctttggaaagggaatgcc

SEQ ID NO: 28034 - DNA, 196 bp, Glycine max
ggagaacaaaaaaaaaacaactttgcggctgcgctgctgctaatagcgcgttgcatctgctacctatcatacatattttcgccaaaccgccgattccggtgagcgtttctaccgtagcgctcaagaaggaagcagtggctggtggtgttggttgtggtggaggtgggtttgctgatcatttgtggtagaaggtagg

SEQ ID NO: 28035 - DNA, 269 bp, Glycine max
gggggaaagagagtggattcttggtgactttcttgaccagaaaagtagcaaccgcagcaccaaagactgtgctttgcatctatcgaattctaatccaattctctctgcatctacatatacaatatcataatcgctcataagattgcatttgcattgatttcaaaaatgcagatcaggggatcgagtcacagactctccagtatgggcaataatcgatcccgcattcccgcgctcctcatctacatgttcgccactttcgcttctatcta

SEQ ID NO: 28036 - DNA, 393 bp, Glycine max
ggagtgaagaagccaaaaagaacttcgccggagctctaacggcgaggcccaactccgatgagccgaaaccggcaccggtgccagctgttcccccgaagaaggtcatcatcaagagcgctgatatgatccccgacatgcagaaggaggccgttgatatcgccgtcgccgcgtttgagaagtacaatgtggagaaagacgttgcggagcagataaagaaggagttcgataagaggcatggccccacgtggcattgtatcgttggacgtaattttggctcatatgtgactcatgaaacaaaccactttgtttatttctacttggatcagaaagcggttttactctttaaatctggctagccttattgtggtagcaaagaagttgagatctatggga

SEQ ID NO: 28037 - DNA, 257 bp, Glycine max
ggaagaagaagaatcagttccgtcgtgagacactgtcataacataagagtcgtggacgcggttggctgttgctgtctacggttccaacttccaagttacaagcttcacccattttataaaagttacggttcggttccgctgcattcgtgcaacacaaaatgagcgccatctctttcagttccacccatttgcacagttggaaaaatcccaaggcgtttggaaaggtgagaaagcaacgagatgggaagctacttgtc

SEQ ID NO: 28038 - DNA, 401 bp, Glycine max
ggataatgtaaaggatagaacccaatctgaaatatctagctctacctcggaaaccaagcatttgtgtgtattccttttcagggagttaagtggaagatggggttgtcaacagcacggacaagcataggatcagtttgtgtttgtgccatctcaaagcctccccgccgtcactgccatttcctcccaacctctgtttctcctgtcttctatgttttcaggtttgaggattctttcaccagagattttgcatatcgagtagcttgcaatggttacaacattctagttccagacttatttcgtggaaatccatggacaaaggaccagcacgatccagatgtgttcgaaaaatggattgctagacaaaacccagagaggatcgcacaagacattaccagatggac

SEQ ID NO: 28039 - DNA, 306 bp, Glycine max
ggagagaaaaaatgaccaaatcaatcaaattctttgagttgaacacaggggccaagattccttctcttgggttagggacttggcaagctgaacctggtgttgtagctgaagctctcaccacagccattcaggttggatacaggcatattgactgtgctagtgcgtataagaatcaagcagagattgggtctgctcttaagaagctttttgatgatggtgtggtgaagcgtgaagacttatggatcactttcaaactctgggggtcaaatcatgcaccagaagaagtgcccaaagccttggattaaa

SEQ ID NO: 28040 - DNA, 390 bp, Glycine max
  modified_base (355)..(355): a, c, g, t, unknown, or other
ggagtaagaataatacaaaaaatataccacggacccgcatatcaccggtatacccacccctctttccactgtaggagggactggagagtcagaaattggaacataagattgagacaccaaaatatagcttactatacacaacactgtgttgtgcttgtgaatctgccttcgaagagaatcagcacagcagcaacaatggaggcgccgccatttgcttattctgcttccacttcctctctcttttctcttcgcaacaagccactctcatcccctacaatcacccatttgggcaacaccaaaccatcaaagagcttctcggttggtgcctcctcttctagggattctgttgtgactntgcttgattacggtgctggcaatgttcggagtgtc

SEQ ID NO: 28041 - DNA, 348 bp, Glycine max
  modified_base (239)..(239): a, c, g, t, unknown, or other
ggagagagagagaagaaagggaaaatggtgaacttcatgttgatgattactgcagagcttgagaacctcacgaatctgcaaccccaagatggctgcgacgaccccaacttctcctacctcttcaagttgaaatgcgggagatgcggagaactgagccagaaagaaacctgcgtcgtcttatacgacaccgtttctctccccgttggcaagagcaccactcatctcattcaaaagtgcanattttggggcagggatggcactgtgaccatgattgaaggcaaaggtaaaccactcacccaggaaatcagtgaatcagggaagtacgccccattgatgttatttgactgt

SEQ ID NO: 28042 - DNA, 248 bp, Glycine max
ggcatcaaaattgcttattattttggtattagggatgcgatggctctgttctgattgactccactaaggataatacagcagaaaaggattctccagggaatttgagcctgagaggctttgaagtcatagatgccatcaaagaagagcttgaaagacaatgccctggggtggtttcatgcgctgatattcttgccatggctgctagagatgcagttttctttgctggaagcccagtgtatgacatacct

SEQ ID NO: 28043 - DNA, 253 bp, Glycine max
gaggaaaaaaagaagaaaaaaactggggagatattctgatcagaaaaattggggtttgaactttgaagcattaagggactacgaaggcatcaatttctctttcttcttgggaagaattttcttctgcgcaccgaaattgcatcttctacagtggtccatctgatcttcttctttctgcttctggggtggtttgtctttggatccttgatggaatggaaggagaaagtgtttcaaggtcaagttagtcaccaaa

SEQ ID NO: 28044 - DNA, 297 bp, Glycine max
gattccactgagtgtggtaatcaatcatcttttgattggtcttcagtactttagtgtgtgatttaattcccagattttgagaatgtctagctgtgggtgtggaagtagctgcaactgtggcagcaactgctgttgcaacaagtactctgttgacttgagctatgttgagaagacaaccacagagactcttgttttgggtgttgggtctgtgaaggcccaattggacggtgctgaaatgggtgttgcagctgagaacggtggctgcaactgtggatcaagctgcacctgcgacccatg

SEQ ID NO: 28045 - DNA, 179 bp, Glycine max
aggtgctcctttactgggatgacagatataaaaaggatgatgggctcaacactatgggttcaaaccttgctcacatgaacaacgataataatttgtatctcaagtccagctgctacgatcgcgacatttacctacttgcgacgaaaatttgtagccatatagcgctgatctattccata

SEQ ID NO: 28046 - DNA, 354 bp, Glycine max
  modified_base (336)..(336): a, c, g, t, unknown, or other
tcctgaagagtgcgttgaaccaacaaaggactacatggatggcgaacaatttagatcagactctaaaacagttaaccaacaagctttcttttatgctagtgaacgcgaagtccatcacaacgacatatttatattcggcatagataacaccgtactctctaatatcccatactatgaaaaacatggatatggggtggaggaatttaatgaaaccttatatgatgaatgggttaacaagggcgacgcaccggcattgccagagactcttaaaaattacaacaagctgttgtctcttggctttaagattgtattcttgtcaggaagatatcttgacanaatggccgtaacagaagc

SEQ ID NO: 28047 - DNA, 395 bp, Glycine max
  modified_base (355)..(355): a, c, g, t, unknown, or other
ggaagtttgaaacaacaaagtattattgcacagttattgatgcgcctggacatagggatttcattaagaatatgattactgggacatcccaagctgactgtgctgttcttatcattgattcgaccactggtggttttgaagctggtatttccaaggatggacagactcgtgaacatgctctgctttcattcacccttggtgtgaaacagatgatttgctgctgtaacaaaatggatgctactacacccaagtattccaaggccaggtatgatgaaattgtgaaggaagtctcttcctacttgaagaaagtaggatacaaccctgacaagattccttttgttcctatctctggttntgaaggagacaacatgattgagaggtccacaaaccttgac

SEQ ID NO: 28048 - DNA, 205 bp, Glycine max
aggcgtgcgtacacgtccgagaagacgacagagaggcatgcatctcaaccatgggggctaaggtttcaagatgcggtaacacctataatgcgcggaattatatacttacatcacgacttcttgatcttgctcattgaaagcggccgttatggatcatggctattgcttcgtgctttgtgcaattccaggattaaaatgaacccaa

SEQ ID NO: 28049 - DNA, 395 bp, Glycine max
ggtgtgagttcattaacatatacaaattctctgtgttgtgttgtgtacttgtgttaattgtgttgctgttgtaggaaatttaagtgaagagagaatgatgatgaagtctgctatgtgtgcattggtgcttgtggcactggttgtggttgaagtggggcccatggctgaggctgtggtgacttgcaacccaacacagttgactacttgtcttccggcaattaattcaggttctgcaccttcgagtgcttgttgccagaagctgaacgagcaaaagccatgcttctgtggctaccttaaaaaccctagcttgaagcagtatgttaactctcctaatgcctaaaaaaccgttagttcttgtggtattgcctatccaacttgttaagcacctgttatat

SEQ ID NO: 28050 - DNA, 111 bp, Glycine max
aatattgatgagtcttttcaagtgtgggaaattctgtgctaacttaaagcattctgagaggttgaattcgggagtcatggtggtggagccatctgctactctttttaatga

SEQ ID NO: 28051 - DNA, 232 bp, Glycine max
ggagcgaagagtgaagagaatggctggccaaggtttaacctttctggctgtgttaaatgcgtttcaccactggcacttgattcctttggttgcggggaaaggccaaataatgggcctggtattaacctctaccagggatcatgcccttaagcttaagaccttattaccgaaccaggcaagcttctttaccagcgccaccagaacactgtgttcttctggcttaagaaccttt

SEQ ID NO: 28052 - DNA, 361 bp, Glycine max
gacactaaacaagttaaaagaagagcatcgctgaactaacaaagcaaccctatgtcgaaggtggtttgtgtcaccggagccagcggcgccatcggatcatgggtggtcctactcctcctccagcgtggttacaccgtccatgccaccgtccaagatatcaaggatgaaaatgagacgaaacatttggaggaaatggaaggagcaaagagtcatctccatttttttgaaatggatcttcttgacatcgactccattgccgctgccataaagggttgttccggcgtaatccaccttgcatgtcctaacatcattggtcaagtcgaagatcccgagaaacagatattggaaccggcgattaaag

SEQ ID NO: 28053 - DNA, 350 bp, Glycine max
ggagagcgagttgattaaggcaaagggtgtgatgagattagttttgagaagaaaccagcaatcggcgattaggagtgagagagatatggagggaattgaaggaaatagcagcagatacagtctgaaaccctcgcgaatttgcaacgaagatgttctgatctgcgtcgacgtcgatcctcagtgcctcgtcgaaatgaaaggtgccaccggtcccaatggcagacccctcacccgtttggactccatcaaacaagccatcgttcttttcgtaaatgccaaattaaccttcacccccgaccaccgtttggccttcgccattttttccaaaaccttgggtttttggttcagga

SEQ ID NO: 28054 - DNA, 244 bp, Glycine max
gggaatgggaccaggtaacgagcaaggggtatacaacatggagttcttgtaaatggtatgacatggcttttaaacccaccagaacatgatctgacgttgattttagctgataatggacttgacgtaaggattgcgaacacgatacgaacctggtattgtccgcggcccattttaatggaaccgtcttagccaggcttatgggaatggcctttggaatgaactggcctccaatgatttccttgcg

SEQ ID NO: 28055 - DNA, 221 bp, Glycine max
ggagagatgcgtgtttgagtctgtgtgtgtgaaggttgaacaagacgcgaagcattcgcaacccccaaaaacgcggcgttttgaacggtccacgacacgaacatggccgaaacgttttctacagaagaggatcacattcatattcccatcgaaattttcagcgacgacgaatgggctttaattgaacctgttttcgcttttgcttccactcgcactttctt

SEQ ID NO: 28056 - DNA, 344 bp, Glycine max
  modified_base (276)..(276): a, c, g, t, unknown, or other
  modified_base (286)..(286): a, c, g, t, unknown, or other
  modified_base (313)..(313): a, c, g, t, unknown, or other
gatagcatcctaagatacagagactgtcaccatcgtcctgctcatttggcacatgcttctccccctgaatactttgtccgcctggagaacacaacttacaaagacgatctatatttaaggaagaggacaaggatgcgtcggtggctttgttgtacttgtcaggtggaagagtcttacccatcaaatgaaaatgaacacctgaaaagcccaaggaattatggagatggcaaccaaaaaggctcaaaggtgtcagctcctgtcaaacctgaaacacanaaggcacctncacctattgaagctccaaccttgtctntagatgagctgaaggagaagactgacaactt

SEQ ID NO: 28057 - DNA, 402 bp, Glycine max
ggcacaagtgagtttgttgatcgagataactggaaacagtgtgatgaaaatgaaagtccttgttttcttcggtgctacaattttggtagcatggcaatgccatgcgtacgatatgttccctctccgaatgaacactggctatggtgcccgtactccggaagtgaaatgcgcaagttggaggcttgctgtggaagcacacaacatctttggctttgagaccattcctgaagagtgcgttgaagcaacaaaggaatacatccatggcgaacaatatagatcagacttccaaacagttaaccaacaagcttacttttatgccagagacctcgaagtccatcccaaggacacatttgtgttcagtatagatggcaccgtactctctaatattccatactacaaaaa

SEQ ID NO: 28058 - DNA, 381 bp, Glycine max
gaagtgtgaagcactgagcattgaggaaatgggatcccttgggagagcgatctacagcgttggtaactggattcgagaaactggacaggccattgatcgtctcggttcccgtcttcagggcggttactacttccaagagcagctctctaggcatcgaactctgatgaacatatttgataaggctcctgttgttgataaggatgtatttgttgcgccaagcgcctccgtcattggagacgttcaacttggaagaggatcatccatttggtatggagttgtcttgagaggtgatgttaacatcatcagagttggaaatggaactaacattcaggacaactctctggtgcatgttgcaaagtcaaatttaagtgggaaggtgtt

SEQ ID NO: 28059 - DNA, 377 bp, Glycine max
  modified_base (1)..(1): a, c, g, t, unknown, or other
  modified_base (10)..(10): a, c, g, t, unknown, or other
nccacgcgtncgaattcgagcgggcgcttttttttttgtggagagattcgtgtttgtggtaacaagcaatttctaaattcagatgaattgatttctcaatccatagtagagatttgaagcttacaatccccaggggtagaaaaggcccatggaaatttatatacagaatttggggaggcatacttaatcaagagaatacccacttttgtgggaagctaagcgacattgactactattcagaagaatctacccggcaacaatcttaaccatccaaatcagagatgaagaatcttcagtccgccaaaaacccattccaggcactttcttccagttttaatttgctactcaaatgcaatggccccattttagaggaattc

SEQ ID NO: 28060 - DNA, 209 bp, Glycine max
gaactacaagtggaccaaagtcgcaaagagcaacgcgaattcaaaacccagaagaagtagaagaaactcgcgtcgtgtggtgaatcaaattcaatccgcagaagaaaacatgttactctttgcaacacttcttctcttttctctgcaatcgagtatcttaacaccgattccagtaaaacccactaaactctcttcgaatctcttcgtca

SEQ ID NO: 28061 - DNA, 299 bp, Glycine max
  modified_base (245)..(245): a, c, g, t, unknown, or other
atagggatagggttaaggccatggagcgcatcatcggcgccaagtacaagctatgtcgcaagatcggaagcggatccttcggcgaaatctacctcgccactcatattgataccttcgagatcgtcgccgtcaagattgaaaacggtaaaacgaagcatccgcaattgctttatgaggccaagctctacaatattcttcaaagaggaagtggaatcccgagcataaaatggtgtggtgtagacggngaggataatgtgcttgttatggacttgctgggacctagtcttgaggatcttttt

SEQ ID NO: 28062 - DNA, 188 bp, Glycine max
tcttgaatttgatcatcatgttttcaagagtctctacaagcaagtcactgagcttaaactactattcaaaaacatgccctgatgtggaatgcattggtgccaaagcagtgaaagatgccactggtatggacaaaactgtttcaactgcacttttgcgaatgcactttcatgactgtttcggtcggggg

SEQ ID NO: 28063 - DNA, 251 bp, Glycine max
tcgacgtgaaaacacagggggcggggtacaggagtgggtgactgcgcgcatggataaagagagaaaaaaggcatgccgaagtcctgtatgtttggatggcaaagacatgtcttaattttgatcccttctcctcaccaggaatcacgttttattgcccatgcgtggaatgaccagctatcgctgtttgctctaagtggaacatttcgcgtatgtattgtctgaaataacatgtcttctactccagaagtgat

SEQ ID NO: 28064 - DNA, 193 bp, Glycine max
  modified_base (84)..(84): a, c, g, t, unknown, or other
atgaaagactagggtatctggaagtaatcaaggacaagctcattttgcccttcttggagttggacatcaagtattatgacttangccttccttaccgtgatgagaccgatgataaaggtacaattgaaagtgcggaagcaactctcaagtataatgtggcaattaagtgcgcaactattactccagatgaagc

SEQ ID NO: 28065 - DNA, 57 bp, Glycine max
ggaggggagaagcccaaaagaactttggcggagctgttacggcgaagcccaacttcg

SEQ ID NO: 28066 - DNA, 140 bp, Glycine max
gggggatattttttttttggtttaacaggcattttttaaattaaaaagaattgatttttcaatccataaaaaaaatttgaagcttccaatccccaggggtaaaaaaggcccatggaaatttatatacaaaatttgggggg

SEQ ID NO: 28067 - DNA, 403 bp, Glycine max
gaagaagggttctttcttccctgcgaagattcagagtgctaagtgtgagagaaagaaaatgccaaagtctcaatttcgaaccccatttcttgtttctttttctcttttgttattcatcttcaacctcaccccttcatacgcactctatggagcatccacacccgtgcttcaactcactccctctaacttcaagtccaaggttctgaattcaaatggagttgttcttgttgaattctttgctccatggtgtggacactgtcaggctcttactcctatatgggagaaggcagctactgtgttgaaggcgtgtgttactgttgcagcaattgatgctgatgctcacccgtctttggctcaggaatatggaattagaggatttccaactataaaaagtgttgcacct

SEQ ID NO: 28068 - DNA, 107 bp, Glycine max
ggggtttctgaagatcaaatcctcatcttctaccatgtcaagtgctcactttcttcggccatttttatttgtttgttggtttaacaaaacccataatcagaacccat

SEQ ID NO: 28069 - DNA, 259 bp, Glycine max
  modified_base (1)..(1): a, c, g, t, unknown, or other
ngggtgttgtgttaatctcattcacacattcacaggtatactctctctctctttgtcgcttggatcactgatctcatctcaattttcagatatgtcgacatctgataagccagaagtggtggaaaggggtagcaaggatgaaaaacacaaggaagatgatcaagaggaggggaagggtggattcattgagaaggtgaaggatttcattcatgacattggtgagaagattgaggaagctattgggtttgggaagccaact

SEQ ID NO: 28070 - DNA, 378 bp, Glycine max
aaccaaaaatggttctcacatccactgccacacacccagatgaacaagaccagaggctaaactatacttttgcttccagatatgtgcgtgaacctattccaaagttcaagatgccggagaaatccataccaaaagatgctgcttatcagataataaacgatgagttgatgttggatggtgcaccaagggctaacttggcctcggttgtgaccacttggatggagcctgagtgtgacaagctcataatggcttcacttaacaagaactatcttgacatggatgagtatcctgttaacactgagcttcagaaccggtgtgttaatatcatagcaaatctattccatgctcctataagtgatgatgagactgcaataggtg

SEQ ID NO: 28071 - DNA, 389 bp, Glycine max
ggatagagagatggcagctgcaacatctggtgctgtgttaaatgggttgggatcttccttcttgagtggaggaaacaggagccaaacccttctggcctctgctattggaggcaaagttggtgctgctgttactgttaatcccagaagactcattgtggtagctgctgctgcaccaaagaagtcatggctccctggtgttagaggtggtggcaatctcgtcgacccagaatggcttgatggatcgctaccaggtgactatggttttgatccactaggccttgggaaggacccagcattcctcaaatggtacagagaagctgagctcattcatgggaggtgggcaatggctgcagttctaggaatctttgtggggcaggcatggagtggag

SEQ ID NO: 28072 - DNA, 365 bp, Glycine max
caatgaattgaatttagcacataacaaattcacaggtgctttgcctgacttaactggaatggataccctcaactatgtggatcttagtaacaactcttttgatgcatcggatgctccaacttggttcacaattcttccatcactcaccactcttattatggagtttggatcccttcaaggtactcttccatcaaaactctttgacattcctcaaatacagcaagtgaaactacgaaacaatgcattgaacaatacattggacatgggtgacaacatttgtccccaattgcagcttgtagatttgcaagacaatgagatttcctcagtgacactccgttcacaatacaaaaatatattgattctta

SEQ ID NO: 28073 - DNA, 429 bp, Glycine max
gagaggattggatttaaaaaagaaaagacaaaaaccgcattgagtggggcctgccctaaaatggcccttacagagcttctctatcaagagctgctagttggtggttgaggagtaataggttccgcataagctacatttcgtgggggaggcacctatccagtacttccgaactcgtctttcatctacagacattgggtcgctaaagccaatagttcggtgtccgggcaacagccaagccactcatctttggttgcagcttcggcggaagcctatgctttcagttcagttccattccttggttctccggttgattgccctgcccgcgtcacaccttaaaaagctttggaacggcagtttcacttacttctcacggacattggaccttcttcaaactggcctttgaactttagcaaagagtctattggatag

SEQ ID NO: 28074 - DNA, 159 bp, Glycine max
aggggttttaaaaaaccaaccagccaacccgttccaagggggggatttggaattggaaaggcaaggaattcccctcgtgttcttccctttacttttgaattaaaccctaattaataactttccaatccaccaccttaagcttacaattacaccttcccc

SEQ ID NO: 28075 - DNA, 395 bp, Glycine max
ggagaagaagaagaagaagaaacgaggggtcttcgaagaaaccatgagtatcctctctctctaaactctctcagattcgatcctctcttctcttctttcaaatccgcttccctcgcactaaatgacagggtttcctggccctcgccgcgatcacgcttcttcttcctcctcctcgacaattccaacagcagtggtagcaacgtatttaatttgcttgcaaggaaggagatctcaccccgaacaagatatgtggcaaaatggcattggggagaacccggtgaagcttcaaaatcaaagtctattgcttattctcgtcctaaaaaagaagttgtgagagatgcaagacgtggtctcctctcatgggttgaggctgagccattgcggcatttgtctgc

SEQ ID NO: 28076 - DNA, 398 bp, Glycine max
gactctaggtgggtggaggtactttatgatctatggtaaatctctaatagtagctgcgcatttctggaattgcatacttgcggactgtggaggatgacaaatctcgattatgttgtagcttgccgcacagatagagacagattcaaaatctgtcttgcacaggtgtggaagatgtgcttatagatggaccctttctctgtcccatttactacagttactcctaatgttggaatgagttagacagaagtaacatgcagatttgtattcttctggcaaaatggatactccgcttttgcttcatgttctctgattagttggggttgatcttctggactacagtgtgaatctgatatgcgagaaccctattactaccaggattggcgttatcgacgatgcaa

SEQ ID NO: 28077 - DNA, 394 bp, Glycine max
ggaagcagaagccaaatggcaccgggccgtcattccataaaccccaaaacccatggcgactttgacttctaaaaccaacgtcgttttcatagacaccaacctcgatacccacttggccctcgtcgtttccgacctcgacactgtctgcaaccttaaaaagagttttctgtcggaacatccttaatgctttccgaaaattgggaaaattcagattcatgggataaaggttgagcgcatggggtacttttaccaccttacagattccatgcctgtgagaagtgccttcagtggtgtcaaagagagctggtttctcactgttgatgtttctgtgttgagggagtgtgctcagaatgactcaatattttctctgggcattgcaaataatgctttgact

SEQ ID NO: 28078 - DNA, 384 bp, Glycine max
ggggtctctgaagatcagatcctcatcttctaccatttcaggtgctcactttcttcgcccatttttatttgtttgttgttttaacaaaacccataatcagatccgatcctcttgagattgggatcaacgccgagtccatgagcacgccagcgctttcagggggcacgggcctcttctctgggttcactcggttatgcaagggccttgcggtggtgcttggttgcggtcacattgcggttcagttttttccttcagctgctaactacctggctcttattcccgccaggacaatcccatttgcctggaatctcatcacagctgggtatgttgaacaatctatatatggggtaatggtcaacacattaagtctcctgggtattggga

SEQ ID NO: 28079 - DNA, 388 bp, Glycine max
gacacagggtcctttcttacctgctaagattcagagtgctaagtgtgatacaatgaaaatgcctaagcctcaacttcgaaccccatttattgaatgtttcactgttttattaaccatcatcgacgttacctctgcatacgcgctctatggagcatccactcccgtgctatagctcactcactgtgacttcaagtccatggatctcaattcagatggagttgtgctcattgaatgctttgctccatggtgtggacactgtcaggctctgactgctatatgggataaggcatctactgacttgaacggtgtcgttactgtggcatcaatagatgctgatgctcacacatgtttggctcacgaatattgaatcagaggattttcaactatt

SEQ ID NO: 28080 - DNA, 233 bp, Glycine max
gatagaaaaaaataaaaaactttgcaaagattttatccaattggaattttaaaaatgactgggataaacttaagaattcaattattgaaattgaataaggtaaccatttaattggattggtccaatggtattaaaaaatggagtacttacttccaattcctatttattattggaatacccgaccacttggtttggtatcggaccattttttttggatttcaaaaattttccgg

SEQ ID NO: 28081 - DNA, 162 bp, Glycine max
gacaacagagtgtgataatagtaagacagaacacctactcactcgtaaatggcgaggaagaagatcagagagtgccactccaagaggcttctcaaggagcatcttaaacgtgttgactatatcgacctgcaaatgctctcagctcaagggacagaatctacg

SEQ ID NO: 28082 - DNA, 409 bp, Glycine max
  modified_base (370)..(370): a, c, g, t, unknown, or other
  modified_base (389)..(389): a, c, g, t, unknown, or other
gatggacttgatcattttcgtctatctccgacacaactccgtgcagagttcacaaggcgcaatgcggatgctgtgtttgccttccagctccggaatcctgttcacaatggccatgctttgctaatgactgacacccgaaagcgccttcttgagatgggctataagaatcctgtcctcttgcttcatccacttggaggctacaccaaagctgatgatgtcccacttgattggcgaatgaagcaacatgagaaggtacttgaggatggtgttcttgatccagagacaactgtggtatccatattcccatctcccatacactatgctggacccacggaggtgcagtggcatgcaaaggctaggatcaatgcangggctaacttctatatcgntggtcgtgaccccgcaggca

SEQ ID NO: 28083 - DNA, 394 bp, Glycine max
gatccaaaaccatttgatcctaaaacatatgtggaggaggatacttttgtaaccgatgaatctggaaccagaaaacgcatacgtttggagaacaatattgtacgctggaggactactaaaaatcctgatggcacaacatcatgtgaaagcgatgctcgctttgtgagatggtccgatggcagcctgcagttgctaattgggaatgaagttcttgacatatcagtgcaagatgcacagcatgatcaagcacatctttgtcttagacatggaaagggtatcctccaatcacaaggaaggttgttaaggaaaatgaggtttatgccatcttccttgtcatcaaattctcatcggctgttgactgcccttgttgactcaaggcataagaaggttttta

SEQ ID NO: 28084 - DNA, 356 bp, Glycine max
gatacaaaaacattagatactataaaacatgaaaattgcgaggatctttcttctctccaccatcgttgcgttgtgtttgcgtgtctctccgtaaattgccttcgactgtgacaacacgcaccgatcgccatgaacatcttcaccaagaaacccaccgccaaagaggctcttcgtgagagtaaacgtgaaatgacaaacgccagtagaggtatagagaatgaaattggagctctacaatcgggagaaaaaaagcttgttgctgagataaagagaactgctaagacgggaaatgaggcagcaactaaaattctagctcgccagttgatcaggcttaggcaacaaattgctaatcttca

SEQ ID NO: 28085 - DNA, 116 bp, Glycine max
  modified_base (90)..(90): a, c, g, t, unknown, or other
tgaacaaaacaagtgtttcgaatagattatcctaagtgtttgggaatagtgctgcaatggcttcaagtcacgaggaggtgacccttttgngagctactggaagcccatttgtgtgc

SEQ ID NO: 28086 - DNA, 409 bp, Glycine max
ggtttgagaaatgaaagacatttgacatcaacggatgcccaagatggcagcatatcagtgaacttgccccaagagccaagatataaaagggattcactttcaaatcagcttcctgtgtttgtccctggtggatttgagaataaccttcaacctcgttctggcatgaattaacttatgttgttttgagattccaatgagtggacaaagtttttgttggaatcgaaaggatagtgaagagcaattaaaagagtctatgtggtagacacgattttagcctttaagaccatacaaatgaaaagtatggtgaacaacatccgactccaacaggttgttgtttattcggcctaatcatctagggttaacgtgtgttgtcatcaaaatccatctgggcgtttgagagaatgaaatc

SEQ ID NO: 28087 - DNA, 53 bp, Glycine max
ctgcggattgtgaaattagaaacatttcacaggtacaaaggccctctatggaa

SEQ ID NO: 28088 - DNA, 112 bp, Glycine max
gggcaacctggatttggactgaatggaaattttaagaaagagaagagagaaataattttcccggaaaattcaaagtccaatcgggacccggaatgaataagggttgggttct

SEQ ID NO: 28089 - DNA, 251 bp, Glycine max
cgaagagaaaaagagacaaggaccgtctagaattgatttcattgagtgtagcagcaaccaattccatttccagtttctgattcgtcaaacggacaaaggaagtgaaagggtttagggtgtgacctgagatcaacatgttgcggaggcttctctcttctcacctcaaaaccctagccggcaccgcttcttcttccacttcccgatctgctttcggcggcggcagattcgccggtttcttttggttcttccgg

SEQ ID NO: 28090 - DNA, 348 bp, Glycine max
gacagcggagcatttgatagatggaaactgcaacagcctttggtgtgctaccctgattatgcctaatcataagcttagaacgacacacatggaatcttccattgctctagtgactatcattgatgttatctttgtctacatgctcattcaaggagccactgctgactatggtagtagtcacagtgcttatgccactatttatgtcgatgctgatgcttctggcacaatgggaggagcatgtgcatatggaaatcactatagccatcgctatggaactgacactagggctctaaccactgctttggtcaacaatactttaacctgtggagcttgctatgcaatgacatg

SEQ ID NO: 28091 - DNA, 340 bp, Glycine max
aatgtggaagctgacctattatgctgcacatggggcattgggtcttaaaattacgtaccatgaaccctcgttcactaatacgaagccatacttcaatgactggtcaaatcatgagtcgaagagttcactactgttgtactacatgtgccagtgtcggctctacatatatagcattgctgctattctcacatgggacactcgaatgaaggatttttcaaagacgtttacttaccatgtaattactgcactactgattgggatctcatatctaacaagtatctttagggatggctacataatcctcgcccttcatgatgcacgtgacgtattcatggaagct

SEQ ID NO: 28092 - DNA, 280 bp, Glycine max
  modified_base (149)..(149): a, c, g, t, unknown, or other
ggttctagtgtgtgattgtttgttgttgtaactcgttcttcttcttttgttgttctgtgtttgtgtttgttttttctctcacctgaaaatgtcttgctgcggtggtaaccgtggttgcggaagctcctgcaagtgcggcaacggctgcngaggctgcaagatgtacccagacttgagctacactgagtcaaccaccaccgagaccttggtcatgggagtggcacctgttaaggctcaatttgagggtgctgaaatgggtgtgcccgctgagaacgatggc

SEQ ID NO: 28093 - DNA, 318 bp, Glycine max
  modified_base (259)..(259): a, c, g, t, unknown, or other
gacacacataaaagcatgtgtggactttacaaggccatgatggagagggaagaagagctggctataatgattttcatgttcccatgttctgctgaccagccttgtaagtggcttgaatcattaggtgtccaccagaagggtatgtggaggagaaagtgcagttgctattcacactgcccttttggtctcctttctgggaaaggtgggctgcaagaactatggggtggaattgatgaatttgaataccctcatgattctncatttaataaccatttcatctcaagcccatttcttctctctgggtggtctgagtactac

SEQ ID NO: 28094 - DNA, 376 bp, Glycine max
  modified_base (359)..(359): a, c, g, t, unknown, or other
ggatgatgatgcgttggcagtggtggaaaccaaagacgggaaatcggtaacgttgtctataatgagacagggtgttaacggctagaaacgaaggaaggagtaacataaaatggaggttcaatttgccctcccattccactaacacacatcacatctccctctcgcacgcgacgagggagctacgcttcggaatctcactccctctttctgctaattgacaagatggttgctcagaaattcgttgttgatttgaacaagccccttgtgttccaggttgggcatcttgtggaagcctatgatgagtgggttcacgatcctatcgtaagcaagggaggccctacgtttttccaaaatgggtntctcgagttggtcacgc

SEQ ID NO: 28095 - DNA, 389 bp, Glycine max
  modified_base (157)..(157): a, c, g, t, unknown, or other
  modified_base (190)..(190): a, c, g, t, unknown, or other
ggggagatagatggcacgcttgtcactgctcattttcgcgttctgcgccgtcggcgtcgccgtcgccgtcgcgggcttctccttcgatgatgccaaccctatccgtttagcgtcggacttggagtcgcatgtgctggacgtgatctgacagagccgncacgctctctccttcgcccgtttcgctcgccgncacggcaagcgctaccgttccgtcgacgagatccgcaaccgctttcggatcttctctgataatcttaaactcatcagatccaccaacaggaggtctctcacctacacgctcggcgtcaatcatattgctgactggacttgggaagagttcaccagacacaagctcggcgctcctcaaaattgctctgccacgctcaaag

SEQ ID NO: 28096 - DNA, 417 bp, Glycine max
gacactaaacaagttaaaagaagagcatcactgaactaacaaagcaaccctatgtcgaaggtggtttgtgtcaccggagccagcggcgccatcggatcatgggtggtcctactcctcctccagcgtggttacaccgtccatgccaccgtccagatatcaggatgaaaatgagacgaaacctttggaggaaatggaaggagcaaagagtcatctccatttttttgaaatggatcttcttgacatcgactccattgccgctgccataaagggttgttccggcgtaatccaccttgcatgtcctaacatcattggtcaagtcgaagatcccgagaaacagatattggaaccggcgataaaaggaacggttaatgtgttgaaggccgcgaaggaagcaggggtggagcgcgtggtggcgac

SEQ ID NO: 28097 - DNA, 85 bp, Glycine max
agggccccagttagggtggtgatccaaataacttggaaccatgggatgaaaaataaagggcctggtttctttggtacttccattt

SEQ ID NO: 28098 - DNA, 280 bp, Glycine max
cgggacggaaagaatgtgcatcagcccttgacaatggctatgggggctgaatcaccggaatctgacagtgacaacaactccttaaaaaccaacaatcctcaaaccctcaatgaaacggcgccatttcttgactacgctcttgcgcaggtccagctttaccacaaggtcttcaacgactccgtccattcgacaatcgatactgcaaaatcccgcttctaccaaaacctgtcaacttcttccggccactttcaccagaccttggattctgtggatgaactca

SEQ ID NO: 28099 - DNA, 334 bp, Glycine max
gacaaatgggaatcatcttaattcttaactacaagagatagagagagagagagagagagagagagaggaagtgagtgaacatcatggattcagagacgagtagaggtgcttctttgacagtgaagtatttgcagatggcgatatggtggttctcagtgatgatctttgttgggtatttaatggttaggattgtgatgcccaccaacatcttgtttccacatggatattcagatgttcaagctacggcagattcaatatacttcggcagacatgggacaaccatactcatttacacgattccaatgttattaatagccactatagctaggctata

SEQ ID NO: 28100 - DNA, 259 bp, Glycine max
gacgatgagtcgatttgataactaagatattgatattcgtgatattgatccaatttgatatcatcgaaatccaatttataccattgttgaattaattatcgatgaaagatttatcatctctatgggattaaattccgaattttttattggaaatttaagagaaataaaacataattaagattatgggaggtaatattcctgcattattgctactgcactggatatctaggtactactgctttttacttataatttacgt

SEQ ID NO: 28101 - DNA, 263 bp, Glycine max
  modified_base (233)..(233): a, c, g, t, unknown, or other
  modified_base (247)..(247): a, c, g, t, unknown, or other
ggggttaaaatggaattggtggatgctgcattccctcttcttaaaggtgttgttgccacaactgatgtggttgaggcatgcactggggtcaatattgccgtgatggttggtggattcccaagaaaagaaggtatggagaggaaggatgtgatgactaagaacgtctccatttacaagtcccaggcttctgcccttgaaaagcatgctgctgccaactgcaaggttcttggtgntgctaacccagcanacaccaatgcattgat

SEQ ID NO: 28102 - DNA, 248 bp, Glycine max
cctctaaagcagtattttgctggtgattttcatctgcaatggagttctgaatctatgatgatgggatttctcatttgaacccccagagatggacaagaaagagcatattgcaatttttactactgctagccttccatggttgacaggaaccgctgtgaaccctttgtttcgtgccgcgtatctcgccaaaagtggggaaagagatgtcacttttggtgatccccttgttatctctgaaagatcaaaag

SEQ ID NO: 28103 - DNA, 328 bp, Glycine max
gggacatggaaaggtggaagggagaaggctcctgctgctttttgtcgtaaagttatcacttcctctgatagatttgagatgtggggggatggattgcaaacacgatcatttaccttcattgatgaatgtgttgaaggggtgctcagattgactaaatctgatttccgagagccagtaaatattggaagcgatgagatggtcagcatgaatgagatggctgagatcattcttggctttgagaacaagaatattcctattcaccacattcctggccccgaaggtgtccgaagtcgtaattcaaacaatacacttattaaagaaaaacttg

SEQ ID NO: 28104 - DNA, 429 bp, Glycine max
gaatatgaaaaagaaaaaaaagattctaaagaaatgtaactaatattctttagaataatcaaaaagaatattaaattcaaataaattttagatagaaaaaagacttaaaaaggaggatttgaaatgcgagatctaaaaacatatctttccgtggcaccagtagtaagtactctatggttcggggctttggcgggtctcttgatagagatcaatcgtttttttccagatgcattgatattcccttttttttcattctagttattgacacggaaaggggtgaagaagattatagatccaattaagtattaaatatatgtaattaatatgtaattaatctcctcttctttatttcgtcttttatttcttcttttttttacaattggaatagaataagttaggaaagagaaagaataaagggtaatttggcct

SEQ ID NO: 28105 - DNA, 311 bp, Glycine max
gttggggagaacatgcagcctaatgtcatatcatcgaagtcatcttcagattctgagaattttgctgagtctcaacttgttcccaagatgccaaaacaagcttctgaggagcctaagaagaaaaagaaagtgaagctgccacttccattagttccagctgataacaatcaaaatgcctcacaacctgttaggaaatgcatgcattgtgagataaccaagacaccacagtggagggcagggccaatgggaccaaaaacactatgcaatgcttgtggtgttcgttacaagttcggccggctctttcccgagta

SEQ ID NO: 28106 - DNA, 396 bp, Glycine max
acaccgaaggggaggctaaaggagattacagggaaagtgggaaacaggagcttatcccaatgggaatgggccaaattggataccattcaccatagatatcaaaggctgaaattaaaccaattgattgtacatctgacgcgaaaacacattaggcttacctagaaaagctaatgacgtatcgattcaatgtacaaatatgtagaactgagtaacattttagaccttgatactcacacaaatgacgtaacatccatcttaagtgatacaattcaattgctaaaggaccttacttctgaagtcattcaacttatacatgaatatgctactctaaattaagaatcttaggagttggcttactagaaacattaactcagagaatactaggcttgtattaaa

SEQ ID NO: 28107 - DNA, 244 bp, Glycine max
ggaacctttgggtttctggtttcccttttttggggggccaaccggtccttcctcgcttcaattggtgggtgccttgtccaacttgttgtgaaagaaattgccaatggggaccagccagttaaagctgatgccattccaaaaggaaacttttagggttgcctggattcttcagaccggcgaaaatttggttaaccaatattccataccggggttaatggaatctgaaaccagttccaaattgcca

SEQ ID NO: 28108 - DNA, 424 bp, Glycine max
  modified_base (337)..(337): a, c, g, t, unknown, or other
  modified_base (352)..(352): a, c, g, t, unknown, or other
  modified_base (413)..(413): a, c, g, t, unknown, or other
tgggaagtccccaaagaagaagtttctaacttttattgggctaaccaaaaggctaaactattttaatggtgactataaatagatcaatccaaacctgcggacaggtataggttggcttaaaaccaacatgaaacctgttaattgtgtaagcgatgcctgaatcaaagaaattcttgtggctgggcataattctgttgataaaactaaagtagataattcagtggcttgcgatatcaaatttaaaaaggataagatcagtgaatcattgaaagttcttgaaaatctaattcctggtgcataaggaaaggtgccactgttagtcattgatggaactatngagtacttgaaaatnttgatgtcccaaactggtgctcttgggtgaaatatcactaagtagtactcacagtcacagncactgatacag

SEQ ID NO: 28109 - DNA, 408 bp, Glycine max
gataacatacaagatcaaaagataaaagtggaacacatggccacactctgtggctttacctacatcaccggatcacagaacagaatcgatatcgaaaatctcgctcgctttgctgttgatgaacacaacagaaaagagaatgcagttctggagtttgtgaaggtgattagtgcaaagaaacaagtggtttctggcaccttgtactatatcacttttgaagcaaatgatggtgtgacgaaaaaagtttatgaaactaacgtggtggagaaaccatggttgaacatcaaggaagttcaagaattcaagcccatcacttgtgctggtaaatccttttcggtgaccggctagcacataactaggttatggagtgactagcttggcccgaagaataataatatgtatgaactg

SEQ ID NO: 28110 - DNA, 349 bp, Glycine max
agtcacaagtatggtcttgtctaccctggtgttggttgggttgtatggaggagcaaagatgacttgccagatgaacttgtttttcacataaattatcttggatctgatcagcccactttcacattgaatttctccaaaggatctagtcaaattattgctcaatattatcaattgattcggcttggctttgagggttacaaaaatatcatggaaaattgctgggagaatgcaagagttctgaaggaaggaatcgagagaacaggtcggtttaacatcatctccaaagatatcggtgtgccaattgtagccttctgcttgaaagacaatagtcaacacacaagtgttgaga

SEQ ID NO: 28111 - DNA, 210 bp, Glycine max
ggtgaattgaagctcaaatgaattaaggtttaagactaaggaaacaagggggaagaattgaggaagtggaggagtaacaaaacaagtatgtcagaatcaaacgcaattgcaaatggtttggctggtgcaagtggtggaattattgctcaaatcataacttatcctcttcaaacggtaaacacgcgccagcaaactgagagaacactcaag

SEQ ID NO: 28112 - DNA, 115 bp, Glycine max
gacggctgaaaactcacaatcatggcagtactagaattatgatgattgtaaggcagcatatctgaatatgatcatgatgagttaaggaggggttacaagcaagtgaatgaactta

SEQ ID NO: 28113 - DNA, 224 bp, Glycine max
ggttctagtgtgtgattgtttgttgttgtaactcgttcttcttcttttgttgttctgtgtttgtgtttgttttttctctcacctgaaaatgtcttgctgcggtggtaactgtggttgcggaagctcctgcaagtgcggcaacggctgctgaggctgcaagatgtacccagacttgagctacactgagtcaaccaccaccgagaccttggtcatgggagtggcac

SEQ ID NO: 28114 - DNA, 158 bp, Glycine max
aggcgtgagaacacctccgataggacgacataatattgtcacatgtataatcgctcccgcggctttgttcctaaaattatcactagctgcgataaatactagacatatgaacatggatttcacacactatcatttacctctaatcatgaatgttttac

SEQ ID NO: 28115 - DNA, 412 bp, Glycine max
gagctcaaggtggagctaaaattaagagcccgggaaagaaaggatcaattcatctggtcgaaaaaaatgaagttgggaatggcgagaggggaagtttgtctaagggtctcagcaatactggttttggtattaacagcatgtttggttgctttagatacccaaaccaaggttgtgttcgtatctattgagaagaaggctacatacaaagacttgaacgctctcaagatcttggtgtatgttacatgtgcggctgctggttataatctgcttctattgtgcaaacactccatttggtctagaaaaaacttcaaagggtcttatctatgcatggcttggatttgtttctcgttggatcagatcgctgtgtacatgacatttgctgcaaacacttgaacaatgggagccgcggtgc

SEQ ID NO: 28116 - DNA, 377 bp, Glycine max
  modified_base (365)..(365): a, c, g, t, unknown, or other
ggagcaaagagaaaagcttccttcaatgtagttgtgattcttcaataccatatattctctttctctttcttgatttgtgttgtgaaacagttaaaagtggtcttgatgtctgaggcattggaagaggttgttccttcaatgaaaggagggtgtgaagaagaagggttgaacctggaggctactgagctgaggcttgggttgccagggtgtgagtcaccagagagggagggtgtgtttaagagtgtggtggtgtctggggccaagaggggtttctctgatgccattgatggaaactggaatggtggaggatctgaaaaagatgccgcttccttgaattctccaacttcaaagggtgctgctagtgntagtgttagtgc

SEQ ID NO: 28117 - DNA, 138 bp, Glycine max
gaccccaaagccataatgtctcaaaacgaggaggccatatagaaattttgtattactttgtcttgaactttgtgaaaaactccattttatatcttcctcgtttcgaacaaaaaaatggggctttgccccaattttaca

SEQ ID NO: 28118 - DNA, 162 bp, Glycine max
tattggacttttaagccataactcttcaattcggggagtggatatctaaattgtgaaacacgattacttgaactatgctaagaaccacattttatcacttcatggtttcaaacataaacttgactctataccctaattacccacttcattcctactacgaac

SEQ ID NO: 28119 - DNA, 315 bp, Glycine max
gaatgggaagtctagatgttttggttttgtgaatttccagaatccggattcagcagctgctgcagttgagaggttaaatggaactactattaacaatgacagggttttatatgtggggagagctcagaggaaagccgaaagagaggcccagttgaaagccaaaattgggcaggaaagaatcagtagatatgaaaaattaccaggggctaatttgtacctggaaaatcttggtgaccgtttcagtgatgagaaagtgaaagatctattttctgagtttggaactattacatcttgcaaggtgatgattgattcaaa

SEQ ID NO: 28120 - DNA, 288 bp, Glycine max
gcttgtggagggccacaccgaggtcccaaactggaggtttaactgcaacgttgagcttgtccaatcgccgcaaaaacatggtgggatgatcctcatccaaccgtagggtagacacgcggtcaggctcgtcaacgactccgagatcagtcagcatctgccagttgagaagggtatccatttactcgctcacgttcagtgcggttcgcacctgccctcactttgagtccatcaacatctcggttctgcctgcgtcgaatacgatagacttgcagacactctacaacgtcc

SEQ ID NO: 28121 - DNA, 251 bp, Glycine max
gtagccaaagttagtaagtctgggtggatgactgatgaggaatttgctagagaggtgattgccggtgtaaacccaaatgtgatccgtcgtcttcaagaattcccaccaaagggcacacttgatcccacactctatggtgatcaaaccagtaccataacaaaagaacaattggagattaacatgggaggggtcacagtagaagaggcacttaatactcagagattattcatattagattaccaagatgcatt

SEQ ID NO: 28122 - DNA, 275 bp, Glycine max
gggttccatatgatcactgatcagcaccactattggctacggccttgacacctgcgagaccaagtaccaggctgaggcacgttcctcaggtcgtacacaatacatgaatcttactgatgtattattggaggcaatatctaacatataagtgcttttactttaccagggccttgggacaaagatatttcaatccgttatttcacaatatgtctacctctacggatacagctatttttaaagactgtatctagaaaaaagtggttataaatccattg

SEQ ID NO: 28123 - DNA, 279 bp, Glycine max
gagagagagagagaaaaaagagaaagtgaaaattagaaactcttgtacttggttttatgccaaattagggactcttttggttgtcaattagatcacaaagatatggaggttgccatggaactggaagatgatctattttttgctgatttgagcaaggaaattgctctactaattatggatgaagatgaagatccacttgcttcttgtcctcctgactctcttcaggtactttactactttcatttcttccaacacatgccaccacacatactttttttt

SEQ ID NO: 28124 - DNA, 429 bp, Glycine max
  modified_base (285)..(285): a, c, g, t, unknown, or other
  modified_base (401)..(401): a, c, g, t, unknown, or other
gatgcataatgaggagagaaaacgtgtcccctgtgttgcgtgcgtcgtttgacagcaaattcgagggttcagcacggtcagtgctatcggttcggtggccttaacttaagaataataacaaaacaaacacagcctaatacccaatcctcactctactttccccatttatctgtcaaacgcgcagcaacaagaatcaaaatccaagggcgagctttaaaccatttcagttaagctttctaaccccccaacctactcctttgtagttaccaatttcatttagcgttntttttctactcataattagaattagaattacaacctcggtaaaatagaattactgggtatgtgtgtgctacttgcaactttgagaactcttgtgattttttttcccataaggtatntgtgaaaatgctgtaatgaggaaaattg

SEQ ID NO: 28125 - DNA, 430 bp, Glycine max
gatgcattttcattgatgggtgttgttgaagagagtagtagtggcttcgattcccgcattgtgaaagagggtggtgagggagatgatagcgatatctcgaaagtggaagaagatgtagaggtcagaatggatctcaccgatgacttgttgcatatggttttttcgtttttggatcatcccaatctctgcaaagctgccagggtttgtaagcagtggcgaggtgccagtgctcatgaagatttctggaaaagtttgaattttgaagatcggaacatatctgtagaacaatttgaggacatgtgtagccgctatcctaatgccacagcagtgagcttatctggttctgctatttacttgcttgtcatgaaagccatctgttcattaagctgattggtctatgttgagaagattgaatatcaatgattctata

SEQ ID NO: 28126 - DNA, 369 bp, Glycine max
gggtggaaggagccgtagcagcagcggaagctctagcttgggcagcgaatcacaatggcgagaggattgaagaagcatttgaagaggcttaatgccccaaagcattggatgcttgacaaactgggtggtgcatttgctcctaagcccttatctggaccacacaaattcagggaatgcctgccactcatactcattttgcgaaaccggctgaagtatgctctgacataccgtgaagtcattgctattctgatgcaacgacatgtccttggtgatggccaaatcaggaccgaccagacatattctggtgggttcatggatggtggatcaattccttaaaccaatgagaactttcggctggtggatgacacc

SEQ ID NO: 28127 - DNA, 392 bp, Glycine max
gggttgttgaatcctagaactagtctaggctgtgatggtgtgggagaagtacttccttcactgggtctatgcggctcttttggaagaacaattcaggatcagactcatcaacaaaacaacgggtttgcactaggagaacatcacagtagtggagttcaagaactttaccacaagctcaggtcatcgtcatcatcaattaattattgtggcagtgataactcaccagtgtatctaagcaacatggcttcttcttactcttctttgtccaacattttggagtcatcttcagtttctgggagtgaattcgggtgctggaatccaaccctttcctggtctgatcttcccactaccaatggagcatatccttaataaccaccgcatgcaggaactac

SEQ ID NO: 28128 - DNA, 414 bp, Glycine max
gaccacaccgagtcgcagaaaaggaaaaaagtgatcatagtttcacttcggccttatccagtttagggtttcggttctctaccctatctttcacgtatcgaaaccttaaatttacgatcaggtctgagcaatctggttggtagaacctttggtcttagtgagtcaagatttatgtctgaattagacgatcaaattcctactgccttcgatccttttgctgatgcaaatgctgatgactcgggtgctgggtcaaaagagtatgtgcatattcgtgtacagcagcgaaatggcatgaaaagcctgacaaccgttcacggattgaaaaaggaattcagctataacaagatacttaaagacgtcaagaatgagttctgttgcaatggaacagttgttcaggacccagaactaggacag

SEQ ID NO: 28129 - DNA, 294 bp, Glycine max
ggggccataggatcactgatcagcaccactattctctacccccttgacacctgcaagaccaagtaccaggctgaggcacgttcctcaggtcgaacaaaatacaggaatctcactgatgtattattggaggcaatatctaaccgtcaggtgctttcactttaccagggccttggaacaaagaatcttcaatccttcatttcacaatttgtctacttctacggatacagctattttaaaagactgtatctagaaaaaagtggttataaatccattggaacaaaagcaaacttgggt

SEQ ID NO: 28130 - DNA, 371 bp, Glycine max
  modified_base (219)..(219): a, c, g, t, unknown, or other
  modified_base (352)..(352): a, c, g, t, unknown, or other
gatggtaaacatgttgctcacaatgctcatatgtcaccactcactgcaggatgagacttcaagcccgattagtgctcgaatattcgaactttgcgagcctgatttcttgccagacacacttgacaattcagatgttactttcagctccaattgatgtcatgactagacgtcctcatatgccacaaccatattttcacctgtagatatagtagacgccangatcaatatcaataacactagcaccatagtcactactacctcatgtagcactaccacaaccagcaccccatccatcaacagcaacaacagcacatcgaacagcaataacctgtccatcctctttgacactcangatgaaattgacaatgaca

SEQ ID NO: 28131 - DNA, 252 bp, Glycine max
gatgaacatggagaaggcaaagaagagaatatggctgcttggcttggtggaataaactctctcaagattcagcctttcaagctttctactttgggaccccatgatgtcagagttagaatgaaagctgttggtatttgtgggagtgatgttcactacctcaagacactgaggtgtgctcactttatagttaaagaaccaatggttattggtcatgagtgtgctgggatcatagaagaggttgcagtccagtga

SEQ ID NO: 28132 - DNA, 268 bp, Glycine max
gatgaggaaaggttgagattggagaaagaagctgaagctttggcagcgcaagatgatggaagtggggaagctcttgaacgtatttatgaacgattggaagccattgatgcatctactgcagaaaagcgtgctgctgaaattttatttggtcttggtttcaacaagcagatgcaagcaaagaagacacgcgatttctctggtggttggagaatgaggattgctttaacacgtgctctatttatgaaccctaccatacttttacttgatg

SEQ ID NO: 28133 - DNA, 390 bp, Glycine max
ggttctagtgtgtgattgtttgttgttgtaactcgttcttcttcttttgttgttctgtgtttgtgtttgttttttctctcacctgaaaatgtcttgctgcggtggtaactgtggttgcggaagctcctgcaagtgcggcaacggctgcggagggtaagattttcgttgtaacattgtttttttcttgggaaaatagagtttttccgggaaaattttctttttggatttttaattggtattatggttacccttttggttcaattgcatgaaaaaactatgcttttgttattttcttgcatggggggggagattctgatcacccgaaccttttgtttggttttaccgaacatgtccatttggtttcttttcatgggaagggtttctgggggg

SEQ ID NO: 28134 - DNA, 391 bp, Glycine max
cacagtgaagttgatgctcctagccgaagacttgctaaaccactaatcttttgtaggactgaaagtgactgccccatggaaaatggctatgcccgtcctgttgatggaatccatgtacttgttgacatgcaaaatatggttgttcttgaatttgaagaccgtaaacttgtcccactttcacctgctgatccactaagaaattatacttctggtgaaacccggggaggagttgaccgaagtgatgtgaaacccttacagattattcagcctgaaggtccaagttttcgtgttaatgggcacttcattgaatggcagaagtggaattttcgtattggattcactcctaaggagggtttggtaattcattcagtagcctatattgatggaagtc

SEQ ID NO: 28135 - DNA, 407 bp, Glycine max
ggcacaagtgagtttgttgatcgagataactagaaagagtgtgatgaaaatgaaggtgcttgttttcttcgttgctacaattttggtagcatggcaatgccatgcgtacgatatgttccctttccgaatgaacactggctatggtgcccgtactcccgaggtgaaatgcgcaagttggaagcttgctgtggaagcacacaacatctttggctttgagaccattcctgaagaatgcgttgaagcaaccaaagaatacatccatggcgaacaatatagatcagactccgaaacagtttaccaacaagcttacttttatgccagagacctcgaagtgcattccaaggacacatttgtgttcaagatagatggcaccgtactctctaatattccatactacaaaaaacatg

SEQ ID NO: 28136 - DNA, 323 bp, Glycine max
ggggaagaggtagggtacagctgaagaggatagagaacaagatcaatcgccaggtaactttctccaaaaggagaggtgggttgctcaagaaagctcatgaaatatctgtactctgtgatgctgaggtagctttgattatcttctctcacaaaggaaagctctttgagtatgctactgattcatgcatggagaagatactggaacgccatgaaaggtatgcctatgcagagaggcagctagtagcaaatgattctgagacacaggaaaactggaccattgaatacactagactgaaggcaaaaattgaccttttacagagaaac

SEQ ID NO: 28137 - DNA, 327 bp, Glycine max
gcggccacgcgtccacacacgcgtgcatacacgtgttagacgactgcaaaaagtcatcggggaagggatagattagaaaaggatcgagttatactgtgctacaattctgattgattatctctgacatagcctcgacaaccttttatgttcaaatgaacactcgcttatcaggcccgtactaccgaggataaatgctcacgttttaccctttctctggaatcgcccgacatcctttgactttagatcacttatggtaaatgcgattcaacttcagttgaacacatgtataggcaaccatctataattgaatcttacacatttcttaca

SEQ ID NO: 28138 - DNA, 400 bp, Glycine max
gacgagattgagatcgatattgatgatgtcagtgatgataccctgttcacattacgaaagcttttggatgactttttgcaagagaagcaaaagaacaaagcaaaagttgaagcatgtgaagtagaggtgttgaatgattctggaccaagcaattcctcattgcaaccatttaaaggtaatgatccagcggatgaagaggtggacattggtggaaatgagccccctgtgtcaagctattctcatgtggagattgaaaaggatacaacttacagagtgaacaaaagcctaagcccaggcagctcacatgatacagactctgatagttcttctgatagcgaagccgatgatgttaaagcaagtccagcaaatgtaacaaaagcaccagaaaatctgggttctg

SEQ ID NO: 28139 - DNA, 96 bp, Glycine max
gatgctggttttgttaagatgattccaaccaaacccatggctgttgaaactttcttcgagtattctgcacttggtagggttgctgttagggacatg

SEQ ID NO: 28140 - DNA, 287 bp, Glycine max
ttgggatagagaaatatagataagtacagtgcgaaaagagtgaggcggttaaaaatgaattgcccgtactgttcggcggcgcatgggcgttgcgccaccacgagcagcgggcgttcgatcacggaatgcacgtcttgcggacgcgtgctggaagagcgacagtcgcatccccaccacgtgttccacgttcgcgcccagtacaaccttctgggtctggtcccatcggatctggttctccctgtgttcaatcaaaacaactaggaggaggaccttttcgagccaacggc

SEQ ID NO: 28141 - DNA, 210 bp, Glycine max
ggagcgaataatatgtgaaggggtttgagtgcagtgcggcgatgctagcactctcttttgcagctttcgccgacagcttcattcaccatggctgagtaaaccgagaaagcttttttgaaacaaccaaaagtgtttttcagctcgaagaaaactggcaagggaaagagacccccaaagggtgtggaaccgcttttggaaatccattgggct

SEQ ID NO: 28142 - DNA, 384 bp, Glycine max
  modified_base (106)..(106): a, c, g, t, unknown, or other
ggagttaagatatgagatatatgctatctaatgcctagtgggatataggaaaggacctcaaatctgctatctttcgttcacatacgcatcatattcttttaattgntagttctgagttctgaccaaagttgttgatttgagtgtttttagcatatttggggtgtctgcaaacaccgcaggaattttgctttttctattgaattagattcctctgggaattcaattctgattcttccttagttttcggttttctgtctttctttttttccttctatttatattttgggttggttttctgttgagtcttgacttgcttgctccaactccaacccagtttcacactagttttgtgctccaattcttgtcaaggggaacaatgaatgc

SEQ ID NO: 28143 - DNA, 244 bp, Glycine max
gatgttgtggttcaacgtgacttgcctccactctgggaaattgatatgaatggaaaagttaatggagctgtggaaacttgcagaggggacgatcagtgggtaatgtctaagcattttaggaactacttcaatttttcccatcctcttgttgcacaacatttggatcctgatgagtgtgcttgggcttatgggatgaatgtatttgatctgcgtgcatggagaacaacaaacataagagagacat

SEQ ID NO: 28144 - DNA, 174 bp, Glycine max
gaaggcagagatcacatagacccatctaattttggactcaaatagttggtggtatggatgaccaatttttgaccggtcataggcatagtcgtgagcccatggctaagggcttaattcatgagaaggctttaaaagcccaaattttttgccacaatgggtgccacgaatttttta

SEQ ID NO: 28145 - DNA, 276 bp, Glycine max
ggggaaaaaaaactcaactttgaaattcttaaagccctaactggtccgaaccattggagccaccgtgcaatagttcctactctcactctctccctcaacacaccattgattttggtttcagctttatttggaagaaggttgtaacgctgacctgaaatttttctgaagacaaagatgcaggcttgtacaacgatgagttctttgcagcaacaacctatttggaccaaagggttaaatttccctgcaaaagggtatggcagcaataacgggtttcta

SEQ ID NO: 28146 - DNA, 354 bp, Glycine max
aatagagagaggtgcaaaatcaatggatatgagatgccagctaagaccagggtctttatcaatgcttgggcaattggaagggatcccaagtattggactgaagctgaaagtttcaaacctgagaggtttcttaatagctctattgattttaagggcacaaactatgaatttatcccatttggtgctggaaggagaatctgcccaggcatttcatttgctacacctaacattgagctgccacttgctcatttgctttaccattttgattggaagcttcccaacaatatgaagaatgaagaacttgacatgactgagtcatatggggctacagcaagaagagcaaaagacctatgc

SEQ ID NO: 28147 - DNA, 414 bp, Glycine max
accaggagatttacaacactcgtacaccctactcaaccaactgagctaaacccccttgttattaatattgtattacattatatatctattggtataaaccaattatcctaaaaaggcttaagtcattaggtaaaagattttgtattaacatctgtagtagacatcatcatgatcagtataaagcttacttttgctggacatgataaatgctctgttgatgaattatgttttttaatccctaaggattcactagaagaataaatgcaagcaagctaaagtactaaaagttctttagaattcccttttacttttaatgcaggatcgtgatgagaactacattatgttggtatcaagttgctctagaccatgcccatcaaatagaaaatactttcttttctttatatcttttacatg

SEQ ID NO: 28148 - DNA, 355 bp, Glycine max
gacactaaacaagttaaaagaagagcatcactgaactaacaaagcaaccctatgtcgaaagtggtttgtgtcaccggagccagcggcgccatcggatcatgggtggtcctactcctcctccagcgtggttacaccgtccatgccaccgtccaagatatcaaggatgaaaatgagacgaaacatttggaggaaatggaaggagcaaagagtcatctccatttttttgaaatggatcttcttgacatcgactccattgccgctgccataaagggttgttccggcgtaatccaccttgcatgtcctaacatcattggtcaagtcgaagatcccgagaaacagatattggaaccggcga

SEQ ID NO: 28149 - DNA, 415 bp, Glycine max
gcacctaacggcatttgtgaaacttgaaaccttagcggaggtaacttggttggagcgagttcacattccgtagatgaatggatggtccttagtgctaatttggcaccatcaaattactatgataattctagtgttagcatgtgtgaatccagatctgaggttcattgtgcagattagcgtggaagagaactatggagtcagcaacggtatcatcatctgagtcggagactgcgcttgctcttgctctggcgtcgtagtcacagcatccctacgtctacgaacttgtctgcttcacgctctatcgcctgcacatggaacgcgaactcctccgcgtggacgccaaccgcattcggcgtcaaatgcatgaggtcgtactcggcaactaccgatctttcattgccgtcgtcgacgcctt

SEQ ID NO: 28150 - DNA, 291 bp, Glycine max
ggtcagaagagcatatattatgttatggcttcttgcacaaactttcggagttttctttcggtaattaataaaatctttgcttaattaatttgtgctttctggaggggcacttaattaattaatctctggtgagtatttataaatatggagagcctggaagaaagagtgcttatgttcatggatgaacaatattatttttccaattgcaatgaatcagagctgcatatgcatcatcatccctctgtgtctgtggagaacatatcgtgggaaaacaacaccgacttctatgac

SEQ ID NO: 28151 - DNA, 347 bp, Glycine max
agacgggggcagaaggcaaatcgcgaagactagatctgatctgagagaatggctcctcggtctagcagcaaggacgcccaagaccttttgcgcgctctttggtctgcttatgctgcaacctccactaatcttaagatcattgatctctatgtcatctatgccgtattcaccggtttcatgcaggacgattacatggctttggttggatcatttccatttaacttcttcctatcaagagcactatctggtgtaagaactgctggtcttgcatgatgacttaggatccaaatgaataatgagaatctgggcattaaggatcttgcacctgaacgcgctttagcggattt

SEQ ID NO: 28152 - DNA, 422 bp, Glycine max
tcggcaacagctacttgattggtggaacaggcattataaatggccatacccttcggaatctcaaaagcaggcacttgcagaatccacaggcctagatctgaaacaaatcaacaactggttcatcaatcagagaaaacgtcattggaagccttctgaggatatgcaatttgccgtgatggatgcaactaactactacatggaaaatgttatgtgcaagccattttcaatggatggcatgcctatgcttctttaaactaatcctctactagaatattcaaaagcttagccgagaaaaccctatctattttaagttgcctaggtcgccaggttgctatatataatgtgtcattgatgaatgttttactttaaattgtagaaagcaggatgaaaattctcggttatccctgaactgcaatctatgt

SEQ ID NO: 28153 - DNA, 446 bp, Glycine max
  modified_base (145)..(145): a, c, g, t, unknown, or other
gcgagacgacagaaggggaagtttttgatggaaaagaacaccactaatgctcttcatggacaagtcactattgggaccctgattttgcaggactgtgctgttggattgctctttgcattgcttccagttctgggtggcacctcangtgtttttcaaggagtgttatcaatgaccaagctgttggtgacattgattgcattcctctctgttctgtcaatattgtctcgcacttgccttccatggttgcttaaactgatgataagcctctcatcacagacaaatgaactctatcaattggcgtcagttgcattctgcttgctagtagcctggtgtagcgataagctgggactaagtctagaactaggttcctttgctgctggagtgatgaatgcaaccactgatctggctcaacatacactagagcaaattgaacctattcgcaatct

SEQ ID NO: 28154 - DNA, 143 bp, Glycine max
ttgggaagagggttttgggtaaaactcccacggtcaagaggcaatcttgtgggaaatacaaaggtgttcggatgcggaaatggggcaaatgggctgcagagattcgtgaccctttcaagggcgcgcgaatctggttgggtact

SEQ ID NO: 28155 - DNA, 170 bp, Glycine max
gtggcactagggtcaatcatccaataaattgatgcacctaagagtactatatgagaccccatacctgttactcaagatgcattctcagtaccacccacaccttgtagagaaagagagaatttatcaattaagtcatagggaaaattgaagaaaaccaatgtgacttcagt

SEQ ID NO: 28156 - DNA, 405 bp, Glycine max
gggatcgaatttcgcagcacgatttggggctttccggaaatccaattagggatttcaacggttcttctctccgttccgttctcgtttcgtcgcggaatcacaaaactgaaaacaatcaaacctggggagtgaaggttcaggcttcgatcctcgctccttgtgctgatgcctccttcggctctggcgctacgtcatggccgataacatggaaatcgatattccctccgattcccagccgctcaagcctcgcgatcgagttgttcggaggcttgcccagtttggtgttcctgaggagcagctcgaccaacctggtttggttgcttttgctaaggataagagggcgttgatacctgagctggtgtctgtgatattgcctactgatgcggaagtggcagatgcatggga

SEQ ID NO: 28157 - DNA, 415 bp, Glycine max
gatacaatgaaggatttcaatttaacctttatgggaactcggctttgtagatgagcttgatgtttccatttgagatgcaagacatcttactgccttccggcacaaatggtgttaaagacctacacatttctgcttctcatagtagtaccctggctctctttgcttctctaggaaagaaattatcagtgctcagcttggacagcggcaaccttgttgtcaattatgacctacaggttcctgcatggtcttgttcatgggtctcaacaattcacattacatatatgctggactacagaatggttctgtcttagtgtttgatatgcgccaaactgcaggacccatgaaatctctagttggtttgactagcaaccctgtgcatactgtacatgctcttgcacaaacttcaagtttgtct

SEQ ID NO: 28158 - DNA, 293 bp, Glycine max
gtatctatttgtcattatacccattttaacttatgccaacatggagaactttatagaagctacagtcaaggttcagatactgcttctttagaggtagcaacacctattctaattcctagaagtgatggtcataggcatcggaagggaagccatggtgatgttatcttcttgacaaatcgtggagagattacatcatactcccctggcttgcatggtcatgatgctatttggcagtggcaacaatcaactggtgttacatggtcaaacctaccctccccatcaggaatgatgga

SEQ ID NO: 28159 - DNA, 415 bp, Glycine max
ggttgttcaggcgaaacaatggcgacggtggagctctggtggatgacgtgctttctctaacaactgctcttagaaaagagagagagaatggcggtggagtacacatgctgctcaacggcgttcttcgttcacatagtggtaatcgtgctgctggtgctgttcgcgggcctcatgtcgggcctcaccttgggcctcatgtcgctcagcctcgttgatcttgaggttctcgctaagtccggcactcctcaggatcgtaaacacgctgagaagatattaccagttgtcaaaaaccaacatttattgctatgtactcttctaatttgcaatgctgcggccatggagacacttcctatttttcttgatggtcttggtactgcttggggcgctatcctgatttcagtaacattaattcttt

SEQ ID NO: 28160 - DNA, 316 bp, Glycine max
  modified_base (215)..(215): a, c, g, t, unknown, or other
gaagtttgaaagacaaatacaccatggcagatatcctgagtgaagaacagattgttgattttaaagaggcctttggcttgtttgacaaagatggggatggttgcattactgtggaagaacttgccactgttattcggtcgttggatcagaaccccaccgaagaagagctccaagatatgataagcgaagtggatgcagatggcaacggaaccatngaattcgatgagttcttgagcttgatggccaagaaagtgaaagacaccgatgcagaggaggagctcaaagaggctttcaaggtttttgacaaaaatcaaaa

SEQ ID NO: 28161 - DNA, 409 bp, Glycine max
acgacagaaagggattcattgaagtattacaatacaacctttatgggagctcggggttgtatatgagctggatgtttccatttgagatgcaaaacatcttactgccttccggcacaaatggtgttaaagacctacacatttctgcttctcatagtagtaccctggctctctttgcttctctaggaaagaaattatcactgctcagcttggacagcggcaaccttgttgtcaattatgacctacaggttcctgcatggtcttgttcatgagtctcaacaattcacattacatatatgctgaactacagaatggttctgtcttattgtttgatatgcgccaaactgcaggacccatgaaatctctacttggtttgactagcaaccctgtgcatactgcacatgctcttgca

SEQ ID NO: 28162 - DNA, 396 bp, Glycine max
  modified_base (277)..(277): a, c, g, t, unknown, or other
gaccatctaaggtagctgtaaattagtgactttaatatttgaagtttgagatgttgcagcatgttttgcttgctggttgctgatggcaaagaccatgacttgaaggatgatggtgaagagaatggttgtaaagaagagtatttggtgcttgtgggtgtgaagctggatttttctcttttaggaaacatctctgttggacattaaaaacatgttaacagagagcacattgcaccgcagcccatcattgtcttcgctgtgcatactcgaggagacatangctgtctgtgttaatggctaagaaagatggaagttgtgagtgatgttgatgggttgaccaggtcaagggtgatgtaatgcatgcaagtacttgtgcactctgatacttgcatgtgtgca

SEQ ID NO: 28163 - DNA, 412 bp, Glycine max
  modified_base (369)..(369): a, c, g, t, unknown, or other
ggagcgagaagcgagaagggagtgaggtttggagaagagagagatgggaaaggagaagaagaggtatcttctgaaaacggaaccgtcggagtggtcgtgggaggaccaggcagcaaacggaggcataagcaaatgggatggggtgaagaacaagcaggcccagaaatacctcaagtccatgtccatcaacgacctctgcttcttctaccactccggccccaaggcccgccgtatcgtcggcgttgtttccgtcgtccgcgagtggtacggcgatgctgtcgacgtcaaggctgtcggggagatgaggaggcccgtcgacttaaaggagatgaaacatttcaaggatttcgctctcttgaggcaacctangctctctgttgtccctgttcccgatcacatttggaaccaaatc

SEQ ID NO: 28164 - DNA, 399 bp, Glycine max
ggccacttttcgctgagatgctgcgactttctaacgaaactggctaactgaataaatgattaatgcgattacatgggtgcataaaagggtttcgaaatcggaactagtggtggctgaaccttctaccgacaaggaaaatgatcacacgatagtcaaccatgcattcactaggatagacaaggaccatgaagacgctatcgacgatgaccttgtggcacatgcattaaccgtatcagacgcagatgacaatgcctttactggaacctgcgacgataaaaccctcgcggtgaatgaccttgacatggacctttatgatgactaaaattaaggaattgatgtgttcagttctggaattggctatcgttattatgctagtaacgacatggatccctatatcaa

SEQ ID NO: 28165 - DNA, 364 bp, Glycine max
gcatgttatttgggtaaagaatggaaataatggctatgatgatattcgtgctgccattaaggaagcaaaagctgtcaaagacaaacccacattaatcaaggtcacaacaaccattggttatggttctcctaacaaggctaactcctacagtgtgcatggaagtgcactgggtgccaaagaagttgatgccacaaggcagaaccttggatggtcacatgagccattccacgtgcctgaagatgtcaaaaagcattggagtcgccacacccctgagggtgctgcacttgaagctgaatggaatgctaaagttgctgagtatgaaaagaaatacaaggaggaagctgcagaattgaaatctattatc

SEQ ID NO: 28166 - DNA, 419 bp, Glycine max
gattaacaagaagaagaagaagaaacggtgtcttgctccaatctgacaatgttggtgtcctcaaaaccttccctttccgacccctcgaacctctccttccgctctgtcctgaacccttttcagctccctacacaaaacccagcttcatgcaccccttcacgctcctcaagcacccaaattcagtgtggtctgagagaactgagaacccgcattgagtctgtgaagaacacgcagaaaatcacggaggcaatgaagcttgttgctgcagccaaagtgagaagagctcaagaagctgttgtgaacggaagacccttctcagagaccctggttgaagtcctctacaacatcaacgagcagctccaaactgatgacgtagacatccctctcacaaaggttagacctgtcaagaaagttgcact

SEQ ID NO: 28167 - DNA, 180 bp, Glycine max
ggcccatggacgtcgcagacaccgggtatgaggaccacgccgaccacaaagcacgaggtaacaaacacatcactggcgacgaacgagaggggcacggagaagaggtaaacgggaagggaacaacggaaaagaggaaggacgacgggctaaaggagaagaaacggaacaaggaatggggag

SEQ ID NO: 28168 - DNA, 428 bp, Glycine max
ggcatataacgattagaaaatctagtctgactcactctcacgaggttatgcaacaagacaacgcgacaggggtcccacttccagatctacttactacgcttctctgatctgacactcatcattctgatagtataactcctttttgggaaagcttaaaacttgaatgcaaaaccacaccaccccattagccatttggtgatcaaaatcgatcaatggagtttactgcatcttacaagcaaacgggatcctgttgtgtgtcttccaacgctcgattcattgccattggcgttgattatcgtgtcgtgattcaggagaccgtatctttcaaggtcgtgcagttgctttcatgcttagacaagattacctatattgaatggccccttgattctgaatatattctttgcggtctctacttaacgacgatgata

SEQ ID NO: 28169 - DNA, 428 bp, Glycine max
ggacctgaggttgtttttgcaggcagaggaagagacaatggaacgattaaggtcacacgagactggcatattcaagaagaaaccagccgatctaatgcagatttttaaggatgtgcaatctaaagtcagcgatgttgtccttgggaaagagaagccagtagaagaatcagatcctgagtatgaaaagatgaaacattacatctttgagcttgaaaaccacttggctgaagctcaaaagcatgcataccgtcttgtgaagaggcacagagagttggggcaatcactgtctgattttggaaaagcagtaaaacttctatgtgcttctgaaggaaatgctcttgggaaagcgttctctgaacttgggatgaagtcagagattttatcagccaagttgcaaaaggaggctcatcagctcttgatgaattttg

SEQ ID NO: 28170 - DNA, 409 bp, Glycine max; identical to SEQ ID NO: 27270

SEQ ID NO: 28171 - DNA, 422 bp, Glycine max
gacccatattttgatcaaattggctgttctcatgctggttgtgagccagcttatcggactcccaagtgtgttaaaaagtgtgtaagtggaaaccaagtttggaagaagtcaaagcactatagtgttagtgcatacagagtcaactctgatccccatgatatcatggcggaagtttacaagaatgggccagttgaagttgcatttaccgtttatgaggattttgcttactacaaatcaggagtttacaaacacatcactggttatgaactaggtggtcatgcagtaaagctaattgggtggggaacaactgatgatggggaggactattggcttctcgcaaatcagtggaacagagaatggggagatgatggttacttcaagatccgaagagggacaaacgaatgtgggattgaagaggatgt

SEQ ID NO: 28172 - DNA, 198 bp, Glycine max
gagaggttgaagaagcaagcaccaacgtgaatacgcctaattcggagggtttcagttttcgccctcttttctcatctccaacatcttcgtcgtcacggaagctagtcttcctgttatcacaaacaatgtctgacggtcaagaatcagacaagaatattgagatatggaagatcaagaaattgataaaggcattggaag

SEQ ID NO: 28173 - DNA, 424 bp, Glycine max
  modified_base (392)..(392): a, c, g, t, unknown, or other
ggtgagagagagagcgagcagtttcagacacagagagaggggtttgggattggagggattgacgctgcgtctcttcctcttctctttcgatccatccctcattcctaatcctccaatccaaccacctcagcctcacactcacatatacacatatctgaacgcgtatcgtccctcctatggcttcaaagcgcatcctcaaggagctcaaggacttgcagaaagacccaccaacttcttgcagcgctggtccagtagctgaggacatgttccattggcaagcaacaataatgggtcctgctgatagtccttatgctggaggtgtattcctagtcactattcacttccctccggattatcctttcaagcctcctaaagttgcctttaggactaangtgtttcacccgaacatcaatagcaatggtag

SEQ ID NO: 28174 - DNA, 247 bp, Glycine max
ggatgaagagcgaatagtgaatagaatggctggcaaaggtttaacctttgcggctgtgataatatgcgtttcagcactgtcactgagtacttctgtcgcggtggcagcggccaatgatggccttgtattaacttgtacaaggaatcatgccctcatgctgaagacatcatcacagaacaagtcaagcttctctacaagcgccacaagaacactgctatctactggctcatgaacaatgatcatgact

SEQ ID NO: 28175 - DNA, 416 bp, Glycine max
ggtaaagagatagatgaagcaagcaagcgatttgtgaaagcgttgaccagaaagtgtgaactacaaagtgtaggaatgagcatataccaccagatacctgcgttgattctggattcttgaagccattccttctattttctggtgacagcttcgtcttgtgctatactatataacaactcaccctctctccttacctcttcattcccaacacaaaacactctctcctccttcaacctagccctggtcactaccaaccaagtgtcccccctcctctcccttgttaacaggtagctgagttagtgagtgatggcgggaggacaactaggagtgcttaatgcactcgatgtggcaaagacacaatggtaccacttcacagctattgtgattgctggaatgggattcttcaccgatgccta

SEQ ID NO: 28176 - DNA, 423 bp, Glycine max
ggaagcgtgagggcaaaaagtcggaaccaccggggaggagggcttcacacagagaattacgcggttgcagcagtcaacgcccgggattcccacgtccataccaaccacaacaggcggagagagagtttaggccttagtgagaaggataacgccatttggttttggcttggaatacgtcatccactatcaatcaactgggctttgaaatggtgaaggagaccgaatactatgacgtgctgggtgtcagccctacggcatccgaagccgagattaagaaagcttattacattaaggcacggcaagtgcatccagataaaaacccaaatgaccctcttgctgcacaaaattttcaggttttaggtgaggcttaccaagttctgagtgacccagctcaaagacaagcttatgatgctcatggaaaat

SEQ ID NO: 28177 - DNA, 283 bp, Glycine max
  modified_base (152)..(152): a, c, g, t, unknown, or other
gacagcagcagagcaaaagaaagaaagaaagaaagtgcaacttcctctgttttgctcccctgtttaagccttatcataagcttagaatggcacacaaggaattttccattgccctagtgactctcattgttctctttgtcaacacgaacctncaaggtgccacggctgactatggtggtggttggcagagtgctcatgccactttctatggtgggggtgatgcttctggcacaatgggtggagcatgtgggtatggaaatttgtatagccagggatatggaac

SEQ ID NO: 28178 - DNA, 385 bp, Glycine max
gatccaaagcagaacaaagagccattgaactttgactataatgttcagagttcagattactcactctaatcttctaagttttcattttggggtttaagtttctgaaggaaaaaaaaatgataaagtttgttctatttttgttctgctttgcctctgcactgaccctttcagtatcggagtccaaatcagcttcagtgcaacctcatgctgctgaatctttctctgttggatatattcagatgaagactgcagcgaactgttcttacctggtagttatatctacgagttgttcatcgcctaagttcacaacggataagatcggtatcacgtttggggatgctaatggcaaccaggtatatgaaccaagactggatgatccaatttc

SEQ ID NO: 28179 - DNA, 399 bp, Glycine max
  modified_base (343)..(343): a, c, g, t, unknown, or other
ggatggaatggtgtcaagatgtgatggttgaagaaatgaaaactttgaaacgtcttcacaggttgcagcaaactagtgccaatcttccaaaggaaaaggtgctttcgaaaatacgcaactatttacaacttcttgggagaaggatagatcaaattgtgttagaacatgaacaggaaccctataagcaagatagaatgaccgtgcgactgtggaaatatgtctccactttttcccatctttcacgggagaggcttcatcaaatatattccaaacttagacaggagcaagatgaggcagaggttggcccctctcacacaaatggatcggtatctgtttcatttancagaaatggaaatccattccgtttccatatggagaggcaaagaggattaaaaaata

SEQ ID NO: 28180 - DNA, 362 bp, Glycine max
ggaggggtttaggtttaaagttgaagaaggagcgagcatggggaaggaaggagatctatgggacgattcatctctcatcaatgccttcgaccaagctatttctactttcaacgttctcttcataaccctatttttcactcttcaaattcggtcttaatctgagaatttcgttattaactaatttacagaaaatgcatagcagcggcaaacacaaaggcgccgccacggctcgagaggcggacacaatcatcggagaaaatggctccaatgttgacactacaagggatgctgatacgaatattccagctactgatgtgcctgattcaggtgaaactggtaatttgtcaaagttggaagaaaat

SEQ ID NO: 28181 - DNA, 387 bp, Glycine max
aaccaccttttgggattttgcaagagattgatgtaaccggtaaactggcttattgagaggggaatatgaagttgtaacttttctttgttgctacaatatttttgctaacatggccatgccttgtctcaggctacccaaggtcccctcttcaaatgataactcacctattctgagctttctttcctggtaaactgctcacactttatgcttgcttcttagctcacaacatccgcaccttttataccattcctccagagcgcgttcaaccaacacaagactacattaatctcgaacatttaagatcagactctaaaacaattaaccaacaagctttcccatatgctagtgaacgcgacattcatttctgcgacatatttatgttccccc

SEQ ID NO: 28182 - DNA, 221 bp, Glycine max
ggaagaatagaagattcatttttttgtctttttgatatggaagctgatgtttctattatttttgttgcgttttcaaaaccctaaattggagaaatcccaatttctccttctgtctttctgctttggatgtttttcaaccaaaaaattgtgcttttcaaatcttttgctctgatgggtacttcaaatcttctcttgtttttctctctgatgagcctgtgtgc

SEQ ID NO: 28183 - DNA, 68 bp, Glycine max
gaacttaattagaaattaaattgcacaaaaagcttcagaattgtcctatttattttgtgtaccttttg

SEQ ID NO: 28184 - DNA, 382 bp, Glycine max
gggagttgagttgagaaggaaaggctgaagaacacatagagagagagagagaagtgcagaaaaaatgagactgttcgatccatggcctgttttcttcaagagagaatggaagcggaattggcccttcttggttggattcgccatcaccggaactctcatcaccaaactttcccttggtctctctgaggaggaagccaaaaagtcgaaattcgtccaggcacacaagaggtgactttagaatggaagatttgcagtggctttgcacattgtattagatgtgtgaagagagcttttgtttgtaataaatgaagagagatgttgtatacactccatgttcctatttccattttggttgtttactttaatgtgattgagaaattca

SEQ ID NO: 28185 - DNA, 355 bp, Glycine max
gggccatgaacgttgtcagctccggcggaattagtatggccaacaaacagcttatgtccaacaatggctatgctttcagctttgccagttcgttaactgggttccactttgccgtaactgctctcgttggtctggtgtcaaatgctaccggttactcagcgtcaaagcatgttcctatgtgggagctcatttggatctcactggttgccaatatgtctatcacggggatgaactttagcctcatgctcaactccgttggattctaccacatatcaaaactgagcatgattactgtggattgggtgatggaatggatacttcacaacaaacactactcaagggaagtgaaaatgtc

SEQ ID NO: 28186 - DNA, 380 bp, Glycine max
gggtcaaagtgctactattacaggaacctacgcaggacagtatgtcatgcagggatttctggatttacgactggagccatggattcggaatatgttaactcgttgcttagccatagttcctagtttgattgttgcagtcattggtggctctgctggggctgggaagctcataataattgcatctatgatcttatcatttgagcttccttttgctttggttccactcctcaagtttacaagcagcaaaaccaagatggggacacatgtcaactctaccatgatttcggctgttacttggataatcggtaccctcctcatggccattaatatatactacttaataactggcttcatcaagctgctgcttcatagtcacttaa

SEQ ID NO: 28187 - DNA, 317 bp, Glycine max
gagagagaggtagagtgttgatactggagcggaggcactcgaattaggagagtgaagcaagaagaagatgaagatgaggcagaagaagatgcattgagaagacggtgtctgaggaaactgatctgatgctgtgactgggactatgtctgcctggaaatggaacgacggtatcaactgaagctgctgatgtggtatcatgaatcaggactagaggtgtctctgagactgcgactgatgaaacatgcacgcgtaatttaatgcttaagctctgacgcacagaagctactgctgctgatggtgcagatccacgtgagaag

SEQ ID NO: 28188 - DNA, 333 bp, Glycine max
  modified_base (266)..(266): a, c, g, t, unknown, or other
ggttggagagagagatgggaaggtccccttgctgtgagaaagcacacacaaacaaaggtgcatggaccaaagaagaagatcatcgcctcatttcttacattagagctcacggtgaaggctgctggcgctctctccccaaagccgccggccttctccgttgcggcaagagctgtcgtctccgctggatcaactatctccgccctgacctcaagcgcggcaatttcaccctcgaagaagaccaactcatcatcaaactccatagcctncttggcaacaagtggtctctaattgctggaagattgccggtagaacggacattgagataaagattac

SEQ ID NO: 28189 - DNA, 421 bp, Glycine max
gaagaagaagggtgttgatgagtttcctttctgtgtccatctggttagttgggagaaggaaaacgtttctagtgaggccctggaagctgctcgtattgcttgcaacaagtacatggccaaatttgctggaaaggatgctttccacttgagagtcagggtgcacccattccatgttcttaggatcaacaagatgctttcgtgtgctggagctgataggctccaaactggaatgagaggtgcttttggaaagccacagggtacttgtgctagagtggctattggacaggtccttctttctgtccgctgcaaggacagcaacagccatcatgcccaggaggcccttcgccgtgccaagttcaagttccctggtcgtcaaaagattattgttagcaggaaatggggcttcaccaagtttagtcgt

SEQ ID NO: 28190 - DNA, 432 bp, Glycine max
gggagcagatagtaggtgaagaagttctcaagagttttctgggacggagaccaaaaccaacttggaactggcatggcaactataggaattggagtaggagtgacgaagctccaaccccacaaaccaaagtctaagtccttgtttcttggccagaggcttacgattagaccattttggggggagcctcaatgcagtgaaagaagattattcagtgtctcaaaccccccaagagtggttcaagtttttgcactagcgggtggtgaatggcttgacactgttcacagcctctttgtgggtgttggggttggacttccttgcagtgtgatgcagtgtggtgatgtgatatataagagcactcttcccaagtcaaatggcttgacactcactgtccctggagtgattttggctttggggaccctatcttacctttgg

SEQ ID NO: 28191 - DNA, 425 bp, Glycine max
ggcacaagatgggtgttatcgtggggatcactggtgctactgcttctgcttcttaagccttttcttttcttctgtgggttccccctctttcgatattctgcactttagagagacaaccagacatggctggcagcaaccaagtcaatctcaatgaatctaggagtgttgttcctttaaatacatgggtgcttatctccaatttcaagttgtcttacaagcttctcagacgtgacgatggaacgttcaatcgtgagttggtggagtatctcgataggaaggtccccgcaaacgcaattcccgttgaaggtgtgttttcaatcgatcacgttgatagaaacgcgggtttattctaccgtgtgtacttaccaacctcaggaaacgaggctcaatggggtatcagagaccttgaaaagccgttaagtact

SEQ ID NO: 28192 - DNA, 433 bp, Glycine max
ggcacaagtgagtttgttgatcgagataactagaaacagtgtgatgaaaatgaaggtccttgttttcttcgttgctacaattttggtagcatggcaatgccatgcgtacgatatgttccctctccgaatgaacactggctatggtgcccgtactccggaggtgaaatgcgcaagttggaggcttgctgtggaagcacacaacatctttggctttgagaccattcctgaagagtgcgttgaagcaacaaaggaatacatccatggcgaacaatatagatcagactccaaaacagttaaccaacaagcttacttttatgccagagacctcgaagtccatcccaaggacacatttgtgttcagtatagatggcaccgtactctctaatattccatactacaaaaaacatggatatggggtggagaaatttaactcg

SEQ ID NO: 28193 - DNA, 383 bp, Glycine max
agggggttgaagcaaagataagtgatatgcaaaacatgtctctaatagcttcactctcctccacaacttcacaactcacttcccttccttccctcccttcttcctcctctccactttctcgcaaatttcccctcactttccgggaaaaaaacagaactccaatcacacctcacaagctccctttttcagcaaggcctaccaccaccagagtggtgttggtgaagtctcaagccacagcacctgcttcttctgaggctgtggcagtgacacctgtgtcttctgagatgaaagcatgggtctatggggaatatgggggtgtggatgttctgaagctggactccaatgttactgtgcctgatgtgaaggaagatcaggttctaatc

SEQ ID NO: 28194 - DNA, 421 bp, Glycine max
gggagagagaatgagtggcggaggagaagagggggcaactctggagttcactccgacgtgggttgtggccgccttttgcacagtcatcgtcgccatttccctcgccgctgagcgcctccttcattatggcggaaagtttctcaaagccaaggaccagaagtcgctctacgaagctctccagaagatcaaagaagagctgatgcttttggggttcatttccctgcttttgacggttacacaaaacggcattaccaaaatctgcgttcgaccctctttgacgctccacatgctcccgtgtaatctccacgacgctccagcaaaccacgaatctcatttccagacatttttccctggaacagccaggcgccttctctctggggaacactccacccccgagtccgcctctaaaattggttattgc

SEQ ID NO: 28195 - DNA, 408 bp, Glycine max
ggatttactgctgaacattttgtgaagtcagatgtgattgacacaaatgcagtggcttcaaaagtccaagataatttttccaatgaaggttttgaccaaactgaaacagagagggaaaatgccaaacctgatgactccagagaatcaatagtgtccagtgaaaacagtgacgggaatgataaggatgggtccgttgatgagaccacattaaagagtacactcgattctgtgcatgaagagcaagggtttatagctgaacatgttcaaatgttagatgttgaaatagatgcagcggcttcaaaagttgaagacaaattttctaatgacggatttgataaagctgaagcacagagggaagacgccaaacttgagagctctagtaaatcaataatttcctgtaaaaacagc

SEQ ID NO: 28196 - DNA, 397 bp, Glycine max
ggtgagaagagtggtgtgatggcgcagagagctcaaccagtattggccacagatgttttccaaatgggaaacatccaatggaagcaattcaatgttgatacatccagtgcttccttctcacctccaaaaccattgctaatttttacaccaactgttcctggcgcataccctgtaatattgttcgtccatggctttttcattcgcaatttctactactcaaagctcctagcccacatagtctcacatggattcataatcgttgctcctcaactgttttccaatgggcttcctatgtatggacccactgaagtggaatatgcaggaaaagttgcggattggatagctgaggagcttcaacatttgcttccagagaacgttgaagccaatttggacaaac

SEQ ID NO: 28197 - DNA, 268 bp, Glycine max
ggttctagtgtgtgattgtttgttgttgtaactcgttcttcttcttttgttgttctgtgtttgtgtttgttttttctctcacctgaaaatgtcttgctgcggtggtaactgtggttgcggaagctcctgcaagtgcggcaacggctgcggaggctgcaagatgtacccagacttgagctacactgagtcaaccaccaccgagaccttggtcatgggagtggcacctgttaaggctcaatttgagggtgctgaaaatgggtgtgcccgc

SEQ ID NO: 28198 - DNA, 404 bp, Glycine max
gacgtcaacaacattcatcaatgtgttgtgtacacactgcacaccaccccatcccatgtgactctctgccccttccttcatcaatcatagtttctctgtgttttgttccgctaaatctccaaagcaatcaagcagagttctttaattagatgcaacctcagcacgagggttaacagattccgaccgtctcaatgaatgttgtgatttgtggtactgttgactccttctttttggttggacttagagtccaaaatggcggtgctggggtgagttgagttgaagtgaggcacctactttgcagtctgagtttgtgttgtctagtcttttttttttctttttcaaacatacaataatgaaggccttttccttcagtggggtttggattttattgtttctgagctcgg

SEQ ID NO: 28199 - DNA, 417 bp, Glycine max
  modified_base (327)..(327): a, c, g, t, unknown, or other
  modified_base (383)..(383): a, c, g, t, unknown, or other
gattgtatatcatttacaatttcaatctctctctctctctgtctctctctctagacttagattttgtgaatggctgaagtggaagagggacaggtcatcggcgtccacaccgttgatgagtggaagctgcaactccagaatgcaaaagactccaaaaaactgattgtggtggattttactgcttcctggtgtggtccatgccgttttatggccccagttcttgcagagattgcaaagaaaactcctgaattgatcttcctcaaagtggatgtggatgaagtgaggcctgttgctgaggaatattccattgaagccatgccaaccttnctcttcttgaaagatggcgagatcgtggacaaggtggttggtgctagtaaggatgnaccttcagccaccatagccaagcatgcatctgct

SEQ ID NO: 28200 - DNA, 195 bp, Glycine max
ggagctgacatcattgttgagtccaccggagttttcaccgataaggataaggctgccgcacatttgaagggtggtgcaaagaaggttattatttctgcccccagtaaggatgcccccatgtttgttgttggtgttaacgagcacgagtacaagccagagcttgacattatttccaatgctagctgcacaaccaac

SEQ ID NO: 28201 - DNA, 421 bp, Glycine max
acagttcatccagggaactgatgaacaaacaatacccgatgtgaggctgaccaaatcaagggatggaacaaatggcatggctatcttcacatttgatcaaccctcagttttcgattcttcgggtgaaataggcgatatcactggattttatatgattgatgaggaaggggtccttcagtcagttgatgtaagtgctaaatttgtcaatgggaagccctcaataattgaagccaagtatgtaatgcggagtccacgggactgggatagattcatgagattcatggagcgatactcaaatgcaaatggtttgcaattcatcaaaaaatgagttaatgtgctaactctgcccttctattcttttgcccttttcaggaagtttgtgttctacgatatagtcacatataaaacctgagtgaaatgc

SEQ ID NO: 28202 - DNA, 389 bp, Glycine max
ggagagaaagtgagagagaattacagagcattttccaacacgattacacgaccgaatcaaacccctctttctctccgaagctgcttttaatatcgtactggccttcgattgttctcctctttaatacatactgttctctcttcgatttgagggaacagtacaagagtctgagcatcggttaacccaactgcacaggtagtctccaaataatggagcctcatgatgagactggatgccaggctcctgaacgccccattctttgcattaataattgtggcttctttggaagagcagctaccatgaacatgtgttccaagtgttacaaggacatgctgttgaagcaggagcaggacaaatttgcagcatcatccgttgaaaacattgtgaat

SEQ ID NO: 28203 - DNA, 330 bp, Glycine max
ggattccgaatccgagaacgtggttgtgacaggatcattgagctcggcaagaatggaagaacacaggttgagcttgagaatgagcacgcttgtcttcactctttccattatcatcatcgtactctcttacccagcacaaccacttgcgttgaaccattctccgaaattcctaggaaaattcgcagcaacagcacgaacccattcaaattccgagccaccgccgcaattccactacgaaaaaagatactttcaacagcgcctcgaccactttagcttctcggagctacccacgtttactcaacgctaccttatcagcaccgaacactgggt

SEQ ID NO: 28204 - DNA, 351 bp, Glycine max
gaccagacaatgctaatttaatgaaagtacatattttctgaactcagcattgtagggtggactacctttataggtggtccgtgaaccactattaatgaccctagggtgaatgatgttggtagtcagaataaatccgctcaagggcatggcaaacggtggtggggctcgatccacatgcacacaaggtccggacaaacaatggtggtgctcggtctagatccggtttaggccactacaaacgatcaaagaggtgctcgtgatgttctctcgcgtttccagatatgatcatacagatactcatccccgcctctgctgttacaactattattatttactttaattattcacagt

SEQ ID NO: 28205 - DNA, 421 bp, Glycine max
gattgagaaggctgatggatttgctggagtattggctgaacacaaatatgaaattgtgaagaggctgcaagagaggaagcatatttgtggaatgacaggtgatggtgtcaacgatgctcctgcattaaagaaagcagacattggaattgctgttgctgacgctacagatgctgctagaagtgcttcggacattgtcctcactgaacctggtctgagtgtcattattagtgcagtgctcaccagcagggcaattttccaaaggatgaagaattatactatctatgctgtgtcaatcaccattcgtatagtgtttggtttcatgtttattgcattgatttggaaatttgattttgcacccttcatggtgttgattattgccatactaaacgatggtaccatcatgacaatatccaaggatcga

SEQ ID NO: 28206 - DNA, 396 bp, Glycine max
ggtattacaaaaacctattttggcttgtgcctttgcttttccagggagcttattgacaatggctgaaacaaaaggggtcatgaaagacaaaagatggtcttttcatggaatgaccgctctagtcacaagaggcacccgaggcattaggcatgccattggtgaaaaggtaactgagtttggagcaactggtcatatatgtgcacgtaatcaagatgatattgattaatggttaaaaaagtggaaaaaccagggacttaatgtgactggttcaagatgggatttactatggtctgaccaacgtaaaagattaatggaaattggtggcttcatctttcatggaaaggtcaatattctagtgaacaatgcttcttccaattttaccaagaagattaccga

SEQ ID NO: 28207 - DNA, 416 bp, Glycine max
  modified_base (333)..(333): a, c, g, t, unknown, or other
gtattgacaagcgtgtgattgagaggttcgagaaggaggctgccgagatgaacaagaggtcattcaagtatgcctgggtgctcgacaagctcaaagctgagcgtgaaagaagaattaccattgatattgctttgtggaagtttgaaaccaccaaatactactgcacggtcattgatgctcctggacatcgggactttatcaaaaacatgattactggtaccttccaagccgactgggctggccttattattgactccaacactggtggttttgaagctggtatttctaaggatggacagacccgtgagcatgctcttcttgctttcaccctangtgtgaagcagatgatctgttgctgtaacaagatggatgccactacccccaagtactctaaggctaggtatgatgaaatcgtg

SEQ ID NO: 28208 - DNA, 420 bp, Glycine max
  modified_base (63)..(63): a, c, g, t, unknown, or other
agaataccaaaaaaccaatatttcctgggcccttgcctagataagacgggatcatttaactcncccaaaatttaacaacactatgtgaccctgaaaatgatcacaacttatttcactcttttcattatgagcaacctactcttttacccatcccaaccactaaaagttaaccatttttcgaaatccctatcaaaatttgcacctacagcacgaacccatttaaaattcttaccaacgccgcaattccactaccaaaaaagatactttcaacaacgcacttaacacttgaacttctcaaagctacccacgtttgctaaacgctaccttatcattaccgaacacttggagagtccacatcaacttggccccattttttttttatatggaaactaaagctacatcgaatggttctgccaaaac

SEQ ID NO: 28209 - DNA, 402 bp, Glycine max
ggagactcgaagtgtgaagcactgagcagttgaggaaatgggaacccttgggagagcgatctacagcgttggtaactggattcgagaaactggacaggccattgatcgtctcggttcccgtcttcagggcggttactacttccaagagcagctctctaggcatcgaactctgatgaacatatttgataaggctcctgttgttgataaggatgtatttgttgcgccaagcgccttcgtcattggagacgttcaacttggaagaggatcatccatttggtatggaagtgtcttgagaggtgatgttaacatcatcagagttggaaatggaactaacattcaggacaactctctggtgcatgttgcaaagtcaaatttaagtgggaaggtgttgcctacaattat

SEQ ID NO: 28210 - DNA, 173 bp, Glycine max
ggagcgaagaagatattaaggtttttgagtgcggtgcggcgatcctagcactctcttctgcagctttcgccgacagcttcattcaccatggctgagtaaaccgagaaagcttttttgaaacaaccaaaagtgtttctcagctcgaagaaaactgggaagggaaagagaccccg

SEQ ID NO: 28211 - DNA, 392 bp, Glycine max
  modified_base (338)..(338): a, c, g, t, unknown, or other
ggaagaaagtgtgaggtcaggtcgaacagcaagacgaggaaaacgcacgtagcgtcaccgccatcttccatctaaaaccccaaaacttaacatgcccaatctgtgtcgaaaaatgtttcaataatggttctgttccgcaagttcctaaaacaaatactcgtcgacaacacccaaaccaaaacaaaagcccgaacctttttcacctcaacctcaaccgcaaccgcattcccatggtgcgcgcctcaccataacaaccgcctcttccggtccccaggcccaggcccaagcccaagccctctcttcctcgctcggcctccatggaaactctctcagtccgncacccctctctattcgcacggaaacgccttcaatttgcttcgctccacaacccc

SEQ ID NO: 28212 - DNA, 157 bp, Glycine max
ggtggagcgaaatggatgcggcattgtcgtccatcgctccaaagagctcaagcgcatcatcactgccactgctttcatcctccaacaactatcgccctgccgttattctcccaagcttaaggaacaactccggtgactaccagagtttgaagcaaac

SEQ ID NO: 28213 - DNA, 417 bp, Glycine max
  modified_base (349)..(349): a, c, g, t, unknown, or other
ggcgataaaacggagaaaagaaaaaagaaaaatggaagtggaagaagagaaagtggcatcgcttaggtacagatacagacacaacctggtaaaaatcccgaccccagtgccgcacaattttccttcactcgcagcggaggtttacttttgatctagtacctgctatccctatgtataagcatggacttctagcatactattgtttgattaaccaagttcttccatattggttgaggaagcctcgagtcaatatttagtttttgctgccatctgtgggtttctgatggatgatgccgggcatcgtgaaaatggaaggcacaaagcagcagatcaatataaatctgctcanggacagtggttgatgcaacatcagccttccatgaagcagattatggcaattatggctgaaagagatgt

SEQ ID NO: 28214 - DNA, 297 bp, Glycine max
ggctataaaacgtataaaagaaaaaacaaaaatggcaccacggagaatataaagtagcaatcacttaaatacatatacaaacacaacctgttaaaaattcttacctcactaccacacatatgcccctcacgcccagacgaacagaactttgaacctaccacctacaataaagacttataaaccatctcttccagcaaacgaaccttgacacaaaccaaaaccactacatattctgattatgaagacaccaataaataaccaacttctactgtcaccaaacctatacttataaactat

SEQ ID NO: 28215 - DNA, 415 bp, Glycine max
ggatagagagaggtgaaaagaaacgttgcataaaaaatcaaataatgcgtgtggctctcactcaacccacctgggacctggctcggaagtgctaagaaagttacaaagctcttttctcctttcttctctgtggtgtgtgtggtgatggtggttgtggtggtggaggggaatcccatttgctgctccaaccgcaaagtgcagatatttatttgtattgtaccctcttttgtatttattggtttctgtttttgtgctaataatgggagaggaagcacaggtaaagcacttcagatcataggtacttttttttttttttaactttaacacaactttgtgattatttccagaggggaaggggcatgtacatatggttcattttggattgtaaacagtgacctagaatcagttgaataaa

SEQ ID NO: 28216 - DNA, 278 bp, Glycine max
aaccaccgtttggggatttatagaggtgaaacgaaacggggataaaggatcaaataatacgagtggctgtcactcaacccaccacagacactcttaggatgtgctaagaaagtaacaaagctatgctatcccttcccctattaacagagtgaggaaacaacccttgacaacaaagactgaaaaaccatctgtttcttctaccgctccttgcttagatgcaaacgactcaccccctgattcggacgaccccaaatactcacttactctcatcttcacta

SEQ ID NO: 28217 - DNA, 416 bp, Glycine max
ggaacacatgagaaagcagaaaccaaagaaccatgaagtctctggggtccatcttagcaacttttgtggttctattatcaatttcactcactatctcacttccaattgaagaagctttcaaccattgtctaacacaacactctcagactccaaaccaatttccctcatcaatctacacttacaccaatggttccttcacttcaatccttgagtccacagctcaaaatctaaggtacttgttgccctcagtgccaaaacctgatttcatattcaccccactggatgactctcaagtccaagcagcagtggtttgtgcaaaaaagcttggtattcacatgagagtgcgaagtggagggcatgactatgaagggctctcttatgtttccctcattgagaagcctttcatgatcctagac

SEQ ID NO: 28218 - DNA, 417 bp, Glycine max
  modified_base (254)..(254): a, c, g, t, unknown, or other
gtgaaagaaagtgattacaagagctgcaccacaggcaattcactaagcacagacagcagtggcaccaccacaatcaccctcaagactgccggcactcactacttcatatgtgcttctcctggccattgtgatggtggtatgaagcttgctgttaaagtaaaggctaaaaaagcatctgctcctgctacagcaccttcaccagctgcaaaggactcaccttctgattctgatgacaccaaagacacacccacttncacctgcactaaccctaaaacttcaacctccaccaccccttcaactgaaacctccaccactaccacatcttcttatacatcatctgcaactgctgctggctccccaaattgtgctatgttttttgcttctttgatcccatactttgtgttgccgttgatgtga

SEQ ID NO: 28219 - DNA, 319 bp, Glycine max
  modified_base (240)..(240): a, c, g, t, unknown, or other
gcacaaaagagaagaagaaaagtctaggaaaactaaagcatggagaggccaattcattcatccccctcttcagagagccaagtagcattgagaaaatctttggggactttgaaagggagcaacaactactggggttaaggcctgccactcctccggagaggcctaaaacgccaccttatgcccctccaagagctccttctcctaggcctccctctccaagggttccttcttcaaggcctncattcccaaagggctgttcttccagggccggtttttccgcaggtaacctttccaaaggcacgtttttccggaatggtta

SEQ ID NO: 28220 - DNA, 428 bp, Glycine max
ggagagagaagggttagaagggtgaagaagcatgtgttcactcaagaagaagaaaccctattacccgcttccgttaattcctatctagtactactactttacttctgattcaaaagggtgatcttcttcttcttccaagcttatcaattatcatgcatatgctactttcttctctcttctcggggaattgaagcgttgtggtccgattgtttgctagatcaagcaaattaacctatatactggtctatatcatcatcaccttgcacctctctctctctctctctctctatatatatatatatatatatgtgggtttaatctcttactttctttatcttttcacttttttcagttttggtttgatttaattacttgattaaaacttacatatatggatttgaatatatagtacgtggttttcgagcttg

SEQ ID NO: 28221 - DNA, 425 bp, Glycine max
ccaaggctgatggtgggaaaggaaaaattggagagagtacaaatttaagaggaaagataacattaccaaccttgggagctggcgaacaagcatacgatgttaattttgaatgggacagtgacttcggaattcccggtgcattttatattaagaacttcatgcaaaatgagttctacctcaagtctctaattctcgaagacattccaaaccacggtaccattcacttcgtatgcaactcctgggtttacaattcagaaaactacaagactgatcgcatttactttggcaacaatacatatcttacaagcgagacaccaactgcacttttgaagtacagagaagaagaattgaagaatgttagaagggatggaactggaaagcgcaaggaatgggataggatctatgattatgaagtctacaatgac

SEQ ID NO: 28222 - DNA, 418 bp, Glycine max
ggtgtgactaacataaaataattagagagagagagagagagagaggatatgggttcgaagaggtatgcgctattgatgtgcggtgaggattcggagtacttggtgaagatgcacggaggcacctatggggtattcatgaagttgctccaagagcaagaggaaaagtgggacctctacaagctcgtccaaggagagttcccggagcagcatgacttgcctctctacgatggctttgtcatcagtggaagctgctatgatgcacatgccaatgacccatggatccttgacctcattgctctcgttatcaaattggactccatgcacaagaagatccttggcatttgctttggccaccagataattgggcgtgcattgggaggaaaagtgggtcgctctcccaatggttgggacattggtg

SEQ ID NO: 28223 - DNA, 370 bp, Glycine max
ggagaaaaagttcttgttcaggttgaagattttgcaaaccacaatgctttgagttgcttgcaaaatatggcacaactcatcttgttttcaacgatgatattcaggggactgcatctgttgttcttgctggggttgtggcagccttgaagctcattggaggtactctggctgaccacacattcttgtttcttggtgctggagaggcaggaactggaatagcagaactaatagctcttgagatgtcaaagcagacaaagacacctatagaggagactcgcaagaagatatggcttgtagactcaaaaggtttgattgttggttcaagaaaggcttcacttcaacacttcaagcagccttgggctcatgagca

SEQ ID NO: 28224 - DNA, 431 bp, Glycine max
gatcacaacaagacataaacaagaatgttgacatgagtgctgctaggcgtagagaacgtgagtactttaatagtacccctgaatataaacaccttgcaaacagaatgggttctgaacatctggcgaagatgctctcaaagcatttggagacagtaatcaagtccaaaattcctggcattcaatccctaattaacaaaacaattgccgaacttgaagctgaactaactcgtttaggaaaacctgttgcagctgatgctgggggaaagttgtatgctatcatggaaatatgccgctcatttgatcaaatatttaaagaccatcttgatggcgtgcggcctggaggtgataaaatttataatgtctttgacaatcagctccctgctgctttaaaaaggttgcagtttgataagcagctttcaatggaaaatata

SEQ ID NO: 28225 - DNA, 383 bp, Glycine max
ggagtagcgatggagaagaagaagggtgagctaaagtcaagggtccttcctttcctttccactagtcacataatcccgctagtggacatggccagactcttcgccttgcacgacgtcgacgtcaccatcatcaccaccgcacataacgccaccgttttccaaaagtccatcgatttagatgcgagtcgcggtcgccccatcagaacgcacgttgtcaacttccccgccgcacaagtgggtctccccgttgggatcgaagccttcaacgtcgatacgcctcgggaaatgacccccagaatctacatgggcctatcccttctgcaacaagtcttcgaaaaactcttccatgacttgcaaccggatttcatcgtcaccgacatgtt

SEQ ID NO: 28226 - DNA, 418 bp, Glycine max
gggctcaaggaatttcgcttagttctttgcagaaaaatcagtgcagatgagagcaaattgaatttagaagccaagatcaagatcagtatggaatatcctctaaggcctcctctttttgcattgagcattagttgtatatcttctggggaaaaccatgatgagacaggtttggagtggtacaatgaacttcgtgcaatggaagcagctgtcaatctacacatactaaagatgttacttgtcaatcaacaaaattatgtattggctcatcaagtgaattgtcttgctatgttgttcgactattatttggacgaggcatccccatcatctgaaaggacaaattgtacttccgtggttgatattggcttatgcaagcctgttactggtagattcctgggtagatcttttagaggaagggatc

SEQ ID NO: 28227 - DNA, 422 bp, Glycine max
gaagatgggtggctgtaattatctgcagctacaagtgtgcttaagctgatactcttcaactggagaacattcataagtgagcgaggttaatggatcttgaatccagcaagtgttgggacacctcaaagggctcttggaagactattctgctcttggcctaccaaagccttggtgttgtatatggggacttgagcatttctccattgtatgtttacacaagcacatttgctgaagatattgagcattcagagaccaatgaagagatttttggtgccctttcttttgtcttctggactctgacactggtgccactcttcaagtacgtttttgtggttcttcgagctgatgataatggagagggaggtacttttgctctatattccttgatttgtaggcatgctaaagttagtctcctaccaaat

SEQ ID NO: 28228 - DNA, 428 bp, Glycine max
gaaggagaaggagatttctgttgaatgatgaggaacctaccctcttgtgctgattgagaataagaaccagaacaggttgcagttaaaaaaatataacttgatgcaaagaggagtagcagaaccatataacaaaccgaaagtaaaggaaaagaaaagaagtgtttgaatttgatcgttaaactgagggagaagaagatgaatcacactcgcttggagtcttgtcatgaatctccccttaaagtatacaaattctgttttgtcccagaaaaacttggtgatatggttatactcttaataaggtttggcattcttgtgtgtcttgttgcatccatatcacttgctctccactcagcattctctaaaccagaccggtggttcccgttaccggagcatattcgcgccgtccagaatacttcagtcattgacaa

SEQ ID NO: 28229 - DNA, 418 bp, Glycine max
  modified_base (172)..(172): a, c, g, t, unknown, or other
  modified_base (322)..(322): a, c, g, t, unknown, or other
  modified_base (398)..(398): a, c, g, t, unknown, or other
gatggaaatggaacaaccaatggggatgaagtgcgaaagggcgattgaaaaccgagtgatggtgctgagaatggagatatggaagaaggaaaagattaagatgtggtgaaaaggatggttactgtggaggactggcttcttcaatttgcaaggatgttcaagaaccatgtanggtttgagtctgattcttatctagatactcatgagtatgcaatgaaactgtatgaagaaacaatagaggattcagtggcaagcaatgatgctcaagaactttttagaatggctgcggataaatttcaagagatggctgctttggctttgnttaattggggtagtgttcagatgtccctggcaaggaaccaaggtttctttttggaggatggggcaagagagtcttncttggagcatataaaagctg

SEQ ID NO: 28230 - DNA, 431 bp, Glycine max
ggaagtgaagcgggaaagagacagaaccgaaaatggttgcgactttgagtcttccgatcatagacctctcttctccccatcgtctttccacagccaattccattcgtcaggcatgcgtggaatatggtttcttttaccttgtgaaccatggggtggacaccgattttgtgagcaaagtcttcgaccaaagttgcaagttcttctcgcttccggtccaacgcaaaatggacctggcccgcaaggaatatagaggctacactcctctctatgctgagacacttgatcctacttcactctccaaaggtgatccaaaagagacctattacattggtcctatagaagatacctctattgctcatctgaatcaatggccttctgaagaattactgccaaactggagacctacaatgaaatccttatattggaaacta

SEQ ID NO: 28231 - DNA, 389 bp, Glycine max
gacaaacaagtgtagaagaagtttttcattatagctccttttgtacttaaaatgaaattgtatcatatacatattgcagtactggcaaagaagtttatgaatgctaggaggcactactactgcacagattaatcatgagtcttccacaaactgcaactagccctactgcacatctgtatccacaggaacttcagcttaagctttaccaagccttcatattctcaattccaatactcttctgcatcattctcttcctcttgctttactagttctaccttaagagaagggcttcctatgtatcttcctgttctcacttgcttccaaggaccattgtcaatccaccaaccaccactgcgtatcattcctcaccttgtcgtttggatctgacc

SEQ ID NO: 28232 - DNA, 285 bp, Glycine max
gggatctaatgaacgaatgcatctttgatgttgacaccaacgttttgcaaagtctagattagaaacttgtgtaactggaacagatatgctcattcttatcttgaatcaagaccctaatcttctgcgatcctattttgttcgacaggaaagattcgctatttttggacttttgggtaaaggaatgttcacagattttggagaagacatgcactgtcagtatctttgaaaccttcgtaattcatttgactcatgcacatcttctggaccacagagggacactattat

SEQ ID NO: 28233 - DNA, 368 bp, Glycine max
gcttatgttgagaagaagaagatatgtactcttgaagatctatgggatgatgagaagaagaaggcgcaacttcattggacattcatattctgaaaccttattgtgcaatgggctcagcggatagcaaatttcgtgttaggatctggatctatgcacgggcgtctaatatcatgtccttatgctgcactaaatatgcgcaacaataggatgtttgctccatctctaagccatctgactgaagcacgactgagagatctacgacggccgctagaagttgcatatgatggtgctaaagcttagcaccaagacgcacttgaacaatcgtggaaattggcttacccggacagtgagcttgcttgacttaaatc

SEQ ID NO: 28234 - DNA, 381 bp, Glycine max
gttgtacaatttgatacaaccaaaaatcgatatttggctggaggcgatgatttctccattaaattctgggatatggacaatattcagcttttgacaactgttgatgctgatgggggtctccctgcaagcccacgaatccgttttaacaaggatggagctcttttaactgtttctgcaaatgagaatggaattaaaatcttagccaatgcagatggtattcgtttgttacgcacattagaaaattctttatatgatacatcaagaacatcggaagccatgacaaagcctacaataaatccaatttcagcagccgccgctgctgcaactagtgctgcacttgcaaagaaggcctcgtctgtggtagcgattactgcgatgaac

SEQ ID NO: 28235 - DNA, 420 bp, Glycine max
gttttacaattttatacaaccaaaaatcgatagggggctgggggcgatgatttcggcattaaatcctgccatatggacaatattcagcttttgacaactgctgatgctgatggacgtctccctgcaagcccacgaatccattttaacaaggatggagctcttttaactgtttttgcaaatgagaatggaattaaaatcttagccaatgcagatggtattcgtttgttacgcacattagaaaattctttatatgatacatcaagaacatctgaagccatgacaaagcctacaataaactcaatttcagcagccgacgtttctgcaactacggctgtacttgcaaagatggcctcatctttcgtagcgattactgcgatgaacggagatgcccgaaacttgggtgatgttaaacctactata

SEQ ID NO: 28236 - DNA, 341 bp, Glycine max
  modified_base (301)..(301): a, c, g, t, unknown, or other
gaaagcaaggaaggaagaaataaaccgaatgagagcattaacctcttcttcttccactttcattccaaagcgttattccttcttcttcttcctctccattctcttcgctcttcgatcctcgtccgggggctgctccgaataccaccaccaccacgcgccgatggccacgataggaggcttacgcgactcccaaggctctcagaacagcgtccaaaccgaggccctcgctcggttcgccgtcgatgaacacaacaagaagcagaattcacttctggaagtttctaaggtggtgaggacacangaacaggtttgtgcgggaaccctgcatcaccttactctcg

SEQ ID NO: 28237 - DNA, 421 bp, Glycine max
gacaacttcatttgttgacaatcatcagatgaatggtagtcagagaaaaaggcgaacaaacccaaatgaagcactggtcttgtccactgcacctgaggaccctcctacacattggcagcaggtgcagtatttattttttcaatttccagtttaaatatctggttctagttttttgttcaatgaatgtatatacaagtctgttctcaatgcttttcttaagcatacatgaaaataaaaatgtataagatgtctttgatctggttgcttatttgtattcaattcttaataactccatagttggatcccagctatatgcttgcgccacacttgcagcaaggatgttatcacctcaccaagtagcttgtggtgcaagattacattgaagcacagccacacacaccgaaaaaactaaatatgcttt

SEQ ID NO: 28238 - DNA, 496 bp, Glycine max
  modified_base (81)..(81): a, c, g, t, unknown, or other
ggaagaaccgaaccgaccgcacgcgttcgtacagctccaaaaaaacgacttttttgagttttctaaattcttaaacatcanatgtggccacaatctgcggattattaaaagagtcatttcgcgtcacattcatacattccaataacatcaaaacatatctaacatctcaccattctactaacaccattacttcactttttctaattcaaaatctcactatctatatgcttatctcaccaaaaaattataaatgcatagattaaacaatccctaccattttccctattaatacatcaaaaccattgcaactatctttttcatgattctcaacaacctatattacatatattctagacttcacattccatatcttttttttttgatatacaccaaacttcatgactcatgaaatttctatttggctttattgcatttcatggctaaacttaattctatccctcaaaaaaatttttattggacaacaattctaaatttt

SEQ ID NO: 28239 - DNA, 334 bp, Glycine max
gcttggaaaagaccaccgaaggggggagagtgatggatcttttgtgtatcaataatgagggggtatcatatgaatgtactgtacccaacaattatgtccactggggtggtgcataaagcattgatattagatattactgagactacaatgatctaatggcatatcctcgcaattgcatattataactacagatatgatgctacagatgggtacttttttccaccacctgtcattagagattcatatactgtatatcattatcatgatggcaactcatacgtgggactctttcctaatgatgatgatcatcggatgtcttacctattggctttga

SEQ ID NO: 28240 - DNA, 422 bp, Glycine max
gagataaagagtggcttagtccaaaacctcacacgactccctttgttgcgttgtgtttcctttcgccgaaaccctcgctcgcaacttctacagaatccctttcaccatggatattgaggaggacatccgttctttacagctcgattcagcagaagacaataatggggtggtaaatgcagaggatggaaggccagaagaagttgagaaatctgataagatggatgaagatccaaagcaggatgttgaggctgagccaaaagctgttgaagctgagccaaaagtgaaggataaggaggttccttctgttcaagatgaagaagatgaaccagagatgacaaaaagacacttgaatgttgtttttattggtcatgttgatgctggtaagtctacaactggaggccagatacttttccttagtggtc

SEQ ID NO: 28241 - DNA, 434 bp, Glycine max
gaaggtgcaagagtttgttgtgagctataagctaggttatcgtgaggagaatatgaagttgtttgttttctttgttgctgcagtagttttggtagcatggccatgccatggcgcaggctaccaaaggttccctctccgaatgaaaactggctatggtgagcgttcttcggaggtaaaatgcgcaagttttaggcttgctgtggaagcacacaacatccgagcctttaaaaccattcctgaagagtgcgttgaaccaacaaaggactacattaatggcgaacaatttagatcagactctaaaacagttaaccaacaagctttcttttatgctagtgaacgcgaagtccatcacaacgacatatttatattcggcatagataacaccgtactctctaatatcccatactatgaaaaacatggatatggggtggagg

SEQ ID NO: 28242 - DNA, 433 bp, Glycine max
ggcacaagtgagtttgttgatcgagataactagagacagtgtgatgaaaatgaaggtccttgttttcttcgttgctacaattttggtagcatggcaatgccatgcgtacgatatgttccctctccgaatgaacactggctatggtgcccgtactccggaggtgaaatgcgcaagttggaggcttgctgtggaagcacacaacatctttggctttgagaccattcctgaagagtgcgttgaagcaacaaaggaatacatccatggcgaacaatatagatcagactccaaaacagttaaccaacaagcttacttttatgccagagacctcgaagtccatcccaaggacacatttgtgttcagtatagatggcaccgtactctctaatattccatactacaaaaaacatggatatggggtggagaaatttaactcg

SEQ ID NO: 28243 - DNA, 401 bp, Glycine max
tttggcacccaaaggtgcaaaaatattaataggataaacatttgagcacttgaggtactctctgcatttctcttcctcagctgtgcctatgcacaagacacaacaacccttgtgcctgcaatcataacttttggtgactcagtcgtggatgtaggaaataatgactatcttcccacccttttcaaggctgattaccctacttatgggagggactttgctaaccaccaacctactgggaggttttgcaatggcaaattagctactgattttactgcctacactttaggttttaagacctatgcatcaacatatcttatcccacaggcatcagggaaaaacctccttatcggagcatactttgcttctgctgtatctggatatgattaaaatgcttcttcttt

SEQ ID NO: 28244 - DNA, 428 bp, Glycine max
ggtgatttgaaagataagccatggtggcaaaagatgcaaacttgtgaagagttgattgaagcctcggccaccctcatatggatcgcttcagcccttcatgcagctgttaactttggacagtatccatatggaggtttaatcttgaacaggccaaccattagcaggagattcatgcctgagaaagggtctgctgagtatgctgctttggctaagaaccctgagaaggggtttttgaaaactattactggcaagaaggagaccctcattgaccttacaattatagaaatcctgtcaaggcacgcatctgatgagttctaccttggggagagagatggtggtgacttctggacttctgatgctggtccactagaggccttcaagaggtttggaaagaagcttcaagagattgaacataagcttatacagaa

SEQ ID NO: 28245 - DNA, 433 bp, Glycine max
ggtgacaaatggagggtccttagttctgtttctctttcttccctctgttctctcaaccaagttctcaattcaatcttcttcacccttttgatctgctaattctcaaggtattcaaaattgggaggttttcgtttgaattgtgatgtccaagccactgctaggcataggggaggaggaaggtcaaagcaatgtcactttgttggtttcttcctcagtcatcatggaaagtgtgtgcctgaatagctcaaaattgaaagagcgcaactacatggggttatctgattgttcatctgtggacagctccgcgccgtccttctcagatgagactaaaagcaatctgaaccttaaggctactgagctgagactggggcttccgggattgcagtctcccgaacgagattcagatctttgcttgagaagttcaattcagttt

SEQ ID NO: 28246 - DNA, 387 bp, Glycine max
ggagaaagaaaagagtgtatgtatttatgcgtttgtgtgagagatagagagatagagagagagaaagagttgttgataaaaacataattattttttcttcttggtctttggagggtcatgtagatgtagtagctatagatttttggtttatttgttgataccctttttcttctttatcttatttttgttttgaaatctgaaacctttcaaaatcggttttgggtgtgagtgaatctcgtgagttgaagtttttttctttctttctatctttgcaccgatgaggatccggaaaaggccggcgcttttcccttcttcgctctcgccgctgcgtctctcagatccccacctgatcaaccggtcaccggtggtggtgcaactaagcgacgc

SEQ ID NO: 28247 - DNA, 392 bp, Glycine max
gggtttatcagtagatgaacagaagaaaaagcaagaacagcggcttctgctgaatgacttaagaaacttagaagacaacactcaagattttgttagctgctgccaatcaagtggagttggctgctgccaatctaacggaggagactcttttttccgtcagaatcatgtgttattggaaaggagaatggaccccgatgttattgagtcagaggcaaagctctcagcagatagtaagagcagtgagactgtgatttctcggatcaatagtggtaaaggagcttcacgcaagtttctatccatgacaacttggctggatggctgggagcaagaagatacttatgcagctcttgctgttgtctgtgctgctgtgtcagttgccattggctataact

SEQ ID NO: 28248 - DNA, 378 bp, Glycine max
gggactgcatagggggagattgtcacttgtcagcactcaggagtgatatcaggtgaagaagcagaagcagacgaaagaggcagaagatggtgagggtggacatatatcggccaatgaccctggagcaggttatggtccacaccgacatcgctggcaatgccaagaaatgggcaacggctcaggattgaccgcatttactattatatggaccatgtggctgcgactagaaaacgctaatgatggctctgatgcggcaaaagttcggacctggcgccgaaaaggtgaatgcggatgataggacctgtgaagcggatgctgggagtagagctagtgatgtagagctagcagcagtatcaagcgccaatcacattgaaatga

SEQ ID NO: 28249 - DNA, 388 bp, Glycine max
gttgaaggaaatcttcgtgtacttgcatatgagtttgctactatgggctctcttcatgacatattgcacggtagaaagggagttcaaggtgctcaaccaggaccaactcttgattggatacagcgagttagaattgcagttgatgctgctcggggattggaatatttacatgagaaagttcaaccaccgattatacacagggatatcagatcaagtaatgtgctaatctttgaagattacaaggccaagatagccgactttaacctttctaatcaggcccctgacatggctgcacgccttcattcaactcgtgtattgggaacttttgggtatcatgctccagaatatgcaatgactgggcagttgactcaaaaaagtgatgtctata

SEQ ID NO: 28250 - DNA, 412 bp, Glycine max
  modified_base (377)..(377): a, c, g, t, unknown, or other
gatcacagaagcaattaacatattctcctctcattctcactcaaaacacaaaatcctaactaaggtgaaaatgaaggcatcacgcattgctttgttcactttggtggtgcttctttttgtggctgaagttcaagtgtcaaaggcagtgacctgcagcccagtgcagctgagtgcatgtgtgagtgcaataacctcttcaacccctccatcaaacctatgctgctccaagatcaaggaacagaaaccatgcctttgccaatatctcaagaaccccaatctcaagaagtttgttgactctcctaatgcaaggagagttgctaacacttgtggaactcccttcccaaggtgctaaggtgttactaaatttgaagtggttntaatttctctgcctgattatgcatcttgatatcta

SEQ ID NO: 28251 - DNA, 236 bp, Glycine max
ggagaaagaaaacaagcgatatgatcatcatcaagcacattgaggaacgttctagagagagagaaagagttgttgataaaaacataattataagtcgttgcttctctctcatggaaaacacagctgcgttgggggaacttgaagtgctccatgacgacaacgccatcataccctaagccctcggagattccgtggcagaaagagctctgcaactccgtcaacctcatcggcaatgt

SEQ ID NO: 28252 - DNA, 428 bp, Glycine max
gaggtcgcgagcgagcatcttcgagttgcatttcgcagtgtgtgtgagaagaagagaaaaatggagaaaatgatgcgactgagaccactgttccgatcactgagttgcagatcttatcatgccttcccattcatcaaccatgtcgttcttcgaccttctcttatctctcgctctcccaatcctcttccttctccttcacactcagaatgcatgtctcctttctcgatgggtttagggagcatgcgattctatagtgaagatttgacccacgtgcccaatattaaggaccctgcactttacaatgctttcaaggatttgatggcagtaagttggagtgagcttccggattctgttgtatctgatgttaagaatgtgttgtctaaaaacactgatgacaaagctggcaaggaggctgtggaaaatgtgtt

SEQ ID NO: 28253 - DNA, 422 bp, Glycine max
ggcgcacccagagaggaggaagctttgagagagagagagggaggagggagagtgttgacgctccatcaagatgggtatttctagggattccatgcacaagaagcgtgccactggtggcaagaagaaagcatggagaaagaagagaaagtatgagcttgggcgtcaggccgcaaacaccaagttatcaagcaacaaaactatccggaggattcgtgttcgaagtggcaatgttaaatggaaggcattgaagttggataccggcaattactcatggggtagtgaagcagttactcgcaagactcgtattctaagatgttgttacaatgcctcaaacaatgagcttgtgcgaactcagaccctggtcaagaatgctattgttcaagttgatgctgctcctttcagcagtggtaccttcagcacta

SEQ ID NO: 28254 - DNA, 434 bp, Glycine max
gccttccaaacctttggctaccaacaaacacacacgcacacacacttggatcaactttcctcgtcccttgctttccactccaacacggtaccaaccaacctaccaaatggcagccaaaccagctgaagaagctcctcaaggagaaaccctcaagtaccagacgtgggctttgaaagtattgatccactgcgatggctgcaaaaggagagttaagaaaattcttcagggaattgatggggtttatacaacagaggttaattctctgctgcacaaggttacggtcaccggtaacgtggacgctgagactctcatcaagaggctttcaagatcagggagggtagtggagctttggccagaaaaaccacctgagaagaaagataataagaagtctgggaaatccaataagggtggtgctggtgatgctaataaggaga

SEQ ID NO: 28255 - DNA, 383 bp, Glycine max
gaccgttaaacgaaagtaagaactaacatctcgttcaccgcttgtactttggatgatgatgaggtgagtgtgtaacgagaaggtagggtagggtgcagattgcagaggattgggaattttgaatttgaacaacaatccgagcttgcttgtttcctcgttctgttctgagctctaatggaagcactatcccttcccataaacactctcaccaattcctctgccaaacaacacatttatctgagtgcttctttcaattatgcctcagtctcttcttccttacaactcaatccttctcttccaaccagacccctcactctgaggaaaagcgcggttcgagtccaagccgagaatgaagattttgaattgaagcaaatgagggacat

SEQ ID NO: 28256 - DNA, 408 bp, Glycine max
gggttgaagggtagggatgaaatgagagcgagaggagatgaagctgataaagggcagtgttgtgttaacaatcacaatcacattaagtagcgccattctgttgctactattgttcccacaaaaccaaaagccatcttcttcttccatgtcgagggcgcgaagctttgttctgtggcttcacggcctgggtgactctggtcccgccaacgaacccatcaaaaccttattcacttcttcccaattcagagacaccaaatggtccttcccttctgcccctttcgcccctgtcacttgcaactatggttctgtaatgccttcatggtttgacattcttgagattcccgtggcagctgattcttcaaatgacgagagtagtttacttaaagctgttcgaaatgtgcatgctac

SEQ ID NO: 28257 - DNA, 414 bp, Glycine max
ggtcctccgttggttataataataacaataaaaaattcattagattgaaggtttctttgtttctcaaaaccctcttgattctactcctcttcatcctcaaattcataacccttttacagtttcacctttccctgcttctctcaattgtgcttggcctttaactggctatccacgttgccggtcgatgatcaccgtttctctgtttgcttcgtatcccataattcacctcaattcggttgtggccatatatattcttctttgatcacgacccatataccggtttccattgaaaactgatcacggcttttctggctttatctagaactgaaatgccattttcaagaacctgaggattcaaagctctagtcttggcacagtgttacaagttcataatggatttgaagattcaacata

SEQ ID NO: 28258 - DNA, 425 bp, Glycine max
ggacaaaactcgaagcagaaactcaactcaccaacacagttgcattattttctttccagatccaactcaaaattgcaatgggagtagaagatacagatatttgtatcatcaaggagccagatcatgttgtagtctattcagatggcatttcccatgattcaggtcatgaagctggaagtgatcatcacaatattacagagtcttatgaacaaatcaatgagactactgaacatcatagttcagaggagagtgcaaaggaatatgaggtgaaggaatgtacaacagaaatttctgttaaggtctctgatgtctctaatgttaaaaaatgtgaggataagttaacctcagattctgagggtgtcctcagtgagaaaagttttaaatctcacaaaacaaggggtaaacataagccacgagataccggg

SEQ ID NO: 28259 - DNA, 401 bp, Glycine max
gacggcaacagaagaataatcaaatttctcagatctatccgacgtcgtcgcagatccaccaaccgttatggctgccttcagcggtgatgaaacggctccgtttttcggcttccttggagccgcagctgccctcgtcttctcctgtatgggagctgcctatggcacagcaaagagtggtgtgggcgtggcttccatgggtgtgatgagacctgagctggtgatgaagtctattgtccctgttgtcatggctggagttttgggtatttatggccttattattgctgttattatcagtaccggtattaatccaaaggccaaatcttattacctctttgatggttatgcacatctctcctctggtcttgcctgtggcttggctggcctttctgctggcatggcta

SEQ ID NO: 28260 - DNA, 409 bp, Glycine max
gggggaagtttatttcaaaaccttttctatgagtccttggctttaacatcagcaacgtttgcgtccgctctctacaacctcattccagccattacctttgtcttggccatctcctgcggtttcgaaaggttaaatttgagggtggcagcaggaagggccaaggtgttgggaactttacttggaattggtggagcaatgttgttgacctttatcaaaggggcagaaattaatatctggcctttccacatcaaccttatgcatccagatcagcaccaaaacagccacgtggcatcattaaatactgactctggcaataataagttgttgggagcaatttgctccctagcaagctgcttctcttttgctttgtggctcaccattcaggctaagatgagcaaagaatacccat

SEQ ID NO: 28261 - DNA, 404 bp, Glycine max
ggaggcaaaaaggagaagtgagataaagatgtgttgccagacataggcaatattggggtggtgggaggatattgagctctggtgatcataatggtgatcttgtgactaatttgcctggccagcctggggtgaatttccagcactatgctggatatgtcacagtcaatgaaaccagtggaagagcactcttttactggttctatgaggctatcaccaagccagaagagaaaccattggtgctttggcttaatggaggccctgggtgctcttctgtgggatatggagcaacacaggagattggtccatttttagtggacactgatggccaaggcctcaaatttaataacttctcttggaacagagaagccaacatgttattcttggaatctcctgttggagtgggc

SEQ ID NO: 28262 - DNA, 425 bp, Glycine max
ggaaattctattattatgcacacaaaggaggaaaaatcaacacgaagatctcattctcgcagctgcaccgtttcaccttctaaatcagagtaccgttttttcatcagatccgtatacaaaactcctcagggaatgttgaattacgatattttaattcttgattggtagccggttttggctggatttgggttgttggtttttatatcagaaggagaaaggaataggttgagagttgaaagtgaaagtaaatttctgtttcaatggctgctgcttctggtgaaaggtggatggaccgtcttcagttttcctcattgttctggcctcccccactagatgatcaacaaagaaaggatcaagttgctgcgtatgttgaatacattggccaatttacatcataacaagtttctgaggatattgctgagttg

SEQ ID NO: 28263 - DNA, 428 bp, Glycine max
ggagttagtagtaatttaagagagagaaagagagagtgagagagggagacccatccacttcttccatttccacaccttcacacaacacaacataacacaaaagcgctctctctaatatctagagacaggatttccaacgcactcacctctcagagcgcgtgcccttcaaacatgatcatcatcgtcttcttcctaggacctgtttcagattcttcgtagaggagtactagggctgatcactggatctttcaaatttggaatgatttgatggggaatatgacttgcagcttcaacaagactgattcaattgagtgctgtgaagctgaaatgcagaaggctgattctcaggaatctggtcctgcgttgaagaagtcaaaaaccaaaattttggcctctcaaaatgtagataattgtgaaatggaagaaag

SEQ ID NO: 28264 - DNA, 437 bp, Glycine max
gtatgaagaggattacaatgagttggttgacatatactcttttggaatgtgcatcttagagatggtcacttttgaatatccttatagtgaatgcaaccatcctgctcaaatttacaagaaagttgtatctgggaagaagccagaagctctttacaaagtagacaatcccgaggttaggcagtttgtagagaaatgcttagcaactgtgtccctcagactttcagctagggaactcttggaggacccttttctccaaattgatgattatggatttgactcaaaagttttgcagtatcaaagagattgttatgaagtaacgccattaattagacaacctgtgaatggaatttgtatcattaacaacaacttaatgagtggggacactgataatattggtggttatgggcctgtatctgaattggattatcatcaagacg

SEQ ID NO: 28265 - DNA, 406 bp, Glycine max
gacagattagggtaaccggagttgcaaaccctaaacgctacgattttaattttctggttttctctttttcaatcggtgcttcctccggcggcgcgtgggagtgtctttggcgcgtgattcctagttccccgcttacctatgcttcgctcgacccgcattgtagagttcacgccggagagactgcggaatctcaccggacgatcgtgatttcgcatcttcatggcttgcgcctaccggaacgaacctaattggccacggcatagaagcggtggagctggattcatgggaaaagtacctttctctaaccctaaccctaaccctaattctaaccctaaattagcgaatggcaagaagacccaatcggcgttcgatgatgcttactctatcaaccggagatcgaacgacg

SEQ ID NO: 28266 - DNA, 402 bp, Glycine max
gactgaagtgaagagagaaacaatggccaatgtttcaattccactcccacgaaacggtttctccaaacccaattactcgacaaaacgcccatgtttcaccccttcagcttcaacactcagaatttcttgctctggagtggctgagtttgatggatctcatcagaaaaaaggaggtttgtttaatttcaatggaatcaagggcgtggcttgtggtattcttgcagcttgtgctgttacttctgctgcatttcctgttactgctgctactcagaggcttcccccattgtcaactgagcccaatcgctgtgagcgtgcatttgttggcaacacaattggtcaggcaaatggtgtatatgataaaccattagatctccggcaatgtgatttcacaaatgagaaaac

SEQ ID NO: 28267 - DNA, 421 bp, Glycine max
ggaggtgaaggggaaaaaaaaaagagtagagtggataatggcttcgttatcgctttgcatagccatgagagcacccactccctcagcttctctcattctcactaccccaaaaccatcttcactctctttgaaccttacccgcacttgctccagcgctcgctctccgctcctccattgctccttcctctcttcgccttcccatctctcttccccttcctccgtttcaggcttgtcacttggattggatttgacatctaatgttgggaccagaagaggaaaaggttctggcctagttgtgagggcaggcaaggctgctctttgtctgactaagagaagcagatcaagaaaatcattggcacgcactcatggtttccgcaaaagaatgagcacaccaggtggaagagctgttttaaggcgacga

SEQ ID NO: 28268 - DNA, 404 bp, Glycine max
ggcagtgaaagaaacaacaccagatggtgaggaggatcaagagaaaggagtgcctgcattttggcttactgccatgaaaaacaatgaagtgttggctgaggagatttcagagcgtgatgaaggtgctcttaagtatctcaaagatatcaagtggagcaggatagaaaacccgaaaggattcaaacttgagtttttctttgacaccaacccttattttatcaattctgtcttgacaaaaacatatcatatgattgatgaggatgaaccaatattggagaaagcaattgggactgaaattcaatggcacccaggaaaatgcctgacacagaagattcttaagaaaaagcctaagaagggttcaaagaatgctaaaccaattaccaaaactgaaaattgtgaaagct

SEQ ID NO: 28269 - DNA, 416 bp, Glycine max
cgacgataggggcattcgcgaatgtggaaccagctgtggctttgacacttataaatgttctcgagcacacattacagcgactaccaactgtcatctcagagaatattctctatacatgaaggcgtcgtcttgatgtatggacttaactacatattgatagcacagaccatgtaactgagcaacgcgcataatgtatggaactatattcatcatatcgctcaggagaaatgtattgttcgtgaagtccgttttacaattcggagagtcaatatacctgtcttgatgcccttgatatatctcgtcatcacatacatgggcatagctgacatgcttttccatagcaatctaggacggagtgctaaatcatactatcatttacgttagtttataggacatgataccttactggggacata

SEQ ID NO: 28270 - DNA, 417 bp, Glycine max
ggtatggatattgatggtgatacacctagcaaaaaacagcgtctgagtagatcactgtcacggtccaagtcagtgtcacgcccaccacatgaaggtgtgcctggagaaagttacaaggattctgctcaaaaggtcaaggcaattaaacttgcaaagaaatctgtcaagaagagaaacaaggatgcccgtcgtggagaagctgatagagtcatacctaatctgaagcccaagcacttgttttctgggaagcgttccaatggaaaaactgagagacgctaggacaggggatgcttgtttcttcattttagagacacctgttggcatttttcgtggctgccaaaattttggtatttcatattagtgttttgtgttggagtttaaggtgctgtgttggcaacatagtttacttatacatct

SEQ ID NO: 28271 - DNA, 413 bp, Glycine max
  modified_base (336)..(336): a, c, g, t, unknown, or other
gaaggaaacgaatttattcttctcttgcactcgtctggagtcaagactctggaggagccttatcccgatccgcaagaacacgcaaacaccgatcaattaattttctttatgctagatggggagtgcatcagagttcgacccagcgcttgcgctttcccacaaattccctgatgtaatattctttgcgtaatctttttcttttctttttagtaggttttcctaatttacaacaaactgaattctgaatttctgttatcattttgatcgtgcgagatgctctgcagactacgtactcttataccgaaagggatgcagcactttatgccctaagcgtangggtgtgtttgtcggacgctgttgacgctgatgagcttaaatatgtttaccatgaaaatggtcaggagtctatcaag

SEQ ID NO: 28272 - DNA, 420 bp, Glycine max
ggcaatcagcaaccaagatgactcaagcccagattcaaccagttaaacttggaacccaaggctttgaggtactattaactacattacttgctcttattttgataattgatacaattaatctcattctaggtttcaaaattgggattcggatgtatgggccttactggagcgtacaatgaccctctccaagaacaggatggcatatctgttatcaagtatgcgttcagtaagggaatcacatttttgatactgcggatgtttatggagccaatgctaatgaacttttggttggaaaggctttgaagcagctgcccagagaaaagattcagatagccacaaaatttggtattgcttcacgaggttttcctgatatgaagatcaagggttcgcctgaatatgtgcgatcatgctgtgaagcta

SEQ ID NO: 28273 - DNA, 436 bp, Glycine max
gaggaggaaaatgacaataatgaaaaggactcatcttccacagatgagcgatgtacagaactcaggcagagaaggcgaaagaggcggaccagaggtcgtccttctcagccctcatcatcgacggcaagtcctgatggtggatgcatagaaagtgacatggacataagaatttcttctagactggtgtcaaaacctcaaaaactaacttggggaaggggtggttttaggagtcacacacggcatggcagtggcaatggtagcaatagcaaaagttcccgcagtagtcgcttggctaagttagttgattatctccatagcttgaatgaaaacactgatgagttagatgtccatctcattcttttgtctttagacaaacaaattacaccaagcttgcagcagccacacctttgctgtcggccaacattgtctgtgaagc

SEQ ID NO: 28274 - DNA, 397 bp, Glycine max
ggaccacataggattcatcattttccaaacgagcatcttcgtagtttcttaagtcaagagaagaagtgaagtgctgcttcaatggcttcaagtcaggaagaggtgatccttttgggggttattggaagcccatttctgcacagggtgcagattgctctcaaattgaagggagttgaatacaaatatttggaagatgatttgaacaacaagagtgatttgctcctcaagtataacccagtttataaaatgattccagtgtttgttcacaatgaaaagcccatatccgagtcccttgtgattgttgagtacatcgatgacacatggaaaaacaaccccatcttgccttctgatccttaccatagagccttggctcgtttctgggccatgttcattgatg

SEQ ID NO: 28275 - DNA, 309 bp, Glycine max
gaggatgaaggggtgtggaagaggcgtttggagtgcaatgataatggctcgattcggtgtcctaatcgttgttcttgtagttcgcaaacaaaataatatacagaataaaaatttgaaaccgtggtgtgtgtacttgttttgttgttgttgcatgaaacatagatgcggatgcttacatgattctggtgttgttgtcctgtctgtgatagagtttcatagtgccgttagatcatatatctgatgataaacactgtcatcctactttcttacactttggtactgtttgactattatagtcctactctcacg

SEQ ID NO: 28276 - DNA, 417 bp, Glycine max
  modified_base (412)..(412): a, c, g, t, unknown, or other
ggagtgagcaagagtgaagagcgaagagaatggctcccaagggtttaatctttttggctgtgttatgcttctcagcactgtcactgagtcgttgtcttgcggaggataatggacttgttatgaacttctacaaggaatcatgccctcaggctgaagacatcatcaaagaacaagtcaagcttctctacaagcgccacaagaacactgctttctcctggctcagaaacatcttccatgactgtgctgttcagagttgtgatgcttcactgttgctggactccacaagaaggagcttgtctgagaaggaaacagatagaagctttgggttgagaaatttcaggtacattgagaccatcaaagaagctttggaaagggaatgcccaggaagttgttcctgtgctgatatcctcgntctct

SEQ ID NO: 28277 - DNA, 428 bp, Glycine max
ttcatcacaagttttgaaaatgtgttttaaattgctgtggttcatctttttagctgtcaatatggagaaaggtgtagatatttacatgttcagcaacagcggaaacctaatgttaatgggtttggaggacagagcagttctcatcaacagcaaaatacaaatccctttggatttgggtctggctctggctcacaacaacagcagaagggtaatccttttggttttggcaagcataacagctcccagttgaatggggggcctcattctgagaacaaacccaaccaatacaaggttctcactctttcctatgcatatacatgacgtgaaggtttattttaattatatcgttttaattgttaggtattataatagatgaatacaccattatttatggtctatttttgaagggttttcattgctatgtctgc

SEQ ID NO: 28278 - DNA, 314 bp, Glycine max
ggcacaagtgagtttgttgatcgagataactagaaacagtgtgatgaaaatgaaggtccttgttttcttcgttgctacaattttggtagcatggcaatgccatgcgtacgatatgttccctcttcgaatgaacactggctatggtgcccgtactccggaggtgaaatgcgcaagttggaggcttgctgtggaagcacacaacatatttggctttgagaccattcctgaagagtgcgttgaagcaacaaaggaatacatccatggcgaacaatatatatcagactccaaaacagttaaccaacaagcttactttt

SEQ ID NO: 28279 - DNA, 418 bp, Glycine max
ggtttaagagaggactatatctggagattcatactatggctctcacgtgatgcagtatggtgatgtacggcttagcagtgatgttctcttccattatttgggtacagatcctgctaatgataatttcacttttgtggacgaaaactccttatggtcaccttcaaaaccagtcaaccaacgtgatgctgatctcatccatttttgggataagttccgcaaagctcctgagggttctctcaggaaaaatgcagctcagaaacaagttttggaagcaatgtctcatagaatgcatgtagacaacagtgtaaaacttattgggaagcttttatttggtattgaaaagggtccagaagtactcaacgctgttagaccggcaggatcggcacttgttgatgattggcactgccttaaaaccatg

SEQ ID NO: 28280 - DNA, 368 bp, Glycine max
ggaggaaagaagagagagaacaaagcacttaatgctattcaataattacgaaaaaccaacagcgagtgttgtttttgtttggtccaagctggaccagggaatgaatagagatgagaggctttcggttgaagagaactgagttaagcggcgaaaccaaacgcaaaatcggcggcagaaattgccaccggaagcacgtcgaagacgggtgaaccaaacacaaaattccatccaccacttctcttttcaatccccaactcaaatctgtgaagaaaatctcaatttctaaattggaattcttagcactactgctagtagtaggtaaaaaaaacaattagaaagtagtagagtgtttttttttctttttttcg

SEQ ID NO: 28281 - DNA, 408 bp, Glycine max
ggaggaaaagaggattagagggtcgccacgtttagcaataaccaaaccctctctactcttttttcttctccttctcttcgctagggttttagcttcttcctcttcacttcgttctttttcgcctctacaatgagcaacgacaaggacacattcaacgtcgccgatctcacttctgctctcaacgaggacaatagagcagaccttgtcaatgctcttaagagcaagatacagagtttggctggacaacactcggatattctagagtctctgtcgcccaatgtccgaaagcgtgttgaggttcttagagagatccagggccaacatgatgaattagaggctaaattttttgaagagagagcagctctcgaggccaaataccaaaaattgtatcaaccactttacacaaag

SEQ ID NO: 28282 - DNA, 357 bp, Glycine max
agcgcaagagtgaatagcgaagagaatggctaccaagggtttaatctattcggctgtgttatgcttcttagcactgtcactgaatcgttgacttgcggatgataactgcactagttatgaacttctacaaggaatcatgccctcaggctgaagacatcatcaaagaacaagtcaagcttctctacaagcgccacaagaacactgatttctcctggctcagatacatctgccatgactgagctgttcatagtctgtatgcttcactgttgctggactccacaagactgagcttgcctgagaaggaatactatagaatctttgggttgagaaatttcaggtacattgagaccatcaaag

SEQ ID NO: 28283 - DNA, 413 bp, Glycine max
gtggtctgtgtgaaacaataagtgaggttgtcttagaaagatggaagaggggacatttgaacaaccatctttggagaaacactattatgggaactgtcctggttgtaaggtggatcaagccaaagagctgagaaaggatgtttccattagaaatctttcttatatttggatggcagtgttatgtggcatacagcgctgcctgtagcatcactctttccctttgtttatttcatggtgaaggattttaatattgcaaaaactgaggcagatataagtacctatgctggttatgtgggattatcattcatgcttggcagggctttgacatccatattttggggaatgctatctgatcgctatggtagaaaacctgtattatttcagggatattacttgtgcattttcaacacata

SEQ ID NO: 28284 - DNA, 424 bp, Glycine max
gggggaagacggactggaatgggaacaggaacagcttcttatcatagaaatcaacaaactcctgggtccgtccattctcacggaagtgccccttcggcggggagaaaagctcagacggtgaacgggaattacttgctgaattttcaatatgacccgatatcccgttctcaaccacggggtcctcctcctacccctaccactacaagaaggtatcggaagaggaagccgtacaacaaagatttgtttctgcaggcaaattacaagttcatggtgctaggtttgggaaattattcacctgagtcgatggatccagataaaatgttgcagtgggaagatattatatgtgtgacatatttgacccccttttcagttcagtgtccaatttgtttggagtatcccatgtgtccgcagataaccacatgtg

SEQ ID NO: 28285 - DNA, 401 bp, Glycine max
gacactaaacaagttaaaagaagagcatgactgaactaacaaagcaaccctatgtcgaagatggtttgtgtcaccggagccagcggcgccatcggatcatgggtggtcctactcctccttcagcgtggttacaccgtccatgccaccgtccaagatatcaaggatgaaaatgagacgaaacatttggaggaaatggaaggagcaaagagtcatctccatttttttgaaatggatcttcttgacatcgactgcattgccgctgccataaagggttgctacggcgtaatccaccttgcatgtgctaacatcattggtcaagtcgaagatcccgagaaacagatattggaaccggcgataaaaggaacggttaatgtgttgaaggcggcgaacgaagcatgggt

SEQ ID NO: 28286 - DNA, 362 bp, Glycine max
gagagaaaactttgcctagaagacccaagctcgtgtgtaagcgctacggtttatgtgatgtcttcgtctattcccaattccaaattcaagaaattttttaaacttgacatatctgctatcaccttttccgtttcttgcgattcgacgatggccgatcaaaagctttcagaaccggcgcttaaacgtgagcagcttgatgaattcgtgagtagtctatattttgaacaacgaattcttgaactccgacttcttcaagacctcgagaacaatgatgaatgtaggaaaaatgggagcctgaaaaggttaaatgaccagagtgatgtctgtggatttagaagttgcttcaaaaaccattatgattc

SEQ ID NO: 28287 - DNA, 422 bp, Glycine max
ggcctcaagaaggagaacatggggtttgaggaaactgagttaaggcttggactgcctggaaacggaggcactgaagaagtgctcatcaggaagaggggtttctctgagactgaaactggtcatgaagatgagtctgccaccactgtggatttgatgcttaatctttcttctaaggaggccgcaaccactgctgctgctgctgcagatccaactgataagcacaagactttgcctaaggagaagacccttctgccagcagatcctgctaagccttcagccaagacgcaggtggtgggttggccacctgtgcggtcctttcggaagaacatgttggctgtgcaaaagagcgttggagaagagagcgagaagaacagcagccctaatgcaagctttgtcaaagttagcatggatggagcacctta

SEQ ID NO: 28288 - DNA, 340 bp, Glycine max
gcaccaaaattttcataagcataggcccttctactgtgaatagcaattatcctaatgctattttgaatgggctggaaataatgaaaatgaacaactctgtgagtagtctcagctcatcaacagctgtgcctttgtctagtacttctggttcaggttctaagaaagttggcttgatagtgggtgtgagtgttggggcatttcttgcagtggtcattgttggagttttcttttttctactatgcaggaaaagaaaacgtttggaaaaagaagggcattcgaagacatgggttcccttatcaatcaatgatggaacttctcacaccatgggaaagtaatattc

SEQ ID NO: 28289 - DNA, 408 bp, Glycine max
ggctgatctagcagcgtatcaatgagaaaatgtagatagggaagaacaaccatttttcaatgaccaagatctgttgaaggctgtggttgatttagctacatcaaccgaccttgatctccaggaaaaggtgattgttgatacagcacctgatactatcgttaaagcattgtcaaatgatctgttttgtttgtgactaaccttatctgtgcaatgccaatgtcataaaaacacattttgaactatgcctctttcatatgcaagactccaagccatgttccattatggtatgtctacatctgaaattgatccaatgaggttgttcaatgttatctgctttccaatctatgatctctcaatttgcccacaatgttgtgtttctggtgatgttaagcatccttctggaaatca

SEQ ID NO: 28290 - DNA, 393 bp, Glycine max
  modified_base (329)..(329): a, c, g, t, unknown, or other
  modified_base (382)..(382): a, c, g, t, unknown, or other
ggttctagtgtgtgattgtttgttgttgtaactcgttcttcttcttttgttgttctgtgtttgtgtttgttttttctctcacctgaaaatgtcttgctgcggtggtaactgtggttgcggaagctcctgcaagtgcggcaacggttgctgaggctgcaagatgtacccagacttgagctacactgagtcaaccaccaccgagaccttggtcatgggagtggcacctgttaaggctcaatttgaaggtgctgaaatgggtgtgcccgctgagaacgatggcttgcaatgtggaccaaactgcttctgcaacccctgcacttgcaagtgangtgttgggagagcaagcttcaagcagagatagcccttaattaggaataatgantaactattaat

SEQ ID NO: 28291 - DNA, 387 bp, Glycine max
  modified_base (176)..(176): a, c, g, t, unknown, or other
gaatcaagagagtgactactggtcggcgacagcgaactacttccgggtaatggcgaacctcgtcgcaatcgccggcgctttgaacggcgcatgatcgccggattctgacagcggtgaacgtcggagcgtcgagcctgtcgttggccggttccagcttcattgtagtgtgctacctnctcttcaaagagctccgcaagttctccttcaagctcgtcttctacctcgctctctctgatatgctttgcagtttcttcggcataatagggtatacatgctagatcaagcaagattttcttcaatggacccgtccaaaggtttcttttgttatgctcagggctatagcacacatttcttttgtgtggcatcttttctatggactacaacaat

SEQ ID NO: 28292 - DNA, 398 bp, Glycine max
ggacaaaactcgaagcagaaactcaactcaccaacacagttgcattattttctttccagatccaactcaaaattgcaatgggagtagaagatacagatatttgtatcatcaaggagccagatcatgttgtagtctattcagatggcatttcccatgattcaggtcatgaagctggaagtgatcatcacaatattacagagtcttatgaacaaatcaatgagactactgaacatcatagttcagaggagagtgcaaaggaatatgaggtgaaggaatgtacaacagaaatttctgttaaggtctctgatgtctctaatgttaaaaaatgtgaggataagttaacctcagattctgagggtgtcctcagtgagaaaaagtttaaatctcacaaaacaagg

SEQ ID NO: 28293 - DNA, 432 bp, Glycine max
gactgaaagaagagggagggtcctcaaaacggcgtaaaagaaactgtctgaaacgctcctcttctccctcaaaaggcaaaagggttgtgttcacgagtgaacggtgttgatttgtatttgctgatgcaattggtggttaggttggtttaagaagctaagaactgttgctactacttcacaatgggcgctgcttgttgtgttgctgccagagacaaaaccatacaaagtggatcaaccagtgacaatttgcatcggaatgttcgatgttctccaacatggagctttcgttgggatcatcgagggcgtgtagctggtgaagatacttctataaattggttttctgacggtattagcaggaatgatggatcagagaataaaaatgaatcaacatatatgtcagaggacggaagtccactgcagaatgatcaacgg

SEQ ID NO: 28294 - DNA, 421 bp, Glycine max
ggttggagcaggcgctcgtgcgcttttctatccaaccctgttttacaatgtcgtaaggaataagattcagaccgagtttcgatggtgggataaggttgatgagttcatattgttaggtgctgttccatttcctatagatgttccccacttaaaggagctcggtgttcgtggggttatcacattgaatgagtcatatgagactttggttccaacagcattatattatgctcatggaattgatcatctggtgattcctactagagattactgttttgctccttctctgcatgacatttgccgtgctgtggacttcatacatgaaaatgcattgtcgggacgaactacatatgtccattgcaaagctggacgtggtcgcagcacgactattggtatttgttatctggtgcaccacaaaatgatg

SEQ ID NO: 28295 - DNA, 435 bp, Glycine max
ggagcaagagtgaagagcgaagagaatggctcccaagggtttaatctttttggctgtgttatgcttctcagcactgtcactgagtcgttgtcttgcggaggataatggacttgttatgaacttctacaaggaatcatgccctcaggctgaagacatcatcaaagaacaagtcaagcttctctacaagcgccacaagaacactgctttctcctggctcagaaacatcttccatgactgtgctgttcagagttgtgatgcttcactgttgctggactccacaagaaggagcttgtctgagaaggaaacagatagaagctttgggttgagaaatttcaggtacattgagaccatcaaagaagctttggaaagggaatgcccaggagttgtttcctgtgctgatatcctcgttctctctgccagagatggcattgtttc

SEQ ID NO: 28296 - DNA, 437 bp, Glycine max
ggaagaatcaaatatccttgagccagacatgtgcaggaacgctgcttcacgtcttagggtcatcagtgcccgttcgtgcagcagcagcaggatacctgccagtgccagatttgcaagttccgttgccacacaacaatcctcttctggtttgggtggtttatttggatggctcactggagaccgatccagttctttaccatctctggatttcccgctttcgggcgttacacttcccccttcattgcctgattttgttgcgcccggaaaaactattattactacactcccaaatggactcaaagtggcctctgaaacatcaccgactcccactgcgtcggttggcttatatgtagattgtggttcaatatacgagactccgataagttttggggctacacatctgctagaacgaatggctttcaagaccactagaaacc

SEQ ID NO: 28297 - DNA, 411 bp, Glycine max
gaatataaaaaatattactttttctcttctattattatctgaataagtgacatataaagtatttattgactttaattgattaatggttttggttgaagaaattgattaattatcagtctctttttttaataattatgcttctagctagagatttttcttaacatattatctctttacgtctatcttcattttttacttttaaatttaattttaatatattttttttaaatattaatagttaaacattttgtctcaaaatataaattatttttcataaatttaaaatatttatttattatgtataataaatatttatctcgtgtattgcataagcactataatactaataataataaatttccgttaaaaggtgtaacaaagggaaatgcatagaactactctatataagga

SEQ ID NO: 28298 - DNA, 426 bp, Glycine max
ggatcatgcttttaaacagataggattgaaaatcgggcaaatctctcatttttgtggtagatcttacggcatcaaatccctggttgctttcgcagatcgctcccttttgcaactccaactcccttctcttgatgtccaccatcagaataggtgtgctcctctcctccatggggactgtgatgcttaagatccaagcttgggagacagagaaagagaaagagaatggacgccattgattctgtgttcgatccgctgagagaattcgcaaaggacagcgtgaggctcgtgaagcgctgccacaaacccgatcgcaaagaattctccaaggttgccgtccgtactgcaattggtttcgtcgtgatgggattcgtcggtttcttcgtgaagctcattttcattccaattaacaacatcattgtcggatct

SEQ ID NO: 28299 - DNA, 408 bp, Glycine max
gaagagtgaagagcgaagagaatggcgcccaagggtttaatctttttggctgtgttatgcttctcagcactgtcactgagtcgttgtcttgcggaggataatggacttgttatgaacttctacaaggaatcatgccctcaggctgaagacatcatcaaagaacaagtcaagcttctctacaagcgccacaagaacactgctttctcctggctcagaaacatcttccatgactgtgctgttcagagttgtgatgcttcactgttgctggactccacaagaaggagcttgtctgagaaggaaacagatagaagctttgggttgagaaatttcaggtacattgagaccatcaaagaagctttggaaagggaatgcccaggagttgtttcctgtgctgatatcctcgttctc

SEQ ID NO: 28300 - DNA, 391 bp, Glycine max
gggaaaactgtgtatctacaatattccaataggcaagaaatagtgaataacaaaactgcagcagatgttgctggaaatgtactgttagttacaattgagggtgaagatgcacgccttgtcagcattgatgtcttacacttggtcttttcagcctttgggtttgtgcataagattactacttttgagaagacagcaggattccaggcattggtgcaattctcagatgcagaaactgctacttctgcaaaggatgctttggatggaagaagcatacctaggtacctgcttcctgaacatatgggaccatgtagccttaagatcacatattctggacattcagacttaagtgtcaagtttcaaagtcacagaagcagagactacactaatcctt

SEQ ID NO: 28301 - DNA, 407 bp, Glycine max
attgacaagcgtgtcattgagaggtttgagaaggaagctgctgagatgaacaagaggtctttcaagtatgcctgggtgctggacaaacttaaggctgagcgtgaaagaggaatcaccattgatattgctttgtggaagtgtgaatcaacaaagtattattgcacagttatcgatgcgcctggacatagggatttcattaagaatatgattactgggacatcccaagctgactgtgctgttcttatcattgattcgaccactggtggttttgaagctggtatttccaaggatggacagactcgtgaacatgctctgctttcattcacccttggcgtgaaacagatgatttgctgctgtatcaaaatggatgctactacacccaagtattccaaagccaggtatgatga

SEQ ID NO: 28302 - DNA, 418 bp, Glycine max
ggttaaacaattgaatgtccgtgggctcatgaattgtcagtatgcaataactccatcaggggatgtatttttactagaggccaaccctcgagcttctcgtacagttccatttgtatcaaaagcaattggccatcccttggctaaatatgcttcccttgtcatgtctggaaagatcctctatcatttacagtttacaaaagaagttatccctaattatgtgtcagtcaaggaagcagttcttcctttttcaaagttcccaggctgtgacgtgtttttaattcctgagatgcgaagtactggtgaggtcatgggtattgacccttcatataatattgcatttgctaaggctcaaattgctgctggccagaagttaccacttgttggtactgtgttccttagcctgagcgacttaacaaag

SEQ ID NO: 28303 - DNA, 305 bp, Glycine max
  modified_base (152)..(152): a, c, g, t, unknown, or other
gacagcagcagagcaaaagaaagaaagaaagaaagtgcaacttcctctgttttgctcccctgtttaagccttatcataagcttagaatggcacacaaggaattttccattgccctagtgactctcattgttctctttgtcaacacgaacctncaaggtgccacggctgactatggtggtggttggcagagtgctcatgccactttctatggtgggggtgatgcttctggcacaatgggtggagcatgtgggtatggaaatttgtatagccagggatatggaactgacactgtggctctaagcact

SEQ ID NO: 28304 - DNA, 435 bp, Glycine max
ggttctagtgtatgtgattgttgtgactcgttctgcttcgtcgttatcttcttcttttgttgtttgtgtgtttgttttttctctcacctgaaaatgtcttgctgcggtggtaactgtggttgcggaagcgcctgcaagtgcggcaacggctgcggaggctgcaagatgtacccagacttgagctacaccgagtcaaccaccaccgagaccttggtcatgggagtggcaccagttaaggctcaattcgagagtgctgaaatgggtgttcccgctgagaacgatggctgcaaatgtggagctaactgcacctgcaacccctgcacttgcaagtgaggtgttggagagctaaagcttcaagcagaaatggcccttagaaataatgataaaaactatatgtagtttcaaaacttcaaaattatgtagtatgtattatgt

SEQ ID NO: 28305 - DNA, 421 bp, Glycine max
ggatcgagagagagataaaaaaaagaagaaaaaaaaaggaagagagagaggcaaaggcgaagcttggaagatggaaacccagtgagtgaggttcgagatttgtgagcaattcgtgaactttgcgaaggtgcaactaagattggatgaagacacggccaatgaactgagagtatgtatccaaggctattcctcgtggaacagagggatattggggtgctgggtcatattgggagatgggtcaactatgtatgatgatctggttggttcagattgttggggggttgttgtggggtttaatatgggaaggttttagatgtattgctgcaggcttgcaggtcttagttattactgagatagtggttttgtgatgactcctatcttggcatgataactaaagtccttgctctaatatatgagttat

SEQ ID NO: 28306 - DNA, 437 bp, Glycine max
  modified_base (406)..(406): a, c, g, t, unknown, or other
gaccggaaaaggggttacttttagtgaggtggtgacgggtgtacacaggttttctaaggccttaagaactcttggtctgaggaaagggcatgttgtgattgtagtgcttccaaatgtggtagagtatgccattgttgctttggggataatggctgctggtggggtgttctcaggtgcaaatccaacatcacatgtatcagaaattaagaaacaggcagagtctgctgatgccaaattgattgtcacaaatgtcacaaactatgaaaaggtaaaggctttggagctacctattattttgctaggagatgaagttgttgaaggtgccatgaattggaacaagttgcttgaagcagcagaccgtgcaggggatgatttgacaaaggagcctattcagcagaatgatctntgtgccatgccattctcatcaggcaccacag

SEQ ID NO: 28307 - DNA, 389 bp, Glycine max
gtgcagtagttgagttgaggaagtgatggaagcagtttacaggttgaaacctcttttggatgtggttagagttgggaacgctaccacttctgagatgcgtcttgaatcaacggctaattgttacctgcagctagaagctcctcaactctatgagtttcatcgattaacatgactcatcaataagatatgactggatcggataatcaagatccagatcgccaatcaccctctttatccagatttactctctgcatatattgaatgccaaaaggttggagcaccgtcagaactgacatgccttcttgaagaaataggccgagaaagccaccgcatgaatgctcgccgtgagataggggaaggccctgaacttgaccacttcatggaaacat

SEQ ID NO: 28308 - DNA, 196 bp, Glycine max
gagagcaaacgttaccttgagatgtcctatgctgggaagtaccgcaaattggctgagtctgtgccccttgctattgaagagtaaaatcatgtttgaagagaacatgaatggagaaaccggcttttggtcgtttgaagtcttatggagctttcataaataacgccattgattttggatgggaacatgtttttgaatt

SEQ ID NO: 28309 - DNA, 430 bp, Glycine max
gatagaaaggaaacgaaaaaacagagtacccgacagaatttgaaaacaaaggctgaaatttgaagaaactgagatcattgggtgtgaaatatatggcagaggttgtcctgctagtcgatgatttgaaattactttctgcgagtcctcgttgtagaatttgtcatgaagaagagtttgaaagcgtagaaaccttggaagcaccttgtgcttgttctgggaccgttaagtttgctcatagagattgcatacagagatggtgcaacgaaaaaggaaatacaacctgtgaaatatgtctccagcaatatgaacccggatatacagctcctccgccaaagaagtctaagataaatgatgaaacaatgtccattatggaggaggaagaaccgtcaaacgcaagaatagagattatggttgaaggagtggaaatgga

SEQ ID NO: 28310 - DNA, 107 bp, Glycine max
gacacacggagcgcggaaccaagtgaaatgattgagaagagagagcgaagaaaaaaaagagagccaaaccaaacctttcccgaaacggttcgttttgcccttcttcg

SEQ ID NO: 28311 - DNA, 399 bp, Glycine max
gagagggaggaggcactgagagagatggtgttggatgggtggaattggaaatcgaagtgaaaagaacggttgaaagtgaaagagtaagatgctattacaattgcgctgctctcattctcaccacaaactgacacttgcctgcagttgaagaaagaatagaggatcgtggtcgatggcgtctgctagccttggaagtggtggggtcggcagttcgaggtctgttaatggtggcttcaggggttcttccagttccgtcgattggcttggcagagagatgcttgagatgaggttgagagaccacgaagacgatagagatagtgagcctgacatcattgatggtgtgggtgctgagacaggtcacgtcataagaaccagcattggtggccgaaatggtcagtc

SEQ ID NO: 28312 - DNA, 389 bp, Glycine max
ggatacaagtctgttattattccgatttttgctattgccattagtatttttgttagtttcacctttgctgccatgtatggtattgctgttgctgcgcttggcatgctgagtaccattgccaccggattggccattgatgcatatggtccaatcagtgacaatgctggaggtattgctgaaatggctggtatgagtcacagaattagagagagaactgatgcccttgatgctgccggaaacacgactgccgctattgggaagggatttgccattggttctgctgcccttgtatcactggccctctttggtgcctttgtgagccgagctgctattacaactgttgatgtgttgactccaaaggttttcattggtttgattgtgggtgcaat

SEQ ID NO: 28313 - DNA, 375 bp, Glycine max
gccacgcgtcgtacgctgcagaagacacgaggggacggcacagagaatatcaggttctagatctatccgacgtcgccagatccaccaaccgttatggctgcttcagcgggatgaaacggctcgttttcggttcttggagccgcactgcctcgtcttctctgatgggagctgctatggccacaaagaggggtgggcgtggcttcatgggtgtgatgagacctgactgggagaagctattgtcctgtgcatggtggattttgggattatggcttatatgctgtattatagaccggattaatcaaggccaatttattacctttgaggtatgcacatcttctctggcttgctgtgctggctggcttctgtgcatggtat

SEQ ID NO: 28314 - DNA, 184 bp, Glycine max
aagtgaaattattcagaagagagagcgcttaataactatatagccaatccaaacatttctctaaacggttcctttttcccttcttcaaaaccctcccttctacgcctcttctactgcttcggtcttcgtcgtcaactcttcattaacccaagaccactgtcaatccttcagaaacctcatatct

SEQ ID NO: 28315 - DNA, 426 bp, Glycine max
ggaattggaactgtgcctgtgggacgggttgagactggtgtcttgaagcctggaatggtggtgacttttgcaccaactggactgacaaccgaagttaagtctgtggaaatgcaccatgaagctctcacagaggctcttcccggtgataatgttggattcaatgttaagaatgttgctgttaaggatctcaagcgtggttatgttgcctcgaactcaaaggatgatcctgccaaggaggctgctaacttcactgcccaggttatcatcatgaaccatcctggtcagattggaaatggctatgcccctgttcttgactgccacactttccacattgctgtcaagtttgctgaactcatgaccaagattgacaggcgatctggcaaagagcttgagaaggaacccaagtttttgaagaatggtgatgct

SEQ ID NO: 28316 - DNA, 423 bp, Glycine max
  modified_base (315)..(315): a, c, g, t, unknown, or other
  modified_base (345)..(345): a, c, g, t, unknown, or other
  modified_base (408)..(408): a, c, g, t, unknown, or other
  modified_base (412)..(412): a, c, g, t, unknown, or other
ggaaagaaagaaggaaagcaaagtagacgagtgattgcgtggcgattgacgacgacgaggaatcatgtcttccggcggcggcggtggtaagccgttcttctgccacgtgtgcagtcagaggattacgtgctccgatgagtcggaaccattctgcccgatgtgtatggaaagtttcgtagaagaatgcaaccctaacaatcccaaccctaatctcttccccgacagtgatgaatcttcggatcccgaactccccttcaccgcttctcacttctccctctcttgctctcatcagtctctagggtcccgatccgaacnccgacgtgttcgaccccgatggtctttctntcagaccacctttcaggaccttccgcgccgacgggtgcaacattcaagttgactttgaccatncttncaacgagaatc

SEQ ID NO: 28317 - DNA, 432 bp, Glycine max
cggtccccatgatcagcagtctattgctgatgctctgttgaagcttgttagcaacaaacaactttgggcaaaatgtagacagaatgggttaaagaatattcatttattttcatggcccgagcactgtaagacttacctttctaaaatagccacttgcaagccaaggcatccacaatggcagcgaagtgaggatggaggtgaaagttcagaatcagattcaccaggtgattccttgagagatttacaggacttgtctctaaatctgaagttttcattagatggagagaagagtgagggtagtggaaatgacaattctttgaattctgatggaaatgctgctgatagaggggcaaaattagagaatgctgatttgtcatggtcaaagggcatctctaaggacacacgcaagggtggtgctacagaaaaatccga

SEQ ID NO: 28318 - DNA, 436 bp, Glycine max
ggggaaagtgagggaagcacgagaaagcttgcgaaaatttcacgttcttcttctatttgcaaacactgattttccattccattactgctattgttatcattcttattttgctgtgatcaaattggtttttcgtattaagaattctcattattattactgttgagactttcctatcgccttgcaccaaagaactcggttcccacttttctctaattctagggcagctttttcggccaaatccttttcttcccatcgaagcgagctctcattgcaaattaaacgcgctttgcgtggtgcgatcttcgttgtgatggaaactagggcatgaattggccgtacagaagaaaaaagcgataaaaaatgttcttcagcggcgatccttcgacgcggaagcgtgtcgatttgggaggtcgcagttcaaaggaaagggaccgga

SEQ ID NO: 28319 - DNA, 147 bp, Glycine max
gtatgaataaatgcgtgtgctgttatcctacttcaggtctgtgtaggcatgcattctgaatcatttcaagttcctgtcttagttaatataacagccatggttgtggcattctatggtttattagactaaactatctgcagaataact

SEQ ID NO: 28320 - DNA, 147 bp, Glycine max
ggttatagaaagagagatagaaagaaaatgattgatggcaataacagtgtcaacatgagccaccacaagcctaatttcacaggaacaaatgaagttgttggttaagactatgaatcaccattgttggcgttgccactgctaagaaac

SEQ ID NO: 28321 - DNA, 410 bp, Glycine max
gactgataaaagctaataatcatggaagtactcaggtgagcatggctgtcactgttgcattcttgaatacgatcatcatgttttcagtagtctgtacaagcaagccactgagcttaaactactattcaaaaacatgccctgatgtggaacgcattgttgccaaggcagtgaaagatgccactgctagggtcataactgttccagctgcacttctgcgaatgcacttacatgactgagacgctcggcggtgtgatgcctttgtgctgctaaattgaaaacgaagcatcagaccacaaatagatggtccaccaaatgtttctttgcatgcattctatgtcattgatgcagcgaataaagcactatacagctcatgcccagctgcggcctcttgtgctgacatccttgctcta

SEQ ID NO: 28322 - DNA, 407 bp, Glycine max
gggccagcagccaataacttttgtccgagaggttcttgcattatgtgaccatccagctatattggacaaaagtgaaacacagggtttgttcagtactgatgcaatacagcgagcatggcagattgtggatcagattcctgggagagcaactggtgcctatagccatagtcagggtgtcaagggcttgcgtgatacaatagctgctggaattgaagagcgtgatggttttcctgccaatcctgatgacattttcatgactgatggtgcaagccctgctgtccataatatgatgcaattactcattagatcagaaaatgatggtattctgtgtcccattccacagtaccctctgtactcagcctcaattgccctccatggtggctgcctggtaccttattatctagatg

SEQ ID NO: 28323 - DNA, 422 bp, Glycine max
gacggctaaaagctaaaaatcatcgaagtactcaaattagcatggctgtcacggttgcattcttgaatttgatcatcatgttttcagtagtctctacaagcaagtcactgagcttaaactactattcaaaaacatgccctgatgtggaatgcattgttgccaaggcagtgaaggatgccactgctagggacaaaactgttccagctgcacttctgcgaatgcacttccatgactgtttcgttcgggggtgtgatgcctctgtgctgctaaattcaaaaggaagcaacaaagcagaaaaagatgggccaccaaatgtttctttgcatgcattctatgtcattgatgcatcgaagaaagcactagaagcttcatgcccaggtgtggtctcttgtgctgacatccttgctctagcagcaagggat

SEQ ID NO: 28324 - DNA, 422 bp, Glycine max
gggtacagctgatgaagttgtgaggactcctgagaagggaactgtttttgttgaagatcttccagaagaagaacaagtagttgctgttggacatactgctggtcttttcaacttgggaaacacatgttatatgaattcaacattgcaatgcctccattccgtacctgagttaaagtcagctttgactaattattcacattcaggacgaaacaacgatgtcgatcaatcttctcatttgttgaccattgcaacccgtgacttgttcaacgagcttgataaaagtgtgaagcctgtggcgccaatgcaattttggatggtattgcggaaaaaatatcctcaatttggccagctgcataatggagttttcatgcaacaggatgctgaagaatgttggacacaacttctatacactctctctcagt

SEQ ID NO: 28325 - DNA, 290 bp, Glycine max
ggttctagtgtgtgattgtttgttgttgtaactcgttcttcttcttttgttgttctgtgtttgtgtttgttttttctctcacctgaaaatgtcttgctgcggtggtaactgtggttgcggaagctcctgcaagtgcggcaacggctgcggaggctgcaagatgtacccagacttgagctacactgagtcaaccaccaccgagaccttggtcatgggagtggcacctgttaaggctcaatttgagggtgctgaaatgggtgtgcccgctgagaacgatggcttgcaatgtg

SEQ ID NO: 28326 - DNA, 360 bp, Glycine max
gacggtgacggctctcgacagggacgacactctgggtcagcggtctaacttactgggcacatgccaaatccctctgatttcgactggatcgattaaggttgtcacagcggtcaaatgtgcactacacaaccacactgactttttctgctaaactaaactaaaatggtatcctccggtagaaattgctgcttcaaatatcccggcacctactttccgaaggggtatgcctcacatcctactaatgctatactctgcacaactcatttttgcccaaattagctgaccccaattaccctgttggaaaagatgcactgagtgctcattcttttcaccatgcccacaaacttgacctccttttat

SEQ ID NO: 28327 - DNA, 289 bp, Glycine max
  modified_base (130)..(130): a, c, g, t, unknown, or other
atgactgacaatcgcacatcatacgcctaaagccctcgcgagatatccgtggcaagaaaggagcttcttgcaactccgtcatacctcatcggcaattgtcgcaggcccctcgtcgaaatcaaacaacctncccattcggcaagagtcgtctgcctggaccacgcctctgcgtcaaagaaaaagcgcccacgcaatcattcgtccataaagcctcacattctggcgacgaacctcgctcatgtcgcgtaccagcatctccagaaaggttaccaaattcatgtcttcggtc

SEQ ID NO: 28328 - DNA, 419 bp, Glycine max
ggggaacagaaacaagaaaaaaaaactcccacaatagggatgaggagtgccgacaggattaattgaggtcagggactgaaagggggtgttctgttctgatcggatctgaaatcatcgggaaaatgtcgtcgtttctgcaccagagaagcagtctccagaacccattctcgaatccattcccggcatcaactccatcatcatcgaattcgaagaaatccctgtccatcatgggccccaccaccctcctagccctaatctccctcatagtcatactcggcgtcttctgcccctgggtgggcttttcccagggctttcccttcactcccacttccactttcaaatgggctcactacactttagaacaagcgctctccttcgtcgccaaaaacggttcctccgtcatcgtctgcattgtgagc

SEQ ID NO: 28329 - DNA, 424 bp, Glycine max
gaaggtgcacagagtttagttgtgaagctataagctagttttactcgatgaggagcatatgaagactgttgtgttttctttgttgctagcagtagctttggtagcatggccatgccatggcgcacgctaccaaaggttccctctccgaatgaaaactggctatggggagcgttcttcggaggtaaaatgcgcaagatttaggcttgctgtggaagcacacatcattcgagcctttaaaaccattcctgaagagtgcgttgaaccaacataggactacattaatggcgaacaatttagatcagactctaaaacagttaaccaacaagctttcttttatgctagtgaacgcgaagtccatcacaacgacatatttatattcggcatagataacaccgtactctctaatatcccatactatgaaaaa

SEQ ID NO: 28330 - DNA, 340 bp, Glycine max
ggactcaaaagctcaataaatgcacgttaccaagcgaacgaatcaaatctctctctcaatctagccttctttctttttttcaatttccaaatcacgaaactcaagaagatggagaaagcgatcaacagacagaagattttgcttcatcatctcaacccttcatcatccacccaccccaacgaatcatcctccctccatgcttcagcatgtgtggcgggggatagcgctgcttatcaaaggacatcgacattcggggacgatgttgtgatcgtgggtgcttatcagactgctcattgcaaaagctaacgaggtggttcaaagacactcttcctgatgatct

SEQ ID NO: 28331 - DNA, 312 bp, Glycine max
ggaaaagaaaaatgaaaaatagcacaaggccaaaaatatcacctgatctgaaacttggacacgaaagaaaagctcgtatgcgcgacttctctctcttgcattgattcaacgttgtccattctccgaaacatcacaaagaaacccaactgagagagtgaagaataagaagaataaatagaagaagaaggacgacaacaatggggggtttcgcaatgggttctgccttcgattccaaatctgggcagattattatggctgctttgcttttgatgattatgtccttctatgctggcaacctttttggaacaatgc

SEQ ID NO: 28332 - DNA, 166 bp, Glycine max
aggggaagggaataaagtaaaatggtatgtgggttgctgaggcaacaaaaccattcactaaattccaattccacagacccactactttatttccccctgcttccgatggcaaaccaagcttcactctccttttcttctttcgggacccctggttaaccccctttta

SEQ ID NO: 28333 - DNA, 368 bp, Glycine max
gagcactgagcaggtgcaccaaacaaaaacaacggcaacttcacacacagctgacgcggtaactaagattcaacgtctgcgctctgcaaccaccatacaatagatccttcattctttctctgcaacgatcaaacaacaaaaaacactgcaccctttcttctggatttggtgaaaaagaaaaagaaagaagaagaagaagaaagggtgatttgatgattatgaattgaaatgtgagaggtgaagagatgaacgtgagccatgcttcggttcacccagttgaagaagctccaactactgaaggtggtggtgaccaaaacgtcaacgctcctaaggtgaggatgaaagatgttcaaggcatgcctggcact

SEQ ID NO: 28334 - DNA, 306 bp, Glycine max
gcatttgagatgtaaggacatgaaagaaaagaggggatatgtttatgcgtttgtgtgggagatagagagatagagagagagaaagagttgttgataaaaacataattattttttcttcttggtctttggagggtcatgtagatgtagtagctatagattttaggcttatttgttgataccctttttgttctttatcttatttgagatttcgaagatctaaagcgttttaaaatcgggttaggctgtgagtgaatttcttgagttgaagtttttatctttctttctatctttgcaccgatgaggatc

SEQ ID NO: 28335 - DNA, 82 bp, Glycine max
gaatgtaaaaaatagaggttgaagaagcaagcaccaacgtgaataccctaattcggagggtttcagttttcgccctcttttc

SEQ ID NO: 28336 - DNA, 523 bp, Glycine max
  modified_base (133)..(133): a, c, g, t, unknown, or other
  modified_base (138)..(139): a, c, g, t, unknown, or other
  modified_base (153)..(154): a, c, g, t, unknown, or other
  modified_base (166)..(167): a, c, g, t, unknown, or other
  modified_base (176)..(177): a, c, g, t, unknown, or other
  modified_base (205)..(205): a, c, g, t, unknown, or other
  modified_base (215)..(215): a, c, g, t, unknown, or other
aattcccggtgtcgactccacgtcgtctcgtaccggggctgtcgagaagaccgaccagaagggggacctctttaagatgaatggaattgggctttctcgtctgatgggacccaagaatttttcactttcatantgatnngaagtctatgatanngttttgatgcannatgggcctnntcaagaaaatcttctcagaggcatatanttcttatggnttttgagagggccttctgcaatacagcaaaggggaattgttcctttctgcaagggtctggatgtgattcagcaggctcagtctggaactggaaagacagcaacattctgttcggggattttgcaacagcttgactatggattggtacagtgtcaggctttggttttggcaccaacaagggagcttgcacaacagattgagaaggttatgcgagctctaggtgattaccttggtgtcaaggttcatgcttgtgttggtgggaccagtgttcgtgaggatcagcgcattctccaagctggtgtccatact

SEQ ID NO: 28337 - DNA, 249 bp, Glycine max
ggacgaaggtgataataatcggtgccggaacttctggtatcgccaccgccggttgcttaacgaagcaatcaataccttacataatgctcgagagagaagactgtttcgcttcgctgtggcagaaatacacctacgatcgtttccaccttcatttgaggaagcaagtttgcaagttaccgaacttaccgtttcccaagtcttaccttaactacgtgcctcggaagcagttcataaacacctgggaaactt

SEQ ID NO: 28338 - DNA, 413 bp, Glycine max; identical to SEQ ID NO: 26450

SEQ ID NO: 28339 - DNA, 418 bp, Glycine max; identical to SEQ ID NO: 26451

SEQ ID NO: 28340 - DNA, 403 bp, Glycine max
gggcaaaaaaggaggtaatatggagcatgatgggagggcagaccactgaacaaggggattgttcaaaatttaagggaggcattccacattgctgtaagaaagatccgacggttgtagatttgctacctggaacaccttacaatcaacaaattgcaaattgctgcaaaggtggggtgctcagttcatgggtgcaggatccaaccaatgcagtttcctcatttcaagtcagtgttggtagagctggaaccacaaatagaactgtcaaagtcccaaaaaacttcaccttgaaagcaccaggaccaggttatacttgtgggccagctaagaatgtggcacccactaaattcattacttcagacaaaaggagagtgacccaagcactgatgacatggaatgtgacatg

SEQ ID NO: 28341 - DNA, 378 bp, Glycine max
ggcgcaagagaagagagagggagtaatggacagagacgaagcagaaaccatggagaatgtggaattcgatgcttctgagattgagtacgttagttacggtggcgagcatcacctccctctcgtaatgaacctggtggaccaagaactcagcgaaccttattccatcttcacgtaccgttacttcgtctatctctggcctcagctttcattcctggcgttccacaagggtaaatgcgtgggcaccgtggtatgtaagatgggggaacaccgtaacactttcagaggctacattgccatgctggttgtcatcaagccctacagaggaagaggcattgctacggagcttgttactaggtctatcaaggtgatgatggaatc

SEQ ID NO: 28342 - DNA, 382 bp, Glycine max
  modified_base (244)..(244): a, c, g, t, unknown, or other
gattacttaaaggacaagattcagccctcgtttgtaaaagagcgacgggcaatgaagagagaatatgaagaattcaaagtacggatcaatgcccttgtagccaaagctcataagatgccagaggaaggttggacaatgcaggatggaacttcttggcctggaaataatcctagggatcatccgggaatgattcatgtgtttttaggtcatagtggggggctggatacagatggaaatgagctgnctaggacttgatatgtttctcgtgagaagcgaccaggcttccaacatcacaagaagggctggagctatgaatgctttgattcgagtttctgcttgcttgaccaatggtgcatatcttctgaatgtggattgcgatcac

SEQ ID NO: 28343 - DNA, 388 bp, Glycine max
gggagaattaggcaaaatgtttgatatcccaatggatggctctaaatctagaaaatccggtcccataagtaatgctccttcaaggacaggatcatttgcaggtgctgcttcacactctggacctatcatgcaaaatgctgcagctcgttctgcttatatcacatctggtaatgtatctactggaggcatgtctgcttcagcctcaatgaaaaagaccaactctggtccattgaataagcatggggaaccagtcaagaagtcatctggccctcaatctggtggagttacacgccaaaactctggtccaattcctgcagttcttcctacgactggtcttattacatctggcccattaaattcatctggagctccaaggaaagtgtctggt

SEQ ID NO: 28344 - DNA, 423 bp, Glycine max
ggctaagcgaaaccaaaccaatctttttatctccaccctttttatttgggaataataataataataagcacttcaaggttgtgaagccttgaaggtgcatcaacacttgtgtcaacacaagaatgaggctctctgttttacttctagtgttcctcgcagttctggctgccacaaggcctagccttgtagactgtagggtccttccttcaccaaaaaacacagagaaagcccctcatgagcctctcaaagtgattcgatttctcatcaatttagtgatggcagaaaaggccaacactagtgagggtaatataagcaacagggttttgactgagaacaaattccaaaccatgccttcagggccaagcagaagaggttcgggtcactagcaccatgtttcagttaatcaactatcactgctttttc

SEQ ID NO: 28345 - DNA, 351 bp, Glycine max
ggatttagagtgaagagctaagagtatggctcccggggtgtgaatcacttaggctgggtaatgcttcttagcactgtcactgaatcgctgtcttgccgaggataatggacttgtcatgaacttctacaaggattcatgccctcaagcttaaaacatcatcaaagaacaagtcaagcttctctactagcgccacaagaacactgctttatcctggctcataaacatcttccatgactgtgctgttcatagtactgaatccacactgatactagacttcacaacaatgagcctgtctaataaggaaacaaatagaaactctatagttgataaattacaggttccttactacca

SEQ ID NO: 28346 - DNA, 429 bp, Glycine max
gggttgaaagtgagcaatgtcgttcgcagtggcattgtgtacaacgtcgtcgttcttcccttcccgttttgaaattcgcaatccaaagcagcttcagcttccacctctcctttcaatgtcactgtcgtcgaagctaccgttgcatttctccggcaatgccatattcaaccgcaaccacccaaccatgttcaaaattcgagcctcaaactcttcatccaaactcgtcttattgagctccactatcgtcgtcacaacagcggtagcgaatcgcgtgctctacaaattggcccttgttcccatgaaagagtaccccttttttctcgctcagttcataacttttgggtatgttgttatatatttctcgatcttgtatttccggtaccgggcgagaattgtgaccgatgagatgctggcaattccgaaattgcg

SEQ ID NO: 28347 - DNA, 309 bp, Glycine max
ggcacaagtgagtttgttgatcgagataactagaaacagtgtgatgaaaatgaaggtccttgttttcttcgttgctacaattttggtagcatggcaatgccatgcgtacgatatgttccctcttcgaatgaacactggctatggtgcccgtactccggaggtgaaatgcgcaagttggaggcttgctgtggaagcacacaacatctttggctttgagaccattcctgaagagtgcgttgaagcaacaaaggaatacatccatggcgaacaatatagatcggactccaaaacagttaaccaacaaggcta

SEQ ID NO: 28348 - DNA, 422 bp, Glycine max
ggactggccagagggtgcaatctcacgagagagtattaaagctgttatgaagcttccccgactacagaaccttataatgcagcatgttgatcattcagctggagatcttatacatcttttgcaggggctacttagatatgacccctttgaaagacttacagctagggatgctttgaggcattccttctttatgagagatcatcttaggagatgatttttatgtgtttgtaaacgattggtctgcttttaggtgaaagatcactcgagggcaaatatggctgtaaggagcctatgtgccaatgtaaataaatatttaaatttacgcttgtgtggcaagtgaggatgggtattcagcagcatttacacctcaacctcaaagcctgtgtttcaaacgttttattaacaaaaaatgggaataaaaa

SEQ ID NO: 28349 - DNA, 348 bp, Glycine max
gaggaagaatttgatgaatcagacaagtcacatgataatgaagctccagaatatagacgtctaattgcaattcatgctgggaagcctaaaggtggattagcagaatgcctcaaagtggatcctgataaagtgagacgtctaagtttaagtgagcaacagcttgaaaaggctgccataaatcatggacaacaaattgtcaggtttactcagcggaatatactaagggtgtatccaaaaggtactcgcattgactcatcaaattataacccattaattgggtggatgcatggagctcagatggttgcatttaacatgcaggggtatgggagatctctttgggtgatgcat

SEQ ID NO: 28350 - DNA, 412 bp, Glycine max
ggttcaaggaatgtagagagagcgggcggagactgctatgccctttgactcttcaagaactaagaagtacagagctgaatccaagtatggctttgcgtaacaccattgaagaatggactgccaggaatgaagctgcacagctggatatggctcgccggtcattgaatatggggagtccagaaaatgagactcttcaggccttaaagtatgtccagcacatctgccgaagaagtcgatcaaacaaatacactgtccgcaatgcagggcttatcccaatgattgttgacatgctgaagagtagcagccgtaaggttcgttgtagagctctggaaacccttagagttgtggtagaagaagatgatgagaataaggaattgttggctgaaggggatactgttcgcactgtagtaaa

SEQ ID NO: 28351 - DNA, 414 bp, Glycine max
gagagcgaagagcgaagagaatggctcccaagggtttaacctttctggctgtgttaatatgcgtttcagcactgtcactgagtccttctgttgcgggggaagggcaaaataatggccttgttatgaacttctacaaggaatcatgccctcaggctgaagacatcatcacagaacaagtcaagcttctctacaagcgccacaagaacactgctttctcctggctcaggaacatcttccatgactgtgctgttcagagttgtgatgcttcactgttgctggactccacaagaaggagcttgtctgagaaggaaacagatagaagctttgggttgagaaatttcaggtacattgagaccatcaaagaagctttggaaagagaatgccctggagttgtttcatgtgctgatatcctcg

SEQ ID NO: 28352 - DNA, 411 bp, Glycine max
ggcgagagttctgagaagaaaagagaagatcggggagtgaggaagcaaatagcaatagcaccgccaccgtcaccactgccactgccactgccactagcaacagcagaatgggaaccttgggcagagttttctacgccgtcggattttggatccgcgagaccggccaagccatcgatcgcctcggctctcgtctccaaggcaactacctctttcaagaacagctgtctaagcatcgacctctgatgaatctgttcgacaaagctccctcggttcacagggatgcatatgtggcccctagtgcctgccttctcggcgatgtccacgttggccccgcttactccatttggcatggatgcgttctcagaggtgatgttaacagcattactattggatcctgaactaatatacaag

SEQ ID NO: 28353 - DNA, 381 bp, Glycine max
ggcacgttgttaaggatgttcctaacaatttgttgaggcacattaccctggataacaatgagaacaaacctgtcactaacagtagggatacacaagaggtaatgttggagcctggcctgaaattaatcaaaattttcaaggaatataccagcaagacatgcattctggatgattttggcttctatgaggcccgtcagaagactattttggagaagaaagcaaagcaacaattcccaaagcaggtatgggaagggaaacctgctgatgagaagattgagataaatggggaagtcaatactcaaaaatctgaagttagctcggaagtgctcaaggagtcccttgctgaggaggatagtgatgaccacaaagttcccgagaatg

SEQ ID NO: 28354 - DNA, 442 bp, Glycine max
ggagcaagagtgaagagcgaagagaatggctcccaagggtttaatctttttggctgtgttatgcttctcagcactggcactgagtcgttgtcttgcggaggataatggacttgttatgaacttctacaaggaatcatgccctcaggctgaagacatcatcaaagaacaagtcaagcttctctacaagcgccacaagaacactgctttctcctggctcagaaacatcttccatgactgtgctgttcagagttgtgatgcttcactgttgctggactccacaagaaggagcttgtctgagaaggaaacagatagaagctttgggttgagaaatttcaggtacattgagaccatcaaagaagctttggaaagggaatgcccacgagttgcttcctgtgctgatatcctcgttctctctgccagagatggcatagattcgctagga

SEQ ID NO: 28355 - DNA, 333 bp, Glycine max
gacgaaacaatggtagaactagtctctcaatacccgagaacgtgtgaacgaaaaatagcgtctattttaaactagaagactagaagattacgtctttgattatgcaaagcggtgcacaaattacataatccagagtccagaactcacactatatatataagcacgacctaagcttcttctttgcactgcacatcacttttctactttgagtcttcttgatccttctgtgtctccttgaactcaaacatggcagatgatgtggttctgctagatttctggccaaggccatttgggatgaaggtcatgattgcacttgctgaaaagggtatgaaa

SEQ ID NO: 28356 - DNA, 402 bp, Glycine max
ggaagaggaaggggctagagaggaaagaactagctggctggaagctgagaactttagcatggactagtactactagtacattcatgcatattacgttggactatggtggcttaaccatagcatcgagagcgcaaagatggtgtgagctccttggtgagaaaagatgcgcctgaagaaagagccttgggctatcgaggaagatcaaattctaagatgttacattgacaaacatggacatggcgaattggcctgccctttcaaagcaagcaagcttgttaaggtgtgggaaaagctgtatactacgctggattaactatgtgaggcccgatgttcaaagacggaatttcacaattgacgaagaagatactatcattgagctggatgacatgctgaggaacaggt

SEQ ID NO: 28357 - DNA, 439 bp, Glycine max
gaccaggtggtaggcgccctgatatttcacttcaagttccccctagacctacagggtttggcagcactagtggtgtaagggttctggatcattctcaaagtttcggtaaagggatttcatcatcaagaggcttcttgcgggccttgagcttcaaaagaaaaggaaatgtagcagatggcgaaagaagttccctccttaattcagaccccaagacagctgcagacagtcctaatatggcctccatatctgaaattgcatggaaaagatgtacttctcttcctgttacacctgcatcaaatctgtctccttcagtttctacgcccatttctgcaagggcatataatgaacagactaagcctcataaagatgttgattgttctaaggtttcaaggtccctttctgtacccgggcgaaatgttgttattgtaagatctgtctc

SEQ ID NO: 28358 - DNA, 381 bp, Glycine max
  modified_base (357)..(357): a, c, g, t, unknown, or other
ggagaaaagaaggaggatcccaacgcgctttccaacttcaggatttcggaacccttgaggcaaaaattgaaggagaagggtatcgaatcactgtttcccattcaggccatgaccttcgacaccgttctcgatggttctgatttggtcggtcgggctcgcaccggtcagggtaaaactctggcatttgtgttgcccatattagagtctttaataaatggtccaacaaaagcttcaagaaagactggcttcgggaggactccaagtgttcttgtgcttctacctactagggaattggcctgtcaggtgcatgctgattttgatgtttatggtggggcaatgggattgagttcatgttgnttatatggcggagctccgtatcaa

SEQ ID NO: 28359 - DNA, 336 bp, Glycine max
  modified_base (309)..(309): a, c, g, t, unknown, or other
gacacacaacatttacatttctctctccagtatggcttctactcacaatgagttttatgcacttatgctagtggtggtggttggctccatggtggcttcctgtggtgctaacttcaaccaagactttgatctaacatggggtgatcaccgtgctaagatattcaatggtggtcagcttctatctctttctctggacaaagtctctggctccggcttccaatccaagaaagagtacctatttgggaggatcgatatgcaactcaagctcgttgcttgcaactctgccggcactgtcactgcttactactngtcgtctcagggccaactcatgatgag

SEQ ID NO: 28360 - DNA, 313 bp, Glycine max
gcgtcagagggggagaggctcttgggctagatctggatgaacacctactagttgtgagatgggtgctttaaggctaagcctgatgaaagatgatcagcttgcggctgctcaggtcatggaaggcgtatcacgtagtggatccctggcactgacactgttgactgatgtggaaggagaggacatgaactacacgcaacagattgtcgtaggtgctagaccaaggagatggcgagccagggactacgagcccgtatagataggggctaagaatatagtgcactccgacactaaggaacgtgagatggttacgatt

SEQ ID NO: 28361 - DNA, 420 bp, Glycine max
  modified_base (406)..(406): a, c, g, t, unknown, or other
catgccacaggttaaaatgatggtagtacttggggaacttggtgggcgtgatgagtattccttagtggaggccttaaaacaaggaaaggtatccaaaccggttgttgcctgggtcagtggcacatgtgcacgactcttcaaatctgaagtacaatttggtcatgcaggagccaaaagtggtggtgagttagagtctgctcaagcaaagaatcaggcactaagggacgctggagctgttgttcccacatcatatgaagcttttgaagctgcaattagggaaacatttgataaattggttgaagaagggaagatcacaccaatcaaggaaatcacacctgcaccaatccctgaagaccttagtactgcaattaagagtggaaaagtccgtgctccaactcatattatntccaccatttctga

SEQ ID NO: 28362 - DNA, 401 bp, Glycine max
ggctgagttcagaacaaaacaagagaaaaaaaagggtttcacactttgtccaatctttcacactgaactcttcaattttcaattctctttttcatgcaccactcttctttttcttcagacaccttcatcatctgcataccgcttagctccaaaaactacacacacaagaattctgtttctttctgttgatttgatggatccgcaggtctaatggtttcacacactttcttcactacggatcattgtcttcttcatctggggcaccccaatagcttcttctaatcgatagtcaaattttgttggtttgtggtggatcatcttcgtcgttgtggtgactagtgaggagtgcaggactatacctatctatatagtgtatgaaaattctggggggtgaagtcgtt

SEQ ID NO: 28363 - DNA, 418 bp, Glycine max
gtggaacatggagacattgcaaacagaaagtactccggaggaacacagtcttattattactgatgttcgcttcagaccaaattcaactcagctggcaacatcttcgtttgatacaactgtgcggctgtgggatgctgcagatccaaccttccctttacatacatatagtggtcatacttcacatgtggtgtcccttgatttccacccaaagaaaactgagcttttctgttcttgtgacaataacaatgagattcgcttctggagtattagtcaatattcttccacacgtatttttaagggaggatctacacaggtgaggtttcagccaaggcttggtcaccttctggctgcagcaagtggcagtgttgtgtctctctatgatgttgagactgacaggcagatacacacattacaggga

SEQ ID NO: 28364 - DNA, 192 bp, Glycine max
atgaggaaggaagattagtttgagggcatacaatatagctaataatgttaatctgttacctcacccataaagtgagttttacatatagacatttgatgaccatttcctgcagctttatacctctcatctaaccttcgaatacaatacgtatcgccctgaatcgacctatatctatgttctttgatccttcat

SEQ ID NO: 28365 - DNA, 207 bp, Glycine max
ttgactttagaagcatgaggaaggaagatgagtttgggggcatcaaagattgctattaagtataatctgtatcctcacccagaaagtgagttttacgcggagacattctgtgactattccatacagctttcaacctctcagctatctcttgaatacaatgcgtatcgtcctgaatctacctatatctatgatctcgttctttcatcc

SEQ ID NO: 28366 - DNA, 443 bp, Glycine max
gaactcaaacagggaggatcatttctgatcgatttattgcttacgatttggaatagtgacaagtaaagacaaatcacaactcacggtcatccaattccaagaatagagctttacgaggcagcggcttcaaaaggaggggaatattcagaggaaaagaaagagtagttgttgaacaacaagagctttcctcattcttagcttatctcacaaggaaggtacgtaagatccttaacacccttaccgcggttacttgccgcctcaatccattgctgaaatgaatgctcataaataaatatatttgcaggctacgaatctctgctcctagatttttgtttcttaattatcaatctagtctctaaattatattaaaagatttaatttgattccaaatttttaaataatttaatttaatttctatattattttaaaatagattaatttga

SEQ ID NO: 28367 - DNA, 368 bp, Glycine max
ggggagatggagcggaagtggagcagtgaatctggtgggaatgtgatatcgtcgccatcacactcgcgtaatgggcattctcgctcctcttcgctcactatccccggaggaggaatttcaaccgtcaaaaggactcagaatgttgctgccaaagccgccgctcagcgcctcgcccaggtcatggcttctcagactgccgacgacgacgacgacgacgaagacgatctaggatttcgctacactgctcctccacctctctctctttccaggagctctgctagatctccatctcctgcgttagctcggaacctcgtagaagaatcatcaatgtatcttcgcccagcaccacctgctgcttgtaataatag

SEQ ID NO: 28368 - DNA, 340 bp, Glycine max
  modified_base (324)..(324): a, c, g, t, unknown, or other
ggagggtgcattgtgtcaaacctgttggaggtaaaaagacccagtttattgtaatgggcaatgtgttttgctcggagtaccagatccacaagaggtttgacctcaaaggctcttctcatggtcaatctacagataagccaagggaacaaattgatgagactaccactctcaaagaccttgatcttaactttgtctttcgccttgaatagtcttggtttcaagagcttatatggcaacttggtagagattgtgagttcctggaagcaaagggaatcatggattacagtcttctaattggcctgcatttctgtgatgatagctcanttgatgaaatgaaaag

SEQ ID NO: 28369 - DNA, 217 bp, Glycine max
ttattctaatgacaattctacagattaaccaatcgaactgatagatcagactaccactataagagtcctttatatcaactttgactatcgccataaataatactaaattcaaattcttacatgaaataatcaatctatattgatactatgatcgaacaccatctattaataattttctgtcttatatacttcctgtcattttggcattatagcatac

SEQ ID NO: 28370 - DNA, 328 bp, Glycine max
ggatagagagaggtgaaacgaaacgtcgcataaagaatcagataatgcgtgtggctctgactcaacccacctgggacctggctcggaagtgctaagaaagttacgaagctatcttctacattcttctctgtggtgtgtgtggtgatggtggttgtggtagcggacggggataccatttgctgcttcaaccgcccagagcagagatttatatgtattgtaccccctattgtatataaaggactctgtttttgagctcatcatgggagagggagctcatgcctagcactgaatatcacaggcacgtgcatgctgaaactgatacacatcg

SEQ ID NO: 28371 - DNA, 223 bp, Glycine max
ggttctagtgtgtgattgtttgttgttgtaactcgttcttcttcttttggtgttctgggtttgggtttggtttttctctcacctgaaaatgtcttgctgcggtggtaactggggttgccgaagcttctgcaagtgccgcaacggctgccgaggctgcaagatgtacccagacttgagctacactgagtcaaccaccaccgagaccttggtcatgggagtgggg

SEQ ID NO: 28372 - DNA, 401 bp, Glycine max
gaccacttggataaacgaacttggacttatatctttggagcttgctgtgccacctctgtgttcataccttcttttcacaattaccgtatttggtcttttctgggacttggaatgaccacttacactgcttggtacttggcaatagcagcccttattcatggccaggcagaaaatgtgacacacacgggtccaacgaagctagtgctgtacttcacaggagccaccaacatactgtacacgtttggtggacatgcagttactgtagagattatgcacgccatgtggaagccacagaagttcaagtacatatacttgctggccactttgtacgttttcacactaacgattccttctgctgctgcccgttactgggcttttggtgatgaacttctcaatcattc

SEQ ID NO: 28373 - DNA, 411 bp, Glycine max
  modified_base (365)..(365): a, c, g, t, unknown, or other
gagagaaaggatgcggaaagagatcttttggccaaactacttgtcaaccttgtgaaatctcagcatggaaccttgaatcaagttcagctcattaaagggtttgaatctgctctcagtacattggaggatgctgttaatgatgctcccagagcagcagagtttcttggccgaatttttgcaaaagccataacagagaatgtagtttctttgaaggagattgggcagttaatacatgatggtggagaggagccaggtagtctcttagaagttggacttgcagctgatgttcttggaggcactttggaggtaattcaaagcgagaagggggacgtggttctaaacgagatgcgttcagactctaactngagggtggaaacttttccgcaacctaatgctaaaacatcaaggaag

SEQ ID NO: 28374 - DNA, 414 bp, Glycine max
ggtggaaaaactgaagattatgatcatgaagataaacaaagtggtgtcactttcttcagctgcagctcttaaatctgtgtgttccaaaactttttgaggtaaagtctcaaaactttctctcttttctcattaatcacattcttgcttaattagctcttcttttacaaattcttcttcattatattcagctgcagctcttaaatctgtgtgctccaaaactttttgaggtgaagtctcaaaactttctctcttttctcattaatcacattcttgcttaattagctcttcttttacaaattctccttcattatattcagctgcagctcttaaatctgtgtgttccaaaactttttgaggtaaagtctcaaaactttctctcttttctcattaatcacattcttgcttaattagctc

SEQ ID NO: 28375 - DNA, 415 bp, Glycine max
gggggaaggtcgagtagtgtgccagataaatcctcccagcgttcctctcgcagcatgtctgtcagtcctgatcgtgttcgtgtgagggggcggtctccagcctttaatgctctagcagctaattttgagaaccctaattctaggaacctttcaaccccacctccagtaattagaaagctgtatcctaaatctgtgacaacagattctgcaatactggcgccaaaatcttctgccatagctgcacttagttcttcttttgaacaaccaccttcagcacgagaaaccatgatacctcgctcacttaaagtgagtccagtaatgcccaaatcaaaccctgagaaaaatgacaaggagaattctgtgagcaccagagtggaatctcttaccatacaggaagatgtgaaagaggatgaag

SEQ ID NO: 28376 - DNA, 414 bp, Glycine max
ggatgactgatgaagaatttgcaagagaaacgattgctggcttaaatccaaatgtcattaagattatagaggagttcccactaagtagcaagctagatactcaagcctatggtgatcatacctgtataatagcaaaagaacatttggagcctaacttaagtgggctcactgttgagcaggctatccaaaacaagaagttgttcatcttagatcaccatgactatctcattccttatttgaggaaaataaatgcagataccacaaagacttatgctacaagaaccatatttttcttgaaagatgatggaactttgacaccattggccattgagttaagtaagccacatactcagggtgaagaatatggtcctgttagcgaagtctacgtgcctgccagcgaaggagtggaagctt

SEQ ID NO: 28377 - DNA, 400 bp, Glycine max
ggacccgaaggcctgaagaacattgcacaccgtgttcatggtcttgctggggcatttgctcttggattaaagaaacttggaactgtggaagttcaagaccttcccttctttgacactgggaaggttaagacttctaatgcacatgcaattgctgatgctgctctcaagagtggaataaatttgcgagttgtagatggaaacactatcactgttgcttttgatgaaacaaccacattagaggatgttgataatcttttcaaagtttttgctggtggaaagccggtccccttcactgctgcatctcttgcaccagaagttcagagtgcgattccttctggattagttaggaagagcccttatctgacacactctatctttaacatgtaccaaactgagcatg

SEQ ID NO: 28378 - DNA, 442 bp, Glycine max
ggtagtttaagtgtgaatccctttccctctctactcttctttcactttccatttccatttccattttttctggttcactttctcgatggcctccgagaaccccaccgccgacgacgccgtcaacggcttcaatcggccggaaatgttctcggaaaacctcgccggcaccgtcgacgcctacgaccgccacgtgttcctctgctacaagagtcacctgtcctggcccccgcgcatcgaggcctccgacgccgatcccttccccaagcgcgtcgccaccaccttcaaagcccgcaagaacgacttgcccctcaagacgaaaatcaccgtgtgcgaggtgcgtgaggaggctggcttcctcgacggtgacgtgttgattttccccgacatgatcaaatacaggggtttggaggaatcaaatgttgatagctttttcgaagatgtt

SEQ ID NO: 28379 - DNA, 419 bp, Glycine max
  modified_base (206)..(206): a, c, g, t, unknown, or other
  modified_base (246)..(246): a, c, g, t, unknown, or other
  modified_base (276)..(276): a, c, g, t, unknown, or other
ggagcctgagtgtgacaagctcataatggcttcacttaacaagaactacgttgacatggatgagtatcctgtcaccactgagctccagaaccggtgtgttaatatcatagcaaatctattccatgctcctataagtgatgatgagactgcagtaagtgtgggaactgtggggtcatcggaggcaataatgttggcaggtctagctnttaaaaggaaatggcagacaaagagaaaagcagaaggcanaccatatgataagcccaacatagtaactgnggctaatgtgcaggtttgttgggaaaaatttgcaaggtactttgaggtagagctcaaggaagtgaaactcatagaaggatactatgtgatggaccctgcgaaagcagttgaaatggtagatgagaacaccatctgtgttgcaa

SEQ ID NO: 28380 - DNA, 440 bp, Glycine max
gacacacagagacatttttctttcttagaagcgtgcaccacacggaacctcgcaattccttcacacccaccataataataatatcttcattgttcttttcttctttgttaccattaaaaacacacacacacacacaacaacactctgaaactaacaacaacaataaaagaccatgtcggtgaaggagtgcgagcaccacaaggggaagaagaggaagatcttccggcaagtgttctggtgcttagtggtgttccttttcatcgtgctggtcacaattcttttgatatgggcaatccttagacccaccaaacccaccttcacgctccaagacgtcaccgtctacgccttcaacgccaccgtggcgaacttcctcacttcgaattttcaggtcacgctcatctcgcgtaacccgaacgaccgcattcgtgtttactatgatc

SEQ ID NO: 28381 - DNA, 436 bp, Glycine max
ggagttagggtgagttgcaggcagtgtcatctctgctttgacgacaagatgagcatcccaattccccatcggcagttattcatagacggagactggaaagtccccgtcctcaagaatcggattcccatcatcaacccttccacccaacacatcatcggggatatcccagcagctactaaggaagacgttgatctcgctgtcgctgccgccaaagctgccctctcccgcaacaagggcgccgattgggcctccgcttccggctccgttcgggctcgctacctccgcgccatcgctgccaagatcaccgagaaaaagcctgaactagcaaaactcgaagctattgactgtggaaaaccgctcgatgaagccgcctgggacatcgacgatgttgctggttgctttgagttctatgctgaccttgctgaaaaattggacg

SEQ ID NO: 28382 - DNA, 356 bp, Glycine max
  modified_base (223)..(223): a, c, g, t, unknown, or other
ggagaattgttctacgtcgtcaaagacaccgatttaggggttaaaaaatatcgattaacctctgatatttctcttagctgcagcctgcagtgagactaagaaaatctccgaacccgctacttcctattttctatcctttcaaaagagaaactggaaaagttagctaaacgtcatagctagatcgtcgaacaaaacgaatagaaaagcgttgaaaatggctcangagtcactctcagaaacccctgatatctcgcccccttcgtctactgcacaatcgctgccagatccatctctttcaaggaaccgttcttttagccggctcaacgcacaggcaccagaatttgtgcccactcgcg

SEQ ID NO: 28383 - DNA, 369 bp, Glycine max
ggtgagacgagggtagggtcgcgttgtgtcgcggcgtgtcgcgcgctgcttctgtgtgtggcgtttgtgtttacacaccaaactctatctgcgtatcagcaccatgtcgaccacgcggggtggaaaagctaagcctttgaagaaacccaagtgtgatgagagggatcaccacgagggtgacatggctcacattcagaagaaaagggaagaggagaacgctctaaaagagttgagagccagggcgccacagaggggacgctttagaggctctgcgctcaagaagagtggagagatatagggtctctatatcaagagtgtacacatccaatattgagccctgtagtatatcaccatgatcacttgtgtcat

SEQ ID NO: 28384 - DNA, 407 bp, Glycine max
gtatgttaaaagtgttcaaagaactgtcatttggatgggaaaaagacaggaaactgtggaagatgtcccctgtggtaacactgttgctatggttggtttggatcagttcataacaaagaatgctactttgactaatgaaaaggaagttgatgcccatcccattcgagctatgaagttttctgtctcacctgttgttcgtgttgctgttcaatgtaaggttgcatcagatcttcccaagcttgttgaaggtcttaagcggttggccaagtcagatcctatggttgtttgtaccattgaggagtctggtgaacacattgttgctggtgcaggagagcttcatcttgagatctgtttgaaggacttgcaagatgatttcatgggtggagctgagatcattaaatctgacc

SEQ ID NO: 28385 - DNA, 288 bp, Glycine max
gacaacagacacagaaactgctaagaccataacaagaatggtgtttgactcaaaaaagacgaggaacatgaaatgttagggctaggatgcttcaacctcactcgattctctcactatccatccactacctctctaccatcctctcactccgaattacttaaggttgccccttgcaaatccacctaatcagtgactaatacgcaccaatcttcagtcacttagccacagtccacctgcaccgctataattgaaacatataacccgaccagtgccaaaaggcaattggca

SEQ ID NO: 28386 - DNA, 269 bp, Glycine max
ggtcaacttaggctggagaaccgatatcaaaatgtaatgcacacacaacacaacacaacagcgtggaacgagacaacttagtacgaaaatcgttatccgtcgcaacagccactaagatgttctttgagtcttggcacgccacgtgtcagaactgccaacagatagccccatctctttctacttctgcctaaacctcgaactcagcacccccatccactggtgattgtttgattgagccttgaagaaatggaccacagcgctgatgcaca

SEQ ID NO: 28387 - DNA, 405 bp, Glycine max
gaagtacaagcagagagttacgacacatatttctttttcttttccctttttcctaggcacagcacacgccctctcaaatagaaactgagagatgaattctgatcagtttcagaagaacagcatgttcgtagaaacccctgaagatggtggcaaaaacttcgacgatgatggacgagtcagaagaacgggtacatggataactgcgagtgcccatatcataacggcagtgatagggtcaggagtgttgtcacttgcatgggcaattgcacaaatgggttgggtggctggccctgccgctctctttgccttctctttcatcacttacttcacttccactcttcttgccgactgttatcgctcacctgatcctgttcatggcacgcgaaactacacctattccgatgt

SEQ ID NO: 28388 - DNA, 364 bp, Glycine max
ggtatcgcttcagagttgagaccaagacacactcgttcatatatctctctgctcttctcttctcttctacctctcaagtttttgaagtataaagatggcagagacattcctattcacctggagtccgtgaacgagggacaccctggtaagctctgcgaccaatctcgagctgcctgaccttgctcgaacggcccagacagaaggtgctgcaaacatgcccagacaatggtatggcttgagagacacacaagcaacgtgactacagagatcgtgcggaaccttcaggcatggcttattcaacgattgggacttgatgctgacaactgcaaggtccttgtaaacattgagcagcagagccctgata

SEQ ID NO: 28389 - DNA, 356 bp, Glycine max
  modified_base (339)..(339): a, c, g, t, unknown, or other
gacacaaaaacggctaaaaccataacaagaatggtgtttggctcaaaaaaaaagaagaagaagaaatgttagggttaggatgcttaaacctcaatcgattctctcacttcccatcccctccctctctaccatcctctcgttccgatttacttaaagttgcgtctcgtagattcgctttatcagtgactaaaacgcagcaatctccagtcactaagccacaatccaccttcaccgctataattgaaatagataacccggccagtgtcaaaaggcaattggcgcagctgtttgacttgtctctgagggcaactgtgcccgatgagccagatgttgtgccgntaattgatgcttgtgct

SEQ ID NO: 28390 - DNA, 437 bp, Glycine max
ggaatccagaaagtttgataaatgagtgattgtgtgactccaaaagtttatgcactttggaaaggaattttctgtctcataaactctgttcaaaggattttaataatttgtttctggcttagaccattccatgattgctctcctttcttgggggtccatttttttttctcagtttataattataataattgaagcttttgaaccctctcatgtttcattaaattctgtgccctcaaaggggtactgttgaaccattttttttaatctatttacttggctgcggattgtccactcagaatctttacaaagctttatctccaatggatttgattaccactttgattgtcttcctttatgatgctttagcttctttcagtgctaatccgagttaacaagaccaaattttaaaattaaaaaaatggaaaaccagtgacatt

SEQ ID NO: 28391 - DNA, 419 bp, Glycine max
ggtccgttgcaatatcggcagaagagagacaccaacaaccttccattggttgatgacacatcggatggagcatttgtccagtttagggggcggtttaaggtcacgccggcagatctcagtccaatgggtccttcaaacagcacatctggcccacttgttagtcctaccagtccaccaaatccaaatttcctgtctgtagctattcttccatcactgcagtgcatcttgcaacagaacggtttgcagagggaagagattattaaattaataaaatatgcagagcaatcttctggcaagaatacagaatcaatggaagcagggatagttgatattttgcaggcaccacctgcaacaactagggagcgagagctgcattttcaggtgattcaactccagcagagcaatggaatcctttttga

SEQ ID NO: 28392 - DNA, 430 bp, Glycine max
ggaaaagaaggtagagaaggtgttgtgaaaggttaagatcgagaaattagggtgaagtgaaggagaagctcttgagaaggtatagttcttgttcttgctcatgctcccttgtgttttgtgtgactcgttgttcttgttcttgctacatttttatctttaatttacgtgcttctaatcatgttaacattagtgttttgtttcaccttctacacatttacacatttatcgtctcaaatctcaaatacaaagcacctatactttctttctcccaaaataattgatcgtctcaaatctcaatttaataaatgtattataaagtcttttaacataagattcttttttaaaaaagacaaaacataacattaatataaaccaaaagatcgttatcacttatgttaattaataagtgataacgatttatatttcttaa

SEQ ID NO: 28393 - DNA, 435 bp, Glycine max
gagagacagtgacagaaataaattgaaaacagagaaagatgaacggcgacgacgacaagggtttgctgtggaagctcccagtggtgaagtccgaccactttggcaaggtgggccccgtcttcggcatcggtgccggctgcggcctcggtttcggccttggccttctcggaggagtgggtgttggccctggaattcctggattccaagttggttttggatttggtgctggatgtggtgttggtttagggtttggctatggtgtggggaaaggaattgcacaagatgacaacaagagatactctaatgttggaaatcctttccgtggttctagaagcatcatttctgaggatgatattactgcacttgtggacgaccttgtcattaatactaaaaagcttatcaaggcaacatcaaaagaaattgacaagtggagaa

SEQ ID NO: 28394 - DNA, 429 bp, Glycine max
ggaagaaggcatggagcagtggtggatgtggtcgggtaggagcactagagatgggaagctgcccgggacccatagagacacccgctcttctcctatctactcgtaaagggcttcctcactttatctcccctgacctactcacttctctcccttcccccgattcccatctccttcaaatttctccactccactttttggaaggacttgcttcaaccactatatcaaaattaggagggcttcaccaaatgcttggtttgcaccaatatggaatggcggctgtagccagggattccattcaatgccttcctgagtctaagggagctaccaaactcggagcctcttttgaaactccttgtggtcgtctgttgattaaacccaaagattatgttgaaatgatttcatgcatgaggcctaatatatgggccactt

SEQ ID NO: 28395 - DNA, 375 bp, Glycine max
gacaagaagaagaagaagaagaagaagaagaagggttggttggtcccattccataggaagagatcaaagagaagagaaaagatgtttgagccgcagcagctatacactcgagcgaagaccgaggaattcgacctcgaatcaggggaaaccctctacccagggctgagcgtcggcgagaaccagctccgatggggcttcatccgcaaggtctacggcatcctctacgcccagatcgtcctcaccaccctcgtctctgtcaccaccgttttctatactccaatcaatgacctcctcaagggcaattccaccctcctcctcatgctcctcttccttcctttcatctttttgattcccctgttgaagtaccagcagaag

SEQ ID NO: 28396 - DNA, 405 bp, Glycine max
ggtggttggcttgctttcagtctgttcattgcaaatgcttcattccaagatggttaggactctgtaagctgatgaagacaacactcataccgttggaaagaacgatgctgctggccaatgttgttaatttagatcttgcttcctttgtcttcttgagtattatcagagacgggagtgcatggatcactagctctttcattcggtcagagtggccggcagttgacattcctcttgatcatgaagcatttgcagttccaaagggttataatgcacctcaacaagtgcacatcacgcaaggtgactatgatggaaaagcagtaatcatctcatgggtgaccacagaagagccagggcacagccatatacagtatggcacatcagagaataaatttcaaactagtgaag

SEQ ID NO: 28397 - DNA, 362 bp, Glycine max
  modified_base (233)..(233): a, c, g, t, unknown, or other
ggaggaagaggaggagtaacaaagcaagtatgtcagaatcaaacgcaattgcaaatggtttggctggtgcaagtggtggaattattgctcaaatcataacttatcctcttcaaacggtaaacacgcgccagcaaactgagagaacactcaagaagaacaagcaaagtttgcccttcaactcaaccactgctcctggcactcttcttcagatctttcaggtcattggaactganggttggggtggactctatagtggcctcaagccttctcttcttggaactgctgcttctcagggaatttactactatttctatcaagtttttaagaacaaggcagttgccattgcagctgcacggatggtg

SEQ ID NO: 28398 - DNA, 331 bp, Glycine max
gagtgagagacggaaagtgcaaagccaccgtcttgtcttttcagagcttggctttgcttatcgaatctctctcctctcatctttctcaatcaaggtttggaaaagattgccgatgcttaggatattcaaccccttggttgtgacaatggaactggaatggtcaaggctcgatttgctggtgatgatgcttccaaggctggctttcccaggattggtggccggcctcgacacactggtggtatgggtgggatgggtcaaaaggatgcccttgttggtgatgaagcccaatcaaaaagaagtattcctactctcaaggatcccattgagcatg

SEQ ID NO: 28399 - DNA, 370 bp, Glycine max
gggaagatgtgaacagggaaggtcttagaaagacaccacttcgtgttgccaaggcccttcgtgaaggaaccagaggttacagacaaaaggtgaaggacattgttcaaggtgctttattccccgaagctggtctagataatagagttggtcatgcagggggagcaggtggactcgtgattgttcgagatcttgacttgttttcctattgtgagtcctgcttgcttccattcccggtcaagtgtcatgtgggttatgtcccctctggtgaaagagttgttggtttaagcaagctctctcgtgttgctgatgtatttgcgaaacgacttcaagagcctcagcgtctggcaaatgaggtatgctctgctttaca

SEQ ID NO: 28400 - DNA, 350 bp, Glycine max
ggtacaagcagagagttacaagacatatgtaacggttttttccgtttttactatgcacatgttaagccctattaaatagaaactgagagatcaattctgatgagcttcacaataaccgcgtgttcagagaaacccatgaagattgggtcaaaactttacgatgatggacgacgtaaaagaaccgtggcatggataactgttagtgcccatatcgttactgcagtgatctggctccgaatgctggtacttgcattggccatttgccacatgggttgggtggctggccctggcggtcactttgtcttttatgttattactgacttgacttacactcttcttgacgactgtta

SEQ ID NO: 28401 - DNA, 91 bp, Glycine max
gggatggagaaagggaaagtgcttcggcgacttctttagacaccaagggttcaacaagggtcaacctggtttgaacctcttggttccaaac

SEQ ID NO: 28402 - DNA, 395 bp, Glycine max
ggaagagaatggctcccaagggtttaacctttctggctgtgttaatatgcgtttcagcactgtcactgagtccttctgttgcgggggaagggcaaaataatggccttgttatgaacttctacaaggaatcatgccctcaggctgaagacatcatcacagaacaagtcaagcttctctacaagcgccacaagaacactgctttctcctggctcaggaacatcttccatgactgtgctgttcagagttgtgatgcttcactgttgctggactccacaagaaggagcttgtctgagaaggaaacagatagaagctttgggttgagaaatttcaggtacattgagaccatcaaagaagctttggaaagagaatgccctggagttgtttcatgtgctgat

SEQ ID NO: 28403 - DNA, 396 bp, Glycine max
gacaccgagtgagatattgaatcactgaagagggtccttgaatggcggtttcttctctctctgttactcctctttcgctctcaaatactttcccctctctatcttccaagccaaagattccatctttgtgttttctctctggcaacaacaccacattgagggtgacatgcccaaaacctctgcactcatccactgttgttcatgttgctaccgaagcgttggattcatcccctgatcccttggacccacctccagaaacccttgatgatgactctgacgccaccacctttgaggttggtgacttggggactcctagcacttcagcaattagcattggtggcgatgcagatacaatggcgccaaagcagaagattagaatcaagcttatgtcttact

SEQ ID NO: 28404 - DNA, 381 bp, Glycine max
gaagcaggaacggatgggatgcaagattccccaccgcacgaattaaccatggcctcttcaatcgaaaagctcctagaaagtggtcgtcccttccttcgcggtgatctggagtccatcgaccagaacttacctcggctggttggcgtcctgcaaaatgtgggttcccgggaagtgctggcccaaccccggaagtttcgttaacaacttggcgacctatttcgcattctcaagctcttgaaagccccttactctgtctggctctgtggcctgtttcactcagactacttcaatccttacgtttacctcgccatattcgacccttcaaccggtcgagaagtggttcgagcactcgattgcgaggaagctgagagtccgattcac

SEQ ID NO: 28405 - DNA, 416 bp, Glycine max
agacaccacagagggagagacagggacggatataaatcgagaacagacaacgatcaactgaaacatcgactagggtatgctgaggaagctaccaagggtgaagtcctaccactttggcaaggtggaccccatcttcaacatcttagccggcttgggtctcgttttgcaccttgtccttgtcggaggattctgtgtcagacacggaatttctggattccaagttggctacatatttggcactgtatagctttgtaaagtacggactggcgtatggcgttgggaacggtatcactcaagatgacatcatgagatactttaacgttggaaattcgatccgtgaatctagaaacatgattttcgagcactatattactaggcatctggaagacctattcacttgtactgcatagcttata

SEQ ID NO: 28406 - DNA, 424 bp, Glycine max
gaactcaagctttcagacattttcccttttcagcgttcattggtgtggcctagctgttttctcaatgagaaagccttcatctctgcaaagcgcacttttgcgctttggggttcccttgttgcttgttatcaccttctgttatgctacttctactgctgcagcaacaactcaagtttcagggaatgaagagctgccaaagacaaacctaaatgggcatgatgaagaagcaaaattcggattttttcatcataaaccaatattcaagaaacatattccaattccagtatataaacctgtaccaaagccatttccagtgtataaacctataccaaagccagttccagttccagtgtacaagcctattccaaagccagtgtataagcctattccaaagccagttccagtgtacaagcctatgccaaag

SEQ ID NO: 28407 - DNA, 329 bp, Glycine max
ggcatccaaaatggcgcattcttctgttatagtcttcctctgcactctccttctcttcttttctccgtcaattcgtgcctccgacgatgacgtggctcttcacgcgaagaagctcatcagagacctcaacttgttccccgacgctgacgtcaacatcgttcccgttgctaattgcacccttcaaccccgcaggatcgtcgagaagcgcctgatgttcccgaagctgctagcttccgattccgagccttcggttgaagattttgggcaccacgctggctattaccccattcagcattcacatgccgcaagggatgtctactttttcttcg

SEQ ID NO: 28408 - DNA, 325 bp, Glycine max
ggcatacaaagtggcgcattcttctgttatagtcgaactctgcactctgcttctattcatttctacgtcaattcgtgcctccgacgatgacgcggcgctgcacgcgaagaagctcatcacagacctcaacttgttccccgacgctgacgtcaacatcgttcccgttgctaattgcacccttcaaccccgcacgatctgcgagaagcgcctgatgttcccgaagctgctagcttcggattccgagccttcggctgaggatttgggtcaccacgctggctattaccccattcagcattcacatgccgcaaggatgttctactttttc

SEQ ID NO: 28409 - DNA, 238 bp, Glycine max
  modified_base (185)..(185): a, c, g, t, unknown, or other
ggaggatagataggccttagaagaagaagagagaggtctctcaacaatggccactgccactgtttcaatttcaactttatgcgctactttcggaacccattgcgccatttgccacaacccagaacctctattctctcaaccttataatctcaatcactttccttctaactcttacaagctcgatntctcgcctcgctcacctgtttcacccgttgccaaggcctctgaatccgcggta

SEQ ID NO: 28410 - DNA, 396 bp, Glycine max
ggtgggattttgagagagagaaatagagagagaacttcaagtgagggtgagagtgacacaaatctagagagagcactagtactctaaaagtctattatattcttcaaaatatgaccatgcatcgcgagtcttgggcttttgtcttcggcgttatgggcaacatcatctcctttggagtgatccttgctccattgccaaccttttaccaaatctacaagaagaaatccactgaaggtttccagtcacttccttatgttgttgcactgttcagtgcaatgctttggatttactatgctttcgtgaaaagggaaactgccctacttctcattaccattaacacatttgggaattgtgtggagtcaatttacctttctatcttcctaatttatgccccca

SEQ ID NO: 28411 - DNA, 391 bp, Glycine max
agggagagccaacagtgaagagaatggcttccaagggtgtaacctttctggctgtgttaatatgcgtttcagcactgtcactgagtccttatgatgccggggaagggcaaaataatgggcccgttgtgaacttctacacggaatcatgccctcaagctgaagacatcatcacagaacaagtcaacgcttttctacaagcgccacatgaacactgctttctcctggctcaggaacatcttccatgactgtgctgctcacagttgtgatgcttcactgttgctggactccacaagaacgatcttgtctgagaaggtaacagatcgaagctttgggttgagaaatttcaggtacattgagaccatcaaagaagctttggaaagagaatgccctg

SEQ ID NO: 28412 - DNA, 239 bp, Glycine max
gggggccgtgtgtggaagagttgccagcgtcaggaagtcaggaacaacttgacttcttctccttcttcttcttcttcttctctttggacagaacaacaactcaactcatctcacgattcattcagctttttaaatgaataaaattcctttcttccttacaatcacaatgctcttctaccctttaaacccaacattacacccctcttgctttctttctttcctaatactaatatttggta

SEQ ID NO: 28413 - DNA, 426 bp, Glycine max
gggttgttaaaggagcagttgatgtacacattggtgcaaacccttctgctgagggtggaggagaagatgagggagttgatgatgcaactgttaaggttgttgacattgttgacacattcagacttcaggagcaacccgcattcgataagaagcagtttgttaccttcatgaagaggtttatcaagaatttgactcccaagctcgatgcagagcaacaggagttgtttaagaagcacatcgagggagcaactaaatacctgctctctaagattaaagatttccaattttttgctggtgagagcatgggtgatgatgcttgcttggtctttgcctactacaaggacggcgctgccgatccaacattcctgtactttgcatatgccttacaggaggtcaagtgctaagtgacttaatgtaccgagctat

SEQ ID NO: 28414 - DNA, 320 bp, Glycine max
cacagcaatcaagtaagcactacacaaccacactcactttttctgctaaactaaacaaaaatgttatcctccggtagaaattgctccttcaaatatcctggcacctacttcacgagggggaatgcctcacatcatactaatactatactctgcacaaactcattttgccccaaatttgctgaccccaattacccttttggaaaaaatgcacggagtactcattcttttcaccatgcccacaaacttgacctctttgtattccaaatcaacactagttacactcaatttcccatcccatttgcaccctttaattctcacta

SEQ ID NO: 28415 - DNA, 304 bp, Glycine max
  modified_base (65)..(65): a, c, g, t, unknown, or other
  modified_base (271)..(271): a, c, g, t, unknown, or other
ggctcttctcatggtcaatctacagataagccaagggaacatattgatgagactaccactctcanagaccttgatcttaactttgtctttcgccttgaatagtcttggtttcaagagcttatatggcaacttggtagagattgtgagttcctggaagcaaagggaatcatggattacagtcttctaattggcctgcatttctgtgatgatagctcagttgatgaaatgaaaagttcacctcgcagttctcattcaggcaagagagacatgnctgataatgagatgctcacatgctggtaagttc

SEQ ID NO: 28416 - DNA, 174 bp, Glycine max
acagggggggctatattgtaactgaagagctcccttcagggaatttctggtttctgtaatatacctactttcgctttcaaatgattcctcctctctatcttccaggccaaaggatgcatcttggagttacctctatggcaacaacaccaccttgagtgtaacaagccttaatcc

SEQ ID NO: 28417 - DNA, 238 bp, Glycine max
atagtttcaatcaaaaacaaatctcatctcactgtcatccaattccaagaatatatctttacaaggcattcccattctaaaagaggggaatattcaaaggaaaaaaaagagtatttttttaacaacaagagctctcctcaatcttatcttatatcacaaggaaggtacgtcataatcttaacttcctcaccgttgttactttctcactcaattcatttctgaattctattctcataaa

SEQ ID NO: 28418 - DNA, 265 bp, Glycine max
gcgtccgccactcgttcgacattcgataagacgacatattgttgaggctgcattgtttcaaacctggtggaggtgaaaagacccattttattgtaatgtataattagtgttgctcgtagttccattttcacaatagttttgtcctctattgtacttcttatgggttatttatttataaattattgttaacttattttctattctattcctgttatacatcctaatcttaagtttttcttttctattaaatagttttggtttttat

SEQ ID NO: 28419 - DNA, 374 bp, Glycine max
ggagaagaagaagaagaagaaaagaggggtcttcgaagaaaccatgagtatcctctctctctaaactctctcagattcgatcctctcttctcttctttcaattccgcttccctcgcactaaatgacagggtttcctggccctcgccgcgatcacgcttcttcttcctcctcctcgcacaattccaacagcagtggtagcaacgtatttaatttgcttgcaaggagggagatctcaccccgaacaagatatgtggcaaaatggcattggggagaacccggtgaagcttcaaaatcaaagtctattccttattctcgtcctaaaaaagaagttgtgagagatgcaagacgtggtctcctctcatgggttgaggctg

SEQ ID NO: 28420 - DNA, 413 bp, Glycine max
  modified_base (354)..(354): a, c, g, t, unknown, or other
gatggtgatgagcggtttattgagcctacaccaaaatcactggaaaatttaaccctgcaatctgttaaggatgcagtgatgaatcaattttttggtgataacatggaggtatgcattgtaggtgacttcactgaggaggacattgaatcttgcattcttgattaccttggcacagctcaggccacaagaaatcatgaaagagagcaaaaattcaacccacccttatttcgaccatctccatctgatttgcagtttcaagaagtatttttgaaggacaccgatgagagggcatgtgcttatatagcaggaccagcgccaaaccgttggggttttacttgtgatggagtagacttngtagagtcaattaataatgcatcaataatcaatgatgatcagtcaaaatctgatgcaca

SEQ ID NO: 28421 - DNA, 415 bp, Glycine max
ggaagtgaagtggctgcaatggcttcaagtcaggaagaggtgacccttttgggagttgtgggaagcccatttctacacagggttcagattgctctcaagttgaagggagttgaatacaaatatttggaagacgatttgaacaacaagagtgatttgctcctcaagtataacccagtttacaaaatgattccagtgcttgttcacaatgagaagcccatttcagagccccttgtgattgttgagtacattgatgacacatggaaaaacaatcccatcttgccttctgatccctaccaaagagccttggctcgtttctgggctaagttcattgatgacaagtgtgtggttccagcatggaaatctgcttttatgactgatgagaaagagaaagagaaggctaaagaagagttatttg

SEQ ID NO: 28422 - DNA, 410 bp, Glycine max
gaggttgatgggcatgaaagcaacctagattctcaagctgaagatcgtgaactcaaagtccagcttttgcgcaagtatagtggatatctagggagcctcaagaaggaatttttgaagaagaaaaagaatggaaagttgccaaaggaagctcggcaacagctacttgattggtggaacaggcattataaatggccatacccttcggaatctcaaaagcaggcacttgcagaatccacaggcctagatctgaaacaaatcaacaactggttcatcaatcagagaaaacgtcattggaagccttctgaggatatgcaatttgccgtgatggatgcaactaactactacatggaaaatgttatgtgcaagccatttccaatggatggcatgcctatgcttctttaactcaatcc

SEQ ID NO: 28423 - DNA, 412 bp, Glycine max
ggatggcacacgttgacgccatgacttgtgggttgccgacatgcgccacatgcaatggtggtcctgctgagatcattgtgcatggcaagtctggcttccacattgacccttaccatggtgaccgtgctgctgatctccttgttgacttctttgagaagtgcaagcttgacccaacccactgggaaacaatctcaaaggctggtctccagcgtattgaagagaagtacacatggcaaatttactcacagaggcttctcactctcactggtgtctatggcttctggaagcatgtgtctaaccttgaccgccgtgagagccgccgctatctcgagatgttctatgctctcaagtaccgcaaattggccgagtctgtgccccttgctgttgagtaaactgaggatgaagagttgga

SEQ ID NO: 28424 - DNA, 288 bp, Glycine max
ccggactctgaattcccgagccgacctacccgaccgttccgagaagacaacagaaggggaggaccgattgaaagatgtgtgatcgggcctttgggatgaactatgtattctctatgtgtggtccgttcgctttaccacaatcctaattttacgatgctcgcataccacgatctatctcttacatgaagacaactactttcaaattcctacctttcttactattacgaccgaacacataaaagcttatcgaaactaaattttttagaatggcaataaatgttcgatata

SEQ ID NO: 28425 - DNA, 410 bp, Glycine max
acaaaaggggcggacagtttgtaagattgatgaacgggccttttggatgaactatgtattctctatatctggtccattaacaataccacttgggtatcctaagatgatggctatccatgatcttgactcaaaagaagatgatgactctggtattcctacctttcttactctttctagtgaacacatcagtgatgatggaatatatcttcttgagaatggacatgattgtttgatatatgttggagactctgtgaatacagacatcgtgcagaaactgtttggtgttgctacagatgacaaagaccctaccctgtttgtattgcagcaatacgacaatccactatgaaagaagttaaatgaagtggtaaatgagatacggcggcaaagatgttcctacttccggttcaagc

SEQ ID NO: 28426 - DNA, 412 bp, Glycine max
  modified_base (8)..(8): a, c, g, t, unknown, or other
  modified_base (374)..(374): a, c, g, t, unknown, or other
gatagttntatataataataagggggtggcaacagaacacacagctctcacttccttttgccacattacacaagaactctccaaggatcctccttcccacgaaattcatttggtgggaaaatccaagaagagggtggaatttcaagccagggaagatggattatttcaatgcaccaggaagaaaccatctctttgttccggggccggttaacatcccggaccagatcattcgggccatgaacagaaacaatgaggactaccgttctccagcaattccagctatgaccaaaacactgcttgaggatgtcaagaagattttcaagaccataactggaatcccatttctcatccctacaactggtactggtgcttgngagagtgctctcacaaacacactgtctcctggggatcg

SEQ ID NO: 28427 - DNA, 388 bp, Glycine max
ggtggcacacatctatacttgtgcagaagaagaaagatccatgaactaacattcccacacgctcgcttcaccatatttgccacccttttaaccctcacttcttgggtttattttgctccttttttttttccttgtttggggtttgcatttttcctggttgaaaaagggaagaacttgaactaattggttaagttacctatctatctatctatctaaggtataatattttatatcagttattaaaggaaagaaagaaagaaacgaagatgggaaggggtaaggtacagctgaagaggatagagaacaagatcaatcgccaggtaactttctccaaaaggagaagtgggttgctcaaaaaagctcatgagatctctgtactctgtgatgc

SEQ ID NO: 28428 - DNA, 378 bp, Glycine max
  modified_base (195)..(195): a, c, g, t, unknown, or other
gcacggcaacagaagaataatcgagacacagatcatggtgatcattttttaatttctcagatttatccgacgtcgctgcagatccaccaaccgttatggctgccttcagcggtgatgaaacggcaccgtttttcggctttcttggcgccgcagctgccctcgtcttctcctgtatgggagctgcctatggcacancgaaaagtggcgtgggcgtggcttccatgggtgtaatgagacctgagctggtgatgaagtcgattgttccttgtgtcatggctggagttttgggcatttatggccttattattgctggtattatcagtaccggtattaatccaaaggccaaatcctattacctctttgatggttatgcacatc

SEQ ID NO: 28429 - DNA, 89 bp, Glycine max
  modified_base (23)..(24): a, c, g, t, unknown, or other
  modified_base (49)..(50): a, c, g, t, unknown, or other
  modified_base (76)..(77): a, c, g, t, unknown, or other
ggagacttctcaggtcagggcgnngggctacccgcgtgagttggaagcnnatatcaaataagcgggaaggagaaannaaaaaaaagacg

SEQ ID NO: 28430 - DNA, 415 bp, Glycine max
ggatggtgctggtcgtgtcgggaagatgctctttgctcgccaaggaaagaaatttgattatgacctcaaacagctgcgcttcacaggtgatcttctcatggagttgggtgctggagttgaactcgctactgctgcagtgccgcatctctttcttccattggcttgtgctgctaatgtactcaagaatgttgctgccgtaacatcaacctcaactcgcacaccaatttataaagcctttgctaaaggagaaaacataggggatgtcactgctaaaggagaatgtgttggcaatattgcagacctgttaagaactggtttgagcatattgattgccaaaaggaatccatcgcttgtcaccacattttccctcctttcatgtggatatatccttagctcttatagagaggtaaaatct

SEQ ID NO: 28431 - DNA, 365 bp, Glycine max
gagggaaaaatttgcttgaaaaaatttctaatctattctattctatatacaattatgtcttttccatctggtattctgaaaaggctagtttaatttatttgtggaaagagatataaagcaagcaattaataaaaacatgggtaggggaaaggtggagctgaagaggattgagaacaagataaaccgtcaagtgacatttgcaaagaggaggaatggtttgctcaaaaaggcttatgaactctctgtcctctgtgatgctgaggttgcccttattatcttctccaaccgtggcaagctgtatgagttctgcagccgccatagcatggccaagacacttgaacggtatcacagatgcagttatggag

SEQ ID NO: 28432 - DNA, 436 bp, Glycine max
  modified_base (337)..(337): a, c, g, t, unknown, or other
gatgcaacaccagcaacaaaactatccatgtgtggtgcctaacaccaattctcaaagtgaaaaatgcacatatgttggtatggagcagtttcttcacaatcccagcaagttctcctctgatgtccagcctgtactgcaatcatcagggtatacgcctccactatatgctacagcagcagcagcttatatgacctcagcaaatccattttacactaatttgcaggcttcgggtatatattctccgcaatatataggtgcatacccttttagtcccacagctgttcctccatatattgctgcataccctcctcatggttctgtaccacttgttgacggngctactggttctagttttactccccaagcaccagggatttcttctactgcaagaaacatttcacacggagctgaaatgatgcatgcaaacaagtttttt

SEQ ID NO: 28433 - DNA, 419 bp, Glycine max
gagcttcagtgtctgcgtctcttcctcctctctctgcatcgctgcgttttccgaatcgaaaggtgaggttagtaagtaacaatggtggagaaggccaagggtaggaaggaggaggttgtcactcgagagtacaccatcaacctccacaaacgcttgcatggctgcacatttaagaagaaggctcctaaagcaattaaggagataaggaagtttgctcagaaagcgatggggacgaatgatgtaagagtggatgtgaagctcaacaaggctgtgtggagccaggggatccggagcgtcccaaggaggattagggttcgcattgctcgcaagaggaacgacgatgaggatgcaaaggaagagctctattcccttgttactgtcgtcgaaatccccaaggaggagctcaaaggtttggaaac

SEQ ID NO: 28434 - DNA, 434 bp, Glycine max
gggcttacacttgtaaaaaaaattcacagcagcctaatcagcaagcaggaattggcactaataatccacagattccaccacctctgcagccgtcaccaccttcatcggtgacgacaggtatcggaggtagtgactatattcaaggctctatcagaccaggatcaatggctgatagagccaggatggccaagatacaccaacccgatgcagcactcaaatgtccacgatgtgaatccacaaacaccaagttttgctactacaacaactacagcctctcacagcctcgccacttttgcaagacttgtcgtcgttactggaccagaggaggtgcactcaggagcgtgccagttggaggtggctgcagaaggaacaaaagaaacaaagggaacagtgctagatcaaagtctcctatgaaaccttcagcaagtgctaat

SEQ ID NO: 28435 - DNA, 341 bp, Glycine max
gagagcgaagagtgaagagaatggctcccaagggttgaacctttctggctgtgttaatatgcgtttcagcactgtcactgagtccttctgttgcgggggaagggcaaaataatggccttgttatgaacttctacaaggaatcatgccctcaggctgaagacatcatcacagaacaagtcaagcttctctacaagcgccacaagaacactgctttctcctggctcaggaacatcttccatgactgtgctgttcagagttgtgatgcttcactgttgctggactccacaagaaggagcttgtctgagaaggaaacagatagaagctgtgggttgagaaatttc

SEQ ID NO: 28436 - DNA, 372 bp, Glycine max
accctttggaagaacaccacagaggggaatgtttgtttttcttctggcagatggcgccccgcgcttgatatttatcatctcccagcttatacattgacttcaacccaacactactaatacactgcgcctgactcacttggaaacctaacctatggctttttttttttgaatatataatttaaggattgttgcgcgcatccatgaagtggagttagcatatgcatatggcgacggtagacctctgcattaagattagcgttctgtgtgctgaggtaaacactgtatccatccatcatacaggaaatagagagacttcactaagattagctcgcgcatgtggttcaaaccatcacaagccttggctgcacacac

SEQ ID NO: 28437 - DNA, 418 bp, Glycine max
tggggagccagagtgaagaacgaagaggatggcttccaaagggttaatctttttggctgtggtatgcttctcaacacttgcacttgagtcgtgtcttgcggaggataatggacttgttatgaacttctacaaagaatcatgccctcaggctgaagacatcatcaaagaacaagtcaagcttctctacaagcgccacaagaacactgctttctcctggctcagaaacatcttccatgactgtgctgttcagagttgtgatgcttcactgttgctggactccacaagaaggagcttgtctgagaaggaaacagatagaagctttgggttgagaaatttcaggtacattgagaccatcaaagaagctttggaaagggaatgcccaggagttgtttcctgtgctgatatcctcgttctctct

SEQ ID NO: 28438 - DNA, 419 bp, Glycine max
ggagcgaagagtgaagagaatggctcccaagggttgaacgtttctggctgtgttaatatgcgtttcaacactgtcactgagtccttctgttgcgggggaagggcaaaataatggccttgttatgaacttctacaaggaatcatgccctcaggctgaagacatcatcacagaacaagtcaagcttctctacaagcgccacaagaacactactttctcctggctcaggaacatcttccatgactgtgctgttcagagttgtgatgcttcactgttgctggactccacaagaaggagcttgtccgagaaggaaacagatagaagctttgggttgagaaatttcaggtacattgagaccatcaaagaagctttggaaagagaatgccctggagttgtttcatgtgctgatatcctcgttctct

SEQ ID NO: 28439 - DNA, 207 bp, Glycine max
gactgcaaccgagtaattggaaacaccatgaacttaaagctttcgggatatgtgatcaatgtaaatgtgtgtaagatctaacgggttgtgctcaactaaagatgatcctgcaagagtgtacttactgccagttatatgaaccatctgtagatgaaaggtatccctgtttgatgcacattcacatgtgaagttgtgactatgacaaat

SEQ ID NO: 28440 - DNA, 235 bp, Glycine max
catatcagccatggatgtggaacgtgcgaaaccacgaagtgaaaccattgcctgaaggataacttcatccttccaaaatctatctctaccgatttactacttgctattcgcctctcaaaaacaccagcctgctctagtatgcaagcttgcgtaccatctctcatattatcgtgctatcaagctattctccattatcgaagatcacggcctaatacatattgcttaaaaaatagct

SEQ ID NO: 28441 - DNA, 386 bp, Glycine max
gagggtgagagagaattatcaaaggtgaaacgaagaagccctaactacgcacgcattcgtgagaaaactcaatattcgtcgctcatggcactctcttctcgtctcttttccaaatccaaattgatctatggcagtcaaatacttctacaaaaggagcatgctattccagttcgtcactttgctaaagagtctgcccctcctgcccttaagggagacgagatgctgaagaacatttttgtggaggtgaagaacaaatttgagaccgccataggaatattaaagaaggagaaaatcaccattgacccagaagatccagctgctgtttctcattatgcaaaggtcatgaaaacaattagagagaaggcaagcttattgtcggagtccca

SEQ ID NO: 28442 - DNA, 400 bp, Glycine max
ggagagaaatgagtgaagaagccaaaaagaacttcgccggagctctaacggcgaggcccaactccgatgagccgaaaccggcaccggtgccagctgttcccccgaagaaggtcatcatcaagagcgctgatatgatccccgacatgcagaaggaggccgttgatatcgccgtcgccgcgtttgagaagtacaatgtggagaaagacgttgcggagcagataaagaaggagttcgataagaggcatggccccacgtggcactgtatcgttggacgtaattttggctcatatgtgactcatgaaacaaaccactttgtttatttctacttggatcagaaagcggttttactctttaaatctggctagccttattgtggtagcaaagaagttgagatctatgg

SEQ ID NO: 28443 - DNA, 413 bp, Glycine max
  modified_base (60)..(60): a, c, g, t, unknown, or other
gatgtagataaggatgttgatgacgcttttgccagttgaagttaaagaacagcgcctcancaatctgctgcaggcattgatggttgcagcttgtgttgctgctatgcctctcttgaagaagataccaacctcagtgctttggggttactttgctttcatggcaattgaaagcttgcccggaaaccagttttgggagagaatactatatcttttcactgctccaagtcgaagatacaaagtgatggaggaacaccatgcagcctttattgagaccgtgccattcaaaacggttgccatgtttaccttattccagacagcttacttgcttctctgctttggtctaacctggataccaattgctggggtcctattcccattgttaatcatgcttctaatcccagtacgccaatatt

SEQ ID NO: 28444 - DNA, 384 bp, Glycine max
  modified_base (374)..(374): a, c, g, t, unknown, or other
ggtaatgagattgagcaagggtatttttgaaattgagacactaaagaggattaaaattgtacgttgggcgaaaaatgagaatcgagggatgatctgtaattttgttgttgggtgagtgtgttgatcggattggaggcaggcaaagtgcaaatcaagcgattatcaatctttggggtacgaaatttgatgtttgttgagcttttatgaatcacaattaaatgcgtggtgtgatctgaaaaggcaaaggagaactaaaaaagtgtggaatcaattgaaatcaggcggtgctgttgaattctgcaatggcatcagcagcgcctaatgtcgatctcttcgatgcctattttcgccgtgcagatttggatcgagacggncgtatcagcg

SEQ ID NO: 28445 - DNA, 400 bp, Glycine max
ggagcaagagtgaagagcgaagagaatggctcccaagggtttaatctttttggctgtgttatgcttctcagcactgtcactgagtcgttgtcttgcggaggataatggacttgttatgaacttctacaaggaatcatgccctcaggctgaagacatcatcaaagaacaagtcaagcttctctacaagcgccacaagaacactgctttctcctggctcagaaacatcttccatgactgtgctgttcagagttgtgatgcttcactgttgctggactccacaagaaggagcttgtctgagaaggaaacagatagaagctttgggttgagaaatttcaggtacattgagaccatcaaagaagctttggaaagggaatgcccaggagttgtttcctgtgctgat

SEQ ID NO: 28446 - DNA, 423 bp, Glycine max
gaccaacaacacgtagtattattggattgatttctccctcttcgctctctctcagtgaccagagacagatgatgatggagatggcgaagcgaaacgctgtcgttgcggcactcgcggcgttggtgctactcgcggcgagtgtggcggtggatgctcaggagaactcggacgtgaagacgctggtgaagtacaagcacgggaagaagtactgcgacaaaggatgggaatgtaagggctggtcaatttactgttgtaacctcaccattaccgattatttccagacctaccagttcgagaatctgttctccaagcggaactcgccggtggcgcacgcggtcggattttgggactaccactccttcatcgccgccgccgcgctttttgagccggaagggttcggcaccaccgggaacaagacgatgc

SEQ ID NO: 28447 - DNA, 389 bp, Glycine max
aaaaaagaggttgttgataaagcaaaagagtgtgattgaaacataaattttggactttctttgcatttggcagccacccccacaacgaaataaaacaaaacaagcacacaaccagagacacacacgcatagagagagacggagagagaagcagaggaagaaggagaagaaggagatcttgagagatcaggtcgcaactcgtcatggggagagaagttacaggaatgcaagttgtggacaagaagccaaatggtgttataccaccttcaaatggtagttctaatgataaagtatgcttttctcctaaaatggaagcagctaacgttcacgcgaaggatcacaaggtaaatgaatgtaccaaaactaactcttttgaggagaaaagccatg

SEQ ID NO: 28448 - DNA, 241 bp, Glycine max
gtcttgtgcgtttgtttaacaactactcgatgacctgtgacacaggggaactaccttgaaaacccattgtagaagtacacaggtgcatggtacattaaaaaaagagaggagcctaagagttgaagcagccacaaaggagcttggagttggctagaaagggaagaatggctctttatgatgatcatcattgaccctgatataccagaactttgctatgggcttttatgttatgtgtctgact

SEQ ID NO: 28449 - DNA, 117 bp, Glycine max
tttgtgacaatgctgctttcaatgattctggggagtattttggaaactgacaatatgcgatgtactagtaccgtgatttaaccataacgtctacagaaattttacgcaaatttctgt

SEQ ID NO: 28450 - DNA, 414 bp, Glycine max
gggatggtctgcgtccaaaaaataaggggcgtgtacttgttctggctgctacaaacaggccttttgatcttgatgaggctgttattaggaggcttcctcgacgattgatggttaatttgccagatgctccaaacagagaaaaaattctcagagtcattttagtgaaagaagatttggcacctgacgttgattttgaagcaatagctaatatgactgatggatattctgggagtgacctaaagaatctgtgtgtcacagcagctcactgtccaatacgagagatcttggagaaggaaaagaaggagagaagcttagctttgtctgagagcaaacctttacctggattgtgtggcggaggtgacattcgtcccttaaagatggatgattttagatatgcacatgagcaggtgtgtg

SEQ ID NO: 28451 - DNA, 415 bp, Glycine max
ggacaagaatttgtcaagggacaacctcattttcgatttgagaccataccagatgggttgcctccatctgacaaagatgcaacacaaagcattgcatcattgtgtgatgcaactagaaaacattgttatgagccactcaaagagcttgcgaagaagctcaatgcttcacatgaagtgcctttggttacctctatcatctatgatgggctaatgggctttgcatggaaagtggcatgggatttggacatttctgaacaacaattttggacagcctcagcttgtggtttaatgggatacttgcaatttgatgagcttgtcggaagaggcattattcccttccaagatgaaagcttcactactgatgggtcattggatacaaatctatactggatatctggaatgaaaaatatgcgaa

SEQ ID NO: 28452 - DNA, 432 bp, Glycine max
ggaacaaagtgatgatgattattctctgtcagattctgatgagactggtggactgatgcatgggcagagaaacataaacatgcttcagagttgcagaagtgtgtgcgagtttgagatgattaagaagataaacgaaggaacttatggtgttgtctacaaggctagggataagaagactggagaactagtggcattgaagaaggtaaagacgaacatagagagggatggctatccgatgtcatccttgagggaaataaacattctcttgtcttttaatcatccctccattgtgaatgttaaagaagtagttgttgatgattttgatggtacttttatggtaatggagcacatggagtatgaccttaaggggctgatggaggttaagaagcagccctttagcatgagtgaaattaaatcgttgatgcgacaact

SEQ ID NO: 28453 - DNA, 434 bp, Glycine max
  modified_base (30)..(30): a, c, g, t, unknown, or other
ggatgtggaatgtgggaaaccacgaagtanagtttgggcctgaagtgggagaagttgaacctttcaaaaactatctttaccgatatactactccctattcggcttccaaaagcaccagccccctctggtatgcagtcaggcgtgcctctgctcatatcattgtgctatcaagctattccccatttgtgaagtacacgcctcaatacatatggcttaaagaagagctggcgcgggttgatagaaagaagacaccttggctcattgtgctcgtgcacaagccactctacagcagcaacgtagctcactacatggagggtgaagccatgcgatcagtttttgagacatggttcgtccaatacaaagttgatgtcatctttgccggccatgtccatgcttatgaaagatcatatcgatactccaatatagactacaac

SEQ ID NO: 28454 - DNA, 439 bp, Glycine max
  modified_base (18)..(18): a, c, g, t, unknown, or other
  modified_base (49)..(49): a, c, g, t, unknown, or other
  modified_base (95)..(96): a, c, g, t, unknown, or other
  modified_base (109)..(109): a, c, g, t, unknown, or other
  modified_base (119)..(119): a, c, g, t, unknown, or other
  modified_base (130)..(130): a, c, g, t, unknown, or other
  modified_base (147)..(148): a, c, g, t, unknown, or other
  modified_base (185)..(185): a, c, g, t, unknown, or other
  modified_base (207)..(208): a, c, g, t, unknown, or other
  modified_base (234)..(234): a, c, g, t, unknown, or other
ggatctctgggagtattnggctttcaacactggagaacgctcgaatacnagttgtacgtttttgggctgggtctagtctaatgcttcagttacanncctactgttcttncctttcatanatagttttctnttgggccttcgcctatnngttgtgttccgtcattcagattattcaatgtttatanatcaagagtaccgagagtggtnngcagcattctggcctgatgtccattnttcgtgtcattattgcactgatagtgtcacagatagttctgatgggactccttaccactaaagaggctgcttcatcaactccatttctaattgtactcccagtactgacgatatggttccatatatactgcaaaggccgtttcgaacctgcatttgttagatatcccttacaggaagcgatgatgaaagacacattggaacgagc

SEQ ID NO: 28455 - DNA, 373 bp, Glycine max
gggagcgagagcgagaaacaaaaacctatttttattttctctcttcatatcacttaaactgagactggatgcttctgtatccatcatattatatgatgattattgaattgattatgcgttcagatttcacttcaagatcactttgacagtttgacttgtccggcaccaacttctggtattactattgtctgagttctcaggagttctttcacagaaagtagatgggttctagaatcccatctcataagcttagcaatggcctctacgtatcaggacggccggagcagcccaaagaaagaactccaacaatgacatcaacagccgtgccatataccggtggagacataaaaaagtctggagaattggggaagat

SEQ ID NO: 28456 - DNA, 422 bp, Glycine max
tgatgaactattggttctggacatgccacgtgaaatgagattcgcttctggtgcaatgatgttagaatatggaaaagcagttcaagagagtgtatatgagcagcttcgtgttgttcgtgaaggtcaacttcgtatcatattcactcaagacttgaagatattgtcttgggagttctgtgcaaggcgccatgaagaacttcttcctcgaaggttggttgcaccacaggtcaaccagttagttcaggtagctaaaaaatgtcaaagtacaattgctgaaagtgggtctgatggggcttctcaacaagacattcaaacaaacagcaacatgttgttgacagctgggggtcagcttgcgaagattttggagatgcaatcactaaatgagttgggcttttctaaaagatatgtgagatgtttgcaaa

SEQ ID NO: 28457 - DNA, 206 bp, Glycine max
tcataaaccacaacttcatatcatattcactcaagacttgaacatatccaacttgtaattctctacaaggctccattaagaacttcttcctcacaaattggttacaccacatatcaaccaattatatcagctaactaaaaaatttcaaagaacaattcctcaaaatccatctcataaaacttctcaacaaaacatttaaacaaaca

SEQ ID NO: 28458 - DNA, 442 bp, Glycine max
gattctaagagggagatggacatccttgctgcattggatgagatgaagtcaatgaagtctaggcatgcaactgtcagtgttgatgaaatgctggaggctctgcagcgcacagcagctgacaaggagaaaaggctggaagaagaagacgaagctctgataaaatcagttgtctttcataattcagacggttttgtcagaagaattcgtgatgaagatattgaaacagaggaggaattggttcagttttcaaatggacatggcgaaacatccagttctaatcctaagaggcaaaagatttcagaagattttccaagcaaaccaactgacactttgacaaaagccagtttggatgattatggcaaacaagaaaattcacgcagtggtggaaagcttaattctttagtgaggatttctgtcattaagaaaccagtgacctcagatg

SEQ ID NO: 28459 - DNA, 291 bp, Glycine max
  modified_base (202)..(202): a, c, g, t, unknown, or other
  modified_base (253)..(253): a, c, g, t, unknown, or other
ccttctattctcttcgtttcactctaaagacgtgcgcttggggctgctgcggctgtttcattgagcagcaaagtgcctctttttttacggaaagaacggttctggaaatggatccgcttcttcatcatcatcatcatcatggatttcaggagctcttgctcttcctgccgcagcttacatgttccaagatcaggaggtgcangcagctgagctggagcgcactttcattgccattaagcctgatggagtgcanagaggcctgatttctgagattatatctcgttttgagcg

SEQ ID NO: 28460 - DNA, 326 bp, Glycine max
cgagaaaaaagtggaattgctggcgtctcgcaaaggccacacacaccgcaaatacaataacactccatcttacaaaacaaagacttcgcgtccaagcaatttctgagcgataacaaaacaaaacaaatattatcaaaaggggcatactttgaaaccaaaatcagattttattttttatttttatgctgaatctgaatagatcagacggtgatgtcgagttcgtcgtcatatgggtcggaggaagacgatgagggattcgactcttaccggaaaggatgctactacgcctgcagagtcgccgatcagttcggcgccggcaggtacat

SEQ ID NO: 28461 - DNA, 419 bp, Glycine max
gtagataaagctgatgttttggtgcagaatagtttgttgcaggcattaagaacaggaaaattttcatattcgcatggaagggcgattagcatcaataacactatctttgttgtaacctcaactgtctgtaaaggtaatgactcttttgttttggaagagtctaagatgttttctgaggaaagaatgcttgaagccaaaagatgccaaatgcaattattaattggacgtgcctctgaggatgccaaaagaattggtggcacaaatgttaaagttgtacccagaaaagggttttccaaatcatcatctctgaacaaaagaaagcaggctgatattagtgactccaaggagggagcaacaagcaagatgcagaaacaagacagcgaggcatctcgatcctttctagatctaaatatgcctgt

SEQ ID NO: 28462 - DNA, 114 bp, Glycine max
cgaggaagggcgtagtaagcgacgaaatgcttcggggagttgaaaataagcgtagatccggggattcccgatataggtcaacctttcgaactgctgctgaatccacgggccgac

SEQ ID NO: 28463 - DNA, 414 bp, Glycine max
gaagtgtgagtgatatttgagctgaaaccctagccgctcttctcttcattcttcactttggaaacaatcataatggcgttctgtaataaggttggaaatgtcttgaggcagggtgctgctcgcagcacacatgcccctgttgcgtccatgcttaattacatccgctgcatgtcttcaagcaagcttttcattggaggcctttcatatggagttgatgaccagtctcttaaggatgcattttctggctttggagatgtggttgatgcaaaagttataactgatagagacagtggaagatcaaggggatttggatttgtcaacttctccaatgatgagtctgcaagttcggcactctctgcaatggacgggaaggatctaaatgggcgaagcattcgggtatcctatgcaaatgat

SEQ ID NO: 28464 - DNA, 402 bp, Glycine max
aaaccgagaagaagaagatggagatgtatcagatctggagcaggagaatagcgttgggagcgttcgcgtttgttctgcttttcctatcggcctcagcagacgacgtcgttgtgctctctgaagataacttcgagaaggaagttggtcaggacagaggagctctcgttgagttctatgctccttggtgtggacactgcaaaaagcttgctccagaatatgaaaagcttggtagcagcttcaagaaagccaaatctgttttaatcggcaaggttgactgtgatgagcacaagagtttgtgcagcaaatatggagtctctgggtacccaacaattcagtggtttccaaaaggatctcttgaacccaaaaagtatgaagggccacgcactgctgattcacttgctg

SEQ ID NO: 28465 - DNA, 428 bp, Glycine max
caatgggaaacgagaaagcaaattgtttctgggaggcagaattacctccaaattatgatagagttggaattgagaatttcattcgtgcaaagtatgatgaaaagagatgggttccaagagatgggaattcaaaaacaccttctggatttcgggaagagaaaagtccttcacattggcagaggcctgtggagagaagtggttatgccgctgtttctgaaaataaatttgaggaaaggaagaaaatccaaccatcaactgcaattcctgccgcaagaattaatgttcctgctcctcccagagcacctgagcaggtaactcctattaccaaacctcagcatgtggagaaagtggaatcagtagcaccacaaccacaagctccccaaccactaactgaaacatcaaagcaagctacagacacaggtaaaaat

SEQ ID NO: 28466 - DNA, 431 bp, Glycine max
gaaccctcaacatattcactaagatttatttccttgattttattcatttaatgatttgttcctagtctttatcttataataattttcgcattgcttgcccggtaattcaagatcaacttggaaaatttgcaagatttgggatgaaatctggtcggatcttgctttgtgggatggggattttggtgggtcttatttcaatacaaagctcttcctcttcctcttccaaaaatcccatctctttctcttttttttcatcataacacaaaacacaaaacataaacctttcttccaaccaacccttttttccaattctttgtttcttccaaaatcttcaatccaatttttcaccttttcacaaatggggatggctgcagcggagtcacagtttcatgtcttggctgttgatgacagcatcatagataggaaactca

SEQ ID NO: 28467 - DNA, 412 bp, Glycine max
ggcacaaaaatacaatacaaaacaaaacagagcaaagagagagtgtgtgaaaagtgaaacaaaaaacagaacaacaatggcgacacttaaggttcctcagcctcttccccccgctgcagatgattgtgagcagctccgaaaagccttctcaggttggggaactaacgaggagctgattgtatcgatcttggctcataagaatgctgctcagaggaagcttatcagagaaacttatgcccagacctatggagaagatctcctcaaggccttggacaaagaactcacgagtgattttgagaggctggttcatctttggacacttgattctgctgaacgtgatgcatttttggcaaacgaggcgactaaaaaatggacttcaagcaatcaggttctggtggaaatagcctgcact

SEQ ID NO: 28468 - DNA, 357 bp, Glycine max
tgatcatcatggtttcagtagtctctacaagcaagtcactgagcttaaactactattcaaaaacatgccctgatgtggaatgcattgttgccaaggcagtgaaggatgccactgctagggacaaaactgttccagctgcacttctgcgaatgcacttccatgactgtttcgttcgggggtgtgatgcctctgtgctgctaaattcaaaaggaagcaacaaagcagaaaaagatgggccaccaaatgtttctttgcatgcattctatgtcattgatgcagcgaagaaagcactagaagcttcatgcccaggtgtggtctcttgtgctgacatccttgctctagcagcaagggatgcag

SEQ ID NO: 28469 - DNA, 438 bp, Glycine max
gggtagatgaggtgaaatgagagcattggtgagagttgagagagagtgagttatgttatcaatgttatggtgaaagtgaaaccacaagcaaagctgaaagagaagctattcagtgattttgattcagatcgtgtctgtgtctacaaccatgtacagcggctccagcgacggcgaaagccatgacgctcctcaaaatcagaggaaaattccgcctgcatcctccatgctatgggtccgcaatcttcgccgtttcatcggatccggcgccggtctcggatccgaagccctgatggagcttgaaactaagagaattttgctcgacatttttaaggaaaagcagaagaaaaccgccgaagctgctacaattcccactttctacaagaagaaacctgaagatggatcaatcagtcatagagttcagagattggcaaagtatcg

SEQ ID NO: 28470 - DNA, 405 bp, Glycine max
gtgggtaattatgaatggtaccaaaaattggattgggaagttcaatggcgaaaaaaaagagattccttaactcgttatttaattcgaattggtgaaatgatggaatccataaaaattattcaacaggctttggaaggaattcccggcggaccatatgaaaatttagaaattcgctgctttgatagagaaaaagagccagaatggaatgagtttgagtatcgatttattagtaaaaaaccgtctccgacttttgaattgccaaaacaagaactttatgtaagaattgaagcccccaagggagaattgggaatttttctaataggggatcaaaatggttttccctggagatggaaaattcgtccgccaggttttatcaatttgcaaattcttcctcaattagttaaa

SEQ ID NO: 28471 - DNA, 348 bp, Glycine max
gatgcaatgatgcagttgaaaaacgagatacacacagtggctgttggatctgctataggtcaagcctgtttgctactttcagcagggactcctggtaaacgctttatgatgccacatgctaaagccatgattcagcagcctcgtattccttcctctgggttgatgcctgcaagtgatgttcttattcgtgcaaaggaggtgataattaacagggacaatctggttaaactacttgccaaacacacgggaaattcaaaggaaacagttgctaatgtggtgaagagaccgtattatatggatgccacaagggcaaaggaatttggggtcattgacagaattctttggcgt

SEQ ID NO: 28472 - DNA, 391 bp, Glycine max
gatagtagaaggtcaggtggtgattccagaaaatcttcatctaattcaagaccatccaaaactttgtttgttataaattttgatcccgttaatgccaggacaagggatctggagagacattttgattcctatgggaaaatattaaatataagaatcagaaggaattttgcttttattcagtttgaatcccaggaggatgctactagagctttggaggcgaccaacctgagcaagtttatggaccgtgttatcactgtggagtatgccataagagatgatgatgacagagacagaaggaatggatacagtcctgatagaagaggccatgactctcctgatgggagatatggtcgtggtagatcccccagtccatatcgtagaggtaggggta

SEQ ID NO: 28473 - DNA, 430 bp, Glycine max
cacgtgaagctgcaatacttccatgtttcaaaagacttgagctggggccaaggcattggaagtcctaaattccctggagtgccttacacttctcacacagagacaagggtgtaaggtttctctgtaccaagatgctcatgtcccagacaactttgtccctaaaataccacttgctggaggccacacttaccaacctcatagatgttgggaagatgtttttgatgcaatcaataacgcacaacacttgatatacattacaggatggtctgtttacactgagattacgttggtaagagattctaggaggccaaagcgtaggagatgcaacacttggtgagcttctcaagaaaaaagcacgtgatggtgtcagggttttgatgcttgtttgggatgatagaacttcggttcctttgttaaaagaagatggctt

SEQ ID NO: 28474 - DNA, 410 bp, Glycine max
gaagaagattttggttgacggaggacaagctaccatgtcggacatggagtttggaacttatccctttgttacttcttctagcccatcaactggtgggatatgcactgttcttggtattgctccaagggtacttggtgatttaataggagtggtgaaggcatacactacaagagatggttctggtcctttttcaactgaaattttgggttcaggaggtgacctactcagatttgctggtcaggagtttggcacaactactggccgccctcgacagagaggctggctcgatttagttgcactgaaatactcttgtcagatcaacggtttctcatcggtgaatcttaccgaggtagatgttctatcacatcttgaagaaatacagataggtgtctattacaaacttgctgatg

SEQ ID NO: 28475 - DNA, 384 bp, Glycine max
gatggcagaggctgcgcagagtttgaactttgaacgttgaaggaacatagaggcagaggtttttcttctctcaccgtagaatcgaatcgagttcactttgatcgtgtgtgtctccgatcttcaaatccgcaacaaccatggtgaggggattgctcaacaagctcgtctctcgctccctctccgtcgccggaaaatggcagcacaaccaactccgccgcctcaacatccacgagtaccagggcgctgaattgatgagcaaacacggagttaatgttccgagaggcgtggctgtttcctctgttgaagaggtcagaaaggccatcaaggaccttttccctaatgaaaatgagttggtggttaagagtcaaattttaacccggtgga

SEQ ID NO: 28476 - DNA, 416 bp, Glycine max
gaggccaagagcttggaaaattagcctcacaaaagcaaagatcaaacaaaccaaggacgagaacacgatgttgcttgaacttgcacttggtttattggttttggctctgtttctgcacttgcgtcccacacccactgcaaaatcaaaagcacttcgccatcttccaaacccaccaagcccaaagcctcgtcttcccttcataggacaccttcatctcttaaaagacaaacttctccactacgcactcatcgacctctccaaaaaacatggtcccttattctctctctactttggctccatgccaaccgttgttgcctccacaccagaattgttcaagctcttcctccaaacgcacgaggcaacttccttcaacacaaggttccaaacctcagccataagacgcctcacctatgata

SEQ ID NO: 28477 - DNA, 431 bp, Glycine max
  modified_base (417)..(417): a, c, g, t, unknown, or other
ggagagagagaagggttagaagggtgaagaagcatgtcttcactcaagaagaagaaaccctattacccgcttccgttaattcctatctagtactactactttacttctgattcaaaagggtgatcttcttcttcttccaagcttatcaattatcatgcatatgctactttcttctctcttctcggggaattgaagcgttgtggtccgattgtttgctagatcaagcaaattaacctatatactggtctatatcatcatcaccttgcacctctctctctctctctctctatatatatatatatatatatgtgggtttaatctcttactttctttatcttttcacttttttcagttttggtttgatttaattacttgattaaaacttacatatatggatctgaatatatagtacgtggntttcgagcttggtg

SEQ ID NO: 28478 - DNA, 362 bp, Glycine max
attcgtcaatattgctggaaattgcggacatatgtggccaatatggttcattggtcccaattgcggtcacagagattccgaaaaccttgacaatgtgaccaaaattgttgtcatggattgttattttaaaaccttgactagaaccctagaagacagaccccgactatgttaatgagcagctgctgcaggtattcaaaatctgaatgtgatgggaaaggaaatcagtcgtggtaggaagtaatttatcaacaattaacatttggtcaattaacacgttgtgtcagctcttgctttggaccacacgggatcaagagtgctttctggaagctatgactatatggtacgaatgtatgattttcaag

SEQ ID NO: 28479 - DNA, 410 bp, Glycine max
  modified_base (29)..(30): a, c, g, t, unknown, or other
  modified_base (203)..(203): a, c, g, t, unknown, or other
  modified_base (215)..(215): a, c, g, t, unknown, or other
  modified_base (269)..(269): a, c, g, t, unknown, or other
  modified_base (279)..(280): a, c, g, t, unknown, or other
  modified_base (322)..(322): a, c, g, t, unknown, or other
gtgacaagaagtggagtgaggagatatgnngtactgcaaaacacgcttccacgccttggtgttcttctcaagatacttctgtccatggaacaaagtacgagaaagggtggagaaagatagtgcgaagggaacatatcggcgtcgtttacaagagcttcgcgaccgcgtcaccaatagagaaccatcgctctcaagaaagattncgcctcgagcanggaggacgaaggcgttcccacgcaccgccatttcgcgagatttcttctcctcanaagagatgcnnagcataggaacaattgttaaggttgcagggatgtagtacacnagtgaagaagcgattgtatctggtttttgagtatctggacttggatctaaagaaacatatggattcatctccagagtttgtgaaagat

SEQ ID NO: 28480 - DNA, 378 bp, Glycine max
gggagttactgatattgggttggccaagattgctgtcgggtgtggcaaattggagaggctgagtttgaagtggtgcttggagatttctgatctggggattgatcttctttgcaagaagtgcttggacttgaaatttctcgacgtgtcctatctcaaggtagcaagcgaatctttgagatcaatagcttctctattaaagcttgaggttttcattatggtgggctgctctttagtggatgatgttggattacggtttcttgaaaaaggatgtccactacttaaggcaattgatgtaccaaggtgtgattgtgttagctcatccggtttaatatctgtaattagtggacatggaggtcttgagcagttggatgcgggata

SEQ ID NO: 28481 - DNA, 436 bp, Glycine max
agactcaaagggtttgattgttggttcaagaaaggcttgacttcaacacttcaagcagccttgggctcatgagcatgagcctgtaggcagtctcttagaagctgttaaggtaatcaagcctacagttttgattgggtcatcaggagtgggaaaaacatttacaaaggaagtaattgaggctgtgacttctataaatgaaaaacctcttgtcctggctctctccaatccaacttcacagtctgagtgtacagctgaagaggcttatcaatggagtgagggtcgtgcaatttttgctagtggaagtccatttgatcctgtagaatacaagggcaaagtgtactattctggccaggccaacaatgcttacattttcccgggctttggtctggggttggtaatctcaggagcaatcagagtgcatgatgatatgcttcta

SEQ ID NO: 28482 - DNA, 379 bp, Glycine max
  modified_base (88)..(88): a, c, g, t, unknown, or other
ggagacagaaaagaatgagtacggtgggagaagggaaggtgagtagtaatggtcatggatgttgcaaatcagggccagactatgcttncccactggaagccatttctggtcccagagagtctctcatttatgtaacctctgtctacacagggaccggaatagagaagccagactatttggcgacagcggatgtggatccaaactctccaacttattccaaagtcatccataggcttcctgttccttatttaggtgacgaattgcatcacacaagctggaattcatgcagctcttgccatggagacccctcagcagaccgacgatttctcatcgtacctgcactcgtatcacgtcgagtatatgtggttgatgtgaaaac

SEQ ID NO: 28483 - DNA, 407 bp, Glycine max
  modified_base (351)..(351): a, c, g, t, unknown, or other
ggaggagactgagaaaacagaagaaaacaaaatggaagacacagtttctgcgttgaggtctttgatggtttctcactctccgccgctggatgccttaatggtgccctctgaagattatcacctgagcgaatatgtgtctgcacgagacaagcgccgcgaattcgtttccggcttcactggaagtgccggcttggcacttataacaaagaaagaagcactgctgtggaccgatggaccgtattttttgcaggctgagaaagaacttagtgctgggtggaagctaatgcgaattggtgaagatcctgctgtagatatctggatggccgataatttgccaaaagaagcattcgntggggttgatccctggtgcatttcaattgatactgctcaaagatgggagcgtgctt

SEQ ID NO: 28484 - DNA, 328 bp, Glycine max
acctgtccttggcaagctagagaatctgaggggtgttgctcttcataacaacaacttctatgggtcaattccaccagagttgggaaattgcactgaattggacggaatatttttacagggtaatcaccttagtggagcgattccaagtgaaataggaaacctttcacagcttcaaaattaggatatatcaagcaattcccttagagggaatattcctgcatcactagcgaaggtgtataatctcaaaaatgtcaaagtatcaaccaattttctggtcggacctataccttgtgatggtgtccttgacaactttactggaagctccttt

SEQ ID NO: 28485 - DNA, 409 bp, Glycine max
gcagcaacagcaggtataaattgattgatccagccagccaaaagcataattatctttttttttgttttctttaaccaaacaagactgagaaaaagacaagataaacatccattcttgttttagcaaagtggtatgtagataatctataattagcaaaatattatacagagagcatgagcgaaagattgattgtgcaaaagcttccaacattttcttatacaaagaaagacacaattccttagaaaataacaattgggggtacaaagtacaattcaggctttgtttttttctagtagataagctcgggtaagataaggcctggaaattgaaacattaaaagaaatgtgtaagggaaaggacaatgccaagtgtagcgaaggagtacccaaaatttgtaaacataaatact

SEQ ID NO: 28486 - DNA, 360 bp, Glycine max
gagggcgactataagttagaacaaaaggccaatgctgcggtattatatgaatagcttgaccgtagctactcaactttttgaagattataatgctgatcctacacaaatagcacatatggaggatgggcgctcaacagtgattgacaaaagcgaatcacgtaagcacttcgagctgcatggtggtgaagaaactggtaagaaagacactgaatgtagcgatttaactaatgcccgctataaaggaacaagcagtttcttcaaatgttcgaattgcttgataagtagctaacgagatgcacactctcaacaagttgtatgttcacacactacacatgatgctgaaacaccttgtatcaccac

SEQ ID NO: 28487 - DNA, 425 bp, Glycine max
ggaagaggaacgaagcaatcgcaagtcgtctgttgtgtcccgcgggagcagacgacctgtcttcatcgccaaacaacctcaaaaacattcatcaacgttcactattaatccatccatcattaagtaagaaaataaggttcgatttttttatctttgttttgcttctgatccatcatggaggtgccgagttcctgggatgcccttcgcaaacaggcaagaaaacttgaagctcagttggatgagcagatgaattcttatcgtaaattggtttctaataatgtttctacaaaagctgacgctgcagagagtgatctagagtcttggattgagcgtttactaaaacaactccaacaagtaaacacacagatgcaagcttgggtatcatctggtggttcagaaatggtttctcatactttgactagaca

SEQ ID NO: 28488 - DNA, 420 bp, Glycine max
  modified_base (338)..(338): a, c, g, t, unknown, or other
gggaaggaaggtaaaggaagcaaacgcaagagcaagagcaagagcgaaagcggcagagaagatggaaggagaagagggttctcagcagccacagttggtgctcgcggacaagctattccttctccggcaacccgatgtgcaagacattgacaaggttcgctacaaagaggatgtcttcactcatgtcaaggaaaacgatatggtccctctgtacgaaaccctagtcgctgattccgtgttggacttggatcgtgcccttttggactctatgcgcgctaaaattgacgacgagctcaccaagctcgacgaaaagattgctgatgccgaggaaaacttangagagagtgaagttcgtgaggctcatttggcaaaatccttgtttttcatcccgattatggacaaggagaaagccttggaaca

SEQ ID NO: 28489 - DNA, 429 bp, Glycine max
gccaccgaaagggatcacaaaaggggattggtcctttctggtttggctttctttaccgaccccaaacattttttttggggtaaaattactggttctactcaacaatcagcaatcagcgatcagcaatcagcaatcagcatcattacttttccttgtagccatgtcaatttgttttctgtttcaaaaaccaatatgtctttctctttttctagcgtttttcttattttcctgaagtagggaatttgcagttttgttctattttcccagtgatttataatcaaaaagcgagggacagacacacagaaggtgttatcttgaatcataaaacatgatgctaaaaagctcttcaacaccagttgttggatacctcctctcttccttcacagatagccctaacaacaatattcactcagaaacctgtcatgcact

SEQ ID NO: 28490 - DNA, 424 bp, Glycine max
gaagccattcaataatataatggtgattcttcatgttaaatctttggccttctgattaaccttgcaacttcgagaaatttcaaccacctctctctcccaaaatctcagagtgggctgcttcagtgtctgcaggtatcaaagatggcaacattgactgcttcaagtaacttagtctctagaaattctcatgtccatcatggaccaacaactgcttcatatgagtctaaagcagtagcaatgggacttagatctctaaagcagacaaatactcatagtggacttagaatttttaacccggtggatgagctacttaacagaaccccaattaaaaccaatgcaatgcaagctatgaggaagggacctcaaggcaagaatgcctggcctaaaggtataatcacatgtggcatgactttcataattatag

SEQ ID NO: 28491 - DNA, 410 bp, Glycine max
ggggtggggcgtcgtagggctttccagttgtgtgctctgccaatgataattggtgcttctatgagtgcagcaacaaacaacttgtttggcatgcttgtaggaaggttgtttgttgggactggcttgggcctgggccctcctgttgcctctctgtatgtgacagaggtttctcctgcttttgtgcggggcacctttggagctttcatccagattgcaacatgccttggtctaatgggagctttatttattggaatccctgtcaaagaaatttctggatggtggcgggtttgtttttgggtatctaccattccagctgctatacttgccgcagctatggtcttctgcgcagagagtccgcattggttatacaagcaaggaagaactgcttgagcagaagctgagtttgagag

SEQ ID NO: 28492 - DNA, 412 bp, Glycine max
gatccacatctcaaatcaaaagccgaatattctaatttcaccgcttcgaaatccattctttattgccaaaattttgaaaccctaatatcccaatttcgctggtgatctttccaaagcgtcatcaaaccaaacaatttttcgtcatatctgtctccgcaaggagagtcgctttgacgggaagcaaggatttccgctgcaattggaatcgtcggatcaattcgtcatgaagtttctggagtgttctgccttagatcggcttaacgatttcttgggtaatttgaatctgggagaacgtactatcaaaggatgccttgaagcctatagttgcaaacatgctggatcggataaaaaactctctatcagtttggagacagagattcttgattatcttgggaaatcatccgacactgat

SEQ ID NO: 28493 - DNA, 395 bp, Glycine max
  modified_base (37)..(37): a, c, g, t, unknown, or other
agaggggatggacaagaatggtatgttggaaagctcnaaagaaatgctgaagggagaatgaattgaaacaacgatttgagcagagcatgaaagaagctgctgataaatatcaaggggcaaacttgtatgtcaaaaatttagatgatagcctcggtgatgataaacttaaggagctgttctccccttttggtaccataacttcttgcaaggttatgagagacccaaatggcataagtcgtggatcaggatttgttgcattctcaactcctgatgaggcatctagagcactcttggagatgaatggcaaaatggtggtaagcaaacctctgtatgtgactctagcccaacggaaagaagataggagagctagactgcaggctcagtttgctcaaatg

SEQ ID NO: 28494 - DNA, 367 bp, Glycine max
  modified_base (208)..(208): a, c, g, t, unknown, or other
ggtgactgctggaggaagctttagccgtggctaggcaagaactgcactcactcactctcgattcaagttgctcaatgaaacgaaacacagagaacacaatgcttcgaaacgacgacgttcgcatcgtttcctcttccatcaaaatccctcttccttccatttccaaacaccctacctgtcctctgcgaaccgcgcactctcacattgncaacgccacaaactcgattgcgcaactcattaactcgttcacctctcactccgccgagttgactcgctccgtgatacagaaatcgtcgctcctgtgctcggcgacgctgtccttaaccggcgaccggaagagaaaatgtccgattcggcgtctggcgtc

SEQ ID NO: 28495 - DNA, 425 bp, Glycine max
cttaataaagtgatacaggagcagaataacatgcttgcaaagaagatcaaggagaaagaaaaggttgcagcgcatcaagcacaatgggagcatccaaaccacggagttaatgcatctttcttgctaccgcagccacttttgaacatgggtggcaattaccgtgaggaagcatcagaagtagggaggaatgaacttgacctgactctggaaccattatattcctgtcaccttggatgcttttgaatactttctttgaggtggatgatattatatagctttggtatggcatttgacaacatatttgagggcttatatatgcctctatgttttaggggtttccctactctgcaaacgttaatgtttattgggtgttggaagtttataatttggtcacaaggctaagctttcttaagtggaagctttgc

SEQ ID NO: 28496 - DNA, 283 bp, Glycine max
ggcatgtgtgtgcatgaaggaaaagcgaacagaaggggatgcatgggactgatgctgtcgactctaccttcctcgtcagaagagcctctgtttcactatctcgcggaggatactgaactggggatgtactatctcaagggatcatgccctcaagctgaatacatactaaactaacacgcgaaggtgctattcctgcgccacttgatcactgagtggtcctgaacaagaaacatgacacacgaccgggccttgctgaataggcttgctctactgccgctctact

SEQ ID NO: 28497 - DNA, 377 bp, Glycine max
gcaatcgagaagaagaacaagaagcagatggtgaagtatgagatctggagcatgagaatagcgacggcagtgtttgcgtttgctctgatggttccatcggactcagcagacgacgtcgatgtgctctctgaagataacttcgagaaggaagctggtcaggacagaggagctctcgttgagttctaagctccttggtaacacaccaatcttatcgatctatttctctctgtgtatatcagacaattcgctattccatcgttactttgatttcttgaaatcgctattaaggagggcttattattaaccgagtctgatgttatactttatagactatgcctgaacagattgcatgagctctttgcgtgtaacggctcaac

SEQ ID NO: 28498 - DNA, 382 bp, Glycine max
ggataagaaactgcgagaagaaaggaaaaggttcaatttttacccttttttcttcccagaagcgatctctgaagccgacccattttggaattcggaaaacccagtgctgatcgctctctgggtgttcccaaaatgaagcttcggagatcttcgctgtgcgtctttctagggtttctggtgctgttcctttcgccgccgccatctatggcgaaattcgtggtggagaagaacagcttgacggtgacgtcgccggacgacatcaagggcacgcacgatagcgcgattgggaacttcgggataccccaatacggtggcagcatggccgggaacgtgttgtacccaaaggacaacaaaaagggttgcagggagttcgatgagtatg

SEQ ID NO: 28499 - DNA, 420 bp, Glycine max
gcagatattgaagtttaaaccagacttggtaatcgcagagaagggtctgagtgatttggcttgccattatctcagcaagcatggagttagtgcaatcaggaggctgaggaaaactgataataatagaattgcaaaggcttgtggtgctgttattgtgaatagaccagatgaattgcaggagtctgatgttggtaccggcgctgggttatttgaggttaagaaaattggagatgagtactttgcatttattgttgattgcaaagaacccaaggcttgtactgttctactaaggggtgctagtaaggatctattaaatgaagttgaaagaaacctacaggatgccatgtctgttgcaaggaacattataaaaaatccaaaacttgttcctggaggtggtgctacagagttgacagtgtcagc

SEQ ID NO: 28500 - DNA, 424 bp, Glycine max
ggaaggaattggaattagaattgtaaaaaggaaaggggaaggaagcaaggcaaggaaggagagtggatcgattcctcagcagcaccagacatttataaaagctctttcccttccctcaaatcgctcatactcttccaatctttttttttttttttttttacctttctccctcgctcaataatacaaaacaaaaaagaagaagaagaaggttttcgcgatggcatcgaaacggatcttgaaggaactcaaggatctccagaaggatcctcctacctcttgcagcgccggtcctgttgctgaagacatgtttcactggcaagcaacaattatgggtcctccagacagtccttatgctggaggtgttttcctagtcactattcatttccctccagattatcccttcaagccacccaaggttgcattc

SEQ ID NO: 28501 - DNA, 418 bp, Glycine max
gtctccaagtttgacaagattgggggggagaaatccactgtcccttgtgaaactgctgaggccataaaaaaaattttgactcacaatggaaagggaatcaagttccaaatcctttcaaaccctgaattccttgctgagggaactgcaatccaagatcttttcaacccggatcgagtcctaattggaggcagggagaccccagaaggccaaaaagcaattcaaacattgaaaaatgtgtatgctcattgggttcctgagaagaaaattctaaccacaaacctctggcctgctgagctatccaagcttgctgctaatgcctttttggcacagagaatttcatctgtgaatgctatgtcagcactttgtgaggccactggggcaaatgtcacacaagtttcctatgctgttggcacagaca

SEQ ID NO: 28502 - DNA, 450 bp, Glycine max
  modified_base (9)..(9): a, c, g, t, unknown, or other
  modified_base (50)..(50): a, c, g, t, unknown, or other
  modified_base (86)..(86): a, c, g, t, unknown, or other
  modified_base (150)..(150): a, c, g, t, unknown, or other
ggttctagntgtatttgtgattgttgtgacctcgttctgtcttgcggcgntattcttcttctttgtggtgtttggtgtttgttttnttctctcaaacctgaaaatggtcttgctgcggtggtaacctcgtggttgcggaagccgcctgcnaagtgcggcaaccggctgcggaggctgcaagatgtacccagacttgagctacaccgagtcaaccaccaccgagaccttggtcatgggagtggcaccagttaaggctcaattcgagagtgctgaaatgggtgttcccgctgagaacgatggctgcaaatgtggagctaactgcacctgcaacccctgcacttgcaagtgaggtgttggagagctaaagcttcaagcagaaatggcccttagaaataatgataaaaactatatgtagtttcaaaaacttcaaattatgtagtatgtattatg

SEQ ID NO: 28503 - DNA, 436 bp, Glycine max
  modified_base (397)..(397): a, c, g, t, unknown, or other
ggactgacgatgaactgaagaaactatatgaaacccatgaaaggctgctagaccttgtttcattgttttgttatgttccaagaacaaagtatctacctttgggcccaataagtgccaaactcattgacatctatcgtacacgccacaatattagtgcatctactggtttgagtgatccagctgttgccactggtatatctgaccttgtctatgaatcccaaccaccagctgctgagcctgatacacttgatgatgacctagtaaatgcttgggcagcaaaccttggtgatgatggcttatgggggaacaacgcaccagcaatgaatagggtaaatgaatttctggcaggtgctggaacagatgccccagaagttgatgaagagaatatgatctctangccttcagttagctatgatgatatgtgggcaaaaacact

SEQ ID NO: 28504 - DNA, 400 bp, Glycine max
  modified_base (67)..(67): a, c, g, t, unknown, or other
gcagatattgaagtttaaaccagacttggtgatcgcgagataacgggctaacaagttccgcatgtcnctgggtcttccagtggcggcgacggtgaactgcgccgacaacacgggggcgaagaacctctacatcatttcggtgaaagggatcaaaggccgtttgaaccgtcttccctcggcctgcgttggcgacatggtgatggccaccgtgaagaagggaaaacccgatctgaggaagaaggtcttgccagctgtcatcgttcgccagcgcaagccatggcgccgaaaggacggcgtctacatgtacttcgaagataatgctggtgttattgtcaatcccaagggagaaatgaaaggttctgctatcactggtcccattggaaaagagtgtgctgatttg

SEQ ID NO: 28505 - DNA, 411 bp, Glycine max
ggatgcaaagaaatgggcgcaggttattgcttttcgctttgccatccaaggccacataaacccaatgctccaactcgcacagatccttcactcaaagggtttttccatcaccatcatccacacaacttttaactcgcccaacccttcaaactaccctcactttagcttctcttgcatccaagacaacttgtccgaaaccgagacctcggcctcggatctcttgaatttcatcgttgcactcaacgttaagtgtctggtgcctttcaaagattgcgtggaaaagctactaagtgatgtgtccgaggaagctgttgtttcgtgcttcatctcagatgctttgtgttacttcactcaagcgggtgccgacaaccttcagctgcccaggattgtgttgagaactggtggagtttc

SEQ ID NO: 28506 - DNA, 420 bp, Glycine max
gagagaagagaggagaaagcaatgggcattgatagtgaatacgtgatatctcacaaggcctatgcgagggtgggattgcttgggaacccgagcgatgtctactacggcaaaacgatagcgttaagcgtcgccaacttgttcgccaccgtcacgctgcgttcctgcgaccagttaatcctccaaccccaccccctacacgatctccttcatttctgatcgctccctcaattggtcaacaggttgagctcccaaggttactatggaggcgtgcgattgcttatggctatttgcaatgtcttctacgcgtattgcagaaagaacgccatcgatcttggcgacgacaatatcactctatgctacgacaccaatatccctcgccaggctggtctttccggatctagcgggatcgtgtgtgctgcg

SEQ ID NO: 28507 - DNA, 417 bp, Glycine max
gggggattttgagttacaacatttgccagttggagctagtgacgctgatcttgaagagcgtataatccaacacttagcggctgcagcagcgatgggaagagcacgccacattgctagaagagaaggccagagaaacaggtcatcagctcaaggtcgcccacattttttggttttttcaactaatcctaattcacctcccatggctcctgcttcttcctctccatctcagaggggggatgatgaaccaattcctacaattgctgttgccaatctgtctccaactcctgcaactggagaagaatcatcacagctgactttagttccgcctattcaagcagaacaggtgtctgcttcaggatctggatctactgctcttgctacagatcatcagggatcatcttacaacaataggagatc

SEQ ID NO: 28508 - DNA, 287 bp, Glycine max
gagtgggagaaggaagaagattgacagagagagagaggaaggagcgcgaaaagactaaattgaccttggatcttcgtctttcctctctctccgattcgtttttcgttggtcttctaaaagcttcttccaccatgaacagcaaggccaacgtttccaaagagctcaacgccaagcacaagaagatactggaaggacttcttaaattaccagagaatagggaatgtgctgactgcaaagctaaaggtccaagatgggctagtgtaaatcttggcatctttatatgcatg

SEQ ID NO: 28509 - DNA, 362 bp, Glycine max
ggtgaccgtgttgattaacttcacacttcactctctagtcatggcttcttctcttcctcttctcaaccttcttaccctcgctctgtcactactcttctgcattgccttaacttccgaggttggcgtgcaggcgcagatggaggagacaggcttgaacctcatgtcggaggcgttggagtggccaaccgcaatgtcgctctacgacgaagacagcgaagaagaggatgtccagaacggttacagtcggagatcgttgttctggcggaggatgaagtactacatctcctacggcgctctttccgcgaaccgaatcccgtgcccacctcgttctggtagatcttactacacccacaactgctaca

SEQ ID NO: 28510 - DNA, 351 bp, Glycine max
gagagagagagagagaaagagagagagagagaggttaggctatggctgatgagagcgtcgttgagtccccagtgaagaggcagagagatgatgatgaagaaaatgaggtctctgtttccatggatgtggagggtggcaaagaccctcttggtaacggtttatcatctgtgattcctgggtggttctctgaaattagttcaatgtggcctggagaggctcactccttgaaggtggaaaagattttgtttcaaggaaagtctgaataccagaatgtcatggtcttccagtcatcaacatatggcaaggttcttggtttagatggagtaattcagcttacagaaagggatgaat

SEQ ID NO: 28511 - DNA, 268 bp, Glycine max
  modified_base (202)..(202): a, c, g, t, unknown, or other
gggatgagtccagctttcaatctttatgggtgtgcattaattgtgcttgctgaatggaagcccccagtatatgataatacacgtggtatagttcttgtaactgctacaacacgccgtaattcaccaaataatttggattcgaagattcatcacaataaccttctcaataacatacttgcaaagattgaaggcaataatgcanaagcagatgatgcaatcatgctcgaccaagatggttatttatcagaaaccaatgcaactaacattt

SEQ ID NO: 28512 - DNA, 458 bp, Glycine max
gcactatatccagtttcaaaagagcagctgtacagagagatcgtagatgacttgcgtgggggcgatccatgcattggttcaggatctcaggtggcatgccaagagacatattgaactttgggtgctattttttaaagtccaactttctttcttcatgtttttttatttttttttattgttttatatctattttatgttattttatattattttttttaaaaatttttattgttttttattttattattattaatactttattatttcttttcataattttttttatttttttttttacattcttttattattttttttttgttattttcattatttttctttattttttttttctgtattataattatacttcttttttttctataattctatttattttttttttttatatttttattttttaataattgtttttatactttattttgttttttttt

SEQ ID NO: 28513 - DNA, 304 bp, Glycine max
gaatgttgaatccaacaggcgtgctcttagggagctgcttttcaccgctcccggtgctcttaaatatctcagtggtgtcatcctctttgaggaaactctctaccagagcacagctgcaggcaagccctttgtggaagtcttgaaggaggctggtgtgcttcctggcatcaaggttgacaagggcacagttgagcttgctggcactaatggagaaaccaccactcagggtctagatggccttggtcagcgttgcgccaagtactatgaagccggtgcacgttttgccaagtggcgtgctgtgctg

SEQ ID NO: 28514 - DNA, 314 bp, Glycine max
gaaaataatagaagaaaaatttttgaataataattaaaaaattccttcatatttttagagataggagacaaaatttacatggatatagtaagtcttgcttgggctgctttaatggtagttttttcattttctctttccctcgtagtatggggaagaagtggactatagggatactcaaaattgagttaagggatcaaagtacccattttgttttctacttgggtttttcaatttcttaactttaactattgaattaaagtatttcatttatactaattaattgagttcaaatattaacaaatataaaatagatc

SEQ ID NO: 28515 - DNA, 352 bp, Glycine max
tgggggatgagtccagctttcaatctttatgggtgtgcattaattgtgcttgctgaatggaagcccccagtatatgataatacacgtggtatagttcttgtaactgctacaacacgccgtaattcaccaaataatttggattcgaagattcatcacaataaccttctcaataacatacttgcaaagattgaaggcaataatgcaaaagcagatgatgcaatcatgctcgaccaagatggttatttatcagaaaccaatgcaactaacatttttgttgttaaaaagggccgtgttttgacccctcatgctgattacttgtcttctggcattactcgtgcaactgtaatggatt

SEQ ID NO: 28516 - DNA, 330 bp, Glycine max
  modified_base (271)..(271): a, c, g, t, unknown, or other
ttgtgggttgagtccagctttcaatctttatgggtgtgcattaattgtgcttgctgaatggaagcccccagtatatgataatacacgtggtatagttcttgtaactgctacaacacgccgtaattcaccaaataatttggattcgaagattcatcacaataaccttctcaataacatacttgcaaagattgaaggcaataatgcaaaagcagatgatgcaatcatgctcgaccaagatggttatttatcagaaaccaatgcaactaacatntttgtttgtaaaaagggccgtgttttgacccctcatgctgaatactgtctttcctggca

SEQ ID NO: 28517 - DNA, 245 bp, Glycine max
actttaggggggggttgaaagacacagtataaatgaataaaccaacaagcgacgcaattaatatggggaaaaggagcctggagggtggagaagatgatcagtccgaacgaaagaggcctgctcttgccagtgtaattgtggaagctttcaaggtggacagtttgcagaagctttgctcatctttagaacccattcttcgtagagttgtcagtgaagaagaggagcgtgctttggcaaagttaggt

SEQ ID NO: 28518 - DNA, 173 bp, Glycine max
cagggggtttatggagaggtggcggattcgttactttatgcgatcagtggaaggagagagagtctatgaataaaccaccacgcgacgcatttaatcatggtgaaaaggagcctgcatggaggagaatatgatcagacctaacgaaagaggcgctgcatcttgccatgtgtaat

SEQ ID NO: 28519 - DNA, 345 bp, Glycine max
gatgctgccgagcgggtttctcattgtggggttctggagttcattgctgaggaaggcatgatatacatgccatactggatgatggagaacatacttttacaagagggggacattgtcaaagtgaaaaatgtgacacttccaaaggggacatatgttaagttacagccccacacaaaagactttttggatatttccaatccaaaagctatcttagaaacaacattgaggaatttttcctgcttgactactggagatagcattatggtggcttacaacaacaagaaatattacatagatattatagaaactaagcctgacactgccataagcataattgagactgac

SEQ ID NO: 28520 - DNA, 344 bp, Glycine max
  modified_base (336)..(336): a, c, g, t, unknown, or other
ggaaacacagtgtcagaatctgagttctttgaactcaaaccctaaaaaaaacgatgtatcgttttttgtcttccattcgccatggctgtggatcttccctcacatcacttctcgcgccgaaacccacccttccattcgacgccgccctacgatctcgccgtttacctcaaaacgacggacatgttagaggattttcaagctcgaattttgattggaggaatcttattgtgaacgagaatgtgaatgcagatgattctatgcaggatgcagagaacagaaactccgaaaagtggaataatatgaggctgaatatgaatgcagatgcaaaagctcctncaaatttt

SEQ ID NO: 28521 - DNA, 361 bp, Glycine max
ggctggaatcttggccttcacaaagcttactccttatactgctgtcagtgctatccttcctctgtctatcatcattggggcaactatggtgaaagagggtatcgaagattggcgcaggaaaaagcgggatactgaggtgaacaatagaagagttatattgcttaaaggtgatggcaatttcgaatatactgaatggaagaatctgagagtagggaatatagtgaagataatgaaggatgaattcttccctgctgacctcctactgctttcctccagttatgaggatgcagtctgctatgttgagaccatgaacttggatggtgagacaaatttgaagttaaaacaagggctggatgtaact

SEQ ID NO: 28522 - DNA, 294 bp, Glycine max
  modified_base (90)..(91): a, c, g, t, unknown, or other
  modified_base (110)..(110): a, c, g, t, unknown, or other
  modified_base (194)..(194): a, c, g, t, unknown, or other
ccggaccggaagttcccgggtacggacccaacgcgtctcgtacctggcgagaagactgacagtaagggggtgttgtatttttactactannaggaactttgggaactgtnggatgcggtctactaggagctaaaactccatagctgtaggctagaactgcaaggaaatatgattaatggaaggttgatgccttngatggcaattggaactcaaatcgacttcctcagaaagttcctcaacttctgatgtgctcgctaagatgaaaagacactcgacttccgagtgaaggagctt

SEQ ID NO: 28523 - DNA, 326 bp, Glycine max
gccggggcaggcgcacgcacgggtgcagagagacgaccacgatggggtgtggttttacatctggcgaacgaggagaagagaagggataccgttaacgtaggccacaacttgcttggcttgtaggatattgatgttctaaatcaggttgtgttgaggacccaggcctgaaaacctaaacaattgaattgttgtgccatctcacggatgttgattctgaaggaatgtcaccaacacattccgatacgcaattgagaattgaagaacgagctctttccgcatccggtgccgcctttgtgtctgctatcatcgttaatcccctcgatgtc

SEQ ID NO: 28524 - DNA, 300 bp, Glycine max
  modified_base (244)..(244): a, c, g, t, unknown, or other
  modified_base (247)..(247): a, c, g, t, unknown, or other
  modified_base (262)..(262): a, c, g, t, unknown, or other
gacatgagaaatttccattatagcttttccttcataatttctgcttaggattagaattgtagttgctaccatacactgtgtaatagttttgcttggtgaagttcataaggggaccgtgcgtttaatggcgttacctgataattgcagggagcgtgtaacatgaatgcgttacgtaataattgaaggggcgtctaacatggatcggtccaaaatggtaacatcacatgggtctgagaatcagttntgntttattaggtataantatatgatatttgtgtgaaatatcttttagcttttttt

SEQ ID NO: 28525 - DNA, 385 bp, Glycine max
gtagacaagttgtgtagaattggagtgaaaactatattttgcttacaacaagatccagaccttgaatatttcggagttgatattaatgccatacgagaatatgccaagacatgcaatgacattcaacacttgcgtgcggagataagggactttgatgcatttgatctacggaggcggcttccagttgtagttagcaaattatacaaggcaataaattccaatggaggtgtaacatatatacattgcactgctggacttggaagagctccagctgttgcgttggcttatatgttttgggttttgggttataaacttaacgaggctcatacactacttcagagcaaaaggtcatgctttccaaaactggatgccattaaagtgcaac

SEQ ID NO: 28526 - DNA, 268 bp, Glycine max
gaggcgcggcgggatcagcacaagattgcaaaatggagttcaacattgcaaatcccaccactgagtgccagaagaagctggaaatcgatgacgacctgaagcttcgagcattttgggacaagacgatctcccaggaggttcttggtgatgctctgggtgaggagtttaaaggatatggtttcaaaatcaccggtgggtgtgaccaacaaggattccctatgaagcagggagagctgacccctggtcgagttcgacttttgctacatag

SEQ ID NO: 28527 - DNA, 216 bp, Glycine max
gatgtggattaagataaggagaaggaggagaagagaaagaagaccattaaggaggtatctcatgagtggtcattgctgaacatgcataagcctatttggatgaggaaacctgaacagatcacaaaacatgaatatgctgcttgctacatcagtcgaaccaaggtacgggttgagcattgggacgtaaagattctgttactcaattgacaattgaag

SEQ ID NO: 28528 - DNA, 287 bp, Glycine max
gacagcaaaatagaatagaataaaaagggagaaattaaaaaaaaaacttgtttggcttgtaggatattgatgttctaaatcaggttgtgttgaggacccaggcctgaaaacctaaacaattgaattgttgtgccatctcacggatgttgattctgaaggaatgtcaccaacacattccgatacgcaattgagaattgaagaacgagctctttccgcatccggtgccgcctttgtgtctgctatcatcgttaatcccctcgatgtcgccaagacaagacttcaagcac

SEQ ID NO: 28529 - DNA, 231 bp, Glycine max
acgtgtgagtttagtttcgagagggccaccaaaatagcagagaatggttacgtagaaattaaggaaaaaacttatttcacttgaacgatattgatgttctaaatcaagttgtgttgaggacccaagcctgaaaacctaaacaattgaatagttgtgccatctcacggatgttgattctgaaggaatgtcactaacacattccgatgcgcaattgataattgaagaacgagc

SEQ ID NO: 28530 - DNA, 293 bp, Glycine max
ggcacaagtttgttgagatagctagaagcaataagatgaaaatgaaagtgcttgttttgtttgttgctacagttttggtagcatatgaatgccatggctcagactaccagaagttccctctccaaatgaaaactgggtttggtgggcaatacagcaatgaggtggcatgtgccagttggaggcttggcgtggaagcaaacaacgtagtcaagtggcaaactgttcctgcagcttgcggagagtacatagctgactacgttctaggagaccaatatagatcagattccaaaaca

SEQ ID NO: 28531 - DNA, 361 bp, Glycine max
gtacgaatgatacaaatgatagtgattccactataggagaaagttctaataatctcgatgaaagtcaaaaatataagcatttgtggcttgaatgcgaaaattgttatggattaaattataaaaaattttttaaatcaaaaatgaatatttgtgaatactgtggatatcatttgaaaatgggcagttcagatagaatcgaacttttgattgattcgggtacttggaatcctatggatgaagacatggtttctctggatcctattgaatttcattccgaagaggaaccttataaagatcgtattgattcttatcaaagaaaaacgggattaactgaggctgttcaaacaggtactggtcaact

SEQ ID NO: 28532 - DNA, 391 bp, Glycine max
  modified_base (331)..(331): a, c, g, t, unknown, or other
  modified_base (359)..(359): a, c, g, t, unknown, or other
ctaattaaaaaaaaaacaaaaataatttatattttcttaaagaacaaaatgtttgttatgcttaatatctttaatttggtctgtatttgtattcactccgtcctttattcaagtagttttttctcggcgaaattgcccgaagcctacgctttcttgaatccaattgtggatattatgccagtaatacccttactcttttttcttttagcttttgtttggcaagctgctgtaagttttcgatgatatctgtaatttgagtaatgtcttaaaaaaaaattaagaatttatcagaaaactaaaattcgaacattttaaacaattaaaagatcanataagtcttacagtgtgaattatcgatnccaatattgaaatttttggattatacgaaaaa

SEQ ID NO: 28533 - DNA, 421 bp, Glycine max
  modified_base (301)..(301): a, c, g, t, unknown, or other
ggaagaaaagaaaagaaaagaagcagagtggtaaacaaagagaaacaacaaaacccagaatctagagactaataacggctcttgctttgtgaatagcataccatagcaacaacaacaacacagaacacacaaagaaaaaagtacttcccccaaaatcatatattatatattatatgtacatatagatatacatagttttgtgtatattgagattgttgttctctctttcttctatttattcatgtgaaagagagagagagagagagatcttgtgattcttgtcctcctacaatggtcactntgtagcgggactaggtaatctatgcaacaaaattcacttggactcttctcatcgaccgatatttcaactatttttttcctgtcccgttaacgtttcgaataagagcttctttttcccctt

SEQ ID NO: 28534 - DNA, 325 bp, Glycine max
gaaggaaggaaggaagagtgagcgtgaaagatgccttgggcgaggctttcagggtctccaaggctcgacgttgctattgacatgggcaatccatttctcaatctcactgttgatggtttccttaagatcggagctgtcgcagccacgcgatcagctgctgaagatacttatcatattatccaaaagggtaagcaagcatttcacaaattctccaccccatttatttttcatgctattttccttttttctcggagcctaaagaggtaaaatttgattcttataacggtttttatttttactttccttgtttaaattcgggttatac

SEQ ID NO: 28535 - DNA, 281 bp, Glycine max
ggcacaagtttgttgagatagctagaagcaataagatgaaaatgaaagtgcttgttttgtttgttgctacagttttggtagcatatgaatgccatggctcagactaccagaagttccctctccaaatgaaaactgggtttggtgggcaatacagcaatgaggtggcatgtgccagttggaggcttggcgtggaagcaaacaacgtagtcaagtggcaaactgttcctgcagcttgcggagagtacatagctgactacgttctaggagaccaatatagatca

SEQ ID NO: 28536 - DNA, 238 bp, Glycine max
gaccacaaaactactaacagagaaaactttcaatttctggttttctgaatttcggatggttgactctaattttaggagctggaaaaggtactaaatctaaagttggacgaaatgtggatccaaggattcagtttttggatcaaaggtttctctttgctggccttaatatctgtaatttccgctctggaacccgaactgggatcgacccgcgtcgtctttcagacaaagtatggagata

SEQ ID NO: 28537 - DNA, 266 bp, Glycine max
ggaagaagaaggttggttgattggtcccatggaggccgaagagaaaagaaaagatgtttgagccacaacagctatacactcgcgcgaagaccgaggaattcgacctcgaatcaggagaaaccctctacccagggctgagcgtcggcgagaaccagctccgatggggtttcatccgcaaggtctacggcatcctctccgcgcagatcgtcctcaccaccctcgtctccgtcaccaccgttttctatactccaatcaatgacctcctc

SEQ ID NO: 28538 - DNA, 297 bp, Glycine max
gtggttgtgaagtgataacgggtatttctgggtgttctgaagtaattttctttgaatgtgtatcaatggatttgcaagatgactgatgtgcaacaagtatattagaaatttgctttactagctctttcattcttgcagctgattcagtggtttatgatcactcttatattagtgattaggacttctaccatatgttacataataagtgtgaaagttgctctgtgcattatatatcatttggtatgcactgcatgaattagatactgaaacgtatatcgaggtatctgcatattacac

SEQ ID NO: 28539 - DNA, 338 bp, Glycine max
ggagtgagcaggagtgaagagcgaagagaatggctcccacgggtttaatcttttgggctgggttatgcttctcagcactgccactgagtcgttgtcttgcggaggataatggacttgttatgaacttctacaaggaatcatgccctcaggctgaagacatcatcaaaggacaagtcaagcttctctacaagcgccacaagaacactgctttctcctggctcagaaacatattccatgactgtgctgatcagagttgtgatgcttcactgttgctggactccacaagaaggagcttgtctgagaaggaaacagatagaacgcttgggttgagaaatttc

SEQ ID NO: 28540 - DNA, 103 bp, Glycine max
tgtggatctaacaatattcaagaacgaatagggcggcgctcaatattaaaatagatttggctgacttatgctcttcatcactaccactgaatcaacttcttgc

SEQ ID NO: 28541 - DNA, 265 bp, Glycine max
gacggctaaaagctaaaaatgatcggagtactcaaattagcatggctgtcacggttgcattcttgaatttgatcatcatgttttcagtagtctctacaagcaagtcactgagcttaaactactattcaaaaacatgccctgatgtggaatgcattgttgccaaggcagtgaaggatgccactgctagggacaaaactgttccagctgcacttctgcgaatgcacttccatgactgtttcgttcgggggtgtgatgcctctgtgct

SEQ ID NO: 28542 - DNA, 386 bp, Glycine max
ggcaaccaaaatgactcaagcccagattcaaccagttaaacttggaacccaaggctttgaggtttcaaaattgggattcggatgtatgggccttactggagcgtacaatgaccctctccaagaacaggatggcatatctgttatcaagtatgcgttcagtaagggaatcacattttttgatactgcggatgtttatggagccaatgctaatgaacttttggttggaaaggctttgaagcagctgcccagagaaaagattcagatagccacaaaatttggtattgcttcacgaggttttcctgatatgaagatcaagggttcgcctgaatatgtgcgatcatgctgtgaagctagcttgaagcgtcttgatgttgaatacattgatc

SEQ ID NO: 28543 - DNA, 344 bp, Glycine max
gaacaaactaaagagtgaaagatcacgctgaaggatccctgctaattaaattaaagcaacttaattagcagtatagcatgtccaacaatggcagcaacaacccttatgttcaaatttcccctcttcacaccaaccgtccaaagccaatggatacggtgtgtgatgcattaaaccgctgcagcaggaaggttggaaaagcaactagaagagctgagaccatggctgacaatttctggaatcatatcagaattggttctagtcttgctgatgcagcagtggctagaatcgttcaaggaacaaaagtgcttacactaggaggacctgatatattatttcaacaatca

SEQ ID NO: 28544 - DNA, 318 bp, Glycine max
gagctaagagggtggtgagtttcacattcacatagatacatacatcttattttttcattgggaaggaaaactctgagttaagttgcagagacacacgttaaccctgtgtgaagcctctgtgtctccacctgcattattcaacacacagtaacagcactggtagtagtagtagtagtgtttgtttgagagagagagagagagagacaacaagcaacactgttgatgcacagaaggatgaagatagactacacaatctcaagggaggactgatctgaatctgaatctgattcccaccatttactttgtacaggctataga

SEQ ID NO: 28545 - DNA, 281 bp, Glycine max
ggcacacgtgagtttgttgatcgagagaactagaaacagtgtgatgaaaatgaaggtccttgttttcttcgttgctacaattttggtagcatggcaatgccatgcgtacgatatgttccctctccgaatgaacactggctatggtgcccgtactccggaggtgaaatgcgcaagttggaggcttgctgtggaagcacacaacatctttggctttgagaccattcctgaagagtgcgttgaagcaacaaaggaatacatgcatggcgaacaatatagatcag

SEQ ID NO: 28546 - DNA, 316 bp, Glycine max
gggagaggtgaattcgcagacgaacattccgctgccatcgcatctgtaacaatggaagcgcgccatgcaactcttggtcgacgaacgttggaggaaattcggcaaaagagggccgcggagagattgagtaaaacctcttcgggaccagatctcacgcaggttcccagcacctccgagattgcgggaatgagcaagtccgagagcgcaaataagctctctgagacagatcttagtgctctattgtctcaattgaaaggactgcaaaaagaagaacacggaagtggagggaagaaaacacaaaaattaggttaaaagc

SEQ ID NO: 28547 - DNA, 268 bp, Glycine max
  modified_base (243)..(243): a, c, g, t, unknown, or other
ggtgcgagggaggaagaggaaaaagaggattggagggtcgccacgtttagcaacaaccaaaccctctctactctttcttcttctcttcgctaggagcttagcttcttcctcttcacttcgttcttctggcctctacaatgagcaacgacaaggacaccatcaacgtcgctgatctcactctcgctctcaacgaggacaatagagcagaccttgtcaatgctctcaagaacaagatacagactntggctggacagcattctgatattct

SEQ ID NO: 28548 - DNA, 277 bp, Glycine max
gctctctcaattgaagtggctgttgttgacgtctgtaaatccaggattgcagcatggaacagtgaccagctccctatctatgagccaggccttgatgatgtggtgaagcaatgtcgtggcaagaaccttttcttcagcactgatgttgagaaacatgtctatgaggccgacatagtgttcgtctccgtcaacaccccgacaaaaactcgtggtcttggagccggaaaggctgcagatttgacttactgggagagtgcagcacgcatgattgctgatg

SEQ ID NO: 28549 - DNA, 305 bp, Glycine max
gggtcttagaatatgtcagtatggttaggtctatgcaatataggaaattagattttgaggagttttgttctgctgctataagtgtgcaccaacttgagggaatggagacctgggagcaacatgcaaggcgtgcctatgagctttttgaaaaggaaggaaatagaccaattatgattgaggagcttgcctcggaacttgggcttagtccatcagtacctgttcatgtaggacttcaagactggataagacactcagacgggaagcttagtttcttggggtttgttaggcttctgcatggggtttct

SEQ ID NO: 28550 - DNA, 241 bp, Glycine max
gcaccgtggataacaactgtgggagcgggaactgtcgaccgcgatttccctgcttacataaccctcggaacagggaaaacatacaccggagcttctctttatagcggtaaacccttgtcggattcgccgcctcctcttgtttacgctgggaacgcgagtaactcttctgtagggtatctatgtttgcaagattctctgattcctgagaaagtttcagggaaaattgctatatgtgagagag

SEQ ID NO: 28551 - DNA, 305 bp, Glycine max
atcgctttcgtgttttgctagatgagagcaactcattgggtgtgcttggaagttctggacgaggtctcactgaatactgtggagttccagctgagaagatagacattataactgcttctatgggacatgcattagccacagaaggaggattctgcactggaaggacaagagttatagatcaccaacgattgagcagctctggctatgtctttactgcttctttggcaccatatcttgcccgtgctgcaattacagctattgatgtcctcggaggaaatcaccatctgataaatatgctgagaaaa

SEQ ID NO: 28552 - DNA, 406 bp, Glycine max
cccacgcgtccgcccacgcgtccgcccacgcgtccgtccacgcgtccgacagaaggggagggaaaagagggtgcaaggtgcatcttctttttgttgttctctcaaactttaataatctcataaattagcagaacgaagaggaacaaaaacaagaagaagaattggattcgaaaatcgtagcgtagcgttggtgcgattgaacgatacgatgggaagaggaaaattcaagagcaagcccactggtcgccgccagttctccaccccggaagatatgcttgctggaacctctaaccgtcctcgaacttttagacagaaagaagctgagcatgaagaggaagaacccgaagaagtatctggagaataatctggagaagaatctgaagaagaaacttttaagaaaaaagga

SEQ ID NO: 28553 - DNA, 365 bp, Glycine max
  modified_base (304)..(304): a, c, g, t, unknown, or other
  modified_base (315)..(315): a, c, g, t, unknown, or other
  modified_base (320)..(320): a, c, g, t, unknown, or other
  modified_base (342)..(342): a, c, g, t, unknown, or other
aggacccataatgaaaatctcatagtgattctatctcgctcaaacaggattatctctatcctccgatagatgacacatgtgatttatataaaaaaagactcaaatgtaattttgattttcttattttgtttaatccgtaatcttggtcttttcattttaaaataaacatttaatcttttaaaaaattcacaattttagttcttatattttaaaataaagacatttgattcttttattttagaaaattcacaattttgattctcatattttaaaaaattaatgatttcgatgcaatcttcaattntatttaccgtntattntatttatttcttaccatatagntaataaaatcattttttgatgat

SEQ ID NO: 28554 - DNA, 354 bp, Glycine max
  modified_base (321)..(321): a, c, g, t, unknown, or other
gaccacactcttattgttttcttcatatcttccttgtcgctgcccgtgtgtcgccgccatggccaccgtcaccacccaagcctccgccgcaattttccggccatgtacctcgaaatcgaggtttttgaccggctcttccggtaaacttaaccgggaagtgactatgcggccaatggggtgccctccttctgcctctttcaaggttgaagccaagaagggagagtggttacctggcttggcctccccaacttacctcaatggcactcttcctggtgacaatggatttgaccctctggggctagctgaggacccagagaactngaggtggtacgttcaagccgagcttgtgaatgg

SEQ ID NO: 28555 - DNA, 345 bp, Glycine max
ggcagccaaagaaaagaaaatcctcaattttctgagcagccaaacactctctctctgtctctcgaaaattctcagtttgcagagaaaatctgaatcatgtcgtggcaagcgtatgtcgacgatcaccttctgtgtgacatcgaaggtaaccacctcactcacgctgctatcatcggccaagacggcagcgtttgggctcagagtaccgacttccctcagttcaaacctgaggagataactgccatcatgaatgactttaatgagcctggatcacttgctccaactggattgtatctcggtggcaccaaatatatggtcatccagggtgaacccggtgctgtcatt

SEQ ID NO: 28556 - DNA, 406 bp, Glycine max
ggcttagattgaagagaatggctcccaagggttggaccgttctggctgtgttaatatgcgtttcaacactgtcactgagtccttctgttgcgggggaagggcaaaataatggccttgttatgaacttctacaaggaatcatgccctcaggctgaagacatcatcacagaacaagtcaagcttctctacaagcgccacaagaacactgctttctcctggctcaggaacatcttccatgactgtgctgttcagagttgtgatgcttcactgttgctggactccacaagaaggagcttgtctgagaaggaaacagatagaagctttgggttgagaaatttcaggtacattgagaccatcaaagaagctttggaagagaatgccctggaggtgtttcatgtgctgaaatt

SEQ ID NO: 28557 - DNA, 286 bp, Glycine max
  modified_base (145)..(145): a, c, g, t, unknown, or other
gacatacatagaaataaagctgtcttgcttttgggctggctctgttttctcgtctgtctttctttccattttcatctctctgctgcatcagcttgttgtgccacctcaatccccagaaacaacactgcatacccatttcatgctnttctatattcgtcacttcttctctctcttcttttgtccacgctcatgaatatggtcgctgctggtctaaggtgatttctttacgtcatactttgatattatttattatcttggacttgggctttcatcacttttttttttt

SEQ ID NO: 28558 - DNA, 282 bp, Glycine max
ggatcacattcgaaatcatgtgcaaataaaaaatggtgtttcacctgcgaatttgaaagattgatattgaagtcaaaggacacaaaatctgcggtgtctcctatgggcataatctcccatctacagaatattgggagtcagcttgctaatggaagagaagaagatgcacatgaatttcttaggcatgttattgacacaatgcaatctgtttgccttatggaagctggggttaatgcattgggctcattagaagaggacactactttaatgggtcaaacattt

SEQ ID NO: 28559 - DNA, 345 bp, Glycine max
gaaagaacaagttcaagaaacagtaagagccaaggagaaaagaaaaaaaaaaagaactggactccttcaattagtgcattgtttcttttcttcaaattattattatttgtttcatgttatgagaatattatctatgtataaatagatggtagcaagaagacattgttaatttgagagatggcgagttacgaggctattaagaactttgatgatgatgatgatgatgatgatgatgtggagatggcactaccccataaccagatctttgaatcaagatctgccactgtttcttcccccattggccaaactaccccgcttcacattcacaacattattgaggaacaa

SEQ ID NO: 28560 - DNA, 346 bp, Glycine max
  modified_base (320)..(320): a, c, g, t, unknown, or other
ggaaacagagcacaatacaagggaatcaatcctgcgatttcgaagcagaagaaggacaagaacaaaaaacatgtagcatgccataaaagcaggagctcttgttccttgtcatctagaaagaaatactgtagatctgggttagcaatggctcctggaagcagtgttttcaaagaagttcttgaatctcacctgatgtcttcagattatgaaatgggaaaagctaaatctgaggccaagagtaacagtacatctacaaaatctagcattgggttgagtggaaagagtggaattagttaaacaatggcgtgtatgaattactnggatgccccgtttgcaagaatttgat

SEQ ID NO: 28561 - DNA, 367 bp, Glycine max
ggagggttggttcatttgatctgcgagtggagaagagaatcgtgatgggaggaggacacggtcacggcaccacctacaaaggagttaccgttcatcacccaaagcgctggcacactatcaccggcaagggtttgtgcgcggtcatgtggttttgggtattctacagggcaaagcaagacggtcctgttgtattgggctggaggcatccttgggagggtcatcacgatgatcatggcaagggccattaagcattccttaggcatgagctccaagaacaggaagaacaaaatttgaagtgtctgttgctgtgggtgtgctgttagttgaaatgtttactttgatcaattcaataaatttggctgtaaaa

SEQ ID NO: 28562 - DNA, 405 bp, Glycine max
ggctgagaaaattggcatgaaatttgaaacactagtggtgagcgcgcttcatctttttacattccctccattttcatttcacgatttcctccctatcacaatcataatgactaaaagcctcctctcttcttcttctgcttaggattttactctcttcgcaaattcattttctacattcccctctctctcgaatctcaacaatgccttccgaaaccctagaaaaccagaaacctcaagtggaagaccaacaagacctagctgaagacagccacacagagcaggaagataattcggagatgaaggggagatgatggcaaagcgaagaagagaaagagaaaagaggaggaggtagaaggcgatgaaaaaaatgaggagaaggaggaacgtgacgagcttgaatcaaaa

SEQ ID NO: 28563 - DNA, 432 bp, Glycine max
gcggcaacggctgcggaggctgcaagatgtacccagacttgagctacactgagtcaaccaccaccgagaccttggtcatgggagtggcacctgttaaggctcaatttgagggtgctgaaatgggtgtgcccgctgagaacgatggctgcaaatgtggaccaaactgctcctgcaacccctgcacttgcaagtgaggtgttgggagagcaagcttcaagcagagatagcccttaattaggaataatgataaactattaatgtgtagctaaaaacttatgtattatgtctgtgatggttttcgtgcactctggtgttttgtgttaaacaaacatccttagaataaaatggtcatgtctttgctttcagaagttcaagtggttttgacttgtgatgggtggtgtaagctcaatggtgcttctttttttttttttt

SEQ ID NO: 28564 - DNA, 236 bp, Glycine max
gaacgtgagggtgcgtgacaggtgaatgggttcgaacagggcggatgtactaggttcacagagattacaggctcttattcaccatcttcacttttctattccctctgactctaacgaacccaattcaaaatttaccgtttggaagaagatagcagcacttcttatctgggtcttttaaggcgctgattggaatctttgaatattttttaaccaacgggcttttctttttttaatct

SEQ ID NO: 28565 - DNA, 358 bp, Glycine max
ggatgcagtttaacaaagcaaggaagagaaagaggtttggttctctctaaagagtctccgctgaactttttggtttcttgaagatgtcgttactctccgatcttatcaaccttaacctctccgacatcaccgataaagtgatcgccgagtacatatggctcgacggatttgccttgccttttattaacgcactttttttttgttcgatccgatcaaccttctcgatcaagttcccgaagaccagcttcgatttcaagggtataatgataccgtgtttactgtaaatggggttgaatactaaggaaagcttgctttgtgttggaaatttgctcatgtcttggaaacctaaaaatttttt

SEQ ID NO: 28566 - DNA, 291 bp, Glycine max
ggcttcatggatgacatgaacgagttgaggaagaggagaaaaaccgcagacgccgagtgagagccgaaacttctctcatggaatcgcaaacggatctgctgaaccgacccggaatcttcttaattggatcctctaacgtcggcaaacgcactctcctatctcgattgacctctgttgatgttgaaggtgctgcttttgattcggcttctcaagtgaatgtccatgggtggactattaacaataagtactacactgctgatgtttctatctggatggctcatctcaatgacg

SEQ ID NO: 28567 - DNA, 240 bp, Glycine max
ggagtgagcaagagtgaagagcgaagagaatggctcccaagggtttaatctttttggctgtgttatgcttctcagcactgtcactgagtcgttgtcttgcggaggataatggacttgttatgaacttctacaaggaatcatgccctcaggctgaagacatcatcaaagaacaagtcaagcttctctacaagcgccacaagaacactgctttctcctggctcagaaacatcttccatgact

SEQ ID NO: 28568 - DNA, 296 bp, Glycine max
gagagagaagggaaataaagattgggattaggtgttgcgcagtcgcaggcatggccatggctttggtgagcctcaacaccattcatacatcgccttcttctttttcgttttcatctaccaaaccttattcttcctccaactatgcaccacctatcaccctgctttcacgatttcggaggcaccttgttcgtatggctcccgacgaggagaagatgactcgccgatcccctctcgatttccccatcgagtgggaaaggcctaagcctggacgaagaccggatatattccctcaattt

SEQ ID NO: 28569 - DNA, 363 bp, Glycine max
ggggaataggagggggcaaattgagttgggtgttggaaaggcagagcaagaggagtaacataatcaaacatggcggttaggcaaagagccgtgtctgcacttccaactcttctacgcactctccgcaaagaacctttgaagcctcgcaaccacgcacacgtcaatgccttgccctctcttcgacgcgctttctctttgtacgatcagatcaacctcatcgatcaagttcccgaagaccagctccgatttcaagggtataatgatacggggtttactgtaaatggggttgaatacgaaggaagcttgctttgtgttggaaatttgctcatgtcttggaaacctaagaagttttcagagatcact

SEQ ID NO: 28570 - DNA, 266 bp, Glycine max
acataatcaaacatttcttttatacaaaaaaccatttcttcactttcaactcttctactcactcttcgtaaataaccttttaaacctctcaaccactcacacttcaataccttgccctctcttctacacactttctctttttacaatcataacaacctcatctatcaattttcctaaaaccaactcctatttcaaagttataattataccccatttactctaaaatttttttaataccaaaataaccttctttttttttgaaattt

SEQ ID NO: 28571 - DNA, 386 bp, Glycine max
  modified_base (336)..(336): a, c, g, t, unknown, or other
ggagagaaaaatataagcggatgtgtgagtttgcatggttggatagcaatggcagcaaagaaggtgtgtgtaacaggtgctggaggattcgtagcgtcttggcttgttaagcttcttctttccaaaggctacattgtccatggaactgtgagagaccctgaacctgctactcagaaatatgaacacttgctcaaactccacggagcttctgaaaacctcactctcttcaaggcagatctcttgaactacgaatctcttcgctcagcaatttctggatgcactgcagttttccatcttgcttgccctgtaccctcaatcagtgttcccaaccctcangttgaaatgattgagcctgctgtgaaaggaacaactaatgtacttgaagc

SEQ ID NO: 28572 - DNA, 378 bp, Glycine max
gtgtgttgtgggtggtcatgcagtggatggggttgcagagatacatagtgaaattgtaaaagatgatgttttcaatgcattttataagttgtggcccgagaagttccaaaacaaaacaaatggtgtgacaccaaggaaatggatcaggttctgcaatccagatctgagtaaaataataaccgagtggataggtactgaggattgggtcctaaatactggaaaattggccgagctacggaagtttgtagacaatgaggatctacaagtgcagtggagggaagcaaagaggagtaacaaagttaaagttgcagcattcatcagagaaaaaacagggtattctgtcagtcctgatgcaaatgttgacattcaggtcaagag

SEQ ID NO: 28573 - DNA, 264 bp, Glycine max
tgagtagaagaaggatatagtcatagagtcacagaggaggcggcgagtgttgggttgagaatcctatcttgttcgtctttctcgtcttctttcttttcttttgtttttcttgtggatgtgaaacagaatctatgacgagtcaatcggcgaagaacctattggttttgttggggctgggtttagctggaatagttctaatcaccagaaagctcaagaagtctgtcagaaaggatttgggggctttcattgagaagcttcagctgc

SEQ ID NO: 28574 - DNA, 317 bp, Glycine max
  modified_base (20)..(21): a, c, g, t, unknown, or other
tgaagatgatgtaaagctanngggcaagaggagaggatgcgcgtggagaaccacgggcattcagttttggacaaggttaagttaggagagcctggatacaaggaaaggtattatgctgaaaaatttggtgcattggatctggagaagattgaaaaaatcaagaaagatacagtcttaaaatatgtagaaggcctttgttgggtttgtcggtactactaccagggtgtctgctcatggcaatggtactacccataccattatgctccttttgcttctgatcttaaagatctagctgatctggagataacttttttttt

SEQ ID NO: 28575 - DNA, 293 bp, Glycine max
ggctgcggaggctgcaagatgtacccagacgtgagctacaccgagtcaaccaccaccgagaccttggtcatgggagtggcaccagttaaggctcaattcgagagtgctgaaatgggtgttcccgctgagaacgatggctgcaaatgtggagctaactgcacctgcaacccctgcacttgcaagtgaggtgttggagagctaaagcttcaagcagaaatggcccttagaaataatgataaaaactatatgtagtttcaaaacttcaaaattatgtaggatgtattatgttgcac

SEQ ID NO: 28576 - DNA, 348 bp, Glycine max
aagtataaaaaaataaaaaaaaaaaaaaggaatctatataaatataaaaataatatatataaggtacaaatagtaaatcgaggtacccattttatgataaactttccttccatttttgttcctctagtaggcctagtatttccggcaattgcaatggcttctttatttctttatgttcaaaaaaacaagattttttagatacagaaaacaaagtaaaattctggggttttttattccccaattataatactaaattcaaaaaaaggagagtaatgagtataatctttcgctcagacgatgtactgatatattctatggcggaggttcgaagaacaagcaatttatttt

SEQ ID NO: 28577 - DNA, 337 bp, Glycine max
ggatacagaagatgagagagataattagggttcagtattggacaagctggaattcaggtggggaattcatgctgggagttgtattgccttgagcatggaattaaccccgatgggaccatgcctagtgacacctctgttggcattgcacacgatgctttcaacaccttcttcagcgagaccggattcggcaagcatgtgccaagggctttatttgttgatttggaacctagtgttattgatgaagtaagaactggtccttgcagacaactctttcaccctgagcaattaatttctggcaaagaagatgctgctaataactttgcaaggggacactaca

SEQ ID NO: 28578 - DNA, 346 bp, Glycine max
gagggatcagtggaagtgaaggagtttaagatatgtggagcatagtgtgttgttctctgtttcgaagcagcggaaacaaacatgtcgtggtgttactgcgctaagcctatgactttgcagttgccgttgcaatcaagagcagcatcatcgttccattcccacgttggaggagtaacagtaacattctcaacactgtctcttcgaccctcttctcctcttgttctgacccacaacctccacttccaacccaaactcaaacgcgcttccacaaccattcgctgctcctctgcgttgactcctcaattgaagtctaccttggatcaagttattgcttcaaataaagtag

SEQ ID NO: 28579 - DNA, 146 bp, Glycine max
ctttacaagcaagtcactgagcttaaactactattcaaaaacatgccctgatgtggaatgcattgttgccaaggcagtgaaggatgccactgctagggacaaaactgttccagctgcacttctgcgaatgcacttccatgactgtt

SEQ ID NO: 28580 - DNA, 293 bp, Glycine max
ggaagaaaagagcagatagaagaaaaagctcggtgcatagttccgaatccttgttcttctgatagtgaaggtagcttgaggtttatttaatttaattcggttcgagaaaagtgctgagagagagaaaatagaaaaggtgaaaaatcgaaggtcggagatgcaaatggaagctagggttggtatggcggtggatggtggtggtgtacggaagttggtgcagccgccgccgaagcagattggaactgtttctcagcttctcgccggaggagtcgcccgcgcgttcagcaaaacct

SEQ ID NO: 28581 - DNA, 363 bp, Glycine max
  modified_base (70)..(70): a, c, g, t, unknown, or other
  modified_base (266)..(266): a, c, g, t, unknown, or other
gaggtatctttggaagtgaacgagtttaagataggtggggcataatgtgttgttctctgtttcaaagcancggaaacaaacatgtcgtggtgttactgcgctaagcctatgactttgcagttgccgttgcaatcaagagcagcatcatcgttccattcccacgttggaggagtaacagtaacattctcaacactgtctcttcgaccctcttctcctcttgttctgacccacaacctacacttgtaacctaaactcaaacgcgcttncacaaccattcgctgctactatgcgttgactactcaattgaagactaccttggatcaaggtattgcttcaaataaagcagttgtgtttatgaaggga

SEQ ID NO: 28582 - DNA, 312 bp, Glycine max
  modified_base (65)..(65): a, c, g, t, unknown, or other
gggtgtgttaagtgatttattagataatcgaaaagagaaaatcttgagaactattcgaaactcanaagaattacgggaaggggccattgaacagctggaaaaagcccaagcccgcttaaggaaagtcgaaacggaagcagatcgttttcgggtgaatggctattctgagatcgaacgagaaaaattgaatttaattaattcaatttatacgactttggaacaattagaaaattacaaaaacgaagccattcattttgaacaacaaagagtgattaatcaagtccgacaacgggttttacaacaagccttaca

SEQ ID NO: 28583 - DNA, 300 bp, Glycine max
cacacaagctatttcactatccttgtgttaatttgcccgtatcatcaccatcatgggtgtttttactttcgaggatgagaccacctctactgtagctccagctaggctttacaaagctttggttaaggatgctgataacctcgtcccaaaggcagttgaggccatcaagagtgttgaaatcgttgaaggaaatggtggccccggaaccattaaaaagctcacttttgttgaggatgggcaaaccaagtacgtgttgcacaaagtttgaagcaattgatgaggctaatttgggatacaact

SEQ ID NO: 28584 - DNA, 254 bp, Glycine max
tccaaaaccagattcgagtgccgtccccgattcgtggtaccccacgctctccgtcttcaccctcgccatcggcctcgtcttaaccgcctctttcttcatttatgaagcaacatcttctaggaaaagtcgttcacttgttcaggagctgacaactggtgcagtggcttcagtcttcttgggttttgggtccttggtcctcctacttgcttctggtgtttatgtctaatttaaacatttggattggatgaaaattt

SEQ ID NO: 28585 - DNA, 287 bp, Glycine max
gaggtaggtgattgcaaagaatctgaatccagggctttggaagtagttggtaaaatgcaaatgcaattggaaacagcaaatcagactgttgaaactcttaggtccgatgggatgaaagcagcagaagcttacaaatctttagcttttgagttggagcaatcaagaactcaagcaaaatcattggaagaacttgtgagtaaacttcaggctgatttgcttagcaatgctaacaaaagtatgttaagtccaactccaaccaatgaaaatgaaccttctcaggaaaatga

SEQ ID NO: 28586 - DNA, 295 bp, Glycine max
gggtgggaaaaaaataaaaaaggcagggaggagctgaggcgccgacgacgggattctcgtactatcggcgacaatgtacacgtgtgcggtgaactataaacgacgtcgcgtggcggttcaagcagtgtcgtgtgaagaaagaactaaaatggcctaaacaaccacttgaccattacattacatgtttggataatcaatctccttcaaagaacgaccaccgaatttttccccttcaaccttgtacttctacacacgcaatctcatcccattttttctttttctttcttccgatatc

SEQ ID NO: 28587 - DNA, 421 bp, Glycine max
ggaaacaagaagtgaggttgtctttcaaagatggaagaggagacatttgaaaaaccattgttgaagaaaaactatcatgagaattgtcctggttgtaaggtggatcaagccaaggagctcaaaaaggatgtttcctttagaaatctttcttatatatggctggcggtgttatgtggcactttgcctgtagcatcattctttccctttgtttacttcatggtgaaggattttaatattgctgaaacagaggaagacataagtacctatgctggatatgtgggatcatcaatgatgcttggcaggtctttgacatccatattgtggggtatgatttctgatcgctatggtagaaaacctgttatcattatagggattatcactgttgtcattttcaacacattatttggtcttagcacgaatc

SEQ ID NO: 28588 - DNA, 422 bp, Glycine max
gacctcactcttattgttttcttaaaatgtcttgcttgccactgccagtgtgtcaccaccatggccaccgtcacaacccaagcctccgccgcgattttccggccatgtgcctcgaaatcgaggtttctgaccggctcttccggtaaactcaaccgggaagtgactatgaggccaatggggtgccctcctcctgcctctttcaaggttgaagccaagaagggagagtggttacctggcttggcctccccaacttacctcaatggcactcttcctggtgacaatggatttgaccctctgggactagctgaggacccagagaacttgaagtggtacgttcaagccgagcttgtgaatggacgttgggccatgttgggtgttgcaggaatgctacttcctgaggttttcaccaagattggaatcat

SEQ ID NO: 28589 - DNA, 374 bp, Glycine max
ggtctcagtgctagtgtgagtgtgagttcgtgacacacttatccacctactttcatttgagccactcttgtcagtccaaaacagtttctcgctttctcatctgaaaaatgaggagcatctttgtgcttctccttgttctgggtttgattaagtatgcatttgctgaagaagggttttgctctgctccttcggaatcgaaatcaaagcctctttattggaaagtggataaccccactctctcacctatccaccttcaagatttgcctggattcacacgcagtgtttataagagtaatcatgctttggtatcaccagaaagtcatgtatatggcccattgcctgagtggatcgacacgtcaagcgcatatttaatt

SEQ ID NO: 28590 - DNA, 331 bp, Glycine max
  modified_base (65)..(65): a, c, g, t, unknown, or other
tatacttccgaaacgacgtcgtaacgtgacggcgacgcgtatcaacttaaataatcgcgctccanaaccactctcccacgcatttaatcttcaaccaaaacaaacaacccacatcactctctacatatccaacactatagcgtaaaccactcttcaaaaacattacctaatctccaacgaaatctctctctccccccaagaacaattcaatatctataatcttcagttggccaaatccaaccctaataatatcatacaagaatacccacactcagatccccatactccaattcgcaagaacattgatcactcaatgcaactgaatacttat

SEQ ID NO: 28591 - DNA, 364 bp, Glycine max
gggggaaaaagggaaggtggagtagtaaatgggtcatgggatgttgcaaatcaaggccaggctatgcttccccactggaagccatttctggtcccagagagtctctcatttatgtaacctctgtctacacagggaccggaatagagaagccagactatttggcgacagtggatgtggatccaaactctccaacttattccaaagtcatccataggcttcctgttccttatttaggtgacgaattgcatcacacaggctggaattcatgcagctcttgccatggagacccctcagcagaccgacgatttctcatcgtacctgcactcgtatcaagtcgagtatatgtggttgatgtgaaaacaaa

SEQ ID NO: 28592 - DNA, 428 bp, Glycine max
  modified_base (52)..(52): a, c, g, t, unknown, or other
gggaaaaaagagaggggagctcaagattttatggacaagaggggaaccaganaggcattgccctcatatccaagaggataaccaatcaattgacagccaccattaatcagcagcagacttgtaccctcctaggacattatgtaacatttgtaactttgttgtaacagaatttcagccaaattgtatgatatgatagcatggacttaaaagttataaatcagcagttaagatatgagagagatattacccagttattctgatattcaaggggacccaccaatctgtgtattgtaaccttattttttgtgagatagcagatggagattccatttcctggttgatgatggctttgcatcaaggagagtctgataaaaaaccatgtctttaccaagaagcaaagtgacatgcttaggaaactccaatcataa

SEQ ID NO: 28593 - DNA, 395 bp, Glycine max
gtgagctactgtattaaaattggtccctatgcgcttgagatgattggcaagaactgcaagcttctagaagggttgtgtcgaaacatgcacccattggatactgcggagaagccgcatcaagacgatgaagcatatgcaattgcctccacaatgcctaagctcaagcatcttgaaatggcttatcatcttatcagcacttcgggtgtccttcaaatacttgcaaactgccctaagcttgaatttttggatcaaagggggtgttggggtgtgacacttgaccacatgtttttaaagcagaaatttccaaaactgaaggttttggggcctttggttcttgacacttatgagagtgatggctgggatgatttctcagatgtgtctgattcatcagagta

SEQ ID NO: 28594 - DNA, 414 bp, Glycine max
  modified_base (377)..(377): a, c, g, t, unknown, or other
ggacattagccacatggcataggctcatcattttagtaacgtcgtactctagtacaaagacattattattattgtcctcatagtgagtagaacgcagagagactagagcggagatagcaatctcatctcattcatttcaatggcaactcaaggtcaagtcattacctgcaaagctgcggtggcctgggaacccaacaagcccttaactgtccaagacgttcaggtggctccgcctcaggccggcgaggtccgtgtccaaatcctcttcaccgctctctgccacaccgatgcttacacttggggcggcaaggatcccgaaggtctcttcccctgtattcttggccatgaagctgcacggattgtggagagtgttggangacggtgtactaatgttcagcctggggatcatgtcat

SEQ ID NO: 28595 - DNA, 417 bp, Glycine max
agggggtggtagtgtggcagcgacgcgtatcaacttcaataatcgcatcgcagaagcagtttccggtgcatctcatcgtctccgaaaatgaacgacgcagatgtctcgaagcaaatccagcagatggtgcggttcatccgccaggaagctgaggaaaaggccaacgagatctctgtctccgccgaagaggaattcaatatcgagaagctgcagttggtcgaagccgacaagaagaagatcaggcaagaatacgaacgcaaagagcgccaagttgaaattcgcaagaagattgagtactcaatgcagctgaatacttctcggattaaagttcttcaagctcaagatgacgtgatcagttccatgaaagaagctgcatccaaaggaactttggctgtgagtcatcatcatgatgatcat

SEQ ID NO: 28596 - DNA, 265 bp, Glycine max
gacggctaagagctaaaaatcatcgaagtactcaaattagcatggctgtcacggttgcattcttgaatttgatcatcatgttttcagtagtctctacaagcaagtcactgagcttaaactactattcaaaaacatgccctgatgtggaatgcattgttgccaaggcagtgaaggatgccactgctagggacaaaactgttccagctgcacttctgcgaatgcactatcatgactgtttcgttcggaagtgcgatgcctctgtgct

SEQ ID NO: 28597 - DNA, 403 bp, Glycine max
tggagcaagagtgaagagcgaagagaatggctcccgaaggtgtaatctttttggctgtgttatgcttctcagcactgtcactgagtcgttgtcttgcggaggataatggacttgttatgaacttctacaaggaatcatgccctcaggctgaagacatcatcaaagaacaagtcaagcttctctacaagcgccacaagaacactgctttctcctggctcataaacatcttccatgactgtgctgttcagagttgtgatgcttcactgttgctggactccacaagaaggagcttgtctgataaggaaacagatagaagccttgggttgagaaatttcaggtacattgagaccatctaagaagctttggaaagggaatgcccaggagttgtttcctgtgctgatat

SEQ ID NO: 28598 - DNA, 363 bp, Glycine max
  modified_base (350)..(351): a, c, g, t, unknown, or other
  modified_base (354)..(354): a, c, g, t, unknown, or other
  modified_base (356)..(357): a, c, g, t, unknown, or other
tcctataagagattttgtttggtgttgcgcatttgattttgagttgcctatctatgattttggacgtatggtttatcatgacttaattccatagtatcaagatttttctgtttaatcttttgaagttagttttattttgttgaaatggtatttaaacgaatttgggacttgatggaatcaaaggccgattctccatgctatttgaacgtgttaatggatagaatggaatttcgttcttggttggatctttaaaaggttggaactttggtaccccaattgtatgagttcacgggttgagccggattggctgttctatcagattgagttggtttggttcggtggttcccaanntanannacattt

SEQ ID NO: 28599 - DNA, 409 bp, Glycine max
ttcgcaatgcacttcataaggtagcagcgccattcgaatacggtgccggacacattcagcctaaccttgcaattgaccctggactcgtttacgatttacgcaccaccgattacttgaacttcttatgtgcttctggttacaaccaagctttactcaacttatttgccaaattgaaattcccatacacttgtcccaagtcttacagaattgaagatttcaactatccttcaattacggtgcgtgatcctgggtcaaagaccataagtgttactcgtacagttacaaatgttgggcctacaagcacgtatgttgtgaatactcacgggccgaaggggattaaggtccttgttcaaccaagttcgttgacttttaagagaaccggagaaaagaagaagtttcaggttatact

SEQ ID NO: 28600 - DNA, 403 bp, Glycine max
gtacacaagtggcagtacaggggtgccaaagggtgtcatgattactcacggcaacattgtagccactacagcagctgttatgacagtgattccaaatctaggtagcaaggatgtgtacctggcatacttgccccttgctcatgtttttgaaatggcagcagaggtgatttcttcttagccttctaattgtcaaaaacagctgatgttgatgatattatctctaaattacggtggttgtccagtctgttatgctggctgcaggttgtgcaattggttacggctctcctctgactttaactgacacgtctaataaagtcaagaaaggaaccaagggagatgctactgtgttaaagcccactcttttgacagcagtaccagctattcttgatcggattcgagatgg

SEQ ID NO: 28601 - DNA, 384 bp, Glycine max
tgatggttatgaatatcatgtggattatgaggttcagggtgtttcaatggtactcgatgaagacgaaaatagtgaaggccacaaaactagtgaaatttgtgagattgatgagagcagtgaaaacagatatgcaagcctagagaatgatgatgataatggaattagccaggagaaccaaattcactcttctgaagtgccagatgaaagcaccatttgtgttcacgagcagaaattatcggatgaaaatcaagttaaaggtagtaaggtgccgagcacaggtggtagtgaagagcagctcacgggcaataatatgcaatgtggaactaagcggaagagacctattgaagaggatgaggaattgagaaagatcaactcacgaaagcc

SEQ ID NO: 28602 - DNA, 402 bp, Glycine max
  modified_base (100)..(100): a, c, g, t, unknown, or other
ggtgacgggggaagatgcttctggcgtcgatacgcagaggattcactagtcgagtaggtcccatacgaaccctctcttcgcactccgaaatgaaagactntctggattacctcgactccctcaaaaattacgagaaatcaggagttcccaaaggtgccggcaccgattccagcgacggtttcgatcttggtagaatgagatgcctcatggagcgttttggtaaccctcactccaagttcaaggctgttcatattgctggaactaaggggaaggcatcaacagctgcttttgtatctaatattctgaggaatgaaggttattctgttggttgttacactaggctttatttttctcaagcagtccacatatcctgaccatccgggagcgcattttactgggaaa

SEQ ID NO: 28603 - DNA, 418 bp, Glycine max
gtgttataatcaataacatcggtgtgctgattggttacatgattataattggtgatgtgctctctggaacatcttcaagtggagatcatcactatggtatccttgaaggatggtttggtgtgcactggtggacggggcgaacatttgttgtcctttttacaacacttgccatatttgcaccccttgcaagctttaagcgaattgattcattgagattcacatcagccctttcagtcgcacttgcagttgtttttctagtcattgccgtgggaattgcagttgtcaagatattcagtggaagcattgcgatgcccagactcttccctgtcactactgatgtggcatcattctttagactattcactgtagttcctgtgtttgtgactgcatatatctgccactacaatgttcacagcat

SEQ ID NO: 28604 - DNA, 426 bp, Glycine max
  modified_base (8)..(8): a, c, g, t, unknown, or other
gaccacanactgtcatgccatcctcagttctatctagtgatagtatgcacattgggcttcttgcagctgctgctcatgctgcagcaactaatagctgctttacagtgttctataacccaagggctagtccatctgaatttgtcataccgctttcaaaatatatcaaagctgtgtaccatacgcgtgtttctgttggtatgcgtttcaggatgctttttgagactgaagaatcaagtgtccgcaggtacatgggtacaataactggcataagtgacctggatcctgttcgttggccgaattctcattggcgatctgttaaggttggttgggacgaatcaaccgctggagagagacagccacgggtatcattatgggaaattgagcctttaacaacgtttccaatgtatccatctctatttcccctca

SEQ ID NO: 28605 - DNA, 396 bp, Glycine max
gatactaaacgatggtaacatcaggataatgccatcgatggcctagcctaaacttccctgcaaaatcagctttggttttcttctgtcactgctctaacctttaaacctctctcattcattgttctttctccaccgtcgaaaatccctaagttcctgctagtttcaaccttcgagtgctctctggaagattcggtatctcataccgttgggttcaagttctccctctttgttctagttttgggtcttcgggaggaatctatggagacacaatcagatggtaatgaggacaacatagctgccattaaaaatatgaggcagcagcttgaaactcgcatagagtcgcaacacaaggctcacatggagatgcttgcttctatgcaaactgtaatacctaat

SEQ ID NO: 28606 - DNA, 383 bp, Glycine max
  modified_base (378)..(378): a, c, g, t, unknown, or other
gctggtcagggttggaacaaaacgaaaaccaatcacaacaacgtagtaaaactcaaaaccaggaaattaatatgagctgcaacggttgccgtgtgctccggaaggggtgcagcgacacatgccctctgaggtcgtgcctgcagtggatcgaatcttcggagtcacaacgacacgccactctcttcctcgctaagttctttggccgtagcgacctaatgtccttgatttactccgtccccgaaaccaaaaggcctggtactgtccaacactctaccttgtactcactcataattcatgcttttacgtgtgcttagatttcatgctatatagctgcctacgtcttaaaatataaagtgtattcatattttataagatganatata

SEQ ID NO: 28607 - DNA, 423 bp, Glycine max
gacatgagaaatttccattatagctttgccttcataatttctgcttaggattagaattgtagttgctaccatacactgtgtaatagttttgcttggtgaagttcataaggggaccgtgcgtttaatggcgttacctgataattgcagggagcgtgtaacatgaatgcgttacgtaataattgaaggggcgtctaacatggatcggtccaaaatggtaacatcacatgggtctgagaatcagttttgttttataggttataattatatgatatttgtgtgaaatatcttttagctttttttatcttcttttaattatatttgtttgtccatcaaatttaaatatgaagctttgtttaagaagatgaaatctaatttttgtcacactaaatacatatttctggcctggaccaatttatagattta

SEQ ID NO: 28608 - DNA, 432 bp, Glycine max
ttcagattttggtctgaagaggctgcttagcaagattccgccctcgccatctttttattcctcatgattttgatgccagtgatcatgggacatcgagtttcccggttgcttctgtgcatcctataccgattttcgacattaagattcttaacaccgataggcatgctgggaacttgttggttaggaaacttgatggcattcggagttctggtcaggtggagttgattcccattgatcatgggctctgcctgcctgaaactttggaggatccatattttgaatggattcattggccacaggcttccattccgttctcagaggatgagcttacctacattgaagatcttgacccttatccgcattgtgagatgctgagaatggaactgccgatgatccgagacgcgtgtctcagagtcttggtgctgtgcacta

SEQ ID NO: 28609 - DNA, 401 bp, Glycine max
gtcttaaagaagggtgggatctggaaagatatttatggaactgatgaaaagaaggttgccgacatggttagaggagatcaagttgatattttaatagagcttactggtcacactgcaaacaataagctgggaatgatggcatgtcgacctgctcccgttcaggtgacttggattggttatcccaatacaacaggattgcctacaattgattatagaataactgattctcaggcagaccctcccgaaacaaagcagaagcatgttgaagagttagttcgattaccggattgcttcctttgttacactccttcccctgaggctggtcctgtttgtccaactcctgctctttccaatggcttcgttacatttggtagttttaacaatcttgccaagattacacc

SEQ ID NO: 28610 - DNA, 424 bp, Glycine max
gatgttaggaagtatgtcaacacctaccgtcgtacatttacgacaaaagctgggaaaaaggtgagcaaagctcccaagatacaaagactggtcactcctcttacgctccaaagaaagcgggcaagaattgctgataagaagaagaggattgccaaggcaaaatctgaggcagcagagtaccagaaactccttgcctccaggttgaaggagcagagagaccgccgcagtgagagtttggccaagaggagatccaagctttccagtgctgctaaggcagcagctgtataagctgctttcgatagagagatatggtgaagtttaatcatcatatgtagtttttgtttgctatattatgacggctgttgttatgataaactatggttttgctatttttgattacattgagttattcaagtatttctta

SEQ ID NO: 28611 - DNA, 304 bp, Glycine max
caaaactactctcagacaaaacttttaatttctgattttctgaattcctgatggtccactctaattataagagctgcaaacggtactaaatctaaagttgaacaaaatgtacatccaacaattcagtatttcgcatcaaaagtttctctttgctccccttaatatctagcatttccgctctcgaacctccaactggagatcaaacaccgcttcgtctgtcatacaaaagtatcagatattgaatatattttctatccaactgttgcacctaaaactcctgaccacatttataaacttgttccac

SEQ ID NO: 28612 - DNA, 319 bp, Glycine max
ttcgcaatgcacttcataaggtagcaactccattcgaatacggtgccggacacattcagcctaaccttgcaattgaccctggactcgtttacgatttacgcaccaccgattacttgaacttcttatgtgcttctggttacaaccaagctttactcaacttatttgccaaattgaaattcccatacacttgtcccaagtcttacagaattgaagatttcaactatccttcaattacggtgcgtcatcctgggtcaaagaccataagtgttactcgtacagttacaaatgttgggccttcaagcacgtatgttgtgaatac

SEQ ID NO: 28613 - DNA, 428 bp, Glycine max
ggaagcaaaaaatgaaaacccaaagtgcttctctcctctggctttttctctctcttgctatccttttggctagtggcactgctgcaagtgcaactccaagaagcgcagtgccaagccaccatgtttcaacattcaacagaagcctttttccttccacttttctctttggaattggttcttctgcttaccaggttctgacaaccacataactaagcacattcaattagtattttctttttcattttttttgggtactacatagaagagatttgacgtattattttgttttctacaacctattcagatctctagtctttgaatttgtggaatacatgactggtttaactgtgagcgagtgagtcaaatttaatataatttcttttaaaaaaaggaaggacttttaaaataaaaatgatcttatatttata

SEQ ID NO: 28614 - DNA, 203 bp, Glycine max
gagggagaatttctttggaggataaggccttttggttacatttcatgctggaagaaacaacttgtctttacaagtgcatgtgtggttataaaggcttttggtttatggatgagggtgagaagggtttgcctgaccatgttatgggtgatgagaggagggtttttcaagtaattttgcatatggatgggaacctactggaacac

SEQ ID NO: 28615 - DNA, 395 bp, Glycine max
ggaagtaggaagagttaaaggtttgatctttgaggtgaaggtccagtggtttgagtagccaaaccttagttatggatgttgaggcagagattgatcgcttgccaattgacctgttggctcatatttttgttctgttcacttccttcactgatttggcacaggcaagtggtgtttgcaagaaatggaaacaaggggtgaaggagtctcttgttcggagacacaatctcagctttgccggttggaagatggatgatgactccactgctcgccttgtttttcatgcctacaacctcactaaactagaaataccgaggagctgctggggttgccaaataactgatgctggacttctcagaatatcttttgctaagtgtatcagcaatctcacatctata

SEQ ID NO: 28616 - DNA, 336 bp, Glycine max
ttagattgtggtactatgaacaattaaaggggtgaggtataatgttaatgtatattggattatttatccaaacattattatatagatgttgagctaaaaatgaatcaattgccaatggacctggtgactcatatatttggcatattcaattacttcactgacttatgacaggctggtcttaatatggaagacatggagtcagaggaaactggagtatcgtttgcactgactcaatacgaactctctcaattagaacatatatgataaatgcgctgctctgatactgaaacatgccttcaacatgactatactacaaatgccgatgagatgcttaat

SEQ ID NO: 28617 - DNA, 408 bp, Glycine max
  modified_base (8)..(8): a, c, g, t, unknown, or other
  modified_base (64)..(64): a, c, g, t, unknown, or other
  modified_base (69)..(69): a, c, g, t, unknown, or other
ggtacggncatatttcctctcatcagattgaagggtggggagaattagggttctctatctgcanagcanaccttatcttttcacctgaaacttgcttttgttcccaattttctcaaattgctttcggttttcgttctgattctgcaaaatcatggagatggtgcgcatcgttgaattccctcacacatacatggatcgacccccgagaaagagagcgcgtttgggctgggacatcgctgaggtccccaaggctcaagtaggattgttttgtggacaagaggttgagaatatttcaagctttgctccttcagaacatccccctagttctctgtttaagggagttgctcgaaatggttctcccccatggcgagacgatgacaaagatggccattacatgtttgagcttgg

SEQ ID NO: 28618 - DNA, 275 bp, Glycine max
caaaacataccttatcttttaacctcaaactctcttttatctccaattttcacaaattcctttcaatattcttttctactcatactaattatacccattcaccccatacttcaattccttcacacatacattcatctacctacctacaaacatatccctttttctctaaaacatctctaaccttcccaacgctctaataccattattttatcacacatcaattcttaatatctcacacttttatactttaaaacatacccctattactctattta

SEQ ID NO: 28619 - DNA, 419 bp, Glycine max
aattttgtcttaaaacgctgtttagcattattgcgccggggcatttatcaataaccaatccctctctactcttttatcttctccttctcttctctaccgttttatcttctccctcttcacttcattctttactctcctctacattaaccaccatacacaacacattcaccgtcgccgatctcacttctactctcaacgaagacaatagaacagaccttgtctatcctcttaacatcaacatacacagtttgactctacaacactcccatattctagagtctctgtcccccaatgtccgaaagcgtcttgaggttcttatacacatccactgccaacatgatgaattacaggctaaattttttgaaaagagaacaacatctcgatgccaaataccaaaaattgtattaaccactttacac

SEQ ID NO: 28620 - DNA, 422 bp, Glycine max
ggcggaagaggctgtttagcaagattgcgtctgtccagcagtttattcctcatgattttgatgccagtgatcatgggacatcgagtttcccggttgcttctgtgcatcgtatagggattttggacattaggattcttaacaccgataggcatgctgggaacttgttggttaggaaacttgatggcattgggagttttggtcaggtggagttgattcccattgatcatgggctctgcctgcctgaaactttggaggatccatattttgaatggattcattggccacaggcttccattccgttctcagaggatgagcttacctacattgaagatcttgacccttatcgggattgtgagatgctgagaatggaactgccgatgatccgagaggcgtgtctcagagtcttggtgctgtgcactatt

SEQ ID NO: 28621 - DNA, 428 bp, Glycine max
gggctagggcattgtctggcaacaaggatgtggccttcttctctgctaatgctgcagctcacgcttcaaggaagtcccctccaagagtgaccaacgaggctgttcagaaggctgctgctgcattgaagggttcagatcatcgccgtgcaacaaatgtcagtgccagactggatgctcaacaaaagaagctcaaccttccaatccttccaaccaccactattggatccttccctcagactgtagaactgaggagggtacgccgtgagttcaaggctaacaagatctccgaggaagagtatgttaagtcaattaaggaggaaattcgcaaagttgttgaacttcaagaagagcttgatattgatgttcttgttcatggagaaccagagagaaatgatatggttgagtacttcggtgagcaattgtcaggc

SEQ ID NO: 28622 - DNA, 405 bp, Glycine max
ggtgtttagcgaacaaaagagagtaaacaaaatggcattgcaggcaccacctagccttcacaccgtcaatggcaatgctggcctgagacgacccttgatgaatccttcttctttttctctaaagtcatccttcttctctggttccctcaatttctatcttcatcccaatcacctccatcttacttcagctccacccaggatttccatgcgtgttgcttccaaacaggcctatatctgtcgagattgcgggtaaccgggttacccttcttttattttttcataaattcaattaacttatgcttttgctaatgttattcattgaagctaacgctatgctgcaggtatatttacaaagacaggactccctttgagaagttgcctgataactacttctgccctggtaat

SEQ ID NO: 28623 - DNA, 404 bp, Glycine max
ggatgagaaggagaatgacggaaagttgcatccgatccgtcgtagaagccattcactcctctcctttccaagccggtctccatctcgccggtggagcttctcaggtggtgggttcgttgctatcagttcccggtgcttcgaatactgtgctcgaagttgtggttccttactctaagatgtctctcattcaattactcgggaagattccatcccaattttgtggccaacagactgctgaagatatggctttattggcgtataatcgcgctcttaagctctccaagccaggatccccggctgttggagtgggtttcactggttctttggccagcagtcgtacaaaactcggggaacacagattgtatatgtcaacaaagacagccgaccaactttggatatcaagt

SEQ ID NO: 28624 - DNA, 408 bp, Glycine max
ggtcaagaggaacttgtttatgatgaaaactctggacatggattcttaaatgatgtttttgcagggaattctcttgtgaatgatacagatttgaaccctttggagtttttagcttctctattccctggttttgcttcagaaagccttgctgaagttttcttcgccaatgcatgcgatttacatctgaccattgagatgctcactcagttagagattcaagttgatggtggcttcaatcagaatccgagtccaaagactctgtcatctcccaatctgagtgcaatggactttccagctcttacatcatcaaatgggcagaatacttcaaaatatgctgcagataatgttcaacaaagtggcattccatacatatcatctgataaagacatgctcatgttcaaatctggc

SEQ ID NO: 28625 - DNA, 385 bp, Glycine max
  modified_base (42)..(42): a, c, g, t, unknown, or other
gactgcgaaccagtagggactcccattccgactcttagccgncgatctctcagggcttgcatcttctcagctgtgaagatgtacacatcaaggaagaaaatccacaaggataaggatgctgaaccaactgaatttgaagagtcagttggacaggcattgtttgatctggaaaataccaatcaggagcttaaaagtgatctgaaggatttatacataaactcagccgtgcaagttgatgtttctggaaaccgcaaggctgttgttattcatgtcccttacagattaaggaaaggtttccgtaagattcatgttaggcttgtcagggagcttgagaagaagtttagtggcaaggatgtaatcttggttgccacccggaggattttga

SEQ ID NO: 28626 - DNA, 407 bp, Glycine max
  modified_base (47)..(47): a, c, g, t, unknown, or other
ggaaaaaggaagaggaaggaaggaatcgcaagtcgtctgtcccgcangtgcagacgacctgtcttcatagccaaacaacctcaaaaacattcaacaacgttcactattaattcatcataaaataaaaacaagtttcgattttttatctttgttttgtttctgatccattcatggaggtgccgagttcctgggatgctcttcgcaaacagggtttcttcattttgtcggtgatggggaattcatgggatcaaggatgggattctactacccttttgctatctgtgctttgaacatggtttgatttgttgagttgcaggttttcagtgttggaattcccccccgcggagacgaggctatagtttgcttttggaattgttaatggattggattatgaattttcgcaatgc

SEQ ID NO: 28627 - DNA, 443 bp, Glycine max
  modified_base (398)..(398): a, c, g, t, unknown, or other
cggcccggccgtcgcccacgccttggtgcaagccttccttccggttgggttaagacaccgaatgggggaaaacctttcagggccaaaaatcgttgcccacagtgcatggaatataaggttgtgcaagataagaaagtccttgaagttattgtagaaaaggggatgcataatgggcagaagataacattccctggcgaagctgatgaagcgccggacacaattactggggatatcgtctttgtccttcagcagaaggaacatcccaaattcaaaagaaaggctgaagatctttttgtagagcacactttgtcccttaccgaagccttgtgtggcttccaatttgtgctgactcacttggatagccgtcagcttcttattaaatcaaatcccggggaagntgtgaagcctgattcatacaacgctattaatgatgagggaatgcc

SEQ ID NO: 28628 - DNA, 392 bp, Glycine max
gggggaaacaaaaacaaaacatttcgtccgaaactaatataacgtgttcctccttggaagaagccatagccataacatagccaccagaaaacaaaacccaccttagttattaaaagaaaagaaaactacataaaattaagctttgttcggtggtgaccatggggagcaccgactcatcaagcggttcacaacaaccgaacctgccacctgggtttcggttccaccccaccgatgaagagcttgtggttcactacctcaagaaaaaaacagcttctgctcctcttccggtagccataatcgccgaggttgatctctacaagttcgatccatgggagctacccgctaaggccgcgtttggggagcaggagtggtatttctttacaccgagggac

SEQ ID NO: 28629 - DNA, 425 bp, Glycine max
ggagattggatgcgagagttctgagaagaaaagagaagatcggtgagtgaggaagcaaatagcaatagcaccgccaccgtcaccactgccactgccactgccactagcaacagcagaatgggaaccttgggcagagttttctacgccgtcggattttggatccgcgagaccggccaagccatcgatcgcctcggctctcgtctccaaggcaactacctctttcaagaacagctgtctaggcatcgacctctgatgaatctgttcgacaaagctccctcggttcacagggatgcatttgtggcccctagtgcctccctcctcggcgatgtccacgttggccccgcttcctccatttggtatggatgcgttctcagaggtgatgttaacagcattactattggatctggaactaatatacaagacaa

SEQ ID NO: 28630 - DNA, 421 bp, Glycine max
  modified_base (385)..(385): a, c, g, t, unknown, or other
gtagtaagggaggaaccagcattgaagaccttgcggagaaatttccggacatgattataaaggtacctgttgatgtttttgaaggtattactgatgaaggtgctgcaaaggttgttgatggtttggctctcaaagtggctgatagaaataagtcgattgaacaagtgaagaatttgtataaactttttgttgattgtgactgcactcttttggaaatcaatcccatagcggagacagctgataaccaattggtggctgctgatgctaagttgaattttgatgataatgctgcatatcgccagaaagagatattttctctccgtgatacaacacaagaggaccctcgagaggtgactgctgcaaaggcagatttaaattatattgngttagatggagaaattggctgcatggtgaatggagc

SEQ ID NO: 28631 - DNA, 412 bp, Glycine max
ggctgagaaaattgcgacgcggaaacacgcgcatcttcacgatcctggaatccaccgcggcgtatccagcgattccgatctccgacgagtctgcgcaggcgaagaatcgcgaggccagccgccggtgaagaatcgcgcgatttgtctggaaatcgcgattcagccacgattcatccccgatactgagactcaaccacgattcaggaagaaaaacgagacaacctccgattcgtatcggtagcagttggaatcatatcgaatcgggcgatacatatcgtgaatcgtacggttgtgtcctaaaaatggcactggttgtaatgtgtgggcaaccatgcagtggaaagtccaaagctgcagtctgtctcgccgaagctctcaaagaatcagaatcaaaacttcaagtgagaatcat

SEQ ID NO: 28632 - DNA, 400 bp, Glycine max
gggtctctacttcgcatttccgttctttgctttgctcgggctacgaaaaacgacgtcgttttcccaattttccccggcgaccgggaaatggtggagccggtggagcttcgcggcgaggagcagctctcgttgctgtcagattccagcaatggtgaccggtcgtggcggttggacttcgacgggtttcagctatcttcggagcacacggagaagcaagtgaaaccccctcgcggactccatgactgttatggggttcttggtcaagaagataatattgcggagtactatcagcagcaggtagaagtgcttgagggctttactgaaatggatgctttagcagagcgtggttttattcctggaatgtcaaaggaggagcaagacaagttagcaagaagtgaga

SEQ ID NO: 28633 - DNA, 399 bp, Glycine max
gatagaagaagcagaaagagaagcattagcaaaagcaagaagaactagtctaagcagaaatggcctcttcagtgatggcatctgtggccctcaaacctgcccctttcactgttgagaagtcctcagttagaggccttccctccctctcaaggaactcctcttcattcagagttgtggccagtggtggcaagaagatcaagactgacaagccttatggaattaatggtggcatggctttgagggaaggagttgatgcatctggcaggaaaggaaaggtttgtgcctcattaaatcttagtacataattaacaatatgtttttttgttaaaatgatttcattcctctaaactgggggtataagtcaagtaatatagtcattgatgagaaaatcaacacttc

SEQ ID NO: 28634 - DNA, 390 bp, Glycine max
ggctgaagacatcatcacagaacaagtcaagctgtgtctacaagcgccacaagaacactgctttctcctggctcaggaacatcttccatgactgtgctgttcagagttgtgatgcttcactgttgctggactccacaagaaggagcttgtctgagaaggaaacagatagaagctttgggttgagaaatttcaggtacattgagaccatcaaagaagctttggaaagagaatgccctggagttggttcatgtgctgatatcctcgatctctctgccagagatggcattgtttcgctaggaggtccccatatccctcttaagactggaagaagggatggtagaaagagcagagctgatgtggttgagcaattctctccagaccacaatgagt

SEQ ID NO: 28635 - DNA, 420 bp, Glycine max
gacaagtgagtttgttgatcgagataactagaaacagtgtgatgaaaatgaaggtccttgttttcttcgttgctacaattttggtagcatggcaatgccatgcgtacgatatgttccctctccgaatgaacactggctatggtgcccgtactccggaggtgaaatgcgcaagttggaggcttgctgtggaagcacacaacatctttggctttgagaccattcctgaagagtgcgttgaagcaacaaaggaatacatccatggcgaacaatatagatcagactccaaaacagttaaccaacaagcttacttttatgccagagacctcgaagtccatcccaaggacacatttgtgttcagtatagatggcaccgtactctctaatattccatactacaaaaaacatggatatggggtggaga

SEQ ID NO: 28636 - DNA, 422 bp, Glycine max
ggttctagtgtgtgattgtttgtcgttgtaactcgttcttcttcttttgttgttctgtgtttgtgtttgttttttctctcacctgaaaatgtcttgctgcggtggtaactgtggttgcggaagctcctgcaagtgcggcaacggctgcggaggctgcaagatgtacccagacttgagctacactgagtcaaccaccaccgagaccttggtcatgggagtggcacctgttaaggctcaatttgagggtgctgaaatgggtgtgcccgctgagaacgatggctgcaaatgtggaccaaactgctcctgcaacccctgcacttgcaagtgaggtgttgggagagcaagcttcaagcagagatagcccttaattaggaataatgataaactattaatgtgtagctaaaaacttatgtattatgtct

SEQ ID NO: 28637 - DNA, 417 bp, Glycine max
  modified_base (51)..(51): a, c, g, t, unknown, or other
  modified_base (340)..(340): a, c, g, t, unknown, or other
ggagactcgaagtgtgaagcactgagcagttgaggaaatgggaacccttgngagagcgatctacagcgttggtaactggattcgagaaactggacaggccattgatcgtctcggttcccgtcttcagggcggttactacttccaagagcagctctctaggcatcgaactctgatgaacatatttgataaggctcctgttgttgataaggatgtatttgttgcgccaagcgcctccgtcattggagacgttcaacttggaagaggatcatccatttggtatggagttgtcttgagaggtgatgttaacatcatcagagttggaaatggaactaacattcangacaactctctggtgcatgttgcaaagtcaaatttaagtgggaaagtgttgcctacaattattggggataatgttac

SEQ ID NO: 28638 - DNA, 248 bp, Glycine max
ttaacttattcacaactaacacccattatctctaattcccctcttcacaccaactctacttcaaatcattctctagcatccaactatcctaacatatttaataatgctactgcatctataaagattatccattctccaaacgcctccaatattataaacattcaacttagaataacatcatccatatggtatagaattgtccaaagaacaaatgttcacactcctaagagaccaaatatatctaacat

SEQ ID NO: 28639 - DNA, 421 bp, Glycine max
  modified_base (67)..(67): a, c, g, t, unknown, or other
  modified_base (403)..(403): a, c, g, t, unknown, or other
gggaggcaacccgaacgagggttttcaagctggggcgggtgggtcttttttccgtgacacagcacanacaaattctcagtgttggagacttgagctcatagagaaatcatagtttgtttaatttcaattctgagcaaaggtcaacatgcaagttttttccattgaaggcgaaagtgctttgtcagttgttggtccaaggccaatggaatggtctactgttccatacaatgcccctcaagctcctgggccaaatggaaagcagcggacctcaagtttggaatcaccgatcatgttgctgtcaggtcaccagagtgctatatataccatgaagttcaatccagcaagatcagtcattgcatctggatctcatgacagggaaattttcctctggaatgtgcatggngattgcaagaacttcatg

SEQ ID NO: 28640 - DNA, 366 bp, Glycine max
ggaagatacggaggctgctgctatcgaatactcggataaggagggtaagggcggtgaactgcactacttcaatccccttttctctcttctccttttatttcatcactctcttcggtcctttcttcttctccaaagttttcaattttcacacttttcgagtaagaacatcttttcaatggcgtcccaaattacccgtgagtggtctggaatcaatacattcgcacctgctacccagactaagttgcttgaactcttgggaaaacttaaacaagagaatgtgaactccttaactatacttgtgatgggaaaaggtggtgttggaaaatcttcaactgtgaactccatcattggggatagagtggtttc

SEQ ID NO: 28641 - DNA, 411 bp, Glycine max
gacacaaagagacaattttcccaggacacctaagtctgcaagggaccaagctaggatttttaaaagcttccaattacagttaatatggagtcacattcaaaccaaaccttttgctagttcctctccaaggcatattggatggccaagatgacagcgaagagctcaacatagaggagagattggaaaccaatataggcggagaaacacccaagagatgcacccgtgtggttcctaaagatggcaccgctgctatagcctgtcccggagacccgcccctccattaaaaaattattggtatttaagatttttgcatgcacacggataattgagagcaaaaataatttagttattaagacaaatttaaaataaaaataatatcattgaaaattaaaaacatcagttgatctgatt

SEQ ID NO: 28642 - DNA, 423 bp, Glycine max
gacagaacaatagtagcaagcagagccccaagacgagcttcaccttgcgccgaagggccacagatggttgaaaccgatatggatgccgaaactgttgcaaatgtggttccaccaaaggagactccaaacagtgttcccatctcttatcattcctcacactcacaccctcctcttaatgagaggattatttcatccatgaccagaagatctgttgctgcacacccgtggcacgaccttgagatagggcctggtgctccaacgatcttcaattgtgtgattgagattgggaaagggagcaaggtgaaatatgaactggacaaaaaatcgggtcttatcaagatcgaccgtgttctttactcatcagttgtgtatcctcacaattatgggtttatcccacgtactatttgtgaggacagtgatccc

SEQ ID NO: 28643 - DNA, 445 bp, Glycine max
ggaaaacgggggccgaccgcacgcgtccgcgcacgcgtgatcagatgtcagattacgactgaacggggattggtcgaatggtcggaaaagaatgttttactaactcccattgcttatttattattgaatcaaccgatcaacttgcttcggtatcgaacatttctttttgatttcaaaaattttccggaaaaaatttgaatctatttttatatgctaatcaattctactacttctgatcctgatgttattgcgcttgaaaaaaaaaatctgtgacgtatcgcccaaataatttgatacagactatatgtatcttttaccccacataagatgcctaatatttacaacactctgatagttaaaggtcgagatactcttggtcaacaaatttatgtgacttgagaagtacagcaactattaggaaataatccaattagagctgtagcta

SEQ ID NO: 28644 - DNA, 427 bp, Glycine max
gggagagggaaaagagttgaagacttgaagtgaagaaagaaagaattgagaaaggatagggtttagggttggcaaaggaaggaagggatggaagcagctgtggtggacgtcggctctaagcttctcaaagcggactttgcaattcctgaccagactcccgccatgataattcccactcagatgaagcaattgctcgatgatggatcagtcactgatagttcactggctgacaatgtcgccgttgatcccgtcgtgcgaggatttattagagattgggatgccattgaagatttgttgcaccatgttttgtatactggcctcggatgggaaattggcaatgaaggacaaatactatttactgatccactttgtacccctaaggcgaacaaagaacagttggtgcaactaatgtttgaaacattcaaca

SEQ ID NO: 28645 - DNA, 420 bp, Glycine max
ggatatcaacagcatcaccagtgttggagggatcgttgaccaaggcttaggcttcataggcagtgcagtcgatgcacttacttttgcagccaccaaaatctccatccagttgattagtgctaccaaggctgatggtgggaaaggaaaaattggaaagagtacaaatttaagaggaaagataacattaccaaccttgggagctggcgaacaagcatacgatgttaattttgaatgggacagtgacttcggaattcccggtgcattttatattaagaacttcatgcaaaatgagttctacctcaagtctctaattctcgaagacattccaaaccacggaaccattcacttcgtatgcaactcctgggtttacaattcaaaaaactacaagactgatcgcattttctttgccaacaatacata

SEQ ID NO: 28646 - DNA, 393 bp, Glycine max
gacacaccgtttgtgcgattcttaactcaacttctgctacccactctcttcttccaagtccaaccacgcttttctctacagtcatgggcaaggtcaagatcggaatcaacggatttggaagaattggccgtttggttgccagagtcgctctgcaaagagacgatgtggagctcgttgccgttaacgaccctttcattaccaccgattacatgacatacatgtttaaatacgacagtgttcacggacactggaagcatcacgatgtcaccgttaaggacgagaagacccttctcttcggtgacaagccagtcactgtttttggacacaggaaccctgaagagatcccatgggggtcaactggagctgatatcattggtgagtccaccggagttt

SEQ ID NO: 28647 - DNA, 415 bp, Glycine max
gacactaaacaagttaaaagaagagcatgactgaactaacaaagcaaccctatgtcgaaggtggtttgtgtcaccggagccagcggcgccatcggatcatgggtggtcctactcctcctccagcgtggttacaccgtccatgccaccgtccaagatatcaaggatgaaaatgagacgaaacatttggaggaaatggaaggagcaaagagtcatctccatttttttgaaatggatcttcttgacatcgactccattgccgctgccataaagggttgttccggcgtaatccaccttgcatgtcctaacatcattggtcaagtcgaagatcccgagaaacagatattggaaccggcgataaaaggaacggttaatgtgttgaaagcggcgaaggaaagcagggtggagcgcgtggtgg

SEQ ID NO: 28648 - DNA, 429 bp, Glycine max
gcctaagaatgatggtaaaacaggtgccacagaaactagttttcttaggtctggatgtaacaaggatgatgctggaaactgttctcaaactagttctgtttatggctctcaacttagttcatgggttgagaatagtgggagtgtgaaatgtgagaatagtgcttcaactagatactcaaagaggccagatgaagcttgcaagccaaatcgtaaaaggcttaaacctggagagaatcccaggcctcgaccgaaagatcgtcaaatgattcaagatcgagtgaaagagttacgagaaattgtgccaaacggagcaaaatgtagcatagatgcacttttggaacggaccattaagcatatgcttttcttacaaagtgtgacaaagcatgctgacaagctgaaacaaacaagggagtctaagattattaataa

SEQ ID NO: 28649 - DNA, 412 bp, Glycine max
  modified_base (395)..(395): a, c, g, t, unknown, or other
ttggggtgtaacaggaattgacggaggcatgcgaaatcggtgaagatggttgctatgaggtttcatcagtaccaggtggtgggaagggctcttcctaccgaatccgatgagcatcctaagatctaccgcatgaaactctgggcaactaacgaggtccgtgccaaatccaagttctggtattttttgagaaaattgaagaaggttaagaaaagcaatgggcaagtgctagccataaatgagatttttgagaggaatcctaccaagattaagaattatggaatttggctgcggtatcagagtcgtactgggtatcacaatatgtacaaggaataccgagatactactctgaacggtgcagttgagcatatgtacaccgaaatggcgtctcgacatanggtgaggcatccatgca

SEQ ID NO: 28650 - DNA, 377 bp, Glycine max
gggaaatgaaaagtatgaagcattaatcacttctcttccctcgtttcagttattgggaaatttttgctgctgtagtctttgctgttttgattcatttccagttcatcattgggagatattagtatttgggagttacggtgtttgctcaaagatgattactaacccttcattgcatgcttcaacattgccaagtgctttatcttcatctctgattactctacatggaagttctgtaaagtgtatgccctgccttccatttagagccctaagaaaaatcaactggataagagctacatctgctgcagatggagggcctattgagtcatcgccagctttgggatcaaaaaatcctcttgcgggtggtttggacattcctc

SEQ ID NO: 28651 - DNA, 426 bp, Glycine max
  modified_base (8)..(8): a, c, g, t, unknown, or other
ggagtcanattgagaagaaaaatcttcaattgtgggtcctgaacccacttgattcaccccaactcaataattttagccaccagtgtgtagataacttaagccaaaacaactcaccaattcttttggataccaccttccatatattgatattgcaaaagatagttaaatttcattccgaaacaatgatcaacaaagtcgcagctctattagttgttttgcttttcatcattgctgctttggcttctgatcctgatccagtaatggacttttgcataggccaatcaccagacaatagcttcaggtgcaagaactcatgtacagcaacagcggaagatttcacctattgtggcataaagactcctgggaacttcaagcaaactggattctcttctatggcagtgaattcgaatgtctcttccggtttga

SEQ ID NO: 28652 - DNA, 413 bp, Glycine max
ggttctagtgtgtgattgtttgttgacgtaactcgctcgtcttcttttgttgtgctgtggttgtgtttgttttttctctcacctgaaaatgtcttgctgcggaggtaactgtggttgcggaagctcctgcaagtgccgcaacggctgcggaggctgcaagatgtacccagacttgagctacactgagtcaaccaccaccgagaccttggtcatgggagtggcacctggttaagctcaatttgagggtgctgaaatgggtgtgcccgctgagaacgatggctgcaaatgtggaccaaactggtcctgcaaccactgcacttgcaagtgaagtgttgggagagcaagcttcaagcagagatagcccttaattaagaataatgataaactattaatgcgtagctcaaaacttatgt

SEQ ID NO: 28653 - DNA, 364 bp, Glycine max
gaccacaaattacatagtaactctttttctcgaatccacagagtgagactcatcgtgtgaacaacgataacggcatgtttgagcgtacttgaaaaatttgagcggccatggacgaaaccgccgtaacgacgaagcctgattggctcaacaaccgcgcgagggtcgccggagagagaaccgaagaatttttctgtggcggcgacgacgaagaggaatgcgacgacgaggcttgggacatgttgactcggagcttctggcaggcgcagactgtgctggacgagaaccgtgcgctgatcgacgaagtgaacagcaaccacgagtcgaagattcctgacaacatggcgaagaacgttggcctcattac

SEQ ID NO: 28654 - DNA, 407 bp, Glycine max
gaaagaggaattaccattgatattgctttgtggaagtttgaaaccaccaagtactactgcacagtcatcgatgcccccggacatcgtgactttatcaagaacatgattactggtacctcccaggctgattgtgctgtccttatcattgactccaccactggtggttttgaagctggtatttctaaggatggacagactcgtgagcatgctcttcttgctttcacccttggtgtgaagcagatgatctgctgctgtaacaagatggatgccactaccccgaagtactctaaggctaggtatgatgaaattgtgaaggaagtctcttcctacttgaagaaggttggttacaacccagacaagattccatttgtgcccatctctggtttcgagggtgacaacatgattga

SEQ ID NO: 28655 - DNA, 407 bp, Glycine max
ggaggaaaagatagaaagaaaaaaaaacagcgcccgagatttgctcttctttgcttcggaagaaagagaaaaacaaataacaatggcgttcgcttctttcctcggcagagttctcttcgcttccgtcttcatactctctgcttaccaagaatttaacgaatttggagttgatgggggacctgcagcaaaagcactcagacctaagtttgatgcctttacacatcgagtgcattctcaagttggctttcaacttcctgagattgatctgaaatttttaattgctggggctattgctctgaaaggccttggaggggttcttttcatatttggcagctcttttggagctttgcttctgctcctgcaccagctgattgctaccccaatccattatgattgttacaattatg

SEQ ID NO: 28656 - DNA, 376 bp, Glycine max
ggggggcacgggggttggtaacggcgaagaacgtcattaatggaagaagagaaagaagcagtgatggtaacaccgggagaagtgttgggtagaaccagcgatgtcaaagctggaagaggagcatacgcggcgcttcacaacaacaccgtatacgcctccctaaccggcttccgccacaccgtacctcccgcccccgactcttccgacctgagaccgactgttgaagtaactggtcacaaggcccatggacctgttccacagcctggatctgtagtcattgctcgggtcaccaaagtgatggctcggtccgcttcagctgatattatgtgtgttggaccaaaatctgttccagaaaaatttactggcattattaagc

SEQ ID NO: 28657 - DNA, 392 bp, Glycine max
catggaaatttttcgaactgatggcgaacaggggctcaagtatccaccacctaaagtgatgcaggtggataagtctgcatggatgactgatgaagaatttgctagagaaacgattgctggtgtaaatccaaacgtcattaagattcttgaggagttcccaccacgtagcaagctagatacacaagcctacggtgatcatacctgtataataacaaaacaacatttggaacctaacttgggtgggctcacttgtgagcaggctattcaaaacaagaaagctgtcatcttaaaacaccatgactatctcattccatatttgaagaaaataaatgcaactaccacaaagacttatgctaccagaaccatatttttcttggaaagtgatggaactt

SEQ ID NO: 28658 - DNA, 393 bp, Glycine max
ggaggagagaggagaagagaagctaaagaaagagaggagatgggagtggagaagcagttgttgaggtctggcaccggtccgaagccaattcccggtcagaacgtaaccgttcactgcactggtttcgggaagaacggtgacctttctcagaaattctggagcacaaaggatcctggccagaacccattcactttcaaaatcggccaaggttctgttatcaaaggatgggatgaaggtgtgcttggcatgcaaattggtgaagttgctcgtctccggtgctctccggattatgcttatggtgctggtggctttcctgcttggggaatacggcccaactctgtcttggaatttgaaatcgaagtcttaagtgcgcaatgaaaaccttggtagtct

SEQ ID NO: 28659 - DNA, 429 bp, Glycine max
gatacaaggagagaaaaaaaagtgtgttccagagaagcatgtcccattaaagtatattatgtcttcaccaaagaaccaccctcaagttagaagcatctctttgctgtagctgtagccaatagtaatacccttccagctggtatacgtaccctccattctatctttatataccctccttccattctcattcctcgtccttcacattctcctctctgaattcctcttattcaggaatttggagagtattgatatatcaaggtaggataaaccagtagccaaggaagatatggagttttctatgattttcattggtagcaacattatgctgcttttcagttcagcatttgccaaaactgctagtcctccctctctgagcccaactccagcaccagcccccgcaccagacttcgtgaacctcactgagttact

SEQ ID NO: 28660 - DNA, 303 bp, Glycine max
  modified_base (108)..(108): a, c, g, t, unknown, or other
  modified_base (194)..(194): a, c, g, t, unknown, or other
gaaatggctctggtgattctggacttgttctctcaactgatgctaagcctagattgaaatggacacctgatcttcatgcaaggtttatagaagctgtgcagcaattangaggagctgacaaggcaactccaaaaacggtaatgaaactcatagggattccgggtcttaccttatatcatctgaagagccatctncagaaatacagattgagcaagagtctgcatggacaaagtaacaatatgacacacaaaataaccataaattcaggtgcagcaacagacgaaagactcagagaaaataacg

SEQ ID NO: 28661 - DNA, 375 bp, Glycine max
  modified_base (301)..(301): a, c, g, t, unknown, or other
acaagggatctggactctaaacaaagtcactgcttctctagttttgcaacatcaatcttggctcagagagaggttgcaacttgcaaatgcaccaccgactgattattgttcaaacttcaaacttcgaaatcaaagtttctgattctgtctatttccgagctcacccttgatttggtttccttatagaggatcaaaagtcaaaatcataatcaactacaacccaccaacaccaccatgcagaggtggaagtggaacagaaagaaaccccccattttccctttgcttgtgcttattttattgnttttcatagccttctcaaccctccacagtgaacacaccatacaacgaatccatgaaaatccagatcatgttcac

SEQ ID NO: 28662 - DNA, 369 bp, Glycine max
ggttcaccttagaaaaagccacttgacaccatggccacggaaggccatatcaacccattgttcaaattagcaaagctgcttcatctgagaggctttctcataaccttcatctgagatgagtaactctacagagagaaagccacatgcactgttgacaccatatccacttcaaggccatatcaacccattgttcagattagcaaagctgcttcatctgagaggctttcacataacctttgtccacactgaatacaacattaaacgcttgctcaactcaaggggtcctaaagcccttgatggccttcaagactttcattttgagaccataccagatagtcttccccccacatatggtgatggtgatgtcac

SEQ ID NO: 28663 - DNA, 403 bp, Glycine max
gactcgcagttgtattgttgaacaagggtttcggtgtctgcttcttcactttctctcgttgcaatcgaaaccaaaacaaaaacatgggcagaaaattcttcgtcggtggcaactggaaatgcaatgggaccactgaggaggtaaagaagattgttactactttgaatgaggctaaagtccctggagaagatgtcgtagaagttgttgtgagccccccttttgtgttccttcctgttgtaaaaagtttgctgcgccctgatttccatgtttcggcacaaaactgttgggttcgcaaaggtggtgcttataccggtgaggttagtgctgaaatgcttgttaatttgggaattccttgggttattattggtcactctgaacggaggcagcttttaaatgaatcaaa

SEQ ID NO: 28664 - DNA, 427 bp, Glycine max
ttgggggtgactcaatagccatgaaaggaaggagtatgctgtactcaaaactagggtgcgaacaatctaaagcaattaggctatttttgcgtatgaaaaggcttagatatgttgaaatcaacatagatgtgttccccggtagaaaggtggagctggaaaagatttctggatctgcttctgtacccaaggtttttttcaatgaaatactaattggaggctggaatgagctaaaaaacctggatgagtctggtaaacttgatgagaaggttgactttcttattactgaagcaccattatttgaagccccatcaccacctctctctggagaggatgatgtgtccagtagtggaccacttgatgaattggcaattattgtccgtaaaatgaaagaatctattgctgtgaaggatcggctgtataaaatgcc

SEQ ID NO: 28665 - DNA, 404 bp, Glycine max
gggagcaaggcaggatgcgttcagtattttctttgaatgggatgctagttttggaattccaggagcattttacatcaaaaactttatgactgatgagtttttcctcgtcagtgttaaactcgaggacattccaaaccatggaaccattgaatttgtttgcaactcatgggtttacaacttcaggagttacaaaaagaatcgcattttctttgtcaatgatacatatcttccaagtgccacaccagctccactacttaagtacagaaaagaagaattggaggttttaagaggagatggaacagggaagagaaaggactttgacagaatctatgattatgatgtctataatgatttgggcaatccagatggtggtgatcctcgcccaatccttggcgggtctagca

SEQ ID NO: 28666 - DNA, 295 bp, Glycine max
gtgcacaaatgactatattcatttacgcgccgttaaattttgatcagctatcgctactcttaaacatctatactataaaaagaattactcatttaattcttctcagacagaaaattctaaatatctttcatccaaacaggcactctttaatttggctcaacttcttcagtatcatcaggattccttacatgcaaagcttaatataacataaactgaatacccctgtttcatttttcacacctcatatactacaacactcaatacatgattacgtctcaagtttccacatttaaca

SEQ ID NO: 28667 - DNA, 363 bp, Glycine max
gggttaaacaaggaggtaccaaatattgttagtgaatttgttgggggcaccaatttagaaattcacgagaggtacaaaactatcacggaaaagaacattggaaggttggaccagccttctcaaaactcaagagaatatgaatctactattggcatatgtctagagaaaagcctgagtgctgcattagattcttttgataatcttttttgtcgccgctgactgatttttgactgtcagatgcatggctgttctcaacctttaatatatcatagtgaaaagcagacagtttggtctgatcctgaaagagacaggaaaccttgcagtgatcagtgttaccttcagttaaaggtagtgaaaaatgtg

SEQ ID NO: 28668 - DNA, 382 bp, Glycine max
  modified_base (19)..(19): a, c, g, t, unknown, or other
ttttgggactataaggcgngctaccacacccgcgccatcgacggcttataaaaacccactggccccacaaaactctatttcaacaatgaacgggttcaatgctcaagatacttctgggaagaaaaaacgtggatcaccgtcgcgccacaccaaatcatctgtaaataagcctaagaaaagtcaagagccacctgctgatttaagtggattaattggtattagccctgcccaaacagaagatggtatccgtgaagtggttaatattgtgctcattgcctatgatgcacttcggagaaagctctgccaactttaaaaggcaaacgaattgaactcaagttcgatcaagcgtgcagattttaaagcttgcaatactttgaagacc

SEQ ID NO: 28669 - DNA, 375 bp, Glycine max
gggcacctgacaactaagaagagaagagactcaactcaacaatggcttcttctattcagtgttcagtttgggttccttcccttcccaacactaacaccattcgctttctttctgttaacccaaactctgttactttctcttcttcttcccttaccagaatcagagcctcctcttcctccccaaccgtcgaagaagccgctatgaacatcgacaacctccgacgtttcatcaaccttaactccggaaagtggaacggctctttctatcaatttgattcatgtgggaatatgttgcaacaactgagtaccaggctttctgctagctcttatggggaagatgaactcatgagtctcattcaaacgctgtatattaaac

SEQ ID NO: 28670 - DNA, 360 bp, Glycine max
gatgctgaagcaaggaggatgcggggcaagaaagccaaggtgaatttcccggatgagccttcaggcgctgctgcttcctcaaaacgcctcaaggtgaatccagaggctcagccaatgaaggaaaatctgaacaccgtgaagccgaaaatgaaccagatgttcaattttggtcacaatctggagggctactacagcccaatagatcaggtggaacagaaaccactggttaaccagtatgttaaccctgccccgttccctggaaacggagttcaagtctcacctgttactccatctgctgatgttactgcttacttcagctctgagcattcgagcaactcgtttgattattctgaccttgga

SEQ ID NO: 28671 - DNA, 191 bp, Glycine max
gttaccggtttggatcaaaagacccttctcttgggcgacgggccagtcactgattttggacacactaaccttgaacagatcccatggaagtctactgaagcttacatcattctttaatccaccagaattttcaccgataaagattatgctgccgcacatttgaaggatggtgcatagaaagctattatttc

SEQ ID NO: 28672 - DNA, 430 bp, Glycine max
gatggatgaggagtacgatgtgatcgtgttgggcacgggtgtcaaggagtgcattctcagcggtcttctctccgtcgatggcctcaaggttctgcatatggataggaacgactattacggaggagaatccacttcgctcaatcttattcagctttggaagagattcaggggagatgacaagcctcctccacatttgggcgctagcagggactacaacatcgatatgaaccccaagtttattatggctaatggcaatttggtgcgggttctcatacataccgatgttacaaagtatctctatttcaaagctgtggatgggagctatgtgtttaataaaggaaaggttcataaggtgcctgcaaacgacatggaaggcctgaagtccccacttatggggctatttgaaaaacgccgggcacgcaagtttttc

SEQ ID NO: 28673 - DNA, 428 bp, Glycine max
ggaagcggaagtacattgttgtctcagccaggtggttactggtgctgttattatggaactcaaacaacaacttcttcttctgattctaacgcttctttttgctactgctacgcctcaatacgttcgacctcttcctcgtaaaaccttaaccatcccatgggattcaatttccaaggcccactcctcttaccctcaacaggtacacatttctttggcaggagacaagcacatgagagttacatggataaccgatgataaacattcaccttcatatgtagaatacggaacattgcctgggagatgtgactcaatagctgaaagagagtgcacctcttataactatctgttatacagctcaggaaagatacaccatgctgtaattggccctttggaagacaataccgtgtacttctaccgatgtggtggaa

SEQ ID NO: 28674 - DNA, 408 bp, Glycine max
gatagatagagagcgcggcagggcctaaacttacccttcttcgctctgtgtgtgtgcgcatcaaacgcaaccagaagcagccatggccactgcaagaactgtgaaggacgtttctcctcatgagttcgtcaaagcttactcttctcacctcaagcgatctggcaagatggagctgccagagtggactgatattgtgaaaactgcaagatttaaggagttggctccttatgatcctgactggtactatgtcagagctgcttccatggcaagaaagatctacttgagaggaggacttggtgttggtgcctttcagaggatttatggtgggagcaagaggaatggtagccgccctcctcatttctgcaagagcagtggtgctgttgctcgtcacattcttcaacaagtgca

SEQ ID NO: 28675 - DNA, 470 bp, Glycine max
gggccgacccacgcgtgcgcccacgcgtccgcccacgcgtccggcgagtttacgacagaagggggataagagcgagcaagggagagacaaagagtgattcagagggagaaagctccctcgcacaaagcaatgcctgccatcacctgaattctatgctccttttccctttatccgcattgctctcttctctttcaccgttttttgtctctgaatatccaagatcttcaaggacaatgttatctctgagaaacatttttctgaatagcgcttgatccggcgtgaagcattcaattgttgataatttactgcttcactttgggctgtgcgagtggagcagcctattttactattaaaggcatattctcttacaaggtataaataattcttatgcatgtatttgcaagatgcattatttttattttttttaataatcaccattgtaatttattccaattgttatgacatttttt

SEQ ID NO: 28676 - DNA, 383 bp, Glycine max
  modified_base (365)..(365): a, c, g, t, unknown, or other
ggcacaaaaatacaatacaaaacaaaacagagcagggagagagtgtgtgaaaagtgaaacaaaaaacagaacaacaatggcgacacttaaggttcctcagcctcttccccccgttgcagatgattgtgagcagctccgaaaagccttctcaggttggggaactaacgaggagctgattgtatcgatctcggctcataggaatgctgctcagaggaagcttatcagagaaacttatgcccagacctatggagaagatctcctcaaggccttggacaaagaactcacgagtgattttgagaggctggttcatctttggacacttgattctgctgaacgtgatgcatttttggcaaacgaagcccggnaactaaaaaatggactta

SEQ ID NO: 28677 - DNA, 404 bp, Glycine max
ggagagaaagaagagaagatgagacatagtgcttcctccactgatattctctgcttctccattccctgaaccaaaattttcaatttttaatacatataaacttctggggttgtttgttgttgtaaaagttgaaggcttttggggggtgtctgatccattaggatcatcatcattcatcagcacatggcaaagccaggggtgttggagtctgatccaggggtgatggtgaagaaggccaaagagttgaagagggagcttcagaggttggtgaagtctattgtgcatgatgaggattgcagcactgagaccattgatcaggccaaagagactctctgtgttctcaaggagttgaagctcagaaacaggtcttcactgtctctgaagcttcacaacaagagtgtcgc

SEQ ID NO: 28678 - DNA, 404 bp, Glycine max
gggttttgaatcggggagatgagtcacaacaacagctacaacgatagagcgaggtaccctatcgggatgggacttgtgcgcgggggtttcaattcgaacctgagccagaacccgaaccagagccagaacccgagcctgaaccagaatcatcacgcgttccaggctcggacgacgtaccaccaacagcaacaggcgcaatatgtgcagaggcatttgatgcagcagcagcagcaacagcagcagtggctgagaagggatgccaacgccgtcgacgaggttgagaagaccgtgcaatctgaagccgtcgattcgagttcccaagattggaaagcaagactaaagattccaccagctgatactcgctacaagacagatgatgtaacggctacttaaggaaatgagtt

SEQ ID NO: 28679 - DNA, 347 bp, Glycine max
  modified_base (321)..(321): a, c, g, t, unknown, or other
ggcgaagaagagtgaaagagaaaatccgagactctgattttgagagtcgagtgagtgagtgctgcttcctctgaatcaaatcattcatcactctctctggttctgagtttctgacaccaaaatggtgaatcctcgaattccacgttcaaggatcccaactttcacacctttcacttctgctatctccatcgccctctgcattttctttgttctctctcttctcttcacttcccattctgattcatcccatcaataccaccacacaggttctgatggtggtgttgcacatggatttgagtcaataaggagatccattctagnctctgaaacagatcctctcaacctcg

SEQ ID NO: 28680 - DNA, 191 bp, Glycine max
cctcaacagcaccagacattcataaaagctctccaccttccctaaaatcgatcatactctcgcaatcttatttaacaaatgacgtacataccttgccttctaactcaacaatgcataacaaactataccattactaaagtatgtactagcgctgctaaaccgaaattgaaacaaaagcctcttcactggaa

SEQ ID NO: 28681 - DNA, 427 bp, Glycine max
  modified_base (360)..(360): a, c, g, t, unknown, or other
  modified_base (387)..(387): a, c, g, t, unknown, or other
ggttctagtgtgtgattgtttgttgttgtaactcgttcttcttcttttgttgttctgtgtttgtgtttgttttttctctcacctgaaaatgtcttgctgcggtggtaactgtggttgcggaagctcctgcaagtgcggcaacggctgcggaggctgcaagatgtacccagacttgagctacactgagtcaaccaccaccgagaccttggtcatgggagtggcacctgttaaggctcaatttgagggtgctgaaatgggtgtgcccgctgagaacgatggctgcaaatgtggaccaaactgctcctgcaacccctgcacttgcaagtgaggtgttgggagagcaagcttcaaagcagaggnaaatagcccttaattaagaataatgantaactattaatgtgtaactaaaaacttatgtattatgtct

SEQ ID NO: 28682 - DNA, 387 bp, Glycine max
gaggaattggaattagaattgtaaaaaggaaaggggaaggaagcaaggcaaggaaggagagtggatcgattcctcagcagcaccagacatttataaaagctctttcccttccctcaaatcgctcatactcttccaatcttttttttttttttttttttttacctttctccctcgctcaataatacaaaacaaaaaagaagaagaagaaggttttcgcgatggcatcgaaacggatcttgaaggaactcaaggatctccagaaggatcctcctacctcttgcagcgccggtcctgttgctgaagacatgtttcactggtaagcaacaattatgggtcctccagacagtccttatgctggagggtgttttttttcctagtcactattca

SEQ ID NO: 28683 - DNA, 245 bp, Glycine max
tggggtaagagtggagtaatacttgtgtatggcacataataggaatgccaggccactttaaactactccttaggtgtgtgccaatgaatcatttgggtatcttgcatggcttgttttgaagcctatccataaaggagcagtgcctagcttcaactttgtttcttgttctttatattcggttggtattctattgcactttacctagatctttggatggatacttgatgatcttgaaattgcttttt

SEQ ID NO: 28684 - DNA, 385 bp, Glycine max
ggagtagcgatggagaagaagaagggtgaggtaaagtcaattttgcttgctttcctttgcactagtcacataatcccgctagtggacatggccagactcttctccttgcacgacgtcgacgtcaccatcatcaccaccgcacataacgccaccgttttccaaaagtccatcgatttagatgcgagtcgcggtcgccccatcagaacgcacgttgtcaacttccccgtcgcacaagtgggtctccccgatgggatcgaagccatcaacgtcgatacgcctcgggaaatgacccccagaatctacatgggcctatcccttctgcaacaagtcttcgaaaaactcttccatgacttgccccaaaaccggatttcatcgtcaccgacat

SEQ ID NO: 28685 - DNA, 418 bp, Glycine max
  modified_base (314)..(314): a, c, g, t, unknown, or other
gaagtacaagcagagagttacaacacataggtcttggtcttttccctttttcctaggcacagcacacgccctctcaaatagaaactgagagatgaattctgatcagtttcagaagaacagcatgttcgtagaaacccctgaagatggtggcaaaaacttcgacgatgatggacgagtcagaagaacgggtacatggataactgcgagtgcccatatcataacggcagtgatagggtcaggagtgttgtcacttgcatgggcaattgcacaaatgggttgggtggctggccctgccgttctctttgccttctctntcatcacttacttcacttccactcttcttgccgactggttaaatttcgttcacctgatcctgttcatggcaagcgaaactacacctattccgatgttgtcagat

SEQ ID NO: 28686 - DNA, 356 bp, Glycine max
ggataaattgaagtatagattgaacgcgcacatagaaacccaacaacaagaatgaagaagatgattctaaccctattgttcaatatcatgatatctgtcctctccctcatgccacgcctccgaggtggatttctgcgtagcagactacacaggccccaatggccccgcaaggtactcatgccagagcccagctgcggtcacggtggacgacttcgtatactacagccttggcaccgacggcaacaccttaaacattatcaaagccgcagtgacgccggcgttcgacgcgcaattgcccggcgtccacgggcttggaatctctattgcacgcctagacctatcaaccggtggagtca

SEQ ID NO: 28687 - DNA, 392 bp, Glycine max
ggaagcagtgatggagtcactgaaggacctggaagtacgaaatccaaatgcagaacaaccaacaagtagtgttagttctgtgtatgtagatgctgtagagccgtctgataaagatgcttcttcaggagagatttcgagaccggtggagacagaatcttcctcactcaaacacaccacagagtcaaaattcaaaaccacttcctcgacatcagaagaatttgagccattgaacggtgagtcaaattccatttcagtgaaacattcccaaaatgtggtgtcggagccaagtccagtaccaagtgtttcattagaaggaccagcacatctgcagctgcagccaccaccatcggcacctactgacaacccccattatcagtaactgagtccagcaa

SEQ ID NO: 28688 - DNA, 408 bp, Glycine max
ggtactttgtagtagcaagcgagcatgggtccgaaggagggtcttctcctttgcggggacttcatggaagactatgaagccatggttccatttcaagcattgcaagccttcggtctcgccgtcgacgccgtctgtcccggaaagaaatccggcgatgtctgccgcaccgctgtccatgtacttgccggcgcccagacttatagtgagacagttggtcacaatttttcactcaatgcaacgtttgatgaagttgatgctgcaagctatgatgggttgtgggtgccaggtgggagggctccaaagtatcttgctcatgttcctggtgttgtggaactggtgaccaagtttgtcagtttgggaaaacaaattgctagcatttggcatggacagttgattctggctgctgct

SEQ ID NO: 28689 - DNA, 419 bp, Glycine max
ggcggcaatagagagtagagagtaaacagaaaaggtgaggcgcgagtggctggtgaaggcagcgactgcgagggaagggaagcatctttagctccaaatccaatggcggatacctcaagccgatcaagagacctcgacaagctccttctccgccctggcaatctcgtcggtcctaggttcgaacctggccctgagttgcgagatgaccttcaggccttcgccaattcttgttcagacttgaagatgttggcaaacccaaagccgaggtagctgccaagcgtgtcatggagagaattagtggtgtggaaatcgtgccgcacttttgcaggatcgaggacaaggaaattgaattttacaacaattttaacattattgcccttggtcttgattccattgaggcccgcagttatatcaatact

SEQ ID NO: 28690 - DNA, 289 bp, Glycine max
ggattttaaggttgacttagtaagcacgacctcgtggaatagactgcaaatctttcacatcgcactcatcaccactgctaccgtatataccttccaacacactccaacaacactcgtaataatcaactgttgaaccctaacctcaacgatcctgtcctttaccaacaatccaccgctccaaaatgggcaaatccgacttcaccacctccgactgcgcccatgttctcctcctctatttcaatttcccatcaaccgcatacatcaaaaccctcacaataacctcctacac

SEQ ID NO: 28691 - DNA, 253 bp, Glycine max
ggaggataagaaactagtggtgaaggagatcaaaactttggctggctcttggcagaaagtcttgttttctcgcatctttcgggaagcccatggcggatgttttatagccaaggaagcgtatgggatgtgtgaagatttttctctcttctctgttattcccaattgtgtttacctgttcgcaggggttcttagttggggtttcagcccttttgctcaccaaaaaaaaatttagaaactactgggtgttgctttt

SEQ ID NO: 28692 - DNA, 386 bp, Glycine max
  modified_base (324)..(324): a, c, g, t, unknown, or other
  modified_base (370)..(370): a, c, g, t, unknown, or other
acctcagaagggtggagatccatgtcctggttatctgcttgtttttttcctggaattgcttttattattctgacaggactgaattttcttctctggggcagcaaaagtactggtgctattcccatttccctgtattttgagttgctcttcctctggttctgcatctcagttccacttaccctcattggaggatttatggggacaaaagctcagcaaattgaatatcccgtgcgaactaaccagattccaagggagattcctgcacgtaaatatccatcatggcttcttgttcttggggcaggaactcttccgtttggaaccctnttcattgagcttttctttattcccccctttccagtatctggcttgngaggttctattatgta

SEQ ID NO: 28693 - DNA, 395 bp, Glycine max
  modified_base (342)..(342): a, c, g, t, unknown, or other
ggaggaaacaaagaaattctggtgcatatgctttgttcagcctttatacctggcaatacttttaggtgatcacctagaaagggtttgttgtcaattttgcttagaaagtggaagccattcctgaacctttcaatttttatcactttcccctcacttcatagtaatagcgtaatcatttatttattatttatttatttttatattgttccatccttagaatttgaagtcctttcaagtactcagttcattgcagaggatagatcattacatggatcttgtcttttagtttttggcttttcaagtacctcttgttctttgatttacatgttatgtacatattancccctggaattatttggaataagttgcaaggtatatactttaattagggaatt

SEQ ID NO: 28694 - DNA, 393 bp, Glycine max
gtaccgagtgataataaaattggaccggttgttggtgatgaggatctctttgctgtagattatgtcacttgtgtgggacaggttataggagtagttgtggccgatactcatgaaaatgcaaagattgctgcacgaaaagttattgttgagtatgaagagctcccagccatcctttcaatacgggatgccatcaatgctagaagttttcatcccaatacagaaaagtgtttgagtaaaggtgatgttgatcactgttttcaatcaggtcagtgtgaccgaataattgaaagggaagttcatatgggacgtcaggaacacttttatctggaaccacatagcactttgatatggacagtggatggtggaaatgaagttcatatgatatcatctagt

SEQ ID NO: 28695 - DNA, 416 bp, Glycine max
ggcaagtgtgagtgatatttgagcttaaaccctagccgctcttctcttcattcttcactttggaaacaatcataatggcgttctgtaataaggttggaaatgtcttgaggcagggtgctgctcgcagcacacatgcccctgttgcgtccatgcttaattacatccgctgcatgtcttcaagcaagcttttcattggaggcctttcatatggagttgatgaccagtctcttaaggatgcattttctggctttggagatgtggttgatgcaaaagttataactgatagagacagtggaagatcaaggggatttggatttgtcaacttctccaatgatgagtctgcaagttcggcacttctccttttcaatggacgggaaagatctaatgggcgaaacatcggtatctatgcaatgata

SEQ ID NO: 28696 - DNA, 326 bp, Glycine max
  modified_base (309)..(309): a, c, g, t, unknown, or other
gaggaagaaatgagaactaacaagaatcaagagagagaggtgttactacgttagtctatgaacagtcaccccgagagactgaaatttccagaccctcaaatcaaactcttctattctctcatcaatcaatcaatccagttccctctcggataggaatgggaatatatctcagcactccaaaaactgaaaagttttctgaagatggtgaaaatgactgtcttagatatgggttatcatccatgcaagggtggcgtgcaacaatggaagatgctcatgctgcatatactgatctggatgagtccacttcanttatttgtgtctatgat

SEQ ID NO: 28697 - DNA, 366 bp, Glycine max
  modified_base (333)..(333): a, c, g, t, unknown, or other
gagccagaggaacccagaagataaatctttcaaagaaaaaaggagagtgcttagagagagagcaaaacatattattttcattttcatctttttttgagtatcaacaaatggcaaccactgtgatgaccactctcccccaattcagtggtcttagaccccaattctcagctgcccctgtgaagaacttggttgctgcgcaacccatgagtcgcagggggaagggtgcattgggagctcgatgtgactacattggttcatccactaatctgattatggcggcttctacaaccctgatgctgtttgctggaaggtttggattggctccatcagcanacaggaaagccactgcagggctaaagctggagg

SEQ ID NO: 28698 - DNA, 406 bp, Glycine max
  modified_base (210)..(210): a, c, g, t, unknown, or other
gaagacaatctagagaccaggatggctgatcttagcagctacatagtggaatcttgtactagtattagtggctcaaaagatgggtcaacaacatctgaatcaactatttgcagtgtgtgcaaggaggactttaaaagtagacctgcaagggaaacggctaacaatgagatctcttctaagagtacacaaaattctatgcatgaaaaacanagatttgctgctaaacattttcataaattagaagaagacaacataaatgtggcgaccacagaagttgaagatgcttcttgcaatgaaggtttggatagtgctgaagcacagagggaagattcgacctttgaggactcaggtaaatccacaatgtccagtgcatgcagtagcactgataaagataagtccatcaatg

SEQ ID NO: 28699 - DNA, 299 bp, Glycine max
gacggagcagaggacaagatgggtagtgtgagttatagcaatctgaagaacgccatgatagcattcttggtccctctaccctccatcctattctacctctcattccaatcggccattagtactccttcttcttggtcttctctgtggacatggtgctatcaccaccctctgctattggccaatgtccttttcttcttcaatgtcaatttcctcttctggctcatcggcctaatccaatccagccactggatgattgacccgtattggacagtgatacctgtgatgcttggtcattacta

SEQ ID NO: 28700 - DNA, 418 bp, Glycine max
  modified_base (357)..(358): a, c, g, t, unknown, or other
  modified_base (373)..(373): a, c, g, t, unknown, or other
  modified_base (402)..(402): a, c, g, t, unknown, or other
ggaaggaaggagtaacataaaatggaggttcaatgtgccctcccattccactaacacacatcacatctccctctcgcacgcgacgagggagctccgcttcggaatctcactccctctttctgctaattgacaagatggttgctcagaaattcgttgttgatttgaacaagccccttgtgttccaggttgggcatcttggggaagcctatgatgagtgggttcacgatcctatcgtaagcaaggaaggccctcggtttttccaaaatgattttctcgagttgttcacgcgcaccgcgtggtgggtgattccaaccgtttgggtgccggttgcaagttggttcatttccaactccgtannaaaaaatcaggcctnccttctcttgatgtagctctgctcgtctntcttggcatcctcgtt

SEQ ID NO: 28701 - DNA, 413 bp, Glycine max
gttggcccattatcgaagttcgggtgttctgttccagcaagcagaagcagaagcagaactcaggtagcgtgcggttgttgggggaaaaatagaaagcgatggcgaatcagggtgctaagaaacgcaaggaagagaacgctcgtcacatggcgaggctccgccaaatcatcatcgcctgcaacgttatctatgttttgcttagaatgttggtgttccattcgagcttcacctggaagcactggattgggttgattgtgacttctttggcatatgttattccctatcaacagctcgcgaagatggcaacccctgcttacgctgaagatggtgaacttttagatggtggatttgatatgtctactgggggtttgtagtttgtggggatttacatgatgtatctacataacatgctt

SEQ ID NO: 28702 - DNA, 423 bp, Glycine max
  modified_base (358)..(358): a, c, g, t, unknown, or other
ggcacaagtgagtttgttgatcgagataactagaaacagtgtgatgaaaatgaaggtccttgttttcttcgttgctacaattttggtagcatggcaatgccatgcgtacgatatgttccctctccgaatgaacactggctatggtgcccgtactccggaggtgaaatgcgcaagttggaggcttgctgtggaagcacacatcatctttggctttgagaccattcctgaagagtgcgttgaagcaacaaaggaatacatccatggcgaacaatatagatcagactccaaaacagttaaccaacaagcttacttttatgccagagacctcgaagtccatcccaaggacacattttggggntgttcagtatagatggcaccgtactctttatattccatactacaaaaacatggatatggggtgga

SEQ ID NO: 28703 - DNA, 208 bp, Glycine max
tgggactgttcatttgacaagatgggtagtgtgagttggagcaggctgaataacgccatgatagcagtcttggtccctctacccttcatcctattctacctctcattccaatcggtcattaatactccttcttcttggtcttctctgtggacatggtgctattaccaaccctctgctatttgcccattggtctttttcttcttaaatg

SEQ ID NO: 28704 - DNA, 181 bp, Glycine max
gggaacgaaaatgggtggtagatctggcggcttggggtgcgctacttcctcttacactgagattagaacaaggcgtttgtgcacttctaacaacaccacctttcccttcccccaacaacctcaatcactctctatcgctaaacctctcaaactcatgtctcaacctctgaccaccaactct

SEQ ID NO: 28705 - DNA, 125 bp, Glycine max
ggatcagaaatcgtacagatacacacttggctgaggaaggtcgcaaaagaaaatggagttgctcttgtacacggagtttggtggttcggccgcggatgaggcagctatggagctgatcgagaaca

SEQ ID NO: 28706 - DNA, 403 bp, Glycine max
ggaagaagcaaacacaacaaagttcagtcgtctcgaacaaaaagaacaagaaaacaaacacacaaacagacaaacaataatttaaattgttctctggtgttcttgctattaattaatagtaatttccactgctccagttccaaatatatatacttactagtttcctacacactccttaattactatttttcactttctcctttcaatatgaggaaccccactcacaagtcccctgaggttgaaaatgatggtgattttaaagttcatctgttctcttcatcatccgagttgcttgaaaagcttcatgaaaaatggagttcagtggagaaaccaccatacccagctatgtattctagtatttatggaggtatcatacttgaaccagcaatgatggtaatcccca

SEQ ID NO: 28707 - DNA, 383 bp, Glycine max
gggaacgaaaatgggtggtagatctggcggcttgggttgttctacttcctcttacactgggattagaacaaggcgtttgtgcacttctaacaacaccacctttcccttcccccaacaacctcaatcactctctttcgctaaacctctcaaactcatgtctcaacctttgaccaccaactctgttcttgttgaagaggctgctgctgatggtgattcctccgccgccgcacctcccctcttcgattatcatcgtatcgaccaaaaactgctccaaaacatagtttacgatgctcttgtctggagcaccctcaactgcctccttgttggtgacaaatctgttcagagatcaggaagagtttttttcctggggtgggcctggtaca

SEQ ID NO: 28708 - DNA, 413 bp, Glycine max
  modified_base (377)..(377): a, c, g, t, unknown, or other
ggttgggattgggaagtagaagtacacattcccagtaaggttaacaaaaaaatccaacaactcagaaagaagagagaagacttccaaattgcaaaggatgatgaagaagaatcagagcaagcaagttaactcgttgaccacgacacgtttgtcaccattggcgaaacccttcacgctcaaccgttctaccctccaaccctgctcaagttcccctttttcagggtacccttttcttgaatcgccaaaagaatatgactttgatgggtttggggaggatttttcgttgcctagttactcacccttgtgccatgggaagcaaggagaaggggattctcatgagagtttgtttcacaagggtaagcatgctgttgatggantgagtccctgcccagagtctgctggtactagtacaa

SEQ ID NO: 28709 - DNA, 115 bp, Glycine max
tgcaggcgcgtgtgattacggatgcgacaagccgactgacagtgggagtagcaggaaacttcagcacctgacaaagcttatatatgacccatatattgcccatgattatgactag

SEQ ID NO: 28710 - DNA, 387 bp, Glycine max
gaatatggagcgtgtgactcatgctgtaatggtggggtgatgggaacgcatttgagtacatactgtagtctgggggagtacagaaagaaaaggactatccatacaccgggagagatggcacctgcaaatttgacaaaaccaaagttgcggctactgtatctaattacagtgtggtttcccttgatgaagaacaaattgctgcaaacctagtaaagaatggccctcttgcagttgctatcaatgcagtttttatgcagacatatgttggtggcgtctcatgcccatacatctgtgggaagcatttggatcatggggttcttctagttggttatggtgaaggtgcatatgcttccatgcgttttaagaacacaccttactggatcatta

SEQ ID NO: 28711 - DNA, 166 bp, Glycine max
tggatttcaaatcgtacagatacacacttgggtgagggaggtctgtaaagaaaattgagttgttcttttacaccgtgtctggtggtgattgtcacggttgtggcaattattgaactgaacatgaacaacaggggtcgaattaacacctatttcgcatttaaattct

SEQ ID NO: 28712 - DNA, 139 bp, Glycine max
ggaaagaatcagtgaactgcccgaaaataaacacagaaactctcaacgacgttctttcatggggttcaggaagaaaagtcagtccaatgatgagagcatggataggtgaagtcattgaggacgagagctctgagagtga

SEQ ID NO: 28713 - DNA, 323 bp, Glycine max
gggtagtggggcagcacagcaatacgtatcattgaggaagtttcctgtggatcgtctccgaaaatgaacgacgcagacgtctcaaagcaaatccagcagatggttcggttcatccgccaggaagctgaggaaaaagccaatgagatctctgtctccgccgaagaggaattcaatatcgagaagctgcagttagtcgaagccgacaagaagaagaccaggcaagagtacgaacgcaaagaacgccaagtcgaaattcgcaagatgattgactactcaatgcaactgaatgcttctcggatccaagttcttcaagctcaagatga

SEQ ID NO: 28714 - DNA, 410 bp, Glycine max
ggaggcaatagtagcagcaattcacactggtctttgcttctcgttactcatttctcacctaactttctattcttctcagtctcagatcagaaccttagccatggcagcgttccagaagatcaaggtcgccaaccccatcgtcgagatggacggagatgaaatgactagggttatctggaagtcaatcaaggacaagctcattttgcccttcttggagttggacatcaagtattatgacttaggccttccttaccgtgatgagaccgatgataaagttacaattgaaagtgcggaagcaactctcaagtataatgtggcaattaagtgcgcaactattactccagatgaagctcgggtttggtgaaggagtttggtctgaagtcaatgtggaagagtccaaatgggacaat

SEQ ID NO: 28715 - DNA, 333 bp, Glycine max
gggataaggaaatatactcccttaggacaggcaactgctcaacaagtgttgattgacaaaatatctgcaggtcctataactttgattgcgataggagtgcaaacaaatatagctatgtttctcatgaacaatccacacttgaagaacaatgtacaacatatttacataatgggcggtgctgtgaggtcaacagacccaactagttggtgccccaaaaatgcatccttttcttgcattactgggcagtgtggtgaccgtggcaatgtattcacaaattatgaagcgaacccttatgcaaaggttaatatgcttgggtacccttttgcaagattc

SEQ ID NO: 28716 - DNA, 341 bp, Glycine max
gacggctaaaaactaaaaagcatccggggactcaaatcatcatggctggcacggatgcattcttgaatctgatcatcatgtatttcagtgaatcaatacaagcaagtcactgatcttaaactactattcacaaacatgccctggtgtggaatgcattgctgccaaggcagtgaaggatgccactgctagggacaaaacttgtccaactgcacttctgcgaatgcactttcatgacttgttcgttcgggggtgtgatgcctctgggctgctaaattcaaaaggaagcaccctagcagaaaaagatgggccaccaaatgattctttgcatgcattctatgtca

SEQ ID NO: 28717 - DNA, 348 bp, Glycine max
ggagttagggaagaagaagaaagagcaactcaggggcgacgatgctggagtcgatgttgttggacaagaacccattgcttcacacatgcctaaccctaatcctcgctttcaccttggccttcttcaagatccccctcttcttgctgcacgggctccagacctacatgcactctgactcccaaccccaatccaacaatggcctacgagccgacatccggcgtcccagcagcatcgacagctaccaacccttgtcttccaaaaccgacgtcgaactgaaaaagcggaacatgtccaacaacaagtccgatttcgatgaaaacaatgctcagatcttcagaatcacgctcg

SEQ ID NO: 28718 - DNA, 428 bp, Glycine max
gtagatagtagataacattttttttattatatatatatatttgtcgttctgaaagtacctgaagcttattccttttgtgccttttgtttcttaccactttctgggtctgtacttcttcaggtcaaggtcaccaattcgtggaaggttggcctttttcaattttgtatatattttgtctttctgaaagtaactgaaactaattccttttgtgtcttctgtttttaccactttctgggtctttacttcttcaggtcaaggtcaccaattcatggaaggttggtctttttcaattttgtatatattcatggaaggcttacatataatctcacaagtatttctgaaagagttaacttgtggggttttttatgttgactaatggatattggataatgatgggcttattaaggtacaattttttttttcttctc

SEQ ID NO: 28719 - DNA, 399 bp, Glycine max
gacatgcaaaaggaatagctgctaaatgatgaacgcggcaacagcagctaatagcagtgtttattcacagacacagtgcagactactttcctcggatcttcgaagttcgattcctttcttgaatgaacgcaagtcacggttggtggtaagggctggcggtcgtcctcctcaaaatatgggcaaggacgaggatgagaagcagcagcagcgtgtcatacaacaacaacaacaacaagaacaacaagcaccttcgcccgtgtctcttagcctggacgacgtgaaccccgtaggactgggtcgaagatcgcggcagttgttcgatgaggtttggagaaagttctcgggattgggtagatttctaggaccatacggtcggatgatcatgaggctctggatgcc

SEQ ID NO: 28720 - DNA, 413 bp, Glycine max
gggtgtggttacaccacttgggcatgagccagatggcttctacaataatttgcttgatggtgttagtggcataagtgagattgaaacatttgactgtgtagaatatccaacaaggattgctggtgaaatcaagtctttctcaactgatggctgggtagcaccaaaactttctaagagaatggataaatttatgctctatatgctgacagctggcaaaaaagccttggttgatggtggaattactgatgatgtaatggatgagttaaataaagataagtgtggagttctgattggctcagcaatgggtggcatgaaggttttcaatgatgccattgaagctttacgattctcatataggaggatgaatcctttttgtgtaccttttgcaacaacaaatatgggttctgccatgc

SEQ ID NO: 28721 - DNA, 409 bp, Glycine max
gaggggcatgatatgattatcttggctggtgctgagtatgggagtggaagctctcgtgattgggctgcaaaggggccaatgctactgggcgtgaaagctgtcataacaaaaagttttgaaaggattcaccgaagtaatttggtgggaatgggtatcattccattgtgttttaagcccggggatgatgctgattctcttggattaactggccatgaacgttacaccattgatctaccaagcaatgtgaatgaaatacgacccggccaagatgtcacagtggtgacagatgccgggaaatcatttgtatctacactgagatttgatacagaggttgaactagcttacttcaaccatggaggcatcttacaatatgtcatcagaaacatggtcaatgctaaacattgaatca

SEQ ID NO: 28722 - DNA, 413 bp, Glycine max
ggatggatgatggaagaaacaaagagaagggaaatatcaggaggtgcgagtaccggagccaaacgcgggtgtgtgtgtgtgtgagggagagagagatgcagttccattcagaaactccaaactaaacatccctggcgacaaccttaggaatctcgatcgctgaaaaaacctatgcagccccgaacacactctctgcattccaacttgtttaagtcatgcctttcgattcacccttctctcaataaatttttagtcagattcttggccaccgccacactcataataaagttttgtttttccaaataaagggaatggcgactcctgttgagcctccaaatgggatcagaactgaaaggaaagccccaattattattccatgtggcaaacccttgttgagattgactcaaaatacg

SEQ ID NO: 28723 - DNA, 308 bp, Glycine max
gtcctggaagaattgtagatagaccaggtgggatgtctcggatggatcgccgtggggatgtggtaatggaggatgacagatggagtagagtttctggtgcttttcgttctggacgtggtttggatggcattggaggtaatgtgggattccgatctggccaaggaggcaattttggtgtcttaaggaaccctcgtgcacagacaccaccacaatatgttggagggatcctttctgggccaacgcaatcagtgggaaatcatggtggaagaaataatcctgatggggagaggtggcagcgttctgctagc

SEQ ID NO: 28724 - DNA, 205 bp, Glycine max
agggggtcactgtggtttctgtcatgggtggtagagaatctgagtcctcagagatctaagcctctctgtctggtgttttgttcatcacagacccttttgcttgggcataattgtgaaagtgaaaaagtgagagaagatgatgaagatgaagaatattaatagtagcaaccataattataagacaaatggtctttctttcatcatg

SEQ ID NO: 28725 - DNA, 431 bp, Glycine max
ggacatgtggacagtagcgtgagcttagagggtcgttccattcctcgtctagatgtaaacggtttgatgccatcagagcatttaaatggtactgaaggctatgtaaatgacaaagagcatccttctgaattggaacgtaatcatcactcagctgaagatgtaaagattaactctatggcagacacaggacccagcattcctcaaattcttcatatgatatgcagtgggggtgatggaagccctatttcaagtaaacggactgctcttcaacaattggttgaagcttctataacaaatggtcattctggttggaccaaagtcttcaatcagattttgacagtagtgcctgaggggggttgctagatgaatcaaattcctcagtcaaagagcttgctctttcaatgatagttgaaatgcttaaaaaccaggaa

SEQ ID NO: 28726 - DNA, 396 bp, Glycine max
ggacctttgtagccactaatactattgttgctaggcttagatccagtctatgaatggcaaagccaagatcttggactcagatatggccttctattgttggagtgtgtcttctgaattttgttctgaacttcaagatcgtggcagtagcagatgacactggaagcaacagtattgtatcagaaggtgactgcaagaacacaaattatcagatttttctccctccaccttatcagaatatatcctctaccatatgcaaacctgtttggcattcatacgaattgaggtacaccaagacgggtgacaccacaactatcatattatctgctccctacacttgtggatgggtgggaatttggggggattttctagggatggtatgatggctggttccagtgc

SEQ ID NO: 28727 - DNA, 379 bp, Glycine max
ctgggggtcaatagattagagagatacgagggggactcgggtaagcttacggcttacgtgcgaagcgagcgagcgaacgagaagatgtagttattgatttcaatttccaagtcccaaccattatcaaactgacatatccatttggtcaacaaagaatcacacaccaaaccgttcgaatctaaagatcgtggatccgatcccggcgccaccaagattcggcacggacctcttctaggatcctctcgacgcccacccgctgtggttcaaaccggcgtcgtatatctgcatcgacttcgactccgaatcctacatctcggagctgcgaaccttcgtacccttcgacacgctgcgtttacccggaaagctaaacagctaccta

SEQ ID NO: 28728 - DNA, 411 bp, Glycine max
ggaaaagaggagaatgtgaagaaggctcacgaagcccttttggtaagagccaaggccaactcagaggcaactctgggaacctacaagggtaactcaaagcttgctgatggtgcctcagagagcctccatgttgaggactacaagtactgatcaatctaagtgcgggtaggaatcggtattttatgggtacaaccgaattttcttgataatgagtattgtgcttcgactcttcccagaataataatcgtttggaattttgctttttgttattcctagtgttccttcatatcaattttagtaattcggtgtattggtcaaacctgtgcaaacaggggaagggaatttgggtaactttggtttcttgatagacaccaccaccttgctgttaacgaggctttgtgcttattttac

SEQ ID NO: 28729 - DNA, 424 bp, Glycine max
gaaggtaggaaacccataaatttattctagtaatacatgggtgggttttgtttgccttgtgtgtatctttctattgacgagaataatggaatgttcccaattctctgtttttttgcttttgtccatttttgtgggaatttgtttagcttctactgaggaacaggaaagggacaggattgccaagctgccaggacaaccagaaaatgtgctatttgcacactactcaggctatgtgactgtgaatgaagaagctgggagagcattgttctattggctggttgagacaccagctagtattgaaccaagttcaagaccactagtgttgtggctcaatggtggacctggatgctcctctattggttatggagcagctgaagaaattggcccttttagaattaattctgatgggaattcactttactcc

SEQ ID NO: 28730 - DNA, 398 bp, Glycine max
gggagaagaaggaagcatcataaccggccaaagcttctctctcttccatttatcccccataaataaaactaggtgaaaaaaatatactctgtgcttctcatgatgatagtgtagctgaagctgcttctgctgcagcattggtgatttggacacaaaaaaagtttcaaacttttcagttctctgagcttctggtttatcaattttgaaggagttcaatactttaccctattagttggttccctgaaatttgtattggtattgctgtatcagaaattcttctgaacaatctctttaatcaaccatgtcattattggctaaacttaaaaccgctgtgtcaccatagatgttactggtaccctaatggcttacaaaggggagctcggtgactattattgcat

SEQ ID NO: 28731 - DNA, 326 bp, Glycine max
ggagtgaggagactgagaaaacagaggataacaggatggatgacacagtttctgcgttgaggtctttgatggtttctcactctccgccgctggatgccttagtggtgccctctgaagattatcacctgagcgaatatgtgtctgcacgagacaagcgccgcgaattcgtttccggcttcactggaagtgccggcttggcacttataacaaagaatgaagcactgctgtggacggatggacggtattttttgcaggctgagaaagaacttagtgctgggtagaagctaatgcgaattggtgaagatcctgctgtagatatctggatg

SEQ ID NO: 28732 - DNA, 52 bp, Glycine max
tgggagagacatgagcagctagacctttgggtggtcgggatatcagctggag

SEQ ID NO: 28733 - DNA, 341 bp, Glycine max
gacagcacaacttgtttatcgggacgttgctataaacgttgttgttttcagataaacacgtgactcactatctatctatcaatcgatatctccgagttcagccgaaccaaactccgaagctatggcagagctccaaaccaaggttgaacctgttacggtcccggctccggtggatcccgagccaccgctagctgaggctccgccgctcgagaagaaagcggtggcggtgccaccacctgttccggctgcggcagaggaaaccaaagctcttgttattgtggagaaagagaaggagaatgagaagataccagaaccttgtaaaaagaacgccttaaggggat

SEQ ID NO: 28734 - DNA, 383 bp, Glycine max
caggtgtgagcttgagttatagagcgaagagaatggctcccaagggttgaatccttttggcttagatattcttcttatcaccttcactgagtcgttgtcttgctgtagatattgttctataaatcatcttttacaaggaatcttgctctttcatactcgtcttcagcttccttcaagatcagttttacttcattcttcatatgttcactgcttattaatgctttaacagcttttcctgatcttgaacttccacaaacaacaatcttgactacacggtggactccagttacatattttgagaagaaaatgtgcttgatgtttgtgttcggtgaagatgagaaggtggtgtctaggcagccagcaatttccccgtttgccttttc

SEQ ID NO: 28735 - DNA, 311 bp, Glycine max
ggaacaaaaaaaaaacaactttgcggctgcgctgctgctaatagcgcgttgcatctgctacctatcatacatattttcgccaaaccgccgattccgttgagcgtttctaccgtagcgctcaggaagggggcagtggctggtggtgttggttgtggtggaggtggttttgctgatcatttgtggtagagggtaggaaagaaaaaaaagttgaaaatgagttcagacagccgcagcaggagcagaagcaggagcccaatggaccgtaagatccgctctgatcgattttcctatcgtgatgcaccttacaggag

SEQ ID NO: 28736 - DNA, 346 bp, Glycine max
cgtcacacatacgactgatgcgaatgacacagatagggggagtacaatgtagcatcatacgcggtcaaagcttacttctatcgcatgtattcctccataataaaacttatgtgaaaaaatatactttggacttaatatgattatagcatacccgaatcttgttttgctgcaacattggtgatcttgacactaaataagtttcaaactattcaattctctgagcttttggcttatcaattttgaacgagttcaatactttaccctattacttggttccctgaaatcagtattggtattgcatgatcagaaattcttctgaaccatctgtttaatcaaccatgttatt

SEQ ID NO: 28737 - DNA, 430 bp, Glycine max
ggaggcataagaagataattggaagattgaagaaggagtgattgtaatctggaaggatgaggagtactattgatttacgattgggaagacgtgcgcgtattccattccaacgagcattagcaacgcagagtaacaataataacactctggtgtttatccctctgcctcgctgtctcagcgcaacgcggtcgtttcactttcagggcaattcaccgtttggattctccagcgggcatgggcaacgcaagagcatgttcatccaaacgcagcccacgccaaatccctcgtctctcatgttttatcccggcaagcccgtcatggaagttggaagctccgacttaccaaaccctcgtttcccttggaatgaactctcccctcgccaaatcgctcttcgcaatcgacggcgttactcgcgttttctttggatctg

SEQ ID NO: 28738 - DNA, 409 bp, Glycine max
  modified_base (305)..(305): a, c, g, t, unknown, or other
ggatgagaaaagtagaaggggagtgcgcgttagggctagaggttctggttctggactgttaacgttgtcttcttctcttctagaacttattatataatccatgttttggaaggaatctgtttgtttcatactcgtgtcgtgtttcctcgaaaatcacttgaacttgattcttcatctcttgcctcctaataaatcctctaacagctttgcgtgatttcaaactccgacaaagaacaaccttgtcgacacggcaaagcaaagtaacatattaagagaagaagatgtgtttggtgtttgtgtgcggngaagatgagagggtggtgtcaaggcagccaagcactccccgggggcctgtccttactgcagagggatgatccaagctatggacgtagagagtcagtggaatttc

SEQ ID NO: 28739 - DNA, 406 bp, Glycine max
gactacaacattgtttaatgtactatgggggcgcttaggctatgctgcatggggaaatgatgcaccatctaatttcctcaaaggattcggcttctatgagccctttcggctaatagactttgccaatgtctgcatagcagtgcacttagttggggcataccaggtctttgtccaacctatatttgggttggtggaaaagtggaccaaagaaaattggacagaaagccaatttataaatggcgagcatactttgaaccatcctctatgtggaagctacaatgtgaacttctttagggtaatgtggaggactgcatatgtgattatcacttgccgtgtaactatggtaacttcccatttttttcccttaaatgacctttttggccctttattggtagcactctttttt

SEQ ID NO: 28740 - DNA, 404 bp, Glycine max
gggctttcatttgatttgatccaaggccaatcctcggtaataacaacgagaagttgatacaaacaatagaatgattgagtttcggatagctcctccatcataggcattttcagtcttcttccattcacactgtaaccatcaatcatatctgtatcgattctaaaatcttcaagaagatgcagctacaagatggttctgctggtaaagtcattaataacctctcacaagttctgatttcctccgtcgccggaatgattatggacaagtcaagggtggtgggagaccagagcatcgttccccgccacataaaagatcactttggccgtgttgaaaagcttgagaagttctctctctatgttggtaggcaaaatgggaattctagagagcgaggttccagcttaact

SEQ ID NO: 28741 - DNA, 396 bp, Glycine max
ggttctgagaattcgaatctaggatttgtttgagcgttcgcgaaggatcatggtggggttcagaaacagatacatggttatggaggtttttctgaaccctaatagggacaaaggtggggatgattctgttatagttacacagtttaatgtctccaaagctgtaagagacagcatattggtgaattttggggagtgtggtttggcttcgtcattgggatcgtttcaggttaagtatgtgaatccaatcactaatgtgtgtataattagggcttcaagggaacagtatcagaaagtatggtccgccattacaatggtcacaaatattggaaactgcccggtcatgtttaacttgctgggaaatttttatcttgaagtataagggcttgtaaaaatgct

SEQ ID NO: 28742 - DNA, 394 bp, Glycine max
tacttaggggactttaccggcacttgttttcattggcagttgagcttatggttcaattctcaaggtcctcattccccgttccctcgcctttgcttcctagttcctactgtgacctgtgagtctccccttcccggcctcgccaacgggaaattcaacggagttgtgtttgcgaatcgccttttattatctcatttctcttgccattcacacacttcttcatttttgcgtttctcttttcttacgctcttttgctttcattttcatttaagctaaccgcgttttttttcttttcttatcttttcggtttcctcagttaattctcgtgtttcttcagagcgagcataaggactttcgcatcggagaccgaatcgttagggtgaggggagtaaataaa

SEQ ID NO: 28743 - DNA, 403 bp, Glycine max
  modified_base (303)..(303): a, c, g, t, unknown, or other
gggggaaggaaagaaattagaaatatttattcatggtcaccaaatcttgttccctgcaagagaaagaaagaagggagagaagaagttgttgggttgagttggattggatttctaatctaatctatacctttcttttttcctatgcttttaaggcacaaacccttctttcttccctcttctttcttcttcttattggtattccttgcctttaccctttagggaaggaagaaggaacaactatactactattatccttattattggtattattgtaattaatctttttattatagttattggtgntgttattattcctcaaatatggattcgttgtgcctctccaacgactcagttgtttctggattcaaagacaaggagtcaatggttgacccctttttggtcg

SEQ ID NO: 28744 - DNA, 302 bp, Glycine max
  modified_base (241)..(241): a, c, g, t, unknown, or other
gaagacaccgagcgacaaagatcgacgatgatggacgaagccgaagaattagaaccgttgtttgattacagccgggttcagcctctgaaccccatcgacctcgatgatgatcttgatgattacgaggatgtgatttgcgttgatagtaaaaagaggaagatttcccaggctgttgggaatgagaagactaatgggaaaagagtaacagtggtggacattgaggatgatgattggttacctncttcaccaaagatcgcaagtaatgcacagaagacgattgacgaagattcaactttggaaaa

SEQ ID NO: 28745 - DNA, 386 bp, Glycine max
  modified_base (339)..(339): a, c, g, t, unknown, or other
gatccaaaagtcattgagctcattgacaatgttcgaatactacaaatagacatggtatggtgctattttatgatacgagacatcagatggctctcagatgcaggaaagcgtcttgaaatggctcgggaaggtattgaacgtgctcatggaaaggattcttttcgcctcagactcttacaagtaggtcgatatccagaactcgcattgcatttgagactagagctacttgaaggggtagtggcatatcatattggccaattggagaaatccaaaaaaacattagcctcagcaaggacaaagtttatccagcttgcagtgccagatgaagccttatcactngttatgagcatgggctttgtttttgggaacgcgatgcaaagcgagca

SEQ ID NO: 28746 - DNA, 433 bp, Glycine max
gggggatgggatatcagtaacttgaacctggcagatgccatggccagggccaaggtgtttgatatcgacctgcagaaacagttgaggccttacatggaatctatggttccactccccggaatctatgaccccgatttcattgctgccaaccaaggagaccgtgccaacaacgtgatcaagggcacaaagaaagaacaagttcaacaaatcatcaaagacattaaggagtttaaggaaagcactaaggttgacaaggtggttgtcctgtggacagccaacacatagaggtacagcaacctagttgtgggactaaacgacaccatggaaaacctctttgcttccttggacaggaacgaggctttttgtagatttccccttccaccttgtatgccattgcttgtgtaatggaaaatgttcctttcatcaatggaag

SEQ ID NO: 28747 - DNA, 423 bp, Glycine max
gagagagttgtgggcaactggttggttgcatgatcggatacgcgttgtggtttcaagtttcttcgtgaaggtgctgcagcttccttggagatggggaatgaagtatttctgggacacccttttggatgcagatcttgagagtgatgctcttggttggcagtacatatctggcactctccctgatggtcgtgaacttgaccgaatagataatccacagtttgaggggtacaaatgtgacccaaatggagaatatgtgcgacgatggcttcctgaacttgctagattaccaactgaatggatacaccatccatggaatgcaccggagtctgtactccaagctgctggaattgaacttggtttttccaaaattatcctcttcccattgggggaatagattcgcagaagttagacttcaagaagcac

SEQ ID NO: 28748 - DNA, 327 bp, Glycine max
tgtggtattcgattgaactgagatgtccaagcgactgctaggcatagcggaagaggaaggtcaaagcaacgtcactttgttaggttcttcctcagccaccatggaacgtgtgtgcctgaatagctcaaatctgaacgagcgcaactacatggggatatctgatagatcatctgtggacagcttctcgccgaccttctcagatgagactaatagcaatctgaacctgaaggctactgagctcagactagtgcttccggagtcgcaatctctcgaacgagattcagatctttgcttgagacgttcgattcagtgtgatgaaaagccact

SEQ ID NO: 28749 - DNA, 386 bp, Glycine max
  modified_base (360)..(360): a, c, g, t, unknown, or other
caccaaaaatatgagcattcccaactaaagggcaatgaaaataagaacatggatgccgtaatggaaaacatacaaccacaggagtctgaataccaggatggcaaggatgaaccaaggaatgtggttgtagcaggggaattcgacaccagtactgtgcagttcataaagaatgaagatctagaagagttgcgagagctgggttctggtacgtttgggactgtgtaccatggaaaatggagaggatcggatgttgcaattaaaagaataaagaaaagcttgttcgctggtcgatcttcagaacaagaaaagctgaccatagagttctggcgggaagctgacatactttccaagctttttttnaacatccaaatgtggtggcattttat

SEQ ID NO: 28750 - DNA, 339 bp, Glycine max
tccagggccgactcacgcctgcgtgcagatgacagcagacgtcagaatgccacctttaaatatcagcattcccaactaagggacgcgtccaatctcaacatggatgccttatttcacaacatacaccaccactaacatgattaatatgatggcattgatgaaccaactaatgtgacggttactaacaacttcaccaccagaactctgccggtaacaaacactatagatctgtagcacataccacatctgacatctggtgcaatagcgactaagtaccaaggaaaatgccttgcatacaattttgcaacccaaataacaaataaaacctgccttgctact

SEQ ID NO: 28751 - DNA, 420 bp, Glycine max
  modified_base (360)..(360): a, c, g, t, unknown, or other
cattgctgcagatgctgcagcaacctttaaggagcgcttgacaagacgtaaatctactgtggctgaattcctttccaagaattatgaatggtttttcgcagaatataacactaagctgttggaatcttccaattatattacaaggcgtcaagctgtcaagttgttgggagatatgttacttgatcgttcaaattcagccgtaatgacaagatatgtgagctcaagagacaacttgaggattttaatgaatcttctaagagagtcaagcaagagcatacagattgaagcatttcatgttttcaagctatttgctgctaaccaacataagccagctgatatcgtcggtatatttgttgcggnaaaaacaaaagtaagatgctgagactgttggaagactttcaaattggcaaagaggatgaa

SEQ ID NO: 28752 - DNA, 406 bp, Glycine max
gaaggcaagagtggttagggttttgggctggtgtttttgtgaagcttgagatcaggaattaatttcagtggttcagagaatggcaacggattcttcaaatggtaatggacatcaccagacaacaacaaagcagcctcctttgccatctcccctgcgcttttccaaattttttcagtccaacatgagaatcttggttactggaggagctggattcattgggtctcacttagttgacagattgatggaaaatgaaaaaaatgaggtcattgttgctgacaactacttcactggatccaaggataacctcaaaaagtggattggtcatccaagatttgagcttatccgtcatgatgtcacggagcctttattgatcgaggttgatcagatctaccatcttgcatgccct

SEQ ID NO: 28753 - DNA, 325 bp, Glycine max
gggcaaggtcaagatcggaatcaacggatttggaagaattggccgtttggttgccagagtcgctctgcaaagagacgatgttgaactcgttgccgttaacgaccctttcattaccaccgattacatgacatacatgtttaaatacgacagtgttcacggacactggaagcatcacgatgtcaccgttaaggacgagaagacccttctcttcggtgacaaggcagtcactgtttttggacacagaaaccctgaagagatcccatgggggtcaactggagctgacatcattgttgagtccaccggagttttcaccgattaggacaag

SEQ ID NO: 28754 - DNA, 358 bp, Glycine max
  modified_base (318)..(318): a, c, g, t, unknown, or other
gggcgttggggtgattcctgtaatccatcatatggtgcattatctgattatcagttcatgcggccacgtgcacgggacaagaagcttgttgaagaatgggcagttcccttgaaaagcgttgaagatatatatgagaggtttagactgtattgccttggaaagttgagaagcaatccttggtcagaacttgatggtcttcagcctgagacaaagatcataaatgagcagctggagaagattaacacaaagggcttcctcaccatcaatagccagccagctgtcaatggggaaaagtcagattctcctactgtaggctgnggtggacctggtgggtatgtttatcagaaggcatatgtag

SEQ ID NO: 28755 - DNA, 428 bp, Glycine max
gttcaaaatgaggaacaggtggagctttcatttgcaagaatgtgggatcattcactagagggaaagtttgtccccttaaatattgacaaaagattcataatgctccgtggttcatcaggcttctactcttatggaatttatgagcacctaaatggatggccagattttgatattagtgaaacaaggatcactttcaagcttaggaaagacaagtttcaatacatggctatggcagacaataggcaaagggttatgccttttcctgaagatcggttagcaggaagatgccaaaccttgggctacccagaagctgtcctgctagtcaatcccaaagatccacgattgaaaggagtaaaagagtggatgacaagtatcagtattcatgtgtaaacatgaataatcgagtccatgggtggatatctttcagt

SEQ ID NO: 28756 - DNA, 436 bp, Glycine max
  modified_base (356)..(356): a, c, g, t, unknown, or other
ggatcagaactaagaagaagacatggcatcgtccaaggtagcgacgacgacgacgacgacgaattcggatatttcgagccagcaggtatgggacggcgccaccatggagatggagtctcaagacaacatgaacatgagcatgagcctccaggatttgttgaccgaaaacgacgccgtgccaccctctcatagtcatggaaggggaaagagaaaaaccctagtggaggaacccctcgtcgtcgataaggtcactcttcagaaacagagaaggatgataaaaaacagagaatctgccgctaggtccagggaacgcaagcaggcttacacagttgagctagaatctttggttacacatnctttcgggaggaagagaatgccatcttgttaaaacaagaggccgataggaaaaggcagaggttcaatcagctcatggagt

SEQ ID NO: 28757 - DNA, 440 bp, Glycine max
gattgcagtgagtatgatgttgatggggctgaagaagagccgaacttcgatgttgaggaccggaagcccgaccatcttcatccatcaaaccttgggatggagagaatgatgggaaggatgccaattcagcaaccttctcatcccatgaagggagatgttgtcacaaacctagatttcatccggaagaggaagatttctagtgacttcaacatgatgatggatcagaaaatctacacatgcgagcatccccaatgcccttacagcgaagttcgccttggtttccatgataggtctgctagggacaatcatcaattgaattgtgcatatagaaacagttctgcagattatggtggtggtttccccccaatttccatgctactgatgttaatccagtcatattcccccagtcctttgttcaacccaacactacagctcagtct

SEQ ID NO: 28758 - DNA, 292 bp, Glycine max
ggagtgagagagtagcagctagcaatggagatttgtgccctagcttcttctgctactccaagaccttctcttacaactccttccacttctccacacactgtagtcaccaccaccttcagcaaacctcaactgagacgctcccacgtagcagtatcacttcctacctcaaccaccatttcactgctcgctctcttcgcccctccaagcgaagccaaagccgctgtcagcatcgccaaagaccagattgtctcatctgtcacccaagtggagaaaacgctggatcatgttcacg

SEQ ID NO: 28759 - DNA, 262 bp, Glycine max
gaaggagcttaggcatgaaaagcattatagatatgttagtactcatgatgtcgggtactgggctcgaagcttcttgcaagatttggaaaggacctgtagtgatcatgtgcgacgaaggtggtgggggattggttttggattaagctttagagttgttgcgcttgatccaaacttcaagaagctctcaatggagcacataatttcagcttacaaaagcgacggcactagggcaatcctttctgactacgatggtacgctaatg

SEQ ID NO: 28760 - DNA, 267 bp, Glycine max
tgttgccctgaaaaatgatctgaaacttcatccgtattttgaacatggagaagaaaaagaaaaacctgtaggtgatttgtccccaaggttgggggatcctagccaatatcttgatggcacacgaatttacatacaaggatcattatgggatgggtttgcagatgggaagggggacttcactgatggaccttatgaaattcaaaatcccgaagatttctttacagataagttttataattatggattcaatcccgaaggtggttctgt

SEQ ID NO: 28761 - DNA, 273 bp, Glycine max
  modified_base (203)..(203): a, c, g, t, unknown, or other
  modified_base (257)..(257): a, c, g, t, unknown, or other
ggaacacaacacaacgttagccttaaaagtttaagccttagcagcgtcgacaatggccggcgaggagctcgccggagaccacacgccggagctgctgtgtctggtccatgacatcgccggaatgtgctcggcgttatcctcctccgccggctccgccggcgccatgttccgcaaggactgcaccgatctggttcgccggatcntccttctcacccacctcttcgaggagattaaggaactcagcaacaacgttgtcngtggttcttctttctc

SEQ ID NO: 28762 - DNA, 262 bp, Glycine max
  modified_base (217)..(217): a, c, g, t, unknown, or other
  modified_base (229)..(229): a, c, g, t, unknown, or other
gacaatcaaattaaaataaacctgagagatcagatacaaagagatcgagcaatggcattagtgtcttcactttctcctgcgaccccttcttcggttcaaaccaacactttgaacccattgggttggactgatgatcagatcctggagaagggttacattacccacgttcacaccgctgaaaggtacgatgtggaatcgcttttcaacgttactgcanacatcatcaagncgtctactgcacttgctgacagtgtttgctgta

SEQ ID NO: 28763 - DNA, 319 bp, Glycine max
  modified_base (305)..(306): a, c, g, t, unknown, or other
gggacaaagtatgaaggaggaagtagtggctgcagagatatgagattggaatcagaaaaaaatgtctcatcatttttaaatgattttgttacagataatgctggcttcaatgatgtaatatgtccatcagaaaaagtcagagttgattctgcatgctttccttcagtttttcttgatacagttgtttgtgaaagtgataaattgcattatgcagatattaaccaaaaaggggcagtgaattttgcccaaccttcagaagcaaactcccagcaacatattgaaaagtcaaagtttcatactgagcnncttgtacaggata

SEQ ID NO: 28764 - DNA, 204 bp, Glycine max
ggttgagtgaagagaatggctcccaagggtttaagctttctggctgtgctaatatgcgttccagcactgtcactgagtccttctgacgctgcagaagggcagaataatggccttgttatgaacttctacaatgaactatgcccttacgctgatgacattatcacatatcatgtcaagcttacatacatgcgccacaagaacact

SEQ ID NO: 28765 - DNA, 335 bp, Glycine max
  modified_base (234)..(234): a, c, g, t, unknown, or other
  modified_base (321)..(321): a, c, g, t, unknown, or other
atagaacaaaagaagaagattttggttgaaggaggacaagctaccatgttggacattgattttggaacttatccctttgttacttcttctagcccatcagctggtgggatatgcactggtcttggtattgctccaagggtacttggtgatttaataggagtggtgaaggcatacactacaagagttggttctggtccttttccaactgaaattttgggttcaggaggtgacctnctcagatttgctgggcaggagtttggcacaactactgggccgcctcgacggtgtggctggctcgattaagtgcactgaaatactctngtcagatcaacggg

SEQ ID NO: 28766 - DNA, 191 bp, Glycine max
gtttttcaaaagaagaagactttggttgaaggagtgcatgctaccatggaggacagtgatttcagaacttatccctttgctactgcttctatcccatcaactggtgccatatgcactcggcttgatgttgctccaaggatacttggtgatttactaggcgtggtgacggcatacactacttgagttgcatc

SEQ ID NO: 28767 - DNA, 302 bp, Glycine max
  modified_base (38)..(38): a, c, g, t, unknown, or other
gggacgaaaaaggtgttcagtgtccaagcgttgagaanggaagaggtacacatggcaagtggcaactgacctcattgttgatagttgatacttggcctcgaagatgcacttgctactatccaagtccccactattactgatacataattcttctatgctccttcaccgcttctctcctcttctactccctccttttctctttcgccaaccccccttcccctcttcgaatttcaaacctctcacactcaaggtcctctccatggcatcgtctcattccttccaccacatacacactaatcgac

SEQ ID NO: 28768 - DNA, 378 bp, Glycine max
  modified_base (280)..(280): a, c, g, t, unknown, or other
gaggaaagaagagagagaacaaagcacttagtgcgattcaataattacgaaaaaccaacagcgagtgttgtttttgtttggtccaggctggaccagggaatgaatagagatgagaggctttcggttgaagagaactgagttaagcggcgaagccaaacgcagaatcggcggcagaaattgccaccggaagcacgtcgaagacgggtgaaccaaacacaaaattccatccaccacttctcttttcaatccccaactcaaatctgtgaagaaaatctcaatntctaaattgaaatcttagcactactgctagtagtagtaaaaaaaacaattaggaaagtatagagtgttttttttccttttttcggttgtttactttta

SEQ ID NO: 28769 - DNA, 324 bp, Glycine max
  modified_base (216)..(216): a, c, g, t, unknown, or other
gacactaaacaagttaaaagaggagcatcactgaactaacaaagcaaccctatgtcgaaggtggtttgtgtcaccggagccagcggcgccatcggatcatgggtggtcctactcctcctccagcgtggttacaccgtccatgccaccgtccaagatatcaaggatgaaaatgagacgaaacatttggaggaaatggaaggagcaaagagtcatctncatttttttgaaatggatcttcttgacatcgactccattgccgctgccataaagggttgttcctgcgtaatccaccttgcatgtcctaacatcattggtcaagtcgaa

SEQ ID NO: 28770 - DNA, 325 bp, Glycine max
  modified_base (317)..(317): a, c, g, t, unknown, or other
ggagagaaaaaagagaaagtgaaaattagaaactctggtacttggttttatgccaaattagggactcttttggttgtcaattagatcacaaagatatggaggttgccatggaactggaagatgatctattttttgctgatttgagcaaggaaattgctctactaattatggatgaagatgaagatccacttgcttcttgtcctcctgactctcttcaggctttttctggggcaattcatcctccttcacagtttgctttcatctttgagcatgctttgagaaagagaagcaaagggacaggtgtatttatccctcangcaacaca

SEQ ID NO: 28771 - DNA, 284 bp, Glycine max
  modified_base (245)..(245): a, c, g, t, unknown, or other
gggttcaagagtgaagagcgaagagaatggctccgagagggtttaatctttttggctgcgttatgcttctcagcactgtcactgagtcgttgtcttgcggaggataatggacttgttatgaacttctacaaggaatcatgccctcaggctgaagacatcatcaaagaacaagtcaagcttctctacaagcgccacatgaacactgctttctcctggctcagaaacatcttccatgactgtgctgntcagagttgtgatgcttcactgttgctggactccacaag

SEQ ID NO: 28772 - DNA, 316 bp, Glycine max
ggggccagtggggatccttctcatttatccttgagggatcaaatgagccctgcttattctgctagaaagcaatcattggatcatgaaggcaaacttcacatgcctcatccatggcctgtaatgccctctagtctgtcactgagcatcttggactctaatacaaaaggtcctgcacatggtggtgatacaacttacaaagctcgagggaatttgaggtacagtgcatttggtgaataccctgcactgcgtggtcataaagttgagcattcacatggaaacttgatgccacccccacctgcactcctaactcaatatc

SEQ ID NO: 28773 - DNA, 80 bp, Glycine max
ttaagagggagatttttaaaagagactgtgcttattataaactctagtacttccttaaatcccaaatatggcacacttct

SEQ ID NO: 28774 - DNA, 284 bp, Glycine max
ggatgagagatggcagggaaggaggagaaggaggggaaacttcagaagggaatcgcggagttctacgacgagtcttctggcttatgggagaacatttggggcgaccacatgcaccatggcttttatgacccggattccactgtttcgctttcggatcatcgtcttgctcagatccgaatgatccaagagtctcttcgctttgcctctgtttctgaggagcgtaataaatggcccaagagtatagttgatgttgggtgtggcataagtggcagctccagatacct

SEQ ID NO: 28775 - DNA, 299 bp, Glycine max
  modified_base (285)..(285): a, c, g, t, unknown, or other
ggttctagtgtgtgattgtttgttgttgtaactggttcttcttcttttgttgttctgtgtttgtgtttgttttttctctcacctgaaaatgtcttgctgcggtggtaactgtggttgcggaagctcctgcaagtgcggcaacggctgcggaggctgcaagatgtacccagacttgagctacactgagtcaaccaccaccgagaccttggtcatgggagtggcacctgttaaggctcaatttgagggtgctgaaatgggtgtgcccgctgagaacgatggctgcanatgtggaccaaact

SEQ ID NO: 28776 - DNA, 259 bp, Glycine max
ggcttaaaagcggtttattaacactcctaaaccagcctctctccgctaaatttaaaggttagtttaatttgatttatgatcccttgcgttgctagataaatgccgatgccgcgtctggatcgggattagggccctagggtttttgatcgctccatccggttctgcttcggatttcgatcggaaatgtccgaacctcattcaccgacccgtacctccgcgtatctcgacgcgctctcttaagcgatccacaagaaacttc

SEQ ID NO: 28777 - DNA, 310 bp, Glycine max
  modified_base (263)..(263): a, c, g, t, unknown, or other
  modified_base (266)..(266): a, c, g, t, unknown, or other
  modified_base (278)..(278): a, c, g, t, unknown, or other
ggagttgagaggatcgtgagaggggcagtagccgagattccgtgagttgcaaaaatgaagacgattctttccaccgagaccatgaacatcccggacggcgtgagcatcaaagttcatgccaaggtcatcgaagttgagggcccccgcggaaaattggtgcgagacttcaagcatttgaatctcgattttcagctcattactgacgaaaacggtaaaagaaagctgaaaatcgacgcgtggtttggttctcggaaaacatccgncgncattcgcaccgncttgagccacgtggagaatcttatcaccggcg

SEQ ID NO: 28778 - DNA, 284 bp, Glycine max
caatcaaggagctggtgcaaatggaatgtagtagatgggcgagcaaaggggtgaacataaagtacgaggtgagggacaacagagacgggtacaaagcaggggctctgaaagaaggcatgaaacgcagctacgtgaagcaatgtgactatgttgccatctttgacgccgattttcaaccggagcctgatttcctctggcgaactgtcccattcctttgcaacaaccctgaacttggtctcgttcaggcacgcttgaaagttgtgaatgccaatgaatggttgatg

SEQ ID NO: 28779 - DNA, 249 bp, Glycine max
ggtgaaggtcgggggatagatagggtttgccttggccctgctttgctctcggtggtgtcactgattggcgttgccaaatttcctttggcttcttcttctccgaatctttcagaatctctctctcatttatttttgaattgaagtttctttctcattatctaaaatatcctcgcgcgtgttattagcgatgccggaggaagaagtagtggagctcaagttccgtctctacgatggatccgacatcggtcc

SEQ ID NO: 28780 - DNA, 316 bp, Glycine max
aatcatgggtaaggaaaaggttgacatcaacattgtcgtcattggacatgccgactctgggaagtcaactaccactggtcacttgatctacaagcttggaggtattgacaagcgtgtgattgagaggttcgagaaggaggctgccgagatgaacaagaggtcattcaagtatgcctgggtgctcgacaagctcaaagctgaacgtgaaagaggaattaccattgatattgctttgtggaagtttgaaaccaccaagtactactgcacggtcattgatgctcctggacatcgggactttatcaagaacatgattact

SEQ ID NO: 28781 - DNA, 339 bp, Glycine max
  modified_base (318)..(319): a, c, g, t, unknown, or other
gacggctaaaagctaaaaatcatcgaagtactcagattagcatggctgtcacggttgcattcttgaatttgatcatcatggtttcagtagtctctacaagcaagtcactgagcttaaactactattcaaaaacatgccctgatgtggaatgcattgttgccaaggcagtgaaggatgccactgctagggacaaaactgttccagctgcacttctgcgaatgcacttccatgactgttccgttcgggggtgtgatgcctctgtgctgctaaattcaaaaggaagcaacatagcagaaaaaagatgggcccaccaaatgnnttcttgcatgcattctatgt

SEQ ID NO: 28782 - DNA, 309 bp, Glycine max
gactgtgagtgagattataaatttccggttcacaagctttcttctccaccgttttcaatcctgcaaacacccttcaacagtttttccccactcgttgcttattgacacttctccttcttcggaattcaccccttttcgaaataatttattcgtgtttccctccaaaaaaaccctagctagcttccatggcgtccaagaagaagcactcagagggcatcgccttgttgtccatgtacaacgacgaggaagacgacgaaatggaggacgcagaagacgacgacggcgaaaaagaagaagttgatgcaagga

SEQ ID NO: 28783 - DNA, 279 bp, Glycine max
gatcacaaaatgtaataatatcacaccttccaacggcccctgtcactgtaatcttgggctccagaggaagaagacgatgaacgtggatctggaatcattggcagaggcaacttccggggccataggatcactgatcagcaccactattctctacacacttgacaccatcaagaccaactaccatgctgatgcacgatgctcaagtcgaacaacatacaggaatctcactgatgtattattggaggcaatatctaaccgtcaggtgctgtcactttacca

SEQ ID NO: 28784 - DNA, 341 bp, Glycine max
gctttaaaaatgggagggtgtctaccatccaagcggagatccagaagatagtggttcagcttccagcagcacacatcgtttcatgctgtatgcgacagcactttcaatcacatggggagacactccagaatattggacatgggtacagcagaaagaagaagcaaggtacgcatctatctccaaatatatattaaagtttactaaaacacaattcacacaatctatataaaaagtagtgttctaaaaagtagatctctcattcaatctgctcttttattgctaataaaagtttcttctgaaataggaataatgcatcttgcttcgtataaggttagatatat

SEQ ID NO: 28785 - DNA, 168 bp, Glycine max
gacttctaaaagctaaaaatcatcgaagtactcagagcatcatggatgggacggaggcactcctcaataagatcatcatggtcacagtattctctacaagcaagtcactgaacttaaactactatacagcaacatgccctatatgaaaatgcatccttgccaacacac

SEQ ID NO: 28786 - DNA, 349 bp, Glycine max
gggaccaaattatgtccctggggagaagaaggatttgtatgttaaaagtgttcaaagaactgtcatttggatgggaaaaagacaggaaactgtggaagatgtcccctgtggtaacactgttgctatggttggtttggatcagttcataacaaagaatgctactttgactaatgaaaaggaagttgatgcccatcccattcgagctatgaagttttctgtctcacctgttgttcgtgttgctgttcaatgtaaggttgcatcagatcttcccaagctttgtgaaagtcttaagcggttggccaagtcagatcctatggtttgttgtaccattgaggagtctggtgaacac

SEQ ID NO: 28787 - DNA, 225 bp, Glycine max
gactacctaacactaacaatcattctaatcctcagatcttctctcttgacccaaaggctaacttctcaccctgcaccactctaatatgcgtcatgaaaagcagaaagcccaacaccgactactatacagccgaacccaaacttgctgagaacaataatggctacgccaccaaagctaccaaacccacctacaaagacaatgcaactaaacatcctaacaagccca

SEQ ID NO: 28788 - DNA, 334 bp, Glycine max
gctgtgacagactggctgctactacatgcaccacgtccaagggcaggagtgcttgatttggctacgacgacgcttcctacttggggaaacttggatacagccctggccagaatcgtgtcgttcgtagcgctggatttgagggagacaacatgctctggacgtgcactgaccttggccggtacaagggtccaagtctggttgacgcacttgaccacattagtgagctcataaggctctttgacccggcattaacgctctcacttcatggagcgtactggattgtacgcttagaaactgtgccagtgggacatgatcagaccggagccttgtaccc

SEQ ID NO: 28789 - DNA, 432 bp, Glycine max
  modified_base (414)..(414): a, c, g, t, unknown, or other
ggttcgagtggggattcttcttccctccttgttggtggtggttcgtgtccccctccacctccggtgccgcctcccaagccttccgtgacggggaacttgaattcgaggaggagtgtggccgggagtttgaattcccgcagcgtcggatcgtcgaggagggcagttacgtggccggttgtttcggctaggacttcacctgctgggtctaggccgtcttctcccaggtcacataatgaaagtgaggggtacaacagtgctgatgaacagaagccttgcctggtttcatcttatgatgattttgaaagggagcgacagttcgaaattgatatcagaagggcaaaaggttatgaagtcaaaaaaatgatggaggatggaaattgtctattccgagctgttgcagatcaggtgtatggngattctgaagtgtatgat

SEQ ID NO: 28790 - DNA, 333 bp, Glycine max
  modified_base (109)..(109): a, c, g, t, unknown, or other
cgggccgaccgacgcgtccgaccgggggtacaaaaccaataaaaggggttttagtggagagtcttggaccctacacggggggggtgattaaaagggctgggggggtacngtacctcatactaagccgttagagaagtagagctatgatgtgaggattagtggaggacggcagttaggatgtgaggagccaaccgaacgtcataggagggcagacacgcgggaggcagttgctgctgggacctatcctgatgggaataggccggcttataccatggcacatgatgacagagagcgggtcgactgtgctgatgaagagaatcctaggacgtggtc

SEQ ID NO: 28791 - DNA, 420 bp, Glycine max
cgacgcaagggggggagacagtgagagataatccccgagccttttctatcacgattacacgaccgaatcaaacccctctttctctccgaagctgcttttaatatcgtactggccttcgattgttctcctctttaatacatactgttctctcttcgatttgagggaacagtacaagagtctgagcatcggttaacccaactgcacaggtagtctccaaataatggagcctcatgatgagactggatgccaggctcctgaacgccccattctttgcattaataattgtggcttctttggaagagcagctaccatgaacatgtgttccaagtgttacaaggacatgctgttgaagcaagagcaagacaaatttgcagcatcatccgttgaaaacattgtgaatggcagttccaatggcaatgg

SEQ ID NO: 28792 - DNA, 446 bp, Glycine max
aaaacaaacgacggaggccgtgacatctttaagccaattgcaatcaaacaaaggttcagtttttggtgttccatttttcttcctccatctttatcttaaacataacttgaactctccattccttaaattttagctacgagctagttccgacacagacaaagcaatggtaaagaccgagttagaggtgactgttgagagcaagaacaaagacctcaagcacctggggtttgtgaggattgctgctattcaaacatttgtgattgtgtcaaatctgtatgagtacgcaaagcagaattctgggcctttgagatccgtcgtaggaacggttgagaacactgtaaccaccattctcggtcctgtctgcaacaaattcaaagacgtccctgatgatgtccttcgttttgttgacaaaaaggtggatgaagcttcccacaagttcgatgagc

SEQ ID NO: 28793 - DNA, 421 bp, Glycine max
  modified_base (381)..(381): a, c, g, t, unknown, or other
gggcaagaacagttgttacaggaagggcaaagcttggaggaatccctgtgggagtagttgctgtagaaacacagacggtaatgcaaataatacctgctgatcctggccagcttgattctcacgagagggttgttcctcaagccgggcaagtgtggttccctgattccgcaaccaagacagcccaagcaatattggatttcaacagagaagagctcccgcttttcattcttgcaaactggagaggcttttcaggagggcaaagggaccttttcgaaggaattcttcaggctggttccactattgtggagaaccttagaacatacaagcagcccatatttgtatatatcccaatgatgggcgaactccgtggtggggcatggngtgtttgtgacagtagaatcaattcagaccacatcgaaat

SEQ ID NO: 28794 - DNA, 356 bp, Glycine max
  modified_base (251)..(251): a, c, g, t, unknown, or other
ggtagtataaataaaatagtgaacacttggaaaacgacagcccgtttcatcaaatagaaccgtagaggcctaaacgacgtagcgcgcaagcaagggggaaaatcgcgacctatataaattaaggttttcaaaatcagatacagacggaacgaagaacagttagtttgagatttatgacttgatggatacggaagaaggagctcatggaaagggaacacaggtggtatctttgaatgaaaagccaccaactncaccgcgccggaggtcgatccccgcctcctaaaagccatcaagacggtggttcgctattccgattcggagctccgcctcgcaacccaaacccttatggatctcat

SEQ ID NO: 28795 - DNA, 439 bp, Glycine max
ggacccttaaaaagagatagtaactccaactccaagtgacattggtgacaaagttagaaacaaggagaaagaaagaagatggcaggaaagaaaatcccagatgtgttgctgaattcaggacacaaaatgccagttataggcatgggaacttcagtggagaatcggtccatcaaatgagacccttgcttctatctatgttgaagccattgaggtgggttaccgtcattttgacactgctgcagtgtatggaacagaggaagccataggcctagccgtggccaaagccatagacaaaggccttataaagagtagagatgaagttttcatcacttcaaagccttggaacacagatgcacaccgtgaccttattgtcccagctcttaagaccacattaaagaagctggggacggagtatgtggatctttatctgattcattgg

SEQ ID NO: 28796 - DNA, 288 bp, Glycine max
agccccactcaaccaccgcaccactctctctgctcttcttctacctttcaagtttttaaagtattaagatggcagagacattcctatttacctcagagtcagtgaacgagggacaccctgacaagctctgcgaccaaatctgcgatgctgtcctcgacgcttgccttgaacaggacccagacagcaaggttgcctgcgaaacatgcaccaagaccaacttggtcatggtcttcggagagatcaccaccaaggccaacgttgactacgagaagatcgtgcgtgacacct

SEQ ID NO: 28797 - DNA, 410 bp, Glycine max
ggagagaaattttagtgattgatcttaaacgacaagtatggaggttacgttcaatttcaagaaaaattgcttgagaagctgtgtttgaagagcaacttcaatataaagtaaatgatttgtttttttttgttagatcagcatcaataaaaagtaaatgattgatcgattgattctagaggcatccgatacctgctcagtggtgtcaacagttgagtgttgaaatgggtgtgcccgctgagaacgatggctgcaaatgtggaccaaactgctcctgcaacccctgcacttgcaagtgaggtgttgggagagcaagcttcaagcagagatagcccttaattaggaataatgataaactattaatgtgtagctaaaaacttatgtattatgtctgtgatggttttcgtgcactc

SEQ ID NO: 28798 - DNA, 426 bp, Glycine max
  modified_base (383)..(383): a, c, g, t, unknown, or other
ggggcgaggtagccagagagtgatacaatacagagtgcgttgttgctccttcgccacaactccctgccaacatgggtatctccagagattctatgcacaagaggcgtgccactggtggcaagaagaaggcatggaggaagaagagaaagtatgagcttggtcgccagcctgctaacactaagctgtcaagcaacaagacagtcaggaggatccgggttagaggtggaaatgtgaagtggagggcactgagattggatactggaaattactcctggggaagtgaagctgtaactcgcaagactcgtatactagatgtggtttacaatgcctcaaacaacgagcttgtgcgtactcagactcttgtaaaaagtgctattgttcangttgatgctgctccattcaaacagtggtaccttcagcactatg

SEQ ID NO: 28799 - DNA, 428 bp, Glycine max
  modified_base (321)..(321): a, c, g, t, unknown, or other
gccactgatttctccttcatgtttgcacggttacaccgttataatacaagccttaatccccacttttgtctctcacaatcgctctcaatctttccagattttctcccaaaccgttcaaacccgtatcgcgtgtcaaattgttcttctgattttctcattgatcgcgattatcgcatctcaaatcgaacttgaatcagtcatctttatatggaggggaatccaagaggtacaataatatacccagaggacaccatcatttgacaacacagaagaaacaggagattagggaagcctttgaattattcaatactgatggctcangtactattgatgccaaggatctgaatgttgccatgagggcccttggatttgaaatgacagaagagctcattaatcaaatgaaagcagatttggacaacgatggaagt

SEQ ID NO: 28800 - DNA, 408 bp, Glycine max
ggatcagcttgttgggttgctgcaaaggatcctaatcttcctaacagaactggaggtgaaagtttgcatagagatgttgtgtgttcaccatcggggagctttcaatgggatagccgggggcgttttgctggtgaaattgagaatccttcttatcacacctcccatgtggacagtagaaatgtcagcatggagctaaaaggttcgttaagttctgaaagaggtaatttatcagatggtggaagcattgttgagaattctgtaacacctacttttctgaagtcccctgttgatgaggcattggttgcaaatctgatgacccccacttctgatctgtccatgtcaagcaatttttctacagtggtgaagaacccagcagaatcttcaataccaaatctttctttttcaata

SEQ ID NO: 28801 - DNA, 432 bp, Glycine max
ggggggtgttagggtgttgattctctgcgacgctcttcgcattgcggtaccctgcaccttcctcgcggtattgcgcgcctgcctcactcccattccgtttttccgctcccctctctgtgttgcgaaaataagggttcattggtttggggctaattcttcttccgatttcgagccgagtgaaatcgttaagagagaaaatgtacgctgatcgtatggagggtggagccaggaggcccgtgaaggaacgccttaataatgggaatggcgtcattggctctactcggcagcagcagcagcgtcaaatcactggcaagaggtcgaggcaagatgacaagtgggaacatgatctcttcgacaatgacaaacctcagatcactaattgcaaagttagtgctccagatcttcgcctcaagcttcaaaggaagggtcttc

SEQ ID NO: 28802 - DNA, 456 bp, Glycine max
acgacagaagggggaggagatgaggccttgagtgttggtgtaggtccttcgaagagcagcatgccgcatgtcatcgatgggatattgaatgcggttgaggttatgaagttgaacaattctcgcagtagtcttgatggagaggtttgtgctgatttagttatgaagagctggtcgacgaggaataatacaggtatgctgtttactttggtggctgctgtttgcattgtgttgagcttgtccatagtgattcgtaggaggttgattgggtcgagggaatctgtgtcttggtcaaggttgcctgtgaatttgtcggatgatagtgttaagaattaagattggtgatatatagttatatcaaaatataagaaaaaaagattggcaatgtttagtcagcaagtgaataagttgtgtgtaaaaatatcagcaaatctagccatctaatgttgtggccctcat

SEQ ID NO: 28803 - DNA, 392 bp, Glycine max
  modified_base (26)..(26): a, c, g, t, unknown, or other
ggaaacgaccgggccgtgctggtctncgatggcttccgcataccgtgaccgcacgtcggagttccggttattattggagactctgaagaagatcggaagtccggtgcaacccgagaatgctgcttcgacctctcatggcgagtcgtattcgagatccgaattcaaccgaaaggcctcgcgtatcgggttggggatccacgagacctcgcagaagatcgcgaggctcacgcagctggcgaggaaatcgtccatgttcaacgatcccgcagtggagattcaggagctgactgttctgatcaagaacgagatcacggcgctcaactcggctctcttcgatttgcaaaccgttcagaacacggatatggctgacggcggttactcgcaggatacga

SEQ ID NO: 28804 - DNA, 412 bp, Glycine max
gtccaacaactgcaactactactactcatcattgtctcaaaaaccttctctctcaacaaaacctacaacaacaacaaaaaagagaaatttttttagaacaatggaggcatcaaagatgaagtttttcttggttttggtgattgccatgttggcgatggtagcaactggggtttcagctgctgaggcacctgccccaggtccttcatccgatgccaccaccttctttgtacccactgctcttgcttctctctttgttcttgcatttggccttctcttctaattaattcttcaacaacctttggttatttgttacattacatatatggaattcactttgttcagaggtggttgtgttttgtgtttcgttcttctctttttttccaactcagcttgagtagtggttggtcactac

SEQ ID NO: 28805 - DNA, 423 bp, Glycine max
gattgctaggggagtgatgttgggtcctgaccagcccgggatcctgcacatgcttggcattcctccggcagcaaagtcattgaatggggttaaaatggaattggtggatgctgcattccctcttcttaaaggtgttgttgccacaactgatgtggttgaggcatgcactgtggtcaatattgccgcgatggttggtggattcccaagaaaagaacgtatggagaggaaggatgtgatgactaaaaacgtatgcatttacaagtaccatgcttcttgccttgaaaagcatgctgttgccaactgcaaagttcttgttgttgctaacccagcgaacaccaatgcattgatcttgaacgaatttgctccatctattcccgagaagaacatttcttgattgactagatcggatcacaacagggcatt

SEQ ID NO: 28806 - DNA, 400 bp, Glycine max
gggccaagcgaagggaaagggttaggcatcattcatacactgaacgaacgctcagctcagtcaggtgccggcgttcctctttcacgttctcatggaaaacgacgacgtcgacatgcacgctgccgacaccagcgaagaattggatgacatgaagaagcgcttgaaggagatggaagatgaagctgctgctttgcgagagatgcaggccaaggtcgagaaggaaatgggatctgcgcaagatcctgcaaatgcttctgcaagtcaggccaataaagaggaaatagattctcgatcagtctttgtaggcaatgtggactattcatgcactcctgaagaagtgcaacagcattttcagtcttgtggaacagtaaacagagtcaccattcgaactgataagttt

SEQ ID NO: 28807 - DNA, 437 bp, Glycine max
gactttcagtgtgagatcttcgtctcttctcttgcttgcttcttcaattcatctccgaaccgcgtttctatttttgactctctctctctactcagtttcgtcatactgtgggaaattttggacaaggctgatgcaaccacaattgcggtcgcagagtctaaaaaccttgatgttgtggccaaaatcatgtaagaatgtatactaatattggtgtgccaccgggggtacctcagcatcatcctcaacctccaacgagctcacaacctaatctgttcgggaatgcattcaattctgctggttctggactcattcgaggtggattgggtgcgtatggagaaaaaatattaggatcaagctccgagtatgtccaaagcaatataagccggtatttctctgatccccaatactactttcaagtgaatgaccactatgttaag

SEQ ID NO: 28808 - DNA, 374 bp, Glycine max
gttcgatggaataatttattaagtatattgcctcaccccgaaggattaggtccatttttcacaggtcagtggaatctttatgctcaaaaccccgattccaatagtcatatatttggtacccctcaaggagcaggaactgctattctaacacttctcgggggatttcatccgcaaactcaaagtttatggctgaccgatattgcacaccatcatttagctattgcatttctttttctagttgctggccatatgtatagaaccaacttcgggattggtcacagtataaaagatcttttagaagcacatactcctccggggggtagattggggcgtggacataagggtctttatgacacaatcaataattcaattca

SEQ ID NO: 28809 - DNA, 400 bp, Glycine max
ggactcaatacgctactgagtcggtttcttttctctattctttttttctttctttcttttcaatagtaaacgcaaaagctcacaaacaacacaatttctgctgggtcttctcttcggggtcagactctaaaagcaagcatctatctaattgatggaagcgtgttttcgtaattttatttcattttagtttttgttattatttcatgaatcatgatcatcgtcttcttctctcgacaaaaccaataagtgtccacttcttttcacgttttcaatcgttctagtctttgttctttgatcttcattcattctttttcgatcacatcattcttaacgacaccattaattaccaccttcagtttcgttaacaatcaatattttttttttttcaaatttgttttca

SEQ ID NO: 28810 - DNA, 431 bp, Glycine max
ggcacaagtgagtttgttgatcgagataactagaaacagtgtgatgaaaatgaaggtccttgttttcttcgttgctacaattttggtagcatggcaatgccatgcgtacgatatgttccctctccgaatgaacactggctatggtgcccgtactccggaggtgaaatgcgcaagttggaggcttgctgtggaagcacacaacatctttggctttgagaccattcctgaagagtgcgttgaagcaacaaaggaatacatccatggcgaacaatatagatcagactccaaaacagttaaccaacaagcttacttttatgccagagacctcgaagtccatcccaaggacacatttgtgttcagtatagatggcaccgtactctctaatattccatactacaaaaaacatggatatggggtggagaaatttaact

SEQ ID NO: 28811 - DNA, 429 bp, Glycine max
gacaaacaaatggcgagcactctgctgtccgtacaccactttctcccctctcaaaggagggaaaagatcggttgcttgagtggtgtcagaacttcattttgtggtcaagttgtgtgcaattcaagtttctgtgggagacaaataactagaagccatggaaaccgtcttgttgttcactcactgcttggaaggaaggtgaagtctgtgaagagcagagagactgtaattcctgaaccagattacaggattccaattgtgctactcggtatagctggtggattggtttacacagataatttggtacctgcagtacctgttggtctccttggattgcttctgttgtttcagaccactagagtgagatttgtctttgatgatgaggctctggaggtaaagataggtgaacagctccaggaatcaggtgagaat

SEQ ID NO: 28812 - DNA, 380 bp, Glycine max
  modified_base (367)..(367): a, c, g, t, unknown, or other
taagaaggaggagaagcaccacaagcatcttgagcaccttggggaacttggtgctgcggctgccggtgcttatgccttgcatgagaagcatgaggccaagaaagacccagagcatgctcacaggcacaaggtagaagaggagattgcggcagcagctactgttggtgctggtggttttgtcttgcatgaacaccatgagaaaaaggaagttaagaaagaagatgaggaagctcatggaaagaagcaccaccatctgtttggctgaacatgataaatattcatatataattaatattcaagctccaaagtatcaccatgcctgtgtatctctatcatatcttccatttctagtgtgcctttgagtaanatctgtgcgagct

SEQ ID NO: 28813 - DNA, 436 bp, Glycine max
gagagacaagaaaaacgagacctttagatggtcggaagatcaaaaggagaaagccaaacagcacctcctcagcaaattaacataaaaaacctctctttctctatttcttttattattgggtatgtcttgaagttcttctgaatttgaagcatatatttgtccttgaatggaaacacgtgctggaagtgatattaagatggccatagatgatgctttgaacgccttctctcctgtttccacccccaggattttctggaaatcacgaaggagatcagctagcgggaggaatttagaggtatcagaagatactgctaataaaccacccagcaagcaggaagatactcctcctcctcctcctccaccttctagtgaggaggtgcagaacacgactccgatttctgagcgccgaaaggccttgtttgaaccgttagaaccc

SEQ ID NO: 28814 - DNA, 411 bp, Glycine max
ttccgaccggttgcaaaagaccaccgaagggggaaccgaaaaaaatttaagggttttgaagggcgggccggcaatccaagaatttttttttgaactttccgccaccggctcatttaacaaggcttgaccaaaccaaaaagctttttttgaacaacccaaaagtgttctcagctcgaaaaaactgggaaaggaaagaaacccggaaagggtgggaaccgcttttggaaatccattgggctttggatttaagactcccagggaagccatcgaaggaacctacattgacaagaagtgccccttcactggcaatgttttcatccgtggccgtatcttggctggaacatgtcacagtgctaagatgaacaggactattattgttaggaggaattatctccattttatcaagaagta

SEQ ID NO: 28815 - DNA, 421 bp, Glycine max
gagactgaagatgaggactcttctgctcccaccttcactatcacagtggatgtgaaatctggaacttctacgggtgtatcagctgctgatagagcgaaaactgttcttgctctgtcatctcctgagtccaaatcagaggatttcagaagaccgggtcatgtgtttcctcttaagtacagaaatggtggggttcttagaagagcaggtcacactgaggcctcactggacttagttgcactggctggcttgcccccaatttctgttctttcggctcttgttgatgaaaatgatggctctatgcaatctttgctcaatttaagaaagttagcatcggaatacaccttaccaattgtctcaataactgatttgataaggtatcggagaaagagagaaaaattggttgaaagaacctcagtttctc

SEQ ID NO: 28816 - DNA, 399 bp, Glycine max
ggaaacagagagtgatttcagtgagtgaccggtgttcacttgatctcatcataatcgtcagcgtcaattgaagaagatgccgatcagaaacatcgccgtcggaaggcctgaagaggcgactcaccccgacacgttgaaggcggctttggctgagttcatctcaaccttcatcttcgtgttcaccggctcaggctccggcatcgcctacaacaagctcaccgacaacggcgctgccacccctgccggcctcatctccgcctccatcgcccatgcattcgccctcttcgtcgccgtctccgtcggcgccaacatctccggcggccacgtcaaccccgccgtcaccttcggcgccttcgtcggcggcaacatcaccttcctccgcggcatcgtctacgtcat

SEQ ID NO: 28817 - DNA, 434 bp, Glycine max
ttaggaaaatgggggtaacaaggatcaaatctgcgagtgcgaccacttaagctattaggtgaaaaaacacgtgaatggttttatatgtttattatcatgtcaagtgttaaaacaataattttttttatcaagacaaattttgatcgacattgaaaagcctaactgaaatttcataactaaaagactctgcgctaccagaaatccagtgcctatacatttattcacatgcaatcatggatgttgtggattttctctcgccttgagtttggtcatgtgtggttgaatccttagtttaggacacattgttttactgctctaacatcaaactgtcctatcttctttacataagaaaggatatatttgaacagaatcagcatctctaattgttgtgcaacaaagagtgtgtaccctggaactagaatctttaggtaatt

SEQ ID NO: 28818 - DNA, 434 bp, Glycine max
ggatcctttgtattctattcttcaagattcagacacagatggctcgtacgaagcaaaccgctcgtaagtccacaggaggaaaggctcctaggaagcagcttgcaaccaaggctgtacgtaagtctgcaccaactactggtggtgtgaagaagccccaccgttatcgtcctggtaccgttgctcttcgtgagattaggaaataccagaagagtaccgagcttttgatccggaagctccccttccagaggctggttcgtgaaattgctcaggacttcaagactgatctgcgtttccagagccacgccgtgcttgcattgcaagaagctgctgaggcataccttgttgggctctttgaggacactaacctgtgtgccattcacgccaagcgtgtaaccattatgcccaaggatattcagctggcaagaaggattcgt

SEQ ID NO: 28819 - DNA, 425 bp, Glycine max
gttgagaggaatttgaggcatgcccttcagccggtttatgaagttctctttgagcgtctaaacactcatcctggagggttgaggaccttatccattcttcgagaagatatcctctctattctcacagaggaaaatattgcatcgctgagagcattggattcatatttaatggaaaaatttattacgtggcttagtcctgctgccttagagcttcaccagattacatgggatgaccctgcttctttgctggagaaaattgttgcctatgaagctgtgcaccctattagcaaccttctagatcttaagagaagactgggaattggccgtcgttgttttggatatttacatccagctattcctggtgaacccctaattttcattgaagttgcactactgaaggatgttgctcagactatacaggaagt

SEQ ID NO: 28820 - DNA, 371 bp, Glycine max
  modified_base (348)..(348): a, c, g, t, unknown, or other
ggagagaaagagtgaggagagaattacagagcattttccaacacgattacacgaccgaatcaaaccctctctttctctccgaagctgcgtttaatatcttactcgccttagattgttcttctctttcattatactgttctcttttcgatttgagggaacagtacaagagtgtggggatcggttaacccaactgcacaggtagtcactaaaataatggagtctcacgatgagactggatgccaggctcctgaacgccccattctttgcattaataattgtggcttctttggaagagcagctaccatgaacatgtgttccaagtgttacaaggacatgcttgtgaagcangagcaggacaattttgcagcatc

SEQ ID NO: 28821 - DNA, 382 bp, Glycine max
ggacttgagaaattagacagagacgaaaggagtgtgaagaacgatggaaggtgtgaaattggaggacagatggggataccaggttgcaacttcttctcaggcctgcgtttcagccatcaactcctactaccatcaggttctcatctatggtagagagaggtctgtgattctggaagcagtggcacatgacaaacactgtgtcttggccaacatcttggcagcacatttcctttactcctctggttcttctcgtgctctcacttgtcttcatgccgctaagtcccaccttgaacatgccaccttgtacgagaaactagttttcgatgccatcagttatatgctatctgaagatagagacgatgatgtagctgttgaattgcat

SEQ ID NO: 28822 - DNA, 429 bp, Glycine max
gaccgcaaatggcagcattgaacctttgccgcatggcacttcgatcctcgaagcttctctctcgcccttatcatcgtctttctgttcagttgcagatgcagatgcagccctcttctccttcactcactcgaaagatgagcatggatgcacagagtgttgcttctcagcttaatagttctggattgttgaggactcagggccttgttggagggaaatggagtgatgcttatgatggcaaaaccataaaggtttataatccagcaactggtgaatctattgtagatgttgcatgcatgggtggaagagagacaaatgatgcaatttctgcagcctatgatgcatatggatcatggagcaaaaccactgccgctgaacgaagcaaatttctgaggaaatggtatgatttgctaatggtacataaagaagaac

SEQ ID NO: 28823 - DNA, 430 bp, Glycine max
ggaagaaggaaggggtcattcatatgatcccgtgtttgtttgggtcttttctcaattcttcaaccaacccattccttccccacgcgtcattctccggccaccgtccacgacggagcgccgttaccgctttaatatttccccaaaaggcttcggcgaccgcccgtgatggataaagtcttcaacaagctccgcaatttggacgcttacccaaaagtcaatgaagatttttacaaccgcacgctcgccggcggcgtcgtcaccgtcgtttccgccgctgtcatgctgtttctcttcttctccgagctaagtttatacctctatacagttacggagagtaagcttttggtggatacttcaaggggagataccttgcacatcaattttgatgtcacttttcctgctgttcgatgttcaatactcagtttagatg

SEQ ID NO: 28824 - DNA, 433 bp, Glycine max
  modified_base (414)..(414): a, c, g, t, unknown, or other
gacaatactaggtagcatagatattattatgggagaagttgatcgttgaaatgataatttatttaacagagatacaagatatccattttttttcagattggaatcttttaaagagatatatggaattatatgggtatttgcccctattttgattcttatattgggaattacgataagtgtactagcaattgtatggttagaaagggaaatatccgcagggatacaacaacgtattggacctgaatacacaggtccttttggagttcttcaagctctagcagacggaacaaaattacttttcaaagagaatcttattccatctagaggagatattcgtttattcagtataggaccatctatatcagtcatatcgattataataagctatttagtaattccttttggctataactntgttttatctgatctgaat

SEQ ID NO: 28825 - DNA, 431 bp, Glycine max
ggaagcagtgagtgagggaataatgttgcggattgctcccaaattcttcaccacggttcctcttcggaccatttcacccttcgcatgtcgcttctcagtccgttccatcgctgactcttctcctttcaacaaaatccgcattcaaagggatgatactgttagtcataatcacaacccattcaaagggttgctttgttttgccgcattttgtcgttaattttccgttttcttttgtctgcaaaatagaatttttctaactttttttttagtaatgggtttctgagttgaacttggaaggtattgatgagactctgcagtgacaaagataaagtttagaacttttcagcatcaatttgttgggggtaattattgtctggaaacagtgaattggagttacaacttagaactgattgtttcatgatgtgctaata

SEQ ID NO: 28826 - DNA, 415 bp, Glycine max
gataggaggagtcttcaatcttcatctacatcagttctagctataccgttccttctgctactactcaactgcaaaggatggtgctgcccaagttctctctgtgcttctggcttctcctttcttcacttgtgattctcttaataaattgtccagttaaatgtgacgatgatgaggaagacaatctctatcaaggtatcaacaagtatcgagcatcgttaaacttgaaagctctaacaaggaatgataatgcaaattgccttgccgaaaaactagctaaccaattcaagaaacaaccctgcacaaataccacaggtgctaacactgtacctggcacagaacctcagttttccaactatccagaccttttatccaagtgtgacttggctatttccaacacaagggatggaaatgtaat

SEQ ID NO: 28827 - DNA, 433 bp, Glycine max
caatatgggaacactgtcagatctggaatgggttatggtacacatgggtatgattctcgggctaatgggcgggcttggttggctgttgacagcaaatacaaaactaggggaagaagtggtggctattttggctatggaaatgagaatgtagatggcttgaatgaactgaacagaggccctagggccaagggtggcaaaaaccaaaaaggttttgcaccaactattttggcagtcaaagggcagaacttgcctgcaagtttaggcaccgatgaagagaaagacaagactagtaccgttccggaccgtgatcagtataacaaagctgattttccagaagaatatactgatgctaaattttttgtcatcaagtcttacagtgaggatgatatccataagagtattaagtataacgtgtgggccagtacccaaaatg

SEQ ID NO: 28828 - DNA, 434 bp, Glycine max
ggttctagtgtgtgattgtttgttgttgtaactcgttcttcttcttttgttgttctgtgtttgtgtttgttttttctctcacctgaaaatgtcttgctgcggtggtaactgtggttgcggaagctcctgcaagtgcggcaacggctgcggaggctgcaagatgtacccagacttgagctacactgagtcaaccaccaccgagaccttggtcatgggagtggcacctgttaaggctcaatttgagggtgctgaaatgggtgtgcccgctgagaacgatggctgcaaatgtggaccaaactgctcctgcaacccctgcacttgcaagtgaggtgttgggagagcaagcttcaagcagagatagcccttaattaggaataatgataaactattaatgtgtagctaaaaacttatgtattatgtctgtgatggttttc

SEQ ID NO: 28829 - DNA, 432 bp, Glycine max
ggaggaatgaagagagagaacaaagcacttagtgctagtcaataattacgaaaaaccaacagcgagtgttgtttttgtttggtccaggctggaccagggaatgaatagagatgagaggctttcggttgaagagaactgagttaagcggcgaagccaaacgcagaatcggcggcagaaattgccaccgggagcacgtcgaagacgggtgaaccaaacacaaaattccatccaccacttctcttttcaatccccaactcaaatctgtgaagaaaatctcaatttctaaattgtaattcttagcactactgctagtagtagtaaaaaaaaacaattagaaagtagtagagtgtttttttttctttttttcgtttgttttacttttaagatgggtgagaagagcaacgttggcggcgacgcgattaacacgacact

SEQ ID NO: 28830 - DNA, 439 bp, Glycine max
gtcaacggcgttgaatcaaggaaacttgatgagactccagtgcctgccacaaacggcactgaagaaaagtgtggatcatgtggtggtaccacttatccatcgccaccgccaccagtactaccaccaccatcaccaccaccgccatcgccaaagaaacaaccaccctctcagtattgtccgccaccaccaccatcgtcgttcatatacatcaccgggcctccggggaacttgtatcccgtcgacgagaatttcagcggagccatcagccaccgccaccgccggagctttgccaccatgttgttgccacttttggttggcttgtttagcacgcttgcgttttggtgattcgcttgtgaagaaggtaatagtaacgatgtatcattcagatcattctaaacacaaatacacaatggaagaattttatggtttatgatgttat

SEQ ID NO: 28831 - DNA, 428 bp, Glycine max
ggttctagtgtgtgattgtttgttgttgtaactcgttcttcttcttttgttgttctgtgtttgtgtttgttttttctctcacctgaaaatgtcttgctgcggtggtaactgtggttgcggaagctcctgcaagtgcggcaacggctgcggaggctgcaagatgtacccagacttgagctacactgagtcaaccaccaccgagaccttggtcatgggagtggcacctgttaaggctcaatttgagggtgctgaaatgggtgtgcccgctgagaacgatggctgcaaatgtggaccaaactgctcctgcaacccctgcacttgcaagtgaggtgttgggagagcaagcttcaagcagagatagcccttaattaagaataatgataaactattaatgtgtagctaaaaacttatgtattatgtctgtgatg

SEQ ID NO: 28832 - DNA, 436 bp, Glycine max
gatgaatgaaattaccaaatttaccttcactttcccttctcttctcttcttccttgtctaagttgctggagaggtcactgcaaacatcgagaagggagggtgaaaaaaatcgtaggagagctagacaacatggagttcagtggggccatcttggtattttgtttcctctatctgcattagttgcttatgctaattgttgcttctttttgttttctttggtcttgtaaggccaacttctccaaggtgttgaccgcgcagaacaagaatttaaataggacaaaaatgttgctaatgcaatagctggagaaaagttgaaattactgtgatgcgcattccaaagcaatacaatggataacaataaaatgaaaccaaaagcaagagtccttatgcttttgcaaaagtacttttgcctcaaaagtacttttacacctaattt

SEQ ID NO: 28833 - DNA, 439 bp, Glycine max
ctccgataagacaacacaacgggatgaatgaaattaccaaatttaccttcactttcccggcgcttctcttcttccttgtctaagttgctggagaggtcactgcaaacatcgagaagggagggtgaaaaaaatcgtaggagagctagacaacatggagttcagtggggccatcttgctattttgtttcctctatctgcattagttgcttatgctaattgttgcttcttttagctttctttggtcttgtaacgccaacttctccaaagtgttgaccgcgcagaacatgaatttaaataggacaaaaatgttgctaatgcaatagctggagaaaacttgaaattactgtgatgcgcatttcaaatccatacaacggattaccattaaatggaacccaaagcaagaattcctattctttttcaaaagtacttttgcctcaaaa

SEQ ID NO: 28834 - DNA, 406 bp, Glycine max
  modified_base (387)..(387): a, c, g, t, unknown, or other
agttgtaaattaaaagcatgggtgcgcaagctcttgtatcatcatcatctcttaccttctcagccgaggctacaagacaaagtcttggaccaagatcactccaatctccatttggcttctcaagaaaagcctcctttcttgttaaggcaactgctactccccctgtcaagcaaggatcagacagacctttgtggtttgcatcaaagcaaagtctttcctacttggatggcagacttccgggtgactatggatttgaccctctgggactttcggaccctgaacgaacaggagggttcattgagccgaaatggctagcatatggtgagataatcaatggtcgttatgcaatgttgggtgcagttggtgcaatagcaccttgaattctangcaaggctggtctgatccc

SEQ ID NO: 28835 - DNA, 397 bp, Glycine max
  modified_base (362)..(362): a, c, g, t, unknown, or other
gatcaaggaaatttttcgaactgatggcgaacagttcctcaagtatccaccacctaaagtgatgcaggtggataagtctgcatggatgactgatgaagaatttgcaagagaaacgattgctggtttaaatccaaatgtcattaagattatagaggagttcccactaagtagcaagctagatactcaagcctatggtgatcatacctgtataatagcaaaagaacatttggagcctaacttaggtgggctcactgttgagcaggctatccaaaacaagaagttgttcatcttagatcaccatgactatctcattccttatttgaggaaaataaatgcaaataccacaaagacttatgctacangaaccatatttttctttgaagatgatggaactttg

SEQ ID NO: 28836 - DNA, 423 bp, Glycine max
aatgatgaagtagatggaaaaccaggtgcagctgcaatctttgtgaaggtcagcatggatggggctccctatctgaggaaggtagatctaacaaattatacaacgtaccgggaactgtcttctgcacttgagaaaatgttcagctgtttcactctaggtcaatgtggttcccatggagctccaggaagagaaatgttgagtgagagcaagctgaaggacctcctgcacggttcggaatatgtactcacttatgaagataaagatggtgactggatgcttgttggagatgtaccatgggatatgttcatcgacacatgcaaacgactgaaaatcatgaagggttctgatgctattggcttagctcccagggccatggaaaaatccaggagcaggtgctagttggtattggaactgatgacttcg

SEQ ID NO: 28837 - DNA, 433 bp, Glycine max
gaagtccaagtggtgtcctgctccaggttgtgaatatgcagttacttttgatgctggtagtactggaaattatgatgtctcttgcctctgttcatatggcttttgttggaattgcactgaggaggctcatcgcccagtggactgtggcactgtggcaaagtggattttgaagaacagtgcagagtctgaaaacatgaactggatacttgctaactcaaagccatgtcccaagtgtaagcgaccaattgaaaaaaatcatgggtgcatgcacatgacatgcactccaccctgtaaatttgaattttgctggctatgcgttggtgcatggtcagaccatggtgaaagaactggtggtttttatgcttgcaatcgttatgaagcagctaaacaagaaggagtgtatgatgatactgaaagaagaagggaaatggca

SEQ ID NO: 28838 - DNA, 430 bp, Glycine max
  modified_base (421)..(421): a, c, g, t, unknown, or other
aatgtagatgtaatcaaacataaatgcattatatctgtagatagaatactcactagcttagtgagtacattgtagtttgttggcgagcattatgaagaatcaatgctattttaattaagcgcatccgtctcttctcacttcatgtggtactgttcaacattgattatgaaattcatatactgtaatttagcaatcacgtcaagggtgagttataatatatatactccctccctctcttcatttgtaaagttcatgatcttgttcaacaactcgaaaagatttacatcaataaataatcacataaataaatttaacatcacataataatttaaaatcttgaaatttaaatttgtaagtcttgtatttacttatatgacattcaaatttttcattcttatatttcttttattatgtggaactntatctcata

SEQ ID NO: 28839 - DNA, 391 bp, Glycine max
gggcatttctaataatatcaaggtgtattcctattttggcatttctaatttctggaattttagccccgattagcacgggaccagagaaactttctagttatgaatcgggaatagaaccaataggtgatgcttggctacaatttcgaatccgttattatatgtttgctctcatttttgttgtttttgatgttgaaacggtttttctttatccttgggcaatgagtttcgatgtattaggggtatccgtatttatagaagctttcatattcgcgcttatcctaattgttggtttagtttatgcatggcgaaagggggcattagaatggtcttaattcttgactatttagacaattagattagacaattagaaaaaaatattgagacaattatg

SEQ ID NO: 28840 - DNA, 427 bp, Glycine max
ggggagagaatagagaagagagatggatccagacgcgttggcaaaggcattcgtggagcactactacagcaccttcgacaccaacaggaacggcttagcgaatctctaccaggagggttccatgctcactttcgaagggcagaagatccaaggcgcttccaacatcgttgccaagctcacctccctcccttttcagcagtgccaccactcaatctccaccgtcgactgccagccctccggcgtcaacgccggcatgctcgtcttcgtcagcggaaaccttcagctcgccggcgaacagcacactctcaagttcagccagatgttccatttgataccaacacctcagggaagctattatgtgttgaatgacatattccgtttaaactatgcatgaagatgtcatatgaccggaaaggccatagaagaa

SEQ ID NO: 28841 - DNA, 398 bp, Glycine max
gaagagaaaagcgagcaatgggtgtgaactcttactgcaacagcatgaagatccaagccgagatacaaatgccacccttagaaatccacaaggttcgtttgccaccagaacgcaccaccttgcagaaactcagacacagactctctgagatcttcttcccagatgatccactccacagggaatcagctatgctaagcttgcaaacttgccacctattcttggattatattccagttttgtgcccccgttgatatattccctgcttggaagttctagacatcttggtgttggtccagtttcaattgcatctttggtcatgggatcaatgttaagcgagaccgtttcttatagtcaagatccaattctctatcttaaaatggccttcactgccactttct

SEQ ID NO: 28842 - DNA, 429 bp, Glycine max
gaaggggaccaagtaatggaggatgatcctggatgcaacagagagtgtttgctgtccaagtgtttgagttgcatagactgataaaggtccaacagctaattgctggatcaccagatattttgcttgaagatggcgcttttctgggaaagtctcctccaaagggatctactcccaaaaaacttgcacttgaatatgttgtaaaacctcggcaacaaaaccttaagcgcaaagatgattctgaaaagctaaatcataaaatggaatgttctgcagagaatgcggttggcaaaacatctctttcatctgtgaaagacggtagccacctttcaaaatgcacccctttccctggaaatcagcaccagacaaatgcggctgctgacagtgggatgggtccctggtgtttcaatcagtcaccacctgggcacccgt

SEQ ID NO: 28843 - DNA, 431 bp, Glycine max
gacactaaacaagttaaaagaagagcatcactgaactaacaaagcaaccctatgtcgaaggtggtttgtgtcaccggagccagcggcgccatcggatcatgggtggtcctactcctcctccagcgtggttacaccgtccatgccaccgtccaagatatcaaggatgaaaatgagacgaaacatttggaggaaatggaaggagcaaagagtcatctccatttttttgaaatggatcttcttgacatcgactccattgccgctgccataaagggttgttccggcgtaatccaccttgcatgtcctaacatcattggtcaagtcgaagatcccgagaaacagatattggaaccggcgataaaaggaacggttaatgtgttgaaggcggcgaaggaagcaagggtggagcgcgtggtggcgacttcatcgatttc

SEQ ID NO: 28844 - DNA, 429 bp, Glycine max
  modified_base (419)..(419): a, c, g, t, unknown, or other
gaacaaaggagttgtaaattaagagcatggctgcgcaagctcttgtatcatcatcatctcttaccttctcagccgaggctacaagacaaagtcttggaccaagatcactccaatctccatttggcttctcaagaaaagcctcctttcttgttaaggcagctgctactccccctgtcaagcaaggatcagacagacctttgtggtttgcatcaaagcaaagtctttcctacttggatggcagccttccgggtgactatggatttgaccctctgggactttcggaccctgaaggaacaggagggttcattgagccgaaatggctagcatatggtgagataatcaatggtcgttatgcaatgttgggtgcagttggtgcaatagcacctgaaattctaggcaaggctggtctgatccctcangagacagcac

SEQ ID NO: 28845 - DNA, 426 bp, Glycine max
  modified_base (410)..(410): a, c, g, t, unknown, or other
gaaagagagaagtaacatcaaggtgcagagagaggaattgaagcatgggaagagggaaggtggttctggagagaatacagaacaagatcaatcgccaagtaaccttctcaaagcgcagaaatggtttgctcaagaaagctttcgagctatctgttctatgcgatgctgaaatcgctctcgtcatcttctccagccgtggcaagctttttcagtatagtagcactgagtatttttcttcgatctctcatcttttttatcattataatcctaggttttgatttttcaacatatattgctggttggtttgggttgtttttttagtattacacacacacacatatatatatatatatataggcaataaatctctgaaatttgcgtggttccgattgttttcttctattaattgngatgtagctagggttt

SEQ ID NO: 28846 - DNA, 391 bp, Glycine max
ggagcagagccgatgtggtagagcagttcctcccagaccacaatgaatccatttctgcagttcttgacaagtttggtgccatgggaattgacacccccggcgtagttgcattgcttggagcacacagtgttggtcgaacccattgtgtgaagttggtgcaccgtttgtacccagagattgatccagctctgaaccctgaccacgtccctcacattctgaagaagtgccctgatgccattccagaccctaaggccgtgcagtacgtgagaaacgaccgtggcacccccatgattctagacaacaattactacagaaatatattggacaacaagggcttgttgatagtggatcaccaactagccaatgacaagaggaccaagccttatgtgaa

SEQ ID NO: 28847 - DNA, 387 bp, Glycine max
gacgtctaacagctaaatatcatcaaagtactcagattagcatggctgtcatggttgcattcttgaatttgatcatcatcttttcagtagtctctacaacaggcaagtcactgagcttaaactactatgcaaaaacatgccctaatgtggagttcattgctgccaaggcagtaaaggatgccactgctagggacataactgttccagcagcaattctgcgaatgcacttccatgattgtttcgctcgggggtgtgacgcctctgtgctgctaaattcaaaaggaaacatcatagcagaaaaagacgctccaccaaatgtttctttgcatgcattctatgtcattgatgcagcacagaaagcactagaagcttcatgccctggtgtgg

SEQ ID NO: 28848 - DNA, 433 bp, Glycine max
  modified_base (416)..(416): a, c, g, t, unknown, or other
ggaagagaagaggctatttgcgttttccactttgttttgtcgtcgttttcattcagagacggatcaaaacggcatgtggtggccgtgtgggagaagtgggggttcttccttttcatcttcttccactgccgaacaagttactgaaggaatcgatggcactggcctcaccgctattgttacaggggcatccagtggtattggtgctgagactacccgtgttcttgccatgcgtggtgttcatgtaattatgggtgtgagaaatgtggtagctgcaaaagttgttatggaagcaatacttaaagagattcccaacgctaaagttgatgctatggagttagaccttagttcaatgatatctgttagaaaatttgcattagagttcatttcatctggtcttccattaaacattctcatgntagagtataataactat

SEQ ID NO: 28849 - DNA, 422 bp, Glycine max
ggttctagtgtgtgattgtttgttgttgtaactcgttcttcttcttttgttgttctgtgtttgtgtttgttttttctctcacctgaaaatgtcttgctgcggtggtaactgtggttgcggaagctcctgcaagtgtggcaacggctgcggaggctgcaagatgtacccagacttgagctacactgagtcaaccaccaccgagaccttggtcatgggagtggcacctgttaaggctcaatttgagggtgctgaaatgggtgtgcccgctgagaacgatggctgcaaatgtggaccaaactgctcctgcaacccctgcacttgcaagtgaggtgttgggagagcaagcttcaagcagagatagcccttaattaggaataatgataaactattaatgtgtagctaaaaacttatgtattatgtct

SEQ ID NO: 28850 - DNA, 418 bp, Glycine max
ggatgctatgaaacaggatgcaatcaatgtattcctggggcattttcagccacaacagggtaagcctgctctatgggagttgggttcagatcagctccatgatgcaggaagacatggagatgacgatgctaggtcatttttcaaaagatccttctcagatggaaacattcttaatgaaagttctacaccgatgtcagccccaaaggccaagcatgaaaaattcccaagccaaggcggcttaccagatcgatcagaagaaggaagcaagggactctgtgagtcatcaccagaaatatctactactgagagtgacatctcattttcaaggtacactccctcaatgcctcggagacagctctttggagatatgcaaagagagcgctgcctttgaagtgaacatatttactattctgatcac

SEQ ID NO: 28851 - DNA, 421 bp, Glycine max
ggttctagtgtgtgattgtttgttgttgtaactcgttcttcttcttttgttgttctgtgtttgcgtttgttttttctctcacctgaaaatgtcttgctgcggtggtaactgtggttgcggaagctcctgcaagtgcggcaaccgctgcggaggctgcaagatgtacccagacttgagctacactgagtcaaccaccaccgagaccttggtcatgggagtggcacctgttaaggctcaatttgagggcgctgaaatgggtgtgcccgctgagaacgatggctgcaaatgtggaccaaactgctcctgtaacccctgcacttgcaagtgaagtgttgggagagcaagcttcaagcatagatagcccttaattaggaataatgataaactattaatgtgtagctcagaacttatgtattatgtc

SEQ ID NO: 28852 - DNA, 435 bp, Glycine max
gtggtgaaatggagcaaaagtacaatatggtagagcatgacttgaaagatgaagaagatgtagaggatggagaaaaccttgcccctggttcatatgagattctacaattagaaaaagaagaaatccttgctcctcatacccatttctgtacaatttgtgggaaggggttcaagagagatgcaaatcttcgaatgcacatgcgaggccatggtgacgagtacaaaaccccagcagcgcttgccaaaccgcacaaagaatctgcatcaccaaagcctatcaagaggtattcctgcccctatcctggctgcaagcgcaacaaggatcacaagaagttccagcctctgaagacgatcttatgtgtcaaaaaccattacaaaaggacgcattgtgacaagagttacacttgcagtaggtgcaacaccaagaagttctcag

SEQ ID NO: 28853 - DNA, 421 bp, Glycine max
ttaaggggcctcacgatctgaggaagacaccgggcttctctccacgcccttcttgggtaaccgtctgaagtgcagcaatggcagatggattgcattcgcagcatccatcggtagttcagaagttatctggacagtcttatcttgtgtccaggcttgctcctaatcactccagaaactgttctaccactggtagttacttcaatggaggtttgcagtcttcaggtttggttccagtcacggcacacgcgccggctgagaaaggggtgtctggatttttgttggatttcctgatgggcggagtgtcggcggctgtgtccaagacagctgcggctccaatcgaacgagttaagttgctcatccaaaaccaggatgaaatgatcaagagtggtcggttgtctgaaccatacaaaggaattggcga

SEQ ID NO: 28854 - DNA, 434 bp, Glycine max
ggtgaatgtgaggagagaagagcctgaatattagaatcggatacccttaaagaagcggagataggagtgtgcgcctccaaacccaaggggcttcggaggggctcttcatcggaggcggtgctatattcccctccggattcccccaccatgaagagcctcttcaagcccaagccccgcactccttccgatatcgtcaaacaaacgcgagatcttcttctccgtctcacctcccgagatgacgataacatgcccgacttgaccaaaaacctcagggacttaaagtcaatcctctatggtaacagtgaatccgaacccgtccccgaagcttgtgcacagctcactcaggaattcttcgccgacaacaccttacgcctccttatccaatatcttcccaaactcaacttggaggctagaaaagatgccactcagattgt

SEQ ID NO: 28855 - DNA, 324 bp, Glycine max
ggaagcagagcgaggagaagcagaaggagcaaaagcaatggcgccgaagaagccgagaaccacgacaaggaatcctgatttggttagggggattggcaagtattcgaggtcgcagatgtaccacaagaggggcatctgggccatcaaggccaaaaacggtggcgttttgccccgccacgatcccaagcccaagcccgaggccccggcccagaagccgcccagttctaccccgcggacgatgttaagaagcccctcgtcaacaagcacaagcccaaacccgcgaaactcatggctagcattactccagggactgtgttgatcctg

SEQ ID NO: 28856 - DNA, 409 bp, Glycine max
ggagcatggtgtatgcgcaaagtgttgttgcagtacgaagcaaatagttggaagggatatttcagaagttgaggctgagcaaaagatgcttgaggaggccattaagaactctcgggagagagaaaggagatccttattgcgtgctatgaacaaagacaaatctaaaagttcaaatagcgccccaactgatactaaaggtaacaaagttggacaattatttccaaatgcgtcacttgaagactatgccaaactgaatagagttaatgtgggtcatgacgatggtgaaatatgtgatgatagtgagggtgaagtttgtgaagatgaagatgataacagtgacaatgaagattgtgatgaagatggaaacagtgacgatgaagacggtgacagtgagaatgaagatgtgatg

SEQ ID NO: 28857 - DNA, 294 bp, Glycine max
agctccgaaatccctcaagaaactaccttcacaaatgttgaacagacccagaagcctcttgaatcatgctaaagaacgactcctacacaaggtgaccaaccaaaaaccaattcaaaccatagacattgctgcccccaactccccacatatattcagtcaaaacagaaacgggctaatccacaaaaagtacatgcgccaaatgaatttaggtactactaatacaaacaactgacaacatgcatcttacaaacaatgacaacaagaacccaagcaagaatcgctgctaaccaaaca

SEQ ID NO: 28858 - DNA, 435 bp, Glycine max
gaatcaatgactattcatgattccataattgaatcaattacatactggatccaagctaaaggaatgttatggtaaaacttcgtttgaaacgatgtggtaaaaagcaacgagccggttatcgaatcgttgcaatcgatgttcgatctcgaagagagggaagagatcttcggaaagtgggtttttatgatccaataaagaatcaaacctatttaaatattcctgttattctatatttccttgaacgaggcgctcaacctacaggaactgttcaggacattttaaaaagggctggtgtttttatggaacttagctcgaatcaacaaacgaaattccattaatgaaataaaaaaaagggggtgtggatgacttgtatatagatttctaaaactcttttctcttttatcccccgctctcttggtctattcatacctaatt

SEQ ID NO: 28859 - DNA, 421 bp, Glycine max
ggaagagacagggtggtggtaaattaattgaagttgataaatctgacataatgggggtgacatggatgaaggtgcccaggagtaaccaacttggtgttcaaatcaaagatgggttgtactataagttcacgggatttcgtgaccaggatgttgtaagtttgaccaattttttccaaaacacctgtggaatatcagtagaagagaagcagctttctgttagcggacgtaattggggagaagttgatctaaatggaaatatgctggctttcacggttggttcaaagcaagcttttgaagtgtctttagcagatgtctctcaaacgcagcttcaagggaagaatgatgtgatcttggagtttcatgtggatgacacaactggagcaaatgagaaagattcactaatggagattagtttccatat

SEQ ID NO: 28860 - DNA, 397 bp, Glycine max
ggaagcataaaatgaaaacccaaagtgcttctctcctgtggctttttctctctcttgctatccttttggctagtggcactgctgcaagtgcaactccaagaagcgcagtgccaagccaccatgtttcaacattcaacagaagcctttttccttccacttttctctttggaattggttcttctgcttaccaggcagaaggagcagcaagtgtagatgggagaggaccaagcatatgggacacctacactagacagcatactgaaaagatttgggatcatagcaccggtgacatgggagctgatttttatcatcgatacaagggtgacataaaaatagcgaaagaaattgggctggactctttcagattctctatctcatggtcaagaatattcccaaa

SEQ ID NO: 28861 - DNA, 409 bp, Glycine max
gacccagaggagtatgacagaatgatgaagaaggcatgggacgagaaatattataatgcagaggatgctgaccttgacttttgtagtgacattgatgacattgagaagccagattttgaaaaggaggatgaattacttgggcttcctaaaggctgggatgcatgcggatctaatggtgggtttttagctgcaagggaaaaagcattgaaagaaaagattgagaatactagtgatgacgatctccctgaagcagaagatgaaaacgaaaggtttgagaatactagtgatgacgatctcccggaaggagaagatgaaaaagaagagaaaattcctgaggaaggtagtcggaagaggaagcgcaaaacagcacttttggagaaagcaagacaggcaatgatggatgagtact

SEQ ID NO: 28862 - DNA, 128 bp, Glycine max
aaatattataaattgggatcattaaaattataaaggcgccacatttatatacagacgcctaacacttaatactaattattacaaattgcaatgatataatcataaacatttttcttaacacctttcat

SEQ ID NO: 28863 - DNA, 430 bp, Glycine max
ggaaagggaaaaaaaaaaaaatagcaacaaaaacaagaaaaaaggttacctctttcaattttatcccttgttgtgagcttaattcaatttctgctcacacataatggcttgcacgctcgctgattcattactcctattcaagggttcttatcagaaaccagttctgaggagagacattgctgcccggtactccccgggtatatttagtctaaacagtaatgggcttatccagaaaaggttcaggcgtcaaaggaattttgttactaggaataaggttactgtcatacatgccgtggcaattccagtacaaccagctccggtggaaagtgcggagtatagaaaacagctagctgaagactacggtttcaggcaagttggagagccgcttccagatgatgttactttaaaggatgtcatcaattcccttcct

SEQ ID NO: 28864 - DNA, 431 bp, Glycine max
ggcgcggtgtgagtgtgatgagatgaactaactggacactccacacccacagtacgaacttcgctctgaagtttttatctttcataattcggcgctaatcaagggttttatcttcccccttcctctgtttccagtttcttcggtaaaaattcgttccctttcggtggtatcgcttaatttaagatacccttatcggatttattgcaaatcctgggtattactcgatttctgttgaagaacacccggagctattagtgaaccttcacaatggcagatctcaaggagaggctactagcaccaaaacctgcatcagctcttaacgtaagagaggtttccaatcgaccatctgcctctggaaggcaagctttccaaggggtggatgttttggggctaaagaagcggtgccaaggtctccgttcatggattcgggt

SEQ ID NO: 28865 - DNA, 413 bp, Glycine max
gacactaaacaagttaaaagaagagcatcactgaactaacaaagcaaccctatgtcgaaggtggtttgtgtcaccggagccagcggcgccatcggatcatgggtggtcctactcctcctccagcgtggttacaccgtccatgccaccgtccaagatatcaaggatgaaaatgagacgaaacatttggaggaaatggaaggagcaaagagtcatctccatttttttgaaatggatcttcttgacatcgactccattgccgctgccataaagggttgttccggcgtaatccaccttgcatgtcctaacatcattggtcaagtcgaagatcccgagaaacagatattggaaccggcgataaaaggaacggttaatgtgttgaaggcggcgaatgaagcaggggtggagcgcgtggt

SEQ ID NO: 28866 - DNA, 351 bp, Glycine max
  modified_base (44)..(44): a, c, g, t, unknown, or other
  modified_base (47)..(47): a, c, g, t, unknown, or other
gggtctataaacagtagtggagagagggagagaagccaaataanaanattgaccatggcttcatcaatgaggatctcaaggctgctctctcgttcttttctttctgcttccactactcctttgttctctagaggtggaagtggtgctcttggtgcagggctcagtaaattcagcactgctgctgcaattgaagaaccaatcaaaccaccagttaaagtagaacacacccagctcttaatcgatggaaaattcgttgatgctgctactggcaaaacttttccaacgttggaccccaggacaggagatgtgatttctcatgttgctgagggtgaccatgaagatgttgatcga

SEQ ID NO: 28867 - DNA, 389 bp, Glycine max
ggcgagagagagagagaaacaaagcagcacccattgggatcctctcttctcttctttgatctccgttaccctttttgttttctcaacagagagagagagagagaatctttcgaagttcgtttgcgtgtgttgtgtggtcagtcaccgatggcagcaccacctgcgagggcacgtgccgattacgattacctcatcaagcttcttcttattggcgatagcggtgtgggaaagagttgtctgcttttgcgattttctgatggttccttcacaaccagttttatcaccaccattggcattgattttaagataagaaccattgaacttgatggcaaacgcattaagttacaaatctgggatacagctggtcaggagcgatttcgaactattac

SEQ ID NO: 28868 - DNA, 368 bp, Glycine max
gggactcatttctagtaaatggtgttgccttcaaaaagacattttcatatgctgggtttgagcaacaacccaagaagtttctcaatccaaaaatactattactaaatgttgagttggagctaaaatctgagaaagaaaatgctgaaataaggttatcagatcctgcgcaatatcagtcaatagttgatgcagaatggaatattatttatgacaagttggataaatgtgtcagcagtggtgccaaagttgttctttcacgactggctattggtgatctagctacacagtattttgcagatcgagatattttctgtgctggtcgtgtagctgaagaagatctgaaaagggttgctgctgcgactggtgga

SEQ ID NO: 28869 - DNA, 314 bp, Glycine max
tctggccagcaagagctgctaccgtgagaagtgctccacagatgcttgtccagagcctgagtattatgtgctgaagatgtcctctagtcaaactgctgtgtgatgctgacattatgcagcaaagaagtgagtcaaccactgagaaggaatgatcagtactgaaaggggttctgtaatcatgttaaagaatctagtataggagctagcattatcatgctgagaaagctgctttaataatgcactgaagatactcaaaagtttttgcatccattggaatgcactgaagaaaagctgtccttcatgtgagggttccc

SEQ ID NO: 28870 - DNA, 432 bp, Glycine max
gcttgaaaatgaaatcaagacagcattctcactgatcacgatcgcagctttcgatctccaccatttccctaggacaatatcgtaattaacttttcggtggtgcaatgaattttttgctgcggtccacgacgggcgtgtacagagagccttctccgtcgattccggttccggagccgcgtgttgatacgcatcataggtctgcatctgctggatcttctttggagaatcgtgtgtctgatgatccgtatgcgtggtatgatgcaagggttgttagtggcgtgttccttaagcacgtggatgttgctgaggatgaaggatgggttaccattccatgcaaggaacttcctgaaaactggacttgtgcaccagatatacagtctctgtgctctcttgatcgctcctttcttttccctggatacatcttcattcaaa

SEQ ID NO: 28871 - DNA, 432 bp, Glycine max
  modified_base (419)..(419): a, c, g, t, unknown, or other
  modified_base (421)..(422): a, c, g, t, unknown, or other
ggagggaagtggaagctagtagtccgtttcagcgtgtgtgatactttcctctcatcttcttcttctctctgcgataaaagcaaaacctaaaatttggtttaggcataggaatctgttgtagagttgatctacctggaatggagggagcatcgtggaatagtagtgtttgtgtggcaccgtttctgagcaagacctacgacatggttgatgatccttccaccgacttagtggtgtcgtggggcgaaaacaacaactcctttgttgtttggaacgtcccccaattcgccacagacatcttgcccaatcattttaagcacaacaacttctccagcttcgtcagacagttgaatgcttatggttttagaaaggttgacccagatcgatgggaatttgcaaatgaaggattttaagaggtgaanannacactttaaa

SEQ ID NO: 28872 - DNA, 294 bp, Glycine max
  modified_base (26)..(26): a, c, g, t, unknown, or other
tgctttaatttgtcgtgaactataancaccggtaggggaaggagaatatgctgggtttgttctcatcgcgctgcagtagttttgggagcatgcccatgccaaggctcacgctaccaaaggttccctatgaaaatgaaaactggctatggtgagcgtattctgcacaatatcagtcacatagttgatgcataatggaatattatttatgacacgttgcatatatgtctaatcagtgaggccgaggttgactcttctaacgactgactttagggatctaaatacacatcatactct

SEQ ID NO: 28873 - DNA, 423 bp, Glycine max
gggggaagagaaatgagaagatgggcaccaccttgatgagatgctcccacgcaaacgctctcttcagagctctcaaacccaaaccccgcaattcttcactgccactttcttcaatggccatcaacaaaggtaatagtaataaggcatatgatgcattgctgttggatgctgggggcaccctattgcaattggcaaagccagttgaggagatttatgccactattggatccaaatatggtgtgactgtggatccagctatgataaagcagggatttaagagagcatttgctgctccgtggcctgaaaagctgcgctaccagggagatgggaggccattttggaaacttgtagtttctgaagccactggttgtggagatgaagattattttgaggaagtttatgagtactatgcaaaaggtgatg

SEQ ID NO: 28874 - DNA, 434 bp, Glycine max
  modified_base (408)..(408): a, c, g, t, unknown, or other
ggtgtagatgtggtgcattctttaaaggtttcctgggaggacgtctataacggcacaacaaagaaactatctctttctagaaacgtattctgctcaaaatgtaaagggaaaggttcaaaaagtggaacagctggtaggtgttttggatgccaaggcactggtatgaaaattacaagaaggcagattggactaggcatgattcaacaaatgcaacatgtctgtcctgactgcagaggatctggtgaggtcattaacgagagagataaatgtcctcagtgcaaaggaaacaaaatttcccaggaaaagaaggtgctggaagtgcatgttgagaagggtatgcagcagggtcagaagattgtttttgaaggacaagctgatgaagctcctgacacaatcacaggagatatntgttttgtattgcaagtaaaggatca

SEQ ID NO: 28875 - DNA, 366 bp, Glycine max
cgacccacgcgtacggacaggtgcaaaaacactttagaacgtttgatatatttcaagcaaacattaatactggccgccgagcatttttataaccgcgcgccaaaaaaaatatctttttctaaaaacacattctcctaaaaataaaatacggaaatgctccaaaccacagaccagcatggtacaatatttcctattccaacgaactcgtatcaaaatcacaataatgctactcgtactatatctgattcaacaaaatcatcatatcagaactaactgcctataatatccaaatgtcattaactatcgaaatcaattatctcacatcatacaaaacaaaattaatcttgaaaacaaataactaaaaat

SEQ ID NO: 28876 - DNA, 282 bp, Glycine max
  modified_base (164)..(164): a, c, g, t, unknown, or other
ttggggatggttttggagttaacacatatacgctgatcaacaaggctgggaaagcagtgtatgtgaaatttcactggaagaccactagtggtataaagtgtctattggaggaagaggccattaaggtgggaggagccaaccacagccatgccactcaagacctncatgattcaattgctgctggtaactatcctgagtggaaactgtttgttcagacaatagatcctgagcacgaagacaaatttgactttgaccctcttgatgttactaagacttggcctg

SEQ ID NO: 28877 - DNA, 290 bp, Glycine max
  modified_base (115)..(115): a, c, g, t, unknown, or other
gtcgagcccacagccgtgtcgctaccggacgccgatgacagaccgacatggaagaggagagagctatacagagaggaggagaagaagctgtagaactcatagtcaggcacgaatnagctatgactagcgactcatgaagctcgatgcactgagcgtccaagacgtatgctcaacatgctggggacatgcgcaggacatgctccatcaacgtcaaatccaatccttgcaaggttgtacaggacagtacgtgaactacaggcaagcatgggcatgctctgagtgactcagat

SEQ ID NO: 28878 - DNA, 286 bp, Glycine max
ggaagcgcgaggaagctaaaagtagcaacgagggatgagagaacaagaggattggaggattacgacagcgctgttaacgttgctgttggtgtttgtttcttcttttccggcgttgagctacggagttgctcctcctcgtactctgctcaataagctgtctcagggcagttatctcaccactcaagagcaatggttcaatcaaaccctcgatcacttctcttcctatgatcaccatcagttccgtcaacgttacttcgagtttctagactatctccggattcctgat

SEQ ID NO: 28879 - DNA, 399 bp, Glycine max
gtatggcactgcgaaatatgtaatcgcaagcctggccgtggatttgaagcaactgttgaggttcttccacggcttttcaagataaagtatgaaagtggtactttggaagaactactttatgttgacatgcctcgtgaatatcataattcctctggtcagattgttctagattatgcaaaagcaatacaagaaagtgtttttgagcaacttcgtgttgttcgtgatggccaacttcgaatagttttctctccggacctgaagatatgttcttgcgaatcttgtgctcagcgccatgaagaactcattcccaggagattgttgataccacaagttagtcagcttggaacgggtgctcaaaaataccaatcttttactcaaaatgcaacacccaatgtatct

SEQ ID NO: 28880 - DNA, 385 bp, Glycine max
  modified_base (337)..(337): a, c, g, t, unknown, or other
cgggtgaccaaagtgtgatccatccacaagtggaaaaccgatccctttcctcacagtaatgctactctaattaacactgtctatctagagtgtttgtccgatccatgacccatggcgccagcaactccaagatttgttgtgccaatagacttgaagaagaatccatgggaacaaaacgctcctctccataaccgatggcaccctcacataccgcacgtggcggctgttaataccggtgaagtcttcagggtagagatggtagattggacaggaggtgctattaaagacaacgattcagcactagacataaaatttctagacctctcaactgtccatnatcttagtgggccaatcagaattctggataatgatggggtcccagccc

SEQ ID NO: 28881 - DNA, 436 bp, Glycine max
  modified_base (273)..(273): a, c, g, t, unknown, or other
gatattcaagaactagctgataaattggagattggtcataagttttatataattggtatgtcaatgggaggttaccctgtttggagctgcctaaaatacattccacacagattatcaggagcagccttggtggctccatttataagctattggtggccttcttatcctgaaaatctactaagagaagcatttctgatgctaccttactcagaccaatggacttttcgagtttcacattatgccccttggttgttctattggtggatgactcanaaatggttcccttcattgactttgacaaatttgttgtctcctgatgatatagagatcgtgaagagcttgtcagaactccaaaacactggccaggagaggataactcagcaaggtgaatatgaatcattacaccgagacataatgagtgcttttggaaagtggg

SEQ ID NO: 28882 - DNA, 303 bp, Glycine max
tggtgcagcagcgaaatgtcagggaaagacgtggttgcttctctgagatcggcaagagaggcatagattatcctaacgaaggattacaattccgatcaaagattcaccatctgcttcttcaccaacttcggtctcgaacttaagtcaacacttgtgaagagtagaggactttcctctggtgatgtggctgcagaatttaagtataagaacaaggcggttaatgtcaaagttgatactgaatcaaatgtgttgacgacattcactggctctgatgttgtgccattcgcgaaaaccaatggtttc

SEQ ID NO: 28883 - DNA, 388 bp, Glycine max
ggagaggaaaagtgtgagaacgaaaatggagcattgtaactgctacatgttcacgctgagccttcttcttcttcttcttactccgccttctctctccgacgatctcggattcgattttccggcgaagaagctgataagagaccttaacctttttccttctgaagatgtcaacatcgttcctcgccactccaattctcacgccaacaaaatcgtcgagaaaccgcttaggttcccaaacttagtgccttcagactccggcatttccctcgacgacttggctcaccgcgctggctattatcttattcctcattctcatgctgccaagatgttctactttttctttgaatcaaggaacagcaagaaggatccttgtgtgatttggttgact

SEQ ID NO: 28884 - DNA, 247 bp, Glycine max
gaaggagcttaggcatgaaaggcgattatagatatgttagtactgatgatgtcgggtactgggctcgaagcttcttgcaagatttggaagggacctgtagtgatcatgtgcgacgaaggtggtgggggattggttttggattaagctttagagttgttgcgctggatccaaacttcaagaagctctcaatggagcacataatttcagcttacaagcggacggcaactagggcaatccttcttgacta

SEQ ID NO: 28885 - DNA, 422 bp, Glycine max
  modified_base (315)..(315): a, c, g, t, unknown, or other
  modified_base (318)..(318): a, c, g, t, unknown, or other
ggaagagaaggaaggagaataagccgttgcaattgcctccacacgttccagttaccttatctaccacctcagccttttctcttcactcttcctttccctccaaacaaacaaaagcaaccattaccaccaccaccttgaactttcccagttacactaccaccactttgattccaaataaccaccatcaccatgttcacggctagtaaactagccttcacattaacaccacctggtccatgcactgcacccttgacaccaatctcttcagcttctggtgttcacctcattcagttcaatggcaagcacttatgcctncgncaaaggctagttctactttctcctatggccactgcagatcaaccagggaaaagtgaagaatttgaagatgattcaaatacttgtgataggaaaattcttccata

SEQ ID NO: 28886 - DNA, 272 bp, Glycine max
gaagagagagaggaagagaacgtgggtggtggttcacatgccagtttgaaaagcattctttggcatggtgggtctgcttatgatgcatggttcagctgtgcctcaaatcaggttgcgcaggttctgctaacactgccatactctctctctcagctgggaatgctctctggcatcatattccaagtcctctatggaataatgggaagttggacagcttatctgattagcattctgtacatcgagtacaggaccatgaaagagaaagagagtgt

SEQ ID NO: 28887 - DNA, 245 bp, Glycine max
ggagactgtggtgatcagtatcagggcgatgttagggcgcttgatatggatacaatgacttggtcaaggttgaaaattcaaggctcttccccaggagtcagggcaggtcatgcggctgtgagtattggaaccaaggtctacatcattggaggggttggagataaacgttattatcacgacatatgggtcttcgatatctgcactagctcgtggactcagcttgatattcgaggtcaacaaccaca

SEQ ID NO: 28888 - DNA, 356 bp, Glycine max
gggaaaaacaaagggagaatgtgcttcctgttgcagatcaagactccccctcaaattctcatctatcttatgatgaccagcgccgcacccaactcttccttaaagatcaaattcccacatggtttgcaatttctggttatgttgctattgctgccatctctactgccactctgccacacatcttccccgaactaaaatggtattacataattgtcatctacctaattgctcccaccttagcattttgcaatgcttatggttgtggactaacagattggtcccttgcttccacctatggaaagctagccatctttacaattggagcatgggcccgttcaataaacggtggaagtctc

SEQ ID NO: 28889 - DNA, 428 bp, Glycine max
ggcacaagtgagtttgttgatcgagataactagaaacagtgtgatgaaaatgaaggtccttgttttcttcgttgctacaattttggtagcatggcaatgccatgcgtacgatatgttccctctccgaatgaacactggctatggtgcccgtactccggaggtgaaatgcgcaagttggaggcttgctgtggaagcacacatcatctttggctttgagaccattcctgaagagtgcgttgaatcaacaaatgaatacatgcatggcgaacaatatagatcagactccaaaacagttaaccaacaagcttacttttatgccagagacctcgaagtccatcccaaggacacatttgtgttcagtatagatggcaccgtactctctaatattccatactacataaaacatggatatggggtggagaaattta

SEQ ID NO: 28890 - DNA, 330 bp, Glycine max
ggaagaagaagatggcattgggtgttcctgctctggccctgacatacgtggctcacgttctggcacttgttgccagcatcttggtcgtgctctgggtcctcaattttaggggtggcttggcttgggattctgataacaaggccctcatcttcaatcttcatccagttcttattgtcattggcttactagtccttgggggtgaagctattataagctacaaagcattacccctgaagaaggaagtgaagaaattgatacaccttgttttccatgccatcgcattaatccttggaatagttggaattatactgccttcaagtatcacaatga

SEQ ID NO: 28891 - DNA, 432 bp, Glycine max
gcatcttctggggaatagtgatcttcgggttcatcgtgttactgacagttcttataatctgggcaatcctaaagccttcaaaaccaaccttcatcctccaagacgtcaccgtttacggcttcaatgccaccatccccaacttcctcacctcaagttttcaggtcacgctttcctcgcgcaaccccaacgacaaaatcggaatctactacgaccgtctcaacacctacgtaacttaccggaaccagcaggtcacgtaccgaacctcaatcccaccctcgtaccaaggtcacaaggaagaggatgtgtggtccccgtttgtctacggcactaatgtccccgtcgcaccctacaacttcgttggcctcagtcaagaccagaccaacggcaacgtcctcgtcctcgtaagattgacggtaaggtacgatggaaagt

SEQ ID NO: 28892 - DNA, 359 bp, Glycine max
gggcacgtgcagtacgtaggctgttcttgtgggtgttgttggattggaatcggagagaaatggagagcagcgccgtctacggaagcattcgaccaagttacccgatctgcccctctcgacgttcttcctctcttctctctcaccaatctcccttcctattcgagccttctctttctctcaagcttcgcaagcagtttcctctcatttcgcagaattttctggaagccgcttctcctctcaggccttctgccactttgtcttctgattcctaccgtgagacgattgaattagctgatatagaatgggacaaccttggttttgggcttcaacccacggattatatgtattccatgaaatgc

SEQ ID NO: 28893 - DNA, 411 bp, Glycine max
ggttctagtgtgtgattgtttgttgttggaactcgttcttcttcttttgttgttctgtgtttgtgtttgttttttctctcacctgaaaatgtcttgctgcggtggtaactgtggttgcggaagctcctgcaagtgctgcaacggctgcggaggctgcaagatgtacccagacttgagctacactgagtcaaccaccaccgagaccttggtcatgggagtggcacctgttaaggctcaatttgagggtgctgaaatgggtgtgcccgctgagaacgatggctgcaaatgtggaccaaactgctcctgcaacccctgcacttgcaagtgaggtgttgggagagcaagcttcaagcagagatagcccttaattaggaataatgataaactattaatgtgtaactaaaaacttat

SEQ ID NO: 28894 - DNA, 398 bp, Glycine max
ggtctagaattaagggaattcatcatagaagcttgtttaggaggagggtggcaccaatacatgaaaagtagcatccacatgtgggcaggaacagtgagcacttgatggtattgatccagttaaaggactaaggagattgcatttctgtgtttgcattttttttataggtaaatattaattttgtttgcatttttttatcttataaattagaggcatatattgttaaccctttaattttttgagtccacaacttcaaaagcaaatctctttcctttttatctttttaacaagtccttttcactctgttataatttaaatttagccaatatataaattgtcaatataacaattcttcacacaaaaatacacgtagactttttttaagcaaaatagtgaat

SEQ ID NO: 28895 - DNA, 263 bp, Glycine max
gggacagtgacttcggaattcccggtgcattttacgttaagaacttcatgcaagttgagttctatctcaagtctctaactctcgaagacattccaaaccacggaaccattcacttagtatgcaactcctggggttacaactcgaaatcctaccattctgatcggattatatttgccaacaatacatatcttacaagcgcgacaccggctccacttgtcaagttccgagaagcagaattgaacaatgtaatacgggatgggact

SEQ ID NO: 28896 - DNA, 341 bp, Glycine max
gacagagagaacgatctttgcgtttccgagtctcgaagtcctctgttttacactgctgcgcgagacttcatttcattttgtgattataaatacgcaactcaattacccaacccaactttcttttctttaacagcaacaacatcaaaattcccacttactttttcttttatattctttaataagaaacctcgagaagaaagtaaaaggttcgattttacccttctttcttcccagaagcgatctctaaagccgacccatttcggaattcggaaaacccagtgctgatcgctctctgggtgttcccaaaatgaagcttcggagatcttcgctgtgcgtttttc

SEQ ID NO: 28897 - DNA, 259 bp, Glycine max
ggagatcagtttgacagttgagagtgggagtggcggctccaaaaccttgcctccatccctcaatcttactaatctccctgtctctctctcacaacactcacactctgacctatgtacccagaaccttacgtgtccacccactctcactccctctttcaccctttgtgctcttcatgcctaccaaagcaacagcttcgtatggcactggagctagtggtgctgctgaaggtgaccggccaagggagatattggtgcagca

SEQ ID NO: 28898 - DNA, 303 bp, Glycine max
ggaatataggattttctggttttgttgttggtgggtgtcagcgttccgcttcaacttcaaattctcagtgaaaccaattcagttcagtccaaatcccaaatccgaagtgagatttgcgatggagaggcttcagcgaatgttcgcaggtgcaggtggagctctagggcacccttccccagattccccaactctcgattcctccgagcaggtctacatctcctcactcgctctcctcaagatgctgaagcacggaaaggctggggtttccattgaagtgatgggtttgatgcttggaagattcgt

SEQ ID NO: 28899 - DNA, 308 bp, Glycine max
ggaacctgaaaatctagtttcttacaagcctctagtatactgcttcaccttctgctctagaaaattcagtgctgaaacatggcttcggctactctctctgtagccaaaccagcccttcaggcaaatgggaaaggcttctctgaattctctggcctccgaagctcatcaggcttccttcccttttctagaaaatcttcagaggatttccattctgtcattgccttccagacctatgcagttggaagcagtggaggatacaagaagggtgtgacagaagcaaaactgaaggctgccataaacgggtttgg

SEQ ID NO: 28900 - DNA, 347 bp, Glycine max
gacagagagaacgatctttgcgtttccgagtctcgaactcgtctgttttacactgctgcgcgagacttcatttcattttgtgattataaatactcaactcaattacccaacccaactttcttttctttaacagcaacatcatcaaaattcccacttgctttttcttttattttctttaataaaaaacctctacatgaaagtaaaaggttcgtttttaccctcttttcttaccacatgcgatctctaaggccaacccatttcggaattcggaaaacccagtgctgatcgctctctgggtgttcccaaaatgaagctttggaaatctttgctgtgcgtctttctagggt

SEQ ID NO: 28901 - DNA, 434 bp, Glycine max
gtgtttgaaaaggctgcatatgctaagaagcttgagcattttactcctgatgagatagaggacctcatgcttaatgttgggcctttgtgtgttgtcaaaatcatttatgaccattggcagcagaggaggcagaagaagggaatggctttaattcggcactttcagccccctctgtgggaaagatatcagaaacaagtgagagagtgggaactagccatgaccaagaacaatgccccttctaatggatgcctggacaaggttacaactttggagaagccggccatgtttgctttctgtttgaaacctaggggtctggaatcactgaacaagggattgaaacatcgatcccaaaagaagatttcagtctctgggaatgcaaacagtaatctagatcaggatggcttccacactttcagaagaagacagaatgcttt

SEQ ID NO: 28902 - DNA, 414 bp, Glycine max
gattggaacaacagcaacaacccaccaatgttggtggtgagaataagcagaaaaacatgggcggtgaaggaagaaacagaagggtgctgcaagatattgggaatctcgtgggtaaacaaggccatggaaatggaattaacgtgtctaaacctgtcacaaggaactttcgtgctcaactattggccaatgcacaagccgcaacagaaaagaataagaaatcaagcactgaagtgaacaacggagcagtggtggcaactgatggggttggtgttgggaattttgttcctgctagaaaggtgggagcagctaagaagcctaaagaagaacctgaagtgattgtgattagctctgatgatgaatcagacgaaaagcaagctgtgaagggaaaaaaggcaagggaaaaatctgtcatga

SEQ ID NO: 28903 - DNA, 411 bp, Glycine max
ggatggagtgagggttttacgccaaaggagcaccgcgacgctgtctctcccactcttctccgccgccggtaaatgcaattctttctccactctttcatttccttacaaaactaagagacgcaccttcgatttcgcatgctctttttttgttctttctttcttttaattcaattggttgcacataaattccattttcattcttctccgcttgcttttcattacattaccatattctctgtgttccgctccgcgtgcgtgtgcgtctagggtttccttaacaattaacaatttcaattctgtaatgtatcgttgggagtgtgcagcatgtgaattagaagaagaggaggcgaatttgctaatttggtgtgagtgtgttcgaaatgggtgaaatctgggtgtccctttttgggg

SEQ ID NO: 28904 - DNA, 433 bp, Glycine max
gaatacgaagatgactagcaaagggttgctgagaggagcttcgttaactgcaaacgcagtttggcatagaagcagtttcttcccaaaggtaacggttagcgtccaccccaagttggtgaaatttcagagcttctcatcaaccaccgcttgctcctctcttccacccccggatttgcctcgtttggcaaaaactgctcaaatttcacttaccccaaacgaggtttggacagctgcagggtattgatcttgaaagtgttgaaccctcgatcagagcagagactgaaaacaatttgcgtggtaatgctcctgaaacatttgaccataaggacgccttgatcgcttctgtcccgagctatgaagagccttatattaaagttccgagggtcttaagcatggactaaagttaaaattgcttagacgagttatttggtag

SEQ ID NO: 28905 - DNA, 411 bp, Glycine max
  modified_base (326)..(326): a, c, g, t, unknown, or other
gccgctgacttgggtcaactctatgatctcttcgtgcaactcaaggtcaatcttagagttaatctcatgggatatgactactctggatatggagcatctactggcaagcctagtgaatccagcacatatgctgacatagaggcaatatatgaatgccttgaaactgagtatggagttagccaagaagatgtaatcttgtatgggcaatcagttggaagtggaccaacactgcacttggctgctaaattgccaaggttgagaggtgtggttcttcacagtggcattctttctggtcttcgagtgctctgccatgtgaagttcacatnttgctttgacatttataagaacatcaacaaaataacgaaggtcaagtgccctgtctttgtaatacatggtacagaagatgatgtt

SEQ ID NO: 28906 - DNA, 417 bp, Glycine max
ggcagtgacggaggtcaactcgctctaacctttgccttccgttcactcgccgccttgctcatcctcgccgtcacagtcacctcaaccgatcatgttctagacttctctctctcaggacagctggagatgattcaacaaagtatagcttctaaattttgtgagtatagtctgggcaattgtaaaatggacttgcctaatcgtgataaacaactgactgttgctgtgaagaagacagcattgagagatctgcagaatgataataaaatcatggtgccaacctctgttggaagctcttcatttttcaagggataggatccttgtactgattctagtagaagttctggcaccaagagaccctcgtctgactacccattgaatcaccatgtccaacaatctccaagcaataatgctgcaaat

SEQ ID NO: 28907 - DNA, 277 bp, Glycine max
ggcactcagagaggaggaagctttgagagagagagagagggaggagggagagtgttgacgctccatcaagatgggtatttctagggattccatgcacaagaggcgtgccactggtggcaagaagaaggcatggagaaagaagagaaagtatgagcttgggcgtcgggccgcaaacaccaagttatcaagcaacaaaactatccggaggattcgtgttcgaggtggcaatgttaaatggagggcattgaggttggatacccgcaattactcatggggt

SEQ ID NO: 28908 - DNA, 324 bp, Glycine max
ggacgcaagctgacaagactaaaggaagattgcagggtggaaatggaatcgacagctgaaaaccctaattacccggcggtggactacaagcgaccttccatcttgtcatttactctgaggcccgtattcagagttacatccgagttcgattgtcaaagcgcactcttctatcataagagttcctgcatgttgttggacagacttgccaagttcaagttatcgatcatccacagcggttagggcgacgacatctccgaacctcaattcagctatgtctccaatcaccttagcctctactacgacctcgaagaccataatgctatc

SEQ ID NO: 28909 - DNA, 324 bp, Glycine max
tttccgggtcgagacgaagccttcgcgcatgcgagaagacggctgagggaggcgacttaagggggacagggaagaggagaaactggggtacttggctttatgcccaagtagggactgtggtggctgtcaatgggatcacaatgatgagcatggtgacatggaactggatgatgatctattagcagctgatgtgagcatggtacttgctctactaattatggacgaagatgaagatccacttgctacttgcactcctgactctattcaggctctctctgaagcaattgatcctgctccacagaccgctttcgtctctgagcatgc

SEQ ID NO: 28910 - DNA, 331 bp, Glycine max
  modified_base (266)..(266): a, c, g, t, unknown, or other
  modified_base (283)..(283): a, c, g, t, unknown, or other
ggggtgtgaccattttgctagcgcaatcatcttgttccccaattaattaggttttttcagagtatcacattttgcatcgattcctctacgcacgccaccgtcaatcatctcagcacaacgttgcgattcggacaatcgcaatacggtacggtgtttcggttcctattgctttataaacgctgcttttatagttgctgtttcggaaatgatgaattaaatctggtactgtaacatggaagcttctttctctatttcctcttctgatntttggttcgatacttgntagacacttagattggtccttttttttttaaaaaaaaattcaattaac

SEQ ID NO: 28911 - DNA, 410 bp, Glycine max
gaccaatggaagggcctcgatcgctttgtcttcgatgctcgtgtaagtgtgttttttaattttgataaacttggtgttgcttactctcaaacactgttttaggtttattgaacataattggcttaattacgaatgtagtgtaaaattattttaaatgatttaatttgatttctaaatttttaaatttgaaagattttacttagatcttcaattttttaaaaataaattaatttagtttttaagtttttaaaagattcgattttatcttaaaaataaatcaatttaatttttaaaaaattcaatttgtttctttttgaattcttaaaatttgagaatcaactaaatttatttttaagaatttgagaattaattagatattttataaattaaaactaaattaaattattttt

SEQ ID NO: 28912 - DNA, 356 bp, Glycine max
ggcctctggatggccctacttcgcttagacttcggggctggtataaatgtgttctctaatttcgataatctcgatgttgcttactataagacactgttcatggtctattgaacataattgccttaattacgaatgcaccgcaaaattattgtaaatgattcaatttgatttataaatttttcaatttgatagattacacttagatcttcaataggttaacgttcaatcactttagtttttacgactataaatcatgtccttatatcttataaatcaatcaacttaatacttaaaaatttcaacttgaatcttattgaattcttaatatttgcgaatcaactcaatttattcttaag

SEQ ID NO: 28913 - DNA, 391 bp, Glycine max
gatattcaaatggttgaagcaggaaatatggtcaggtccatacaagttctgaagaatgtcactgacaatttcagtgagaagaatgttctgggacaaggaggttttggaacggtttatagaggtgaactccatgatggtacaagaattgcggtgaaaagaatggagtgtggggcaatagctgggaagggtgcggcagaattcaagtccgaaattgctgttttgactaaggttcgccaccggcatcttgtttcccttcttggttactgcttggatgggaatgagaagcttcttgtgtacgagtacatgcctcagggaacgttgagtagggcatcttttgactggccagaggaaggactagaaccactggagtggaatagaagattgacaattg

SEQ ID NO: 28914 - DNA, 303 bp, Glycine max
gaccctaatgaggtcaatgaaatctccatggctaattctcgacaaaacataaggaaattggttaaggatggtttcattatcaggaagccaactaagattcattcccgttcccgtgctcgcagaatgaaggaggccaagaggaagggacgtcactctggttatggtaagcgtaagggtacaagagaggctaggctccccaccaaaatcctttggatgaggaggatgcgtgtcctcagacgattgctccgcaagtacagggaagcaaagaagattgacaagcatatgtaccatgatatgtacatg

SEQ ID NO: 28915 - DNA, 354 bp, Glycine max
gcaacaacacgtagtatgatttcattgatttctccctcttcgctctctctcagtgaccagagacagatgatgatggagatggcgaagcgaaacgctgtcgttgcggcactcgcggcgttggtgctactcgcggcgagtgtggcggtggatgctcaggagaactcggacgtgaagacgctggtgaagtacaagcacgggaagaagtactgcgacaaaggatgggaatgtaagggctggtcaatttactgttgtaacctcaccattaccgattatttccagacctaccagttcgagaatctgatctccaagcggaactcgccggtggcgcacgcggtcggattatgggactaccac

SEQ ID NO: 28916 - DNA, 281 bp, Glycine max
aggcgtccgaacacgtctgagagggggagcaatgacgcaacgtcacgtactcgtaacggggccttccgttcattcgcgttgtttattctagacgtcacactgaccttgaccgatcatgttatacacatctctgtctctgaggtactctctctctcagctcgacatgattcaacgtggtatagatactctattgagcgactatactctgggccactgttaaatggacttgactggtcgcgctacacaaccgactgatgctgatgagacagcttcgagagatc

SEQ ID NO: 28917 - DNA, 310 bp, Glycine max
gagagagagagagaaacacagcggaagccatttggatcctctcttctcttctttgatctccgttacccttttcgctttctcaacacagagagagagagagagtctttcggagttcgtttgcgtgtgttgtgcgatcagtcaccgatggcagcaccacctgcgagggcacgtgccgattacgattacctcatcaagcttcttcttattggcgatagcggtgtcggaaagagttgtctgcttttgcgattctctgatggttccttcacaaccagttttatcaccaccattggcattgattttaagataagac

SEQ ID NO: 28918 - DNA, 417 bp, Glycine max
  modified_base (15)..(15): a, c, g, t, unknown, or other
actcggtctcggaanttcccgtggtcgactccactgcgtctcgtaccgggctgctgtagaagatctatcagaagggggagtgtcaaagggctggtagttgtctccaagtccaaagaggagaagtataagtataagcgaaaggaatgggcgaatcatagagcatcgaagtggatctctggaagcagcagctctgatgaatgggcgccgttccgtagaccgaaaatagtggtgtaactttggtgccccgctttctcgatccagtggaaatgactagagaatgcttcttagggctagggatgatacgttgcgtcgtttcaatttctctcatggcacccacgactatcatcaggaaaccctcaacaatctcaagactgctatgcacaacactggtatactctgtgccgtcatgcttgacac

SEQ ID NO: 28919 - DNA, 290 bp, Glycine max
gaatgtcagaaattgtagtgaaagcgataattcgggggctagtataataactagtacgaatgatacaaatgatagtgattccactataggagaaagttctaataatctcgacgaaagtcaaaaatataagcatttgtggcttgaatgcgaaaattgttatggattaaattataaaaaattttttaaatcaaaaatgaatatttgtgaatactgtggatatcatttgaaaatgggcagttcagatagaatcgaacttttgattgattcgggtacttggaatcctatggatg

SEQ ID NO: 28920 - DNA, 286 bp, Glycine max
ggaaaaagtcctacctatgaagcaattgtttacaggttccgtcaaccaaaatgctacaaacgaaaccagagattcgtaattgcacattctcttttgttgtctccagctcatagaatattataaactcagattcattcagaatttcagattcacctttttcttttcttctctaccttctttttcctctgacagctttttgcagaaagttgtgatttttccttgaaagatggcatctttgagcatgatccagatcagaactgggaattgtgcatctgggtttggtttg

SEQ ID NO: 28921 - DNA, 342 bp, Glycine max
  modified_base (326)..(326): a, c, g, t, unknown, or other
cgagaaagagaagcgcaattcccgagccgaaagattcggcactggttccgcttcgcagggatcagagccatcgaaatcggaggagctgaagaggaaggctagggcagaaaggtttggaatgcctagtcctactacaacttctgacgaagaggcaaagaagaaagctcgacttgctaggtttgcacctgcttccaaagttgatcctcaagaagaagataagaggaaagcaagggctcttaggtttgcgaatccatcatcaacttctatagctaatgttaatggtgagggaaagattgagccggctgctattgcaggcaatgctggangagggacctgaatgac

SEQ ID NO: 28922 - DNA, 361 bp, Glycine max
ggaagtgggaaagagacagaaccgaaaatggttgcgactttgagtcttccgatcatagacctctcttctccccatcgtctttccacagccaattccattcgtcaggcatgcgtggaatatggtttcttttaccttgtgaaccatggggtggacaccgattttgtgagcaaagtcttcgaccaaagttgcaagttcttctcgcttccggtccaacgcaaaatggacctggcccgcaaggaatatagaggctacactcctctctatgctgagacacttgatcctacttcactctccaaaggtgatccaaaagagacctattacattggtcctatagaagatacctctattgctcatctgaatc

SEQ ID NO: 28923 - DNA, 335 bp, Glycine max
gcacaagagcgagtgcaacatgtattgcttagattgtatgaacggtgctctctgctctctctgcctcgcttaccacaaagatcaccgtgctattcagataagaaggtcttcataccatgatgtgattagggttaatgagattcagaaggtgttggacatcacaggggtccaaacctacattatcaacagcgcaagggttgttttcttgaatgagaggcctcagccaaggcctggtaaaggtgtcaccaacacttgtgaagtctgcgagcgcagccttcttgattccttccgattctgttctcttggttgcaagattgttgggacttcaaggaact

SEQ ID NO: 28924 - DNA, 315 bp, Glycine max
gcaggccaagttgtctcaaatggctttccttttggccttgtttttgttgattcttcagatatcagatcatgttatatccagttacgttttgtgttctagtccaggtttgttaaacctagaactagaagattgtagagaaggtttattcgtgttttttatgcttgttttatgggtgaagttagcaggaaactatacaacttgtagtgtggaatcatcttggacagaaaataggttaaagtggggtgtacaaggaaagccatgggagacactggtgtaaaaaactagattgcatggttcttattttggtgaaaagga

SEQ ID NO: 28925 - DNA, 199 bp, Glycine max
ctgggcattccaagtcgtctcatatggctttggttttggccttacttctgtggattctttacctatcagatcatgttatattcagttcctttcagagttctagtccatctttcctaaacctattactagaacatagaatccaacggttattcatcttttttatgcttcatacattcattatgtcatcagcaaactatac

SEQ ID NO: 28926 - DNA, 345 bp, Glycine max
  modified_base (270)..(270): a, c, g, t, unknown, or other
ggaacctttgcattctattcattcaagattcagcaagtgcgttttggaagcagagaccgaaatacttcgagatggcccgtacaaagcaaactgctcgtaagtcaactggaggaaaagctcccaggaagcagcttgcaaccaaggctgcacgtaagtctgcaccaacaactggtggtgtgaagaagcctcatcgttatcgccctggaactgttgctcttcgtgagattaggaaataccagaagagcactgagctcctaatcaggaagcttnctttccagaggttggttcgtgaaattgcccaggatttcaagactgatctgcgtttccagagccatgctgtgcttg

SEQ ID NO: 28927 - DNA, 429 bp, Glycine max
ggaacctttgcattctattcattcaagggtcagcaagtgcgttctggaagcagagaccgaaatacttcaagatggcccgtacaaagcaaactgatcgtaagtcaactggaggaaaagctcccaggaagcaacttgcaatcaaggctgcacgtaagtgtgcaccaacaactggtggtgtgaagaagcctcatagttatagacctggaactgttgctcttcgtgagattaggaaataccagaagagcactgagatcctaatcaagaagctttctttctagaaatcgcttcgagaaattggccaggatttcaagaatgatctgcgtttacagagccatgctgtgcttgcattgtaagaggctgctgaggcataccatgtagggctctatgaggacactaacttgtgtgccattcacgccaagcgtgtgacta

SEQ ID NO: 28928 - DNA, 285 bp, Glycine max
ggagaaaaagagttctaagctttgtctgtgactggtgagagccaaaagccgaagaaagggaagatggcgctatggatggaaaagggttcagagccattaaccgaaaccgagaaggcagaccttgaagccattgctgcactcaaagagtctgcagcctttgaattcaaggaaaagggtaatcaatatgtgaagatgggcaagaagcattactctgatgccattgattactacacgagggcaattgatcagaaagccttgagtgactctgagacctctattctcttt

SEQ ID NO: 28929 - DNA, 324 bp, Glycine max
ggctgagaatcttgataaaagcgcattcactcctcttactctcattgcctttgcgctcctcaaaaacagagtagcctacacgtatcagagagagtgagagaagagagagaatatttctgttcgtgcagatagatagatggctcggagctccacaagaatgaaatgggtctgcatcttcacacttctattcctctcccactcgcccctcacaaccttcgcagaagatgggctagtggcgaatggagattttgaggttagcccatcaagtgggttccctagcgaggcgattgtggaaggccccagcgaggtcccaaactggaagtc

SEQ ID NO: 28930 - DNA, 344 bp, Glycine max
gacggctaaaagctaaaaatcggcgaagtactcaaattagcatggctgtcacggttgcattcttgaatttgatcatcatgttttcagtagtctctacaagcaagtcactgagcttaaactactattcaaaaacatgccctgatgtggaatgcattgttgccaaggcagtgaaggatgccactgctagggacaaaactgttccagctgcacttctgcgaatgcacttccatgacttgttcgttcgggggtgtgatgcctctgtgctactaaattcaaaaggaagcaacaaagcagaaaaagatgggccaccaaatgtttctttgcatgcaatctatgtcattgat

SEQ ID NO: 28931 - DNA, 278 bp, Glycine max
gatgcaaagggtgagtgagagagacattttggtgcttgaacataatttggaccaagaccaacagatgatggaatccggggctcacttctgtaactcttgtggtgaacaaattggacttgatgctaatggggaggtgtttgtggcttgtcatgagtgttattttccaatttgcaaggcttggtttgaatatgaaatcaatgaggggcgtaaagtctgcttgagatgtgccactccctatgctggtaaccctgcaatgtttctattccttcaattatctt

SEQ ID NO: 28932 - DNA, 303 bp, Glycine max
gggtgaagtgagtagtgagtgctgaatcgaatcgaatcgattctccgaacatggcggcgagcgatcgcacagtgttgcaattctcttcatcatcttcttcttcttcgcagatcttgtccgcgaaggtccaccctctggtcatcttcaacatctgcgattgctatgttcgacgccctgaccaagccgaccgcgtcatcggaaccctactcggctccgtccttcccgacggaaccgtcgatatccgaaattcctatgctgttcctcacaacgagtctatcgaacagggtgcattggatatagagt

SEQ ID NO: 28933 - DNA, 79 bp, Glycine max
gacagcttttttgtaagaggtccacaaacccttgtgacaaattctcaagaaggctaataagttgaaaaagttatttcag

SEQ ID NO: 28934 - DNA, 299 bp, Glycine max
gggagagaaagtgaacaccacactctcattcattcccacaaagacatggacttgcattgcttcttcttacgtttccacttcgcatgttttcttctcttcgctaccgccgcatgttgcttttcacacccttctctcctcggcatacaccctctagatgagaaatattacagctctgagatgatcaagtgcaaggatgaatcgaaatccttctccagagaccgtctgaatgacaatttctgtgactgccctgatggcactgatgaacctgggacttcggcttgccccaacggaaaatttta

SEQ ID NO: 28935 - DNA, 305 bp, Glycine max
gggaaaaggaaattcaagctagaaggaaccattaatgatgttaataacatgaaaaatctacttcttgataactttaaattcccaattgggtgcatacgtgtccttacagaagaacagaaggatcccaatttaattccaacaaagaagaacatactggattccttaaattggctcgtgaaggactgccagtcagaggactcattagtcttctacttctcaggacatggtttgcaacaaccagaagatcgcaaaggagatgaaattgacgggcttgatgaaactatttgtcctgttgattttttgag

SEQ ID NO: 28936 - DNA, 360 bp, Glycine max
  modified_base (306)..(306): a, c, g, t, unknown, or other
gggaaaaaagagttggctgtctgcctatttcagactgttgttctgatgttattcaatgatgctgagaaactaagctttcaagatatcaaggactctactggtatagaggacaaggaactgagaaggactctgcaatcacttgcatgtggaaaagttcgtgtcctacaaaagttgccaaagggtagagatgtggaggatgatgactcatttgtttttaatgaagggtttacagctcctctttatcgtataaaggtgaatgcaattcagttgaaggagacagtagaggagaacacaagcaccactganagagttttccaagaccgtcaatatcaggttgatgctgctattgtgagggatatg

SEQ ID NO: 28937 - DNA, 435 bp, Glycine max
cattgcgagatcttctaaagcctggccctgcaagtgttgaaatcgatgatcaccctatgcaaattgaagaaacacagtacccgaaaaccttcttctataaagaagaccttcatccaggcagaacaatgaaagtacaattcagcaagcctccctttcaacaaccatggggtgttggtacatggttaaaggaaattaaagacactactaaagaaggatatagttctgaagagctatgcatcaagaaagaagccattgagggagaagagaagttctgtgcaaaatccttgggaacagtaattggttttgccatttcaaagctgggaaagaacattcaagtactttcaagttcctttgtcaataagcaagaccaatacactgtggaaagagtgcagaatcttggagacaaagcagtgatgtgtcataggctaaatttca

SEQ ID NO: 28938 - DNA, 252 bp, Glycine max
gagagggaaccgtggaaacttcaaccgggcaacaaggacttcttcaccagaaaccactccaccatcgtcgccttcgccatcggcaaacagtatgtttctggaaatggattccacataatcggggctcacacggatagtccttgtctcaaactcaagcctgtcaccaaggttgctaaggctgggattttggaagctgatgtccaaacctatggaggaagcttgtggcacacatggctcgatcgagacttgacc

SEQ ID NO: 28939 - DNA, 369 bp, Glycine max
gaaggaaggaaggaagagtgagcgtgaaagatgccttgggcgaggctttcagggtctccaaggctcgacgttgctattgacgtgggcaatccatttctcaatctcactgttgatggtttccttaagatcggagctgtcgcagccacgcgatcagctgctgaagatacttatcatattatccaaaaggggaatatctcaagtcatgatttcgagaaaacgttgaagaagatgtgcatagaaggtgtatattggggaactatagctggcgtttatgttggaatggaatatggtgtatagaggatccgtggcaccagagattggaagaatgccatgaatgggggtgcaagtactggggccctggtatctgca

SEQ ID NO: 28940 - DNA, 252 bp, Glycine max
atgtacaagtggtgatgaccctaatcataaaacgcacaattacaaaggggaagatgggctatgtactacatgggataatccaagtagactcagcacttatgaacaacctttcgtcgtggaagatgaagaagttattatcttcaggactctagcgaggcatcattcaacaccatcgtacgcactattttcccctcatgagcagatatcataaggcatagacatggatgacatagtcttacacttatgatgatt

SEQ ID NO: 28941 - DNA, 338 bp, Glycine max
gactgctaaaagctaaaaatcatcgaagtactcagattagcatggctgtcacggttgcattcttgaatttgatcatcatggtttcagtagtctctacaagcaagtcactgagcttaaactactattcaaaaacatgccctgatgtggaatgcattgttgccaaggcagtgaaggatgccactgctagggacaaaactgttccagctgcacttctgcgaatgcacttccatgactggtccgttcgcgggtgtgatgcctctgtgctgctaaaattaaaagggaactacaaagcataaaaagatgggccaccaaatgtttctttgcatgcattttatgtc

SEQ ID NO: 28942 - DNA, 424 bp, Glycine max
gcacaagtgagtttgttgatcgagataactagaaacagtgtgatgaaaatgaaggtccttgttttcttcgttgctacaattttggtagcatggcaatgccatgcgtacgatatgttccctctccgaatgaacactggctatggtgcccgtactccggaggtgaaatgcgcaagttggaggctagctgtggaagcacacaacatctttggctttgagaccattcctgaagagtgcgttgaagcaacaagggaatacattcatggcgaacaatatagaatagactccaaaacagttaacccaacagcttacttttatggcaaagacctcgaagttcaatccaaagacacatttttggtcaatatagattggaccgtactctctatattccattcttcaaaaacatggatattgggtggagaaattt

SEQ ID NO: 28943 - DNA, 371 bp, Glycine max
gatactgcagatgttcagataaagcgctgggctgcagggaaagaaggcaatatgcgggcattgctatcaacattacaatatgttctttggccagaatgtggttggcagccagtttctctgacagatatgattacctcttcggcagttaaaaaagtttatagaaaagcaaatttatgtattcacccagataaagtccagcagaaaggggctactcttgaacagaaatacacagcggagaaggtttttgacattcttaaggaagcttacaccaagttcaatgcggaagagctttcttagatccctctgctaatgtctttgcaaaattgatagatctattagcacttgcacgattttggaatcggcctgttcgc

SEQ ID NO: 28944 - DNA, 355 bp, Glycine max
ggcacgcagaagcagaagcagaagcgcaagcgcgtgtaaccctaattagggtttgcaagccgatttgggattcgcctttcgcgtgatcgcagcgctggatccgtaccgtgttcctccgtctacggaagcgccttttgctcgatccttcgccgatctcggaagcatgtacggtccccgaggggcaatgttgggaagcgggggggtttcggacgggtacgaggttggctcaaagagacaaagaatgatggaatccaatccatacttcgcagtgagcagcggaacaggcaacttaccttatgggtatgctgggtggcttcagcccccttcctttccttgggttcgtctaaggggcttt

SEQ ID NO: 28945 - DNA, 320 bp, Glycine max
ggattcagagggagaaagctccctcgcacaaagcaatgcctgccatcacctgaattctatgctccttttccctttatccgcattgctctcttctctttcaccgttttttgtctctgaatatccaagatcttcaaggacaatgttatctctgagaaacatttttctgaatagcgcttgatccggcgtgaaacattcaattgttgataatttactgcttcactttgggctgtgcgagtggagcagcctattttactattaaaggcatattctcttacaaggttgatttgcagagagcatggcgtcttgggatcaaatggggg

SEQ ID NO: 28946 - DNA, 331 bp, Glycine max
gatgttggcaagggttgtgctgctgcattgaagcaggctggtgctcgtgtcatcgtgactgagattgaccccatttgtgcccttcaggctctcatggaaggccttcaggttctgaccttggaggatgttgtttctgaggctgatatctttgtcaccaccacgggtaacaaggacatcatcatggttgaccacatgaagaaaatgaagaacaatgccattgtttgcaacattggtcactttgacaatgagatcgacatgctggggctggagaactaccccggcgtgaaacgcattaaccttaaaccccaaaccgacagatgggtctttcccg

SEQ ID NO: 28947 - DNA, 416 bp, Glycine max
ggaagagaagagaaggttacagaaaaacagacacttatctctgtttctccgtcttacggcaattgaaggaagcactatctctgcaacttccgtcacattcacatggcagcttctgcatctgctactgctgtgccatatctagacaagacagattttctaaagcttcaaaatggcagtgacattcgtggtgtggctgttgatggtgttgagggagagccagttaacctcactgaacctgttgccgaagcaataagagctgcttttgctgcatggttagtggagaaaaagaaagctgatgcttctcagcatttgagagtttctattggtcatgattcccgaatatcagccaaattattacagaatgcaatatctcgaggtcttgctggtggtggcctagaagttggccactacggatt

SEQ ID NO: 28948 - DNA, 372 bp, Glycine max
agagcaagcatctttggacacacagataacatcatctaatattggctttaagctcctccaaaagatgggatggaaaggaaagggtcttgggaaggatgaacaaggaatcattgagccaataaaatctggaattagagatccaaggctggggattggtaagcaagaagaagatgatttctttactgcagaagaaaatatccagcgaaaaaaacttgatgttgagttggaggagacagaggaacatgtgaagaaacgggaggtgttagctgaacgtgagcaaaaaattcaaactgaagtgcaagaaatccgaaaggtgttctattgtgatctctgcaacaagcaatacaaattggcaatggaaattgaagcaca

SEQ ID NO: 28949 - DNA, 289 bp, Glycine max
ggtgaatgaggagaagagaagaaggctgagaacatcaacgaaaaagggtttttggttttggactctgaaagaaactcatagtgatgcgtttcatcgttctttcggacaaaccctaacctcgtactcgtgcattcattctccgcgatcaggtgtgtttatatccattgcatacagcatgaattttgcagcatcattgagcagatgattgaatatcaaggaacttgtgacatatattcctgtgtatagaagcaccagtggtgtttctggagaaggtttgaatttgacgttc

SEQ ID NO: 28950 - DNA, 287 bp, Glycine max
ggaatcgaagatgggtggttccgttttcactcacggcctcgttctcccctcctcttcgactccttctctttccactctcttcccatccaaattccccaccagacccatcaatgaatcttttcccttcacccttacctgcaaccaattcccttccaaactcactacttcgcggccttcccaattctcagctcctcctaggtactcatgctctgtaaaaaagatcaaagcttcgggaagtcagcaaacaggatccattcgacatggagacaaccttgatgcaatgaata

SEQ ID NO: 28951 - DNA, 329 bp, Glycine max
ggagaagagagagagaaagacaaatagaagaagctgcatttgcagagacgccctgagagagagaattggaaggttgcgacgagtgatgatatacacatattgtgacggtagtgaaatctgaggaaaaagaggtagcaatttgcgagtcgcaatgagtaacgaacaggcttcttcatcagcttcttcgagtagctacgagttgagcaaaggcatcaatggcctcgacacggttattcttcgcgacgcacgtggtagctacgctgatgtgtacttgtacggtgctcacgtgacttcatggaagaatgaccatgccgaggaattgccttttc

SEQ ID NO: 28952 - DNA, 383 bp, Glycine max
ggtgttgaaggggttagggtttaggaagggatggaagcggcagtggtggacgtcggctctaagctcctcaaagcgggctttgcaattcctgaccagactcctgccatgataattcccactcagatgaagcaattactcgatgatggatccgtcgcagataattcactggctgacaatgtcaccgttgatcccgttgtgcgaggatttattagagattgggatgcaattgaggatttgttgcaccatgttttgtataccggcctcggatgggaaattggcaatgaaggacaaatactatttacagatccactttgtaccccaaaggcgaacaaaggacaatttgtgcaactaatggttgaaacattcaatatatcaggatttta

SEQ ID NO: 28953 - DNA, 315 bp, Glycine max
gaccaacaaagtaacgtgaaagagaaagagatggaggaaattgttccagtggtggatttccagaggctttcagaggaagaggagcgcaagaagctgagaaaaacatgtgagaaaccagggtgtttcagaatcatcaaccactcaattccactaacactcatggctgacatgaagtcagtggttaaatacttgcatgaccttcccgcggaaatcaaaatgcgcaacaaacccttcttcgtccctgagagtggctatagggcggcatcgccaacaagtcctctatacgagggcatgggaatatatgacatgcatgca

SEQ ID NO: 28954 - DNA, 327 bp, Glycine max
gattgcaagaagaacatgaaagatgtttgatctacttggatgcaagtactaggaagccattgatagcaacagcagaaaaacaacttcttgaacgtcatatacctgccattcttgataagggctttgcaatgcttatggatgggaatcgtattgaagaccttcagagaatgtactcactcttttcaagggtcaatgccctcgagtcattgaggcaggccattagttcatatatcaggagaactggtcagggcatttgtttggacgaggagaaaagataggatatggtttcatcccttttggaatttaaggcttctcttgacacaacat

SEQ ID NO: 28955 - DNA, 367 bp, Glycine max
gtgatagaatggaagtaattgagcttcctggatgtacacctgaggaaaagctccaaattgccatgcggcatttgattccaagagttttagaccagcatggattgagttctgagtttcttcagattcctgaggcaatggtgaagcttgttattcagagatgtactacggaagctggtgtgcgaaacttggagaggaatctagctgccttggctcgagctgctgcagtaagagttttagagcacgaacaagtagttccattagacagatgcatgcacggaccttgctacaccacttgtggaaaacagacttgctgatggaactcgaagtgaaatggaagtgataccaatgggtgtcaatagtcgggaca

SEQ ID NO: 28956 - DNA, 430 bp, Glycine max
gacacgcagttgtattgtagaactgaacaagggttgctctttctctttctctgtctgcttcttcactttctctcgtttcaatcgaaaaaaatcatgggcagaaaattcttcgtcggtggcaactggaaatgcaatgggaccactgaggaggtgaagaagattgttactactttaaatgaagctaaagtccctggagaagatgttgtagaagttgttgtgagccctccttttgtgttccttccttttgtaaaaagtttgctgcgccctgatttccatgtctcggcccaaaattgttgggttcgcaaaagtggtgcttatactggagaggttagtgctgaaatgctttgtaatttgggaattccttgggttattattggtcactctgaacggatgcagcttttgaatgaatcaaatgagtttgtgggagata

SEQ ID NO: 28957 - DNA, 220 bp, Glycine max
  modified_base (44)..(44): a, c, g, t, unknown, or other
  modified_base (85)..(85): a, c, g, t, unknown, or other
ggcattatatttgagttcaaacaaatcaaagccatggccacctncaacttctctattgttctctccgtctccctagccttctttntggtgctacttaccaaggcacactcgaccgataccgtttctttcaccttcaacaagttcaacccagtccaaccaaacattatgctccaaaagaatctaggatttcaatctctggggtggtacaactcacccaaag

SEQ ID NO: 28958 - DNA, 323 bp, Glycine max
ggaggtgtgaaggacaacataacaataaagacaaaagggacccttcacgcattgtcgacaacgtagtcatgaacaagtcgctgaaaccagaagaacaagggtccaaacattgaaactcattcccattgaagctgaacaaccaaccccattttggttctgattatctcagagctccaagcggcaagctttggaatattctgggggcttcatctggattattcttcaatttgaaaacccaccaagggatgagcgtttcctagttgcaatgactacttctggtgctgacctggttttgggtcgacttatgtaaattcttcacccct

SEQ ID NO: 28959 - DNA, 163 bp, Glycine max
gtcattgaattgaagttattgcgcttcctggatatgcacgtgtcgaaaagctccaaggtgccatgcggcattttattccaagagttttagaccctcatggattgagacttgagtgtcttcagatttctgacgctatggtgaatcttgctattcagagatgttc

SEQ ID NO: 28960 - DNA, 366 bp, Glycine max
ggactatgattgaccttaacttacctgttgcactggaagttgaagctgatgaaacttttgtgaatgaagtggcggagatgcagcaaaataacacaggcaaggaatcagatgatctcagtgttgtaacaaatgccaaacttagtgaacagcctgacattcacacccggaggcagagcaccagaaaccggccaccaacaacaaaagtgctagaagcttttgcctttggatatctagacagaaaggagaagtgcagaaatagagattatctccaggacagttcaacaaggcctttccgacgtgtttctcgcaaattggcaggctctagaaatggtggtactgatcttgaaaaagaggaaaaaacagatg

SEQ ID NO: 28961 - DNA, 281 bp, Glycine max
ggggcgaggtagccagagagtgatacaatacagagggcgttgttgctccttcgccacaactccctgccaacatgggtatctccagagattctatgcacaagaggcgtgccactggtggcaagaagaaggcatggaggaagaagagaaagtatgagcttggtcgccagcctgctaacactaagctgtcaagcaacaagacagtcaggaggatccgggttagaggtggaaatgtgaagtggaaggcactgagattggatactggaaattactcctggggaagt

SEQ ID NO: 28962 - DNA, 201 bp, Glycine max
ttgcccattggtaacattgagcattttcgcactgagaagttgggttacgctgatcttgtggaagaggtttctcttggggatgggaagattgtgaagattactgggattaaggagatggggaagaccaccactgtgcttgtacgtgggtctaatcagcttgttctcgatgaggccgagaggagtttgcacgatgctttgtgt

SEQ ID NO: 28963 - DNA, 423 bp, Glycine max
ggagagattggaacaccccccacgaagcaccaattatggctctgaatctttgtatctcacctaagtttaaatgggttccttccttagatagtgcttcctattctttgagaccttcacttgggtcttgttttggtaacataaacattgctagtgtgagtctaagtactactagaagtttgagtttgaggaggagtgggagtgttagtgtaagatctagtttagaaactgcggggcccacagtcacagtgggacaggtcactgaggttaacaaggacaccttctggccgatcgttaaggctgccggggataaaaccgttgtccttgacatgtacacacaatggtgtggcccttgcaaagtgatggctccaaagtttcaagaattatctgaaaagtatctggatgttgtctttctaaagcttgatt

SEQ ID NO: 28964 - DNA, 242 bp, Glycine max
ggagtgaagagtgaagagcgagagagagagagagagagaggcacttggaatccaaaaatgagagatatcatcagcattcacataggtcaggccgttatccaggttggcaactcctgctgggaactctactgcctggaacatggcatccatcccgatggcatgatgccaagtgactcctccttcggtgtaacccacgacgccttcaacacctgcttcagcgtaaccgcatccggcaagcacgt

SEQ ID NO: 28965 - DNA, 429 bp, Glycine max
ggagcatttaatgtatataatttggaaggagttgaggctgttgtatctgctgcagaggaagaacaaagtcctgctatattacagatccatccaggtgccttgaagcaaggaggaattcccttggttgcttgttgcatttctgctgcagagcaagccagtgttcccattactgttcactttgatcatggaacttcaaagcaggatcttgtggaagctcttgacctgggattcagttctgtgatggttgatggctcacatctttctttcaatgaaaatgctgcatacacaaaattcataacattactggctcacccaaaaaatatgttggttgaagctgagctaggaagattgtcagggacagaagatgatttgactgtagaagaatatgaagccagactaacagatgttactatggcatcaaaattcatt

SEQ ID NO: 28966 - DNA, 359 bp, Glycine max
cattgaaatgaggtcaagtgtgctgagcttacatgggacatctatagaatgatacaatgtttagaatgggagcctagtggagtattctaccaaaaacatacagttaaacctaaggagaatggtgacaataattgatcattcaggagctttcgggataatagacatgaatcttactgcagatatgaccgatccaactgtacctgctaatcctagaaaggcttgcgtgtaccgaccatgtgtgacacatgtgatagcagttttggctagtatttgtgaggagctgtcatcagactgtgatgggctagtatatcgtgtagccgtagggatggctggtcttaataatgtgtctcaggtggaga

SEQ ID NO: 28967 - DNA, 423 bp, Glycine max
ggtaccaaagctgaatagccattcgtattgtcgcatagaatgaaaaccctagctcaccgtttcaaggtatccttctctcctattctccttctgattaagattcgtttattagggttcgtgttaatttttcaccgatcgtcgtatctgtgagtgtgaagcctttgattttgatttggggattttcgtgtctgctaattttttgttgaatctactcgtcgtacatcattgattttaccctcttgataatcatacatgctgagatatttttgaaactttttcttgtataattggctagattgtttctatttaattatgttgattgaaagcaatctcgagatctgttgtaaatatgattaatttgtcaaaccgttgggcacgtattgttgtgtattgcataatttgtaaaatcttttgttatataaa

SEQ ID NO: 28968 - DNA, 424 bp, Glycine max
gatatgaaacaatttttgcaataagaggtaacttcatcctagtgtctcatcttgaagacgagctgtgatgaaaaaaaaatataaagaattaatacggaaggatatctgagtagtgagtattagccaaatgaattggcacatggatccccaccctatctgtgccttttcctatgtgtgtgaatttaaatgataactgaagaaaactaaggaaggaaggaagagtgagcgtgaaagatgccttgggtgaggctttcagagtctccaaggctcgacgttgctattgacatgggtaatccatttctcaatctcactgttgatggtttccttaagatcggagctgtcgcagccacgcgatcagctgctgaagatacttatcatattatccaaaagggtaactaagcatttcaaaaattctctaccccat

SEQ ID NO: 28969 - DNA, 415 bp, Glycine max
ggtgatttcattgcataatccattgactagaaatgccatattttccccccacattaactcacccaacccctctttctaaaaggcctcaaggatacactccggacttaattacgttattttagttagggtcaccgtttcgagatattctaaacttgtactgaaaaatatggagggaaaagaagaggacgtaagagttggagccaacaggtacggagagaggcagccaatagggaccgctgctcaggctaaagactacagagagccaccgtcggcgcctctcttcgaaccgggagagttgtcatcgtggtctttctatagggctggcatagcagagtttgtggccactttcttgttcctctacatcacagtgctgactgtgatgggtgtgttcaaatctaagagcaagtgttccact

SEQ ID NO: 28970 - DNA, 448 bp, Glycine max
  modified_base (32)..(32): a, c, g, t, unknown, or other
gcccagcggccgcccacgcgcccgccacgcgnccgcgcggctggagcgcgacagaaggggagaaaagaaccaagcgacatgcttccttactaatacatcatggcagacgagacccatacaagttgatagctctgaggtgatgtccaggatcgtggtgtttttgactttctcggtaagaaaaaggatgaagaagacgagcctgatgctcaggaggaggtcatcgtcaccgagtttgaaaaagtcactgtctcagaccaaggagagaacaaggacagcctattagaaaagcttcaccgatctgacagcagctgtagctagttaagtgaggaggaaggagaagatggagagaaaaggaagaagaagaagaaggaagagaaagggctgaaagagaagatcgaggagaaaatagagggtgatcatcatcatcacaaggatgaggacacaagtg

SEQ ID NO: 28971 - DNA, 417 bp, Glycine max
ggttgaagattggcaagagacaggaacctttacatttgctttggaaagagtagaatcgtggatcttttctcggatagtggagtcagtgtggtggcaggctttgacaccctacatgcattcttccagttggggactcttcaaataaacccattgggaagctgatgggacctgctcttggtgatcacaatcaagggaacttttccatcaatctgcggagaaatgctttccaagatgcttttcaacgactctgtcctgttcgagcaggagggcacgaatgtggttgtttgcctgtattggccagaatggtcatggaacaatgcatagctagactagatgttgccatgttcaatgctcttcttcgggagtcggcccttgagatcccgactgatcctatatcagaccctattgtgaattcga

SEQ ID NO: 28972 - DNA, 393 bp, Glycine max
ggagagatcgagttatataagaatggcatgcatagagagagcatctccagcactgaagcaaatactgctcaaactttgctggtaataagaggttatatatgaaaattaacttttaggaaacactgccatgtttgctaggtcttatctttttattatatatgttggttaaagtttttctaatatgcagcacatggttttgttgtttttgtatgtgtctgtttttgttcttttcttttctttggttagtttttgttgaagggaaagtgcaaaagataaagaatgaagcaatttcattattgaaaatagttttagtaaaggaattatataatatactaatgtttgtttgtatttggaaaaatatgcatttaaacaaaaatttggtcagcatgtgac

SEQ ID NO: 28973 - DNA, 381 bp, Glycine max
gttttcggggttggttgttctctcgttgcgttgggctttgggtttcgtgtctccgtcccttctcctccttggcctccgttgtcgttttttgggcttttgccctcgctcttctcctccttgccttcctttctcctccaagttgctaggtgtcagtcagactccgaagatgtagtggaggctgctgaagaatcaagtgatatcggcattgttggtgatgatgtccaagactttggtgatgggaccttgccttctgccccaggaattgaaacaataagtgtttttccaaaaaatagtgcgagattgataacagctggagaagagacagagctgcttgttggtgttaaaaatgatggggattcaagcttgaatgttattgcgatc

SEQ ID NO: 28974 - DNA, 431 bp, Glycine max
ggagacatggccgaagaagaggaagaatcagagctcagcgataagcagaaagtggagatcgcgaaatggttcctcctcaactctcctaccggagaaatccaatacgttgccaaagatgtgaaatcgattctcaacaacgacgatttgtacaaggaagccgcttccgaggcttttccctattacaacaaatcgcacttgatttccattccaatgcccaaccgaagcggagacgtactggttacttcgttcggtgagcttgagggtaatgcatttcttgaacctaggactgcgcaagttgcaattgttgaccatgctaaacaagtttgtacagaggtgagacctgccacagacgaagaactttcatctccatatattgaagaatttcgatgcaatctggatgctgaaacacttaaatatgttgaagaaactta

SEQ ID NO: 28975 - DNA, 402 bp, Glycine max
gactgcgaaccagtagggactcccattccgactcttagccgccgatctctcagggcttgcatcttctcaggtaagctgtgaagatgtacacatcaaggaagaaaatccacaaggataaggatgctgaaaccaactgaatttgaagagtcagttggacaggcattgtttgatctggaaaataccaatcaggagcttaaaagtgatctgaaggatttatacataaactcagccgtgcaagttgatgtttctggaaaccgcaaggctgttgttattcatgtcccttacagattaaggaaaggtttccgtaagattcatgttaggcttgtcagggagcttgagaagaagtttagtggcaaggatgtaatcttggttgccacccggaggattttgaggccaccgaag

SEQ ID NO: 28976 - DNA, 426 bp, Glycine max
  modified_base (46)..(46): a, c, g, t, unknown, or other
  modified_base (62)..(62): a, c, g, t, unknown, or other
  modified_base (84)..(84): a, c, g, t, unknown, or other
cacaacaagcacgggggagcaaaacccgctacaggccggagggaancaccaagaaaaggganccaacaaaccaaggcaacgaanaagatcgacgaggccatggagccgcagatgaaagaagctgcaaaattgcgtgaatatgagaacaagggccatcaaaatgggccaggccaggttgggagcaggcccgcgccaccaccagcaagcacatgtgacaggaccatgaatccggtgcgacaacgctgtaatttcggtgatggggggaaacgtactgattatgattatgacaagagacggggctatggagtcatgaatcataaggaggctgagaagaagtttaatggcgtcaccctcgatcataattaaggaggttgatgaagataagtttaatggcatgcatgtccatccaataagctagcagctata

SEQ ID NO: 28977 - DNA, 425 bp, Glycine max
gagagtgatcgaaaatggagataagaaaaatgttgggggttgttgtggtgacactaattatgtttaacaatggtgagagtgagagccaacacagtctcgttgccaatggccttggtgccactcctccaatgggatgatagctggggtgaaatgatccgggatgtcgatggaaatttggtagctcataaaacaaaattaatttccttctggcatcaaagctgttgcagattatgttcatgggaagggtcttaagcttggcatttattcagctgcagggtattttacttgtgcaaatgtgatgcctggttcacttggttatggagagcaagatgccaagactttcgcatcatggtatgctttcaaaagcagatatgaatgaagtttatgctgattatgcaagacctggtggttggaatggtatgaat

SEQ ID NO: 28978 - DNA, 353 bp, Glycine max
  modified_base (264)..(264): a, c, g, t, unknown, or other
gctcccgcgcgacccaacccgaatcgccgcgcacacacacagaactaccaagcttctccaaatgcttgtcttctttagttttaatcacaccctctttcaggtaactcatattctttcacctttgaatcatttccaatccttcgcaaccttttggaaaatgtgtatctttgttgaaattgcttagaaaatgtttcgcataacaaattggtattttattaaaacggatggcattttgtatctacttattcgtggcactattgctcntgtgattgcgattatgaaccgcagaaaatgtcttgcctttttttggttgctcacttaagatattattggattctattagataaacaatg

SEQ ID NO: 28979 - DNA, 400 bp, Glycine max
gatgtacagacagtatgtatgggattagccgcttcaatgggatcctttcttttggcaggaggagaaattaccaaacgtttagcattccctcacgcttggcgccaatgaagtcttttatttgagaatatatataaagactataccttcgccataaaaacagttaataaaaacattttataagtagtaatagcatggtattgtgaattccatatgcaaatttttgatgtttaaatcattcgattatatatagaaagagtagtatgaaaaagagggtatttacaattttatctgatctatcaggaacctagtttaattttagtgtcacagactttttgtttttttttcataccagataacttttaacaatttttattgtaattagaagaaaacatagcatatg

SEQ ID NO: 28980 - DNA, 418 bp, Glycine max
gcacttaacgttcgatacaattctctaagagtgcgtttggatagagaattttaactgaagaaagtaatttatgaagaatttaaagttttggaattttattttctttataacctcattcttattccacctgaaagtttccaaaatctcattcttgaactctcgaccttccctcgcattgatgatcctcttcttcaagaaacaccgtcagagcttgtggagtgtcgatcgggtgcgagcgtgaggggacacgtagaactgtacctaccagtcaggcagggaagcagccgtcgatgccaatcacttgacggaggtgctccaaatgggttagctctatgagctaccctaacctagggctccaaatggcggagagagtcgtcaacatgacgaagagaactaagacagcctataggctctgata

SEQ ID NO: 28981 - DNA, 408 bp, Glycine max
  modified_base (336)..(336): a, c, g, t, unknown, or other
ggttctagtgtgtgattgtttgttgttgtaactcgttcttcttcttttgttgttctgtgtttgtgtttgttttttctctcacctgaaaatgtcttgctgcggtggtaactgtggttgcggaagctcctgcaagtgcggcaacggctgcggaggctgcaagatgtacccagacttgagctacactgagtcaaccaccaccgagaccttggtcatgggagtggcacctgttaaggctcaatttgagggtgctgaaatgggtgtgcccgctgagaacgatggctgcaaatgtggaccatactgctcctgcaacccctgcacttgcaagtgaggtgttgngagagcaagcttcaagcagagatagcccttaattaggaataatgattaactattaatgtgtagctaaaaact

SEQ ID NO: 28982 - DNA, 414 bp, Glycine max
ggctcaagccaaatatactagaatagacaataacaagcgaccgtcaagttactgctcaacagtgactattgtcgagtttgtagctctttgcttgtttgggatttggatgatgacatcggcatctgttacacccgtgcaaaatgtagatgtgtctcaggagaataatagtgaggtgaaggaacaggcaactgacccctctaataacaattctcagcagtttgaagataatcggagtgatctgtccgaggatgcaaccaaaggggatggcagtgtcacccctgataaaaactctgacgtgaaagaaaaacaggaagagaaatcggacgaaaagtctcaagaaaaaccttctgaagatacaaaaacagaaaatcaagatacaagtgtgagcgagaagagatctgattctgatgagag

SEQ ID NO: 28983 - DNA, 382 bp, Glycine max
gagggaagggaatggcaacgaccacgagagggaggaaagaaaggaaggaccccataacaggcacgacacactatcctgctctactctatcgcccttttccttcactttactccttgcatccaattctctcgcgaaattaataaaggaactttaactttcgcgagcgacacaaacgcaatcaaatcaaatcatagattgatttggcaaccccaattccctttagattataaaatctttttatgaattaaagcaatgggtatggatgcttagagtttttttggacgcacgaaagatgattccttggggtggcctcagttgctgtgtgaatgctgatgctctctaccttcacggcagaagcagcggcagggatgctgaaattctt

SEQ ID NO: 28984 - DNA, 434 bp, Glycine max
gtaccgttccggaatcgacggacgcatccacgcgtcctgcgagcatactaccgaagggggtacaaacaacacagatgtcactgacacatatgccaatgtctcagatgcctctggaacggatacaatactttgaataacgcgtggtattaattgttaacgctctatcaccattcctcttctcatattccatactgctacctgaacatgaagaagctaaaccctcaacgattgcctgtgttcaagtaccgaatagacgttctctacctcggcgagactcacgccaccacacatcatagtctgcgacactctcaatggataaaccactcaaattgcttagtacctgaaagaaacacgttgagcctgtggtggcagactcaatgcttggacttaacctaaaggactttacactcaggctgatgctttcatagttgcct

SEQ ID NO: 28985 - DNA, 420 bp, Glycine max
ggaagcaaactagtgattgttacattcgcacctgaatttaacattcatggattctctgcttgactttagcatttgacttgtgaggtaatataatccaaacaagtttcaacagcattctttctgctcaagaagtctttactgcttcaaccagtgaccttcaactttctgtgtcctctccttttaattcagctgaaagtcattgttgatgtcctcaatgggtgatccagctgatgaaaatcttgaaaggaaagagatggacgtgagaaatttgtcatcttcacatggccaagaaccatatgtccacaaggttggaattccttcaagacaaaaccttttcaaggaattccaatccactgtaaaagaaacacttttcgcggatgatcctctaaggtccttcaaggatcaatctaagtcccgaaa

SEQ ID NO: 28986 - DNA, 316 bp, Glycine max
ggcgtcggaaggaagagaagatgagtgagaatttgatggtgaaagtgtgcgcactgggagagcgcctgataatcggaggcgtggaagtggggagaaagatgatctaggggatgagctccatgagtatttaagctcaaggagttcttccagcctgggcccaatcaggccgacaagcttgtggaggacgctactttcgaggccctggacgagcccgaatgggccctgaatctggatctctgcgacctcgtcaacaccgacaagctcaactgcgtcgaactcgggcgcggaatcaagaagcggatcattcttaagagcc

SEQ ID NO: 28987 - DNA, 414 bp, Glycine max
gacacaccatccgttctagtctcaacttctgctcttccaactcctacaacgcttttctctgcactcatgggcaaggtcaagatcggaatcaacggatttggaagaattggccgtttggttgccagagtcgctctgcaaagagacgatgttgaactcgttgccgttaacgaccctttcattaccaccgattacatgacatacatgtttaaatacgacagtgttcacggacactggaagcatcacgatgtcaccgttaaggacgagaagacccttctcttcggtgacaaggcagtcactgtttttggacacagaaaccctgaagagatcccatgggggtcaactggagctgacatcattgttgagtccaccggagttttcaccgataaggacaaggctgccgcacatttgaagggt

SEQ ID NO: 28988 - DNA, 419 bp, Glycine max
gacacacaaaaaaaacactaactaaccaaccaactgattaacgttgcgttggtaactgtgttcactcaccttgcttcaatggcactctcaatttgcagcatgaacattatccccatagcatttagcagcgccatgtttctcattcaagtgtctgaaattcccttccttctggccaacacaaaaggtgaagatgggtcctctgagtgtgtctgccatgggatttggaacatgggcatgggggaatcagcttctgtgggggtaccaggaatccatggataatgagctccaacaaatcttcaacttggctatggacaacggcatcaatctctttgacactgctgattcttatggcacgggaaggttaaatggtcagagcgagaagcttctggggaggttcattcgagaatttcaagagcaaa

SEQ ID NO: 28989 - DNA, 396 bp, Glycine max
aggcgtgcgaacacgcgtgagggatctaacactggtactcctagctagggtgacagactgctaaatggagaaagcttagattgatgactctggatcaaaaaccaatgacactcaggtgaaactatggtgatattatgcctctgcggctaggaagagcagataagaagatattcatagctcgtgctaaatcgtatcatgggacaacattgatagcattcaggcgttatggccttacggctctgcatcaaaaagtcgatttgactgcttcgtttgtattgcgcactgactgtgcacattactggaggcatgattttccaggtgagacagtggaagaagttgcgactagattaggctataatgtggagcaggtgattctgaaagagggaccagagacta

SEQ ID NO: 28990 - DNA, 329 bp, Glycine max
gacacacaagatgtgaaacccatgtcatggtgtctctgctaagatttcaaatttttctacatctatggttggtcatactgcttcgtgctcttggacttattctctgagtaatgtttccttaaatgctatattgtctgcttatcattgcttgtttttgtccacagaccacaatgtatgagttgggcttaatcccgtaacaagcagagataataactttcttcagaaccatcacatgggtagtgccgctaactgtcgctgaattcaacctcaaaatatctagacatactataattagaatttagaagactatgtgctgaaaatgtataggg

SEQ ID NO: 28991 - DNA, 431 bp, Glycine max
cgaaaacggccacacgatgcagtctcaggctgacctcttgctggaccaagtgctacaacgcactcgtctgcactcataggcaaggtcacgatcggaatcaacggattcggaagaattgcccgtttggctgaccacaggtcggtctgcgaagagacgatgttgaactcgtagacgttgacgaccctttcattaccaccgattacatgacatacatgtttaaatacgacagtggacagggacactggaagcgtcacgatggcacggttagcgacgagaagacccttcacttcggtgacaaggcagtcactgctcttggacacagagaccctgagagagatgccatggaggtcaactggagctgacatcattgttgagtccaccggagctttcaccggtaaggacaaggctgacgcacatttgaagggtggggc

SEQ ID NO: 28992 - DNA, 233 bp, Glycine max
  modified_base (45)..(45): a, c, g, t, unknown, or other
gactaacgaagcgagcgaacaacacacgcagggcggcggaggaangacgaaaaaccaacggcgagcagggccaaggagcgggccaggcccgaccacagaaggacaagacacgacagagcaagcgacggagagaacacaagaacacggcgaaggcaaacgcacaagcagcggcagaaaaggccaccggaagcacggacaagacgggcgaaccacacacgaaacgccagccacca

SEQ ID NO: 28993 - DNA, 444 bp, Glycine max
ggcagtggaacaaagcacggaagagaaagaaatttggttctctctaaagagtctccgctgaactttttggtttcttgaagatgtcggtactctccgatcttatcaaccttaacctctccgacatcaccgataaggtgatcgccgagtacatatgggttggtggatctggcatggatatgaggagcaaagcaaggactctctcgggactggttaatgacccttccaagcttcccaagtggaactatgatggttccagcactggtcaagctcctggacaagatagtgaagtgatcttatatccacaagcaatttttcgggatccattcaggaagggtaacaatatcctggttatgtgtgatgctcacactcctgctggggaacccattgctaccaacaagagagatgaagctgcaaagatattcagtaatcccgatgttgctgctg

SEQ ID NO: 28994 - DNA, 392 bp, Glycine max
gggaaaaagaagaagagaaaaaagatgagcgacggaggaaaacgacaaggtggaagagcgttgccgccgacgccaagaggccctacgcctcctccctcctctcgccctcgcctcgaacccgtcgatcgcgaaaagacatgtccgttactgctgcgagtgttcactaagattgggagtcaccattccatggaagactttgccgtcagaggcaaagagcccaaagacgaggttcagatttacacctggaaggacgctactcttcgagaactcaccgatcttgtcaaagaagttgctccggctgcaaggagaataatcgccaaactctccttcgcctttggattccccgacaaaaactgccgtttcaaagttcaagaggtgggcaagacattatc

SEQ ID NO: 28995 - DNA, 446 bp, Glycine max
gctcacaaaagggagaggacaatggctaagcgtgcaatgcgaatggggatgttcactgagaggtatacaagcttggcatctctacctcttcatggttcacctttcaggtctcttggccttgaagctcattctgcaatgcaccgaagacacgtgccgtcctccgcggcagcactgagggctcctgatatgagagctgctgcaaaatttgagagaaaccaatttggatcactggttttcgtggaagatgatgatgttggattcttttggcctggcagtttcagacaggtagaccaacaaggagctggtgttaatgtaggacatgctcaaagttcaaatgctagtttaattccaatggtgcctacttcaccacaagcttctacatctgctgatctcacattgaagctttaagtttaaagcttaagaatgacgatacatacacaagcaaa

SEQ ID NO: 28996 - DNA, 420 bp, Glycine max
gtaagcggacatgtgatagtagttgtagaggcaagccacacatgtatgatttcgaggggaattgagacgttaggaagtagtacggctactattgcactgctaggacatttatcaaccaaccctactgcaagggcatcattcttggagagtattccacgtcctacatcatctggggagcaatgactcttgtgttagaactcactggaaataatttagcactagatcaggtcattctctgcactgtgaagtttcagtgtcagcagttgaggtacccaagcatggataagttcagaagatatcctttaatggataatctgtatgtttttcagttcctggaattgttgtttcagtacgagatttatggtcagaatttgtctgacgattgatagtcacatcattatcgttctgtcttctagagtc

SEQ ID NO: 28997 - DNA, 356 bp, Glycine max
agaagaagaaggagcatggccatgagcatggccatgacagcagcagcagcagtgacagtgattaaactgctgcatcacctatatatttaaaaggtttatgggaccatagtagcgagggctgtgccttaagtttgtctctctctctctctctgtatctctctctctgtctctttttcctttttccctatcttgtgatctatttatgagtgagaaaaacaaaagtgagaaattgtgcgtgtatctggttgctaattcgagtgctattagtctgtggtgtgggtggtgtggaaccccgctacttgggttatgtgtgattgcatattatcctagagaaatgaaaattttaaattatcaat

SEQ ID NO: 28998 - DNA, 429 bp, Glycine max
gggcgcaaaggggaacaagaagaagaagatggtgtccttgaagcttcagaagcggctcgccgctagcgtcctaaagtgtggcagaggcaaggtctggctcgatccaaatgaagtcaatgaaatctccatggccaattctcgacaaaacataagaaagttggttaaggatgggtttattatcaggaagccaactaagattcactctcgctctcgtgctcgtcgaatgaaggaggccaagaggaagggacgtcactctggctatggtaagcgtaagggtacaagggaggcaaggctttccaccaaaatcctttggatgaggaggatgcgtgtcctcaggcgcttgcttcgcaagtacagggaatcaaagaagattgacaagcacatgtaccacgatatgtacatgaaggtgaaaggtaatgttttcaagaa

SEQ ID NO: 28999 - DNA, 415 bp, Glycine max
gctgataagaaaggcatcatgctgcggttctgtaatcttaaggaatgtgaaagtcacattcacagcgtagatagcccatgtgcaaatatacgaatggagatagggtggccacttggcgttacatttgtccatcctcatgacttacctaacaaggcaaagctgggttttctagaagcatatgaacctggttggacagaagcccatcaaaactcagacaggaatcagtccccctgatttccaacgtatgggcgacaatggatcaagttgtgaagatagccctatatagttctcagggggctctgaatctatctgtagctaggctttagagttttatacctgctgtctgtatatgcaacttttgaagctcttaggattatgagacgctaatccaatgaaaatgaatggtagactcagc

SEQ ID NO: 29000 - DNA, 392 bp, Glycine max
gcatatgattttgatgatgagtttccggttaagaatcatcgtgaagatctagatcggaaccatgatgttgatcatgtggaaaatggggactacaatccaaagaagttgcataccattggttcaagcattctattcagctgggagcgttgctggcatggattttgaaggggacaaagaattctacagcaatgcagaatggcaagaaagagtcgagaaatggagagtcaggctagaatagagaggtcttctagacaaagaatacggaaaagaagatcagggtgaagaagatgattaccttttgggtgaagctagactaccattgtggcgcatggttccgagatctagaagcttaatcaatgcatatcgcatagtgatggtgatgaggctggtca

SEQ ID NO: 29001 - DNA, 421 bp, Glycine max
ggggagagagaaaaaggtgaaccttgtgttctgtctgttttgttgttattcttatttctgacctatataccaattacactgattctgctttatagaattacatcatcgtatcatgaactaccttggaactacacgaaaatggtgtcggtgaagaaggagatggttgtgtactgattcgacaccctgttcgggcactacaacagcgcggaagctgctgcgtctgccttcgatcaggctcaacatccattgggtgttacatggaagaaagtggtgaatggaggagatactcgtcttcggggttgcatcggaactctggaagcacgcaacttgagcaatgagctcagagggtatgcactgaccagtggcctcagggaccggagattttgaaccatacagggtaatgagctgacgtttttggagt

SEQ ID NO: 29002 - DNA, 198 bp, Glycine max
cctaaagtgtggcagaagcaatgtctggcatctatccaaataaagtcatcaaatcttcatcggagaattcttgacaaaacataataaagttggttaaagatggttttattatcaagaagccaactaagattcactctcgctctagtgctcgtcgaatgaatgatgacactaagaatgaacgtctctatggctatgctt

SEQ ID NO: 29003 - DNA, 378 bp, Glycine max
gagtgagtagtgagaatggagtttcaagggttaccggaaggttgcattgctagtatactctctcgcactacgccggcggacgtgtgtaggttttccgtcgtatcaaagattttccgttcggccgctgaatcggacgctgtgtggaaacgttttctcccttccgattaccattccatcatttcccagtctccttcgcctctcaactatccttccaagaaggagctctatctcgctctctcggatcgccctatcatcatcgatcagggtaaaaaggtaggtagcgtgctgagtgcttcgcataccttaaaaccttttctgctgatttaatttgacggttaattctatgatgtctggaacgcatagctttcaattggagaa

SEQ ID NO: 29004 - DNA, 280 bp, Glycine max
tagggacccagaagaatgagtgagagtcggtgaccaatgggctacagctgaaagacaagctccttcgatctacaatctatatctattacgctctcaatttccgagagtgctctatctctttctctcacacatagtcagcgcgatttgcacgcatatttccatcatgatgtctgctactaaactcaaatctgtcgagttgtacaggtaaatgctgagagatacgactgaggcgtcgccatcagggacgggatcatggatagtggcagttctcggtatgatg

SEQ ID NO: 29005 - DNA, 422 bp, Glycine max
  modified_base (381)..(381): a, c, g, t, unknown, or other
ggagtctgaaaaggttttgaaccaaacaaagaatggggataatagtagtcaatcaggttcatctaatcatttagagaaagataccaatggctctcaatcaggtgaagacagcggtgttaagagtgtttctgcttacagatcttcttcgcatcctataaccgcaccatcccctttgtctggtctgcctgaattctctcaccttggttggggccactggtttacattaggggacctggaacttgctacaaacaggtttgcagaagataacgttattggtgaaggtgggtatggaattgtttatcacggtcaattaatcaatgggaatcctgtggccattaagaagctcctcaataatttaggacaagctgaaaaggaattcanggtagaagttgaagctattggtcatgtgcggcataagaact

SEQ ID NO: 29006 - DNA, 390 bp, Glycine max
gtgtgttgtgggtggtcatgcagtggatggagtggcagagatacatagtgaaattgtaaaagatgatgattacaatgcatagttataagattgtggcccgagaagtttcaaaacacaacaaatggtgtgacaccaatgaaatggatcaggttctgcaatccagatctgagtaaaataataaccgagtggataggtactgaggatagggtcctaaatactggaaaattggccgagctacagaagtctgtagactatgaggatctacaagtgcagcggagggaagcaaagaggattaacatagataaagtagcagcattcatcatagaaaaaacagggtattctgacagccctgatgcactgattgacattcaagtcaagagaattcatgaa

SEQ ID NO: 29007 - DNA, 173 bp, Glycine max
ccgggccgacccacgcgcccgcacgcgcggcggagcccgccgaagggggaaagagagcgaccgacgcagcaagagaccaggggcaccggaaagcaaagagcgacaaagcaaaccagagagccgagaaggcaccaacaacggccgcggggccaggacagacaagaagacaagcg

SEQ ID NO: 29008 - DNA, 354 bp, Glycine max
ggacttggttgagaatacatattgtacacactcagtgctcggtatctctatcactaaatttcaaaatttgctctctctaatcttaaacttgatcgcatctgtgaggaagaatggaacgttcaattctcagaggctgtagaatgcgatctctccattccaattccaaggggtggacccatttacgttcctaacatggtcggtccctgcactagggttcctcactttcagacttggcttctttctgaacttctgaagctcgatgctgaatgagctgaagatttttctcagcgtgatatcttgggtgatgaccttaaaatatttacagaggatgacttaatggatatggctctcaaa

SEQ ID NO: 29009 - DNA, 416 bp, Glycine max
aatcagaattagacacaaacacattaaacagatggatcacttcaaattacaccctcaccttactaaattcatcgttccgaaacactataacattaagctcaatcccaacctcaaccctcaccacatttgcaagctccgtcgacgtcaacctcgacatcgtcgccgacacctatttcatcgttctcaatgccgccgaactcgacgttagcaacgacgccgtttcattcaccaaccaagattcctccaaggttattaaaccttcatcaattgaattgattgaaaatgattagattctagttttggaattcccaaaagaattacctattggcttagggagtctagacattcgctctgaaagaatcttgaatgatagaatgaaaggcttctaccgaagtacctatgatcacaatggtgag

SEQ ID NO: 29010 - DNA, 400 bp, Glycine max
cgagtcagagagagcgagagaaaggcgcgcatgatgtcggacgaatagcatcacttcgattctgaggcggatgcaggagcgtccaagacgtattctcagctggctggtaccatgcgcaagaatggcttgacttgcgatcagatccatgccttgcagggcagtagagtgttgtacgtgaaatacaggcgagcatggacctgcaaagtggcactctgttgcaattgacattattaatgggaaagagatcgaagatgttgagcgatcatccgacaaatgtgatgttacacatgtgaatcgcactgactatgagcttattgatatctatgaagacggctacgtgagtgtgatgactgataatggacataccaaggacgatctgaagctatctactgatgaggca

SEQ ID NO: 29011 - DNA, 412 bp, Glycine max
gggaattggaattagaattgcaaaaaggaaaggggaaggaagcacggcaaggaaggagagtggatcgattcctcagcagcaccagacatttataaaagctctttcccttccctcaaatcgctcatactcttccaatcttttttttttatgtcattttttacctttctgcctcgctcaataatacaaaacaaaaaagaagaagaagaaggttttcgcgatggcatcgaaacggatcttgaaggaactcaaggatctccagaaggatcctactacctcttgcagcgccggtcctgttgctgaagacatgtttcactggcaagcaacaattatgggtcctccagacagtccttatgctggacgtgtattcctagtcactattcatttccctccagattatcccttcaagccaccc

SEQ ID NO: 29012 - DNA, 418 bp, Glycine max
tctgagttccgtgccactctattgatccaggcgctcgggtagatctgacatcgattctcataccaacttccgaattcataatcactctcacattattctcctatcattttctccttcatctccatcaggtgaaagttcagtgaccatcaaaagccacatggacggaagcaactatatcatcggacgcaatgccgtctaactcgacgttagcatcgactccagtgtatgcaccaaccaggatttctgcaaggttattacaccttctagagttgaagttattgaaaatgatgagattctggttttggagttcccaaaagaattacctattggattaagggtctaggacattcggttagtaagaatctcgaatgatagaatgaattgcttatacccgagtacctgatagcacaatggtgag

SEQ ID NO: 29013 - DNA, 416 bp, Glycine max
ggttggcgttgatgttacaatggcacgaagcatgcagctcctacgctggctccgcaggcgatctcgacccttccaaggtcaaacaagtttcgggaaaccgagagctttcgtacgagggttttctgacggaattggaatgcgatcacttgatttccatcgccaaatcggagctcaagagatccgcggtggccgataatttgtccggcgagagcaagttgagcgaagtcagaacgagctccggcatgttcattcccaagaacaaggatctgattgttgctggtattgaagacaagatttcatcatggacctttcttccaaaagaaaatggagaaggcatacaagtattaagatatgagcacgggcagaaatatgatcctcattatgattactttgctgataaagttaatatagctcgg

SEQ ID NO: 29014 - DNA, 436 bp, Glycine max
ggttctagtgtgtgattgtttgttgttgtaactcgttcttcttcttttgttgttctgtgtttgtgtttgttttttctctcacctgaaaatgtcttgctgcggtggtaactgtggttgcggaagctcctgcaagtgcggcaacggctgcggaggctgcaagatgtacccagacttgagctacactgagtcaaccaccaccgagaccttggtcatgggagtggcacctgttaaggctcaatttgagggtgctgaaatgggtgtgcccgctgagaacgatggctgcaaatgtggaccaaactgctcctgcaacccctgcacttgcaagtgaggtgttgggagagcaagcttcaagcagagatagcccttaattaggaataatgataaactattaatgtgtagcttaaaacttatgtattatgtctgtgatggttttcgt

SEQ ID NO: 29015 - DNA, 424 bp, Glycine max
ggagcgaagaagatattagggtttttgagtgcggtgcggcgatcctagcactctcttctgcagctttcgccgacagcttcattcaccatggctgagcaaaccgagaaggctttttttgaaacaatcaaaagtgtttctcagctcgaagaaaactgggaagggaaagagacccggaaagggtgggaaccgcttttggaaatccattgggcttggatttaagactcccagggaagccatcgaaggaacctacattggcaagaagtgccccttcactggcaatgtttccatccgtggccgtatcttggctggaacatgtcacagtgctaagatgaacaggactattattgttaggaggaattatctccattttatcaagaagtaccagaggtacgagaaaaggcactccaacattcctgctcatata

SEQ ID NO: 29016 - DNA, 425 bp, Glycine max
gggataatgattttggaattccaggagcattttacatcaaaaattttatgcaatctgaatttttcctcgtgagtgtcactcttgaagacattccaaatcatggaaccattcactttgtttgcaactcatgggtttacaatgcaaaaagttacaaaagggatcgcattttctttgctaataagacatatcttccaaatgaaactccaactccactagtgaagtacagaaaagaagaattggaaaatctaagaggggatggaaaaggagagcgcaaggaatatgataggatctatgattatgatgtctataatgatttgggtaacccagacaagagcaatgatctagctcgtcctgttcttggaaggtctagtgcctatccatatcctcgcaggggaagaactggtagaaaaccaacaacaaaagac

SEQ ID NO: 29017 - DNA, 228 bp, Glycine max
  modified_base (14)..(14): a, c, g, t, unknown, or other
  modified_base (70)..(70): a, c, g, t, unknown, or other
  modified_base (83)..(83): a, c, g, t, unknown, or other
  modified_base (114)..(114): a, c, g, t, unknown, or other
  modified_base (135)..(135): a, c, g, t, unknown, or other
  modified_base (167)..(167): a, c, g, t, unknown, or other
  modified_base (176)..(176): a, c, g, t, unknown, or other
  modified_base (188)..(189): a, c, g, t, unknown, or other
ggagaagagaggancgagagaggggcacaagcgggcaaggcggagagagcaaagaggaagacgagaaggngcaccgagaccangaacacaccggacggcgggagcaccaaagcncaggccacggccaaggaagangaagggccccgcggaacaaaggggcgagacgncaagcagcngaaacgagaaanncagcacaagacagacgaaaacggcaaaagaaagccgaaa

SEQ ID NO: 29018 - DNA, 439 bp, Glycine max
  modified_base (368)..(368): a, c, g, t, unknown, or other
ataggaatggaggttgctgctgctgctgttggttggaaacttgatacaacaatcatattcccagaagatcaccttttacaaagactgtttactccttctcttgcccggagatatgaagaactctatcaaaagaatggagtcaaaatcttgaagggtgcttccataaaaaatttggaagctggttctaatggacatgtagctgctgtgaaacttggagatggatctcttgtggaggcagatacggtaattataggcattggagcaaaacctgctgtgactccctttgagagggtgggcctgaatacagaggttggtggtatacaagttgatggtcagtttcggacaagcactcccggaatctttgctgntggtgatgtagcagctttccctttgaagatttataatcgtatctctcgagtggagcatgtggatcatgccc

SEQ ID NO: 29019 - DNA, 402 bp, Glycine max
cggcctcaagatatggttccaaatttcgagaactttgggtcggagtgcccctgggaagaggatttgaagtatgctaaagatgtttgtaatcaggttgatgtgccgttagaagttggtcatttaaccgatgaaatactggaacaatgtggtttcttacctcattgaagagtatagtactggccgaacccctaacgctgatgttgtttgcaatacacgaataaagttaggagcattcttggatgcaattggaggcatgggttttgactatgttgcctctgggcattatgcgaatgtgatgcacgcatgtgctgatgggatggatgagccttatgttctggaactatcacaggacatggtaaaggatcaaacatactttgtttcaacctgtcacaattcgagctg

SEQ ID NO: 29020 - DNA, 401 bp, Glycine max
gacacacacacacattccacttagttaaacatggagaaatcaggctctaacagtcctaaatctgctttgaagtttgtgaagaccacatctcagtctgcagctcaatggagcagtactaattcaagaggggatgacaaaagatgtactcaaagacaagttctatgacaagactaaagcttcacgaaggtctccacccaaagaaagttacatggcttcaagaaggtctccacccaaagaaagtaacatggcttcaccaaggtctccaccaaaagaaaatactaagccacaagaattcaaactccacacccaagaaagagctgtcaagcgtgcaatgttcaattatgctgtgacaacaaaattctatatcatggagctggcaaagaaacaagaggagaagctac

SEQ ID NO: 29021 - DNA, 414 bp, Glycine max
gattgcgcaaacatttcagtgatttttgggtagttatcctcgtgatctgtgcacaatcgtctgctacttcatataccttcttccttctcccccacctcttttcctcctttctttgttcaacaccattccccataggagcaacccttttaaaagttttgggatttggagggtgcaaaagagccaatgtgctttttaaggtttgagtccttagtgtgaaggtttatgtagtttggtgcattatgtatcagctagggcatgagttttgtgaaaataatgctttaaaagcaatggggggacaattgtgacaaacatggatcctcaggcgttcattaggttgtcaattggttctctggggttgcgatgcactggaattgaactgagcactgcaaaatctggaattcaaacactctcttt

SEQ ID NO: 29022 - DNA, 417 bp, Glycine max
gggtgaattgggtaatctgaattttcaacaacaaacaattattaagttccatggttcagtcttggattccttgcctgctggctccttgaggtgttttgtccgattgggtggtgttcgagaggtttggagaaattaaggaaacactgcacacaacacaactgtaacttcatccaaggcaataacttctctttcacgtcgatcttttgctctcactgtcagaatttgaacttgcctttgttattcagaatctcaattcaattcatggtggctcaatgttgctgaattgggctaacacctttgattcatcgctgtgggatcttttggtcaatattttggaactgtgaagatttgtggtttaggctaaatatgatgcttgagcaggactgtgctggttttatttagtaagtttatgcacta

SEQ ID NO: 29023 - DNA, 369 bp, Glycine max
agtcaaaagcagagaagagtcactcagggcagcagtcactgagtgaaaactactggcaattgtctgctgatgagaagcttacctttgaaccaccgcctatagattgcacaactagcggagattgcatgtaacgcagtggtatgtattataccaggggcgctggtgacacaccacattattaacgcctatgttgctataatgatgctcgtacagagaacatcattgttggatgcactcgcattgacgagtcaagactgtgaaagatgaagactgattacgaaactgatgaatggtgggctaatgggataagtgagacgcatggtatggtactatttgtgcctaaggtaatggatcaagcattgatggtgg

SEQ ID NO: 29024 - DNA, 419 bp, Glycine max
ggcgcacccagagaggaagcttagagagagagagagagagagagagagaggagagagtattggcgcttcatcaagatgggtatttctagggattccatgcacaagaggcgtgccactggtggcaagaaaaaggcttggagaaagaagagaaagcatgagcttgggcgtcaggcagcaaacaccaagttatcaagcaacaagacaatcaggaggattcgtgttagaggtggcaatgttaaatggagggcattgaggctggatactggcaattactcatggggtagtgaagcagttactcgcaagactcgtattctagatgttgtttacaatgcctcaaacaacgagcttgtgcgaactcagaccctggtcaagagtgctattgtccaggttgatgctgctcctttcaggcagtggtacct

SEQ ID NO: 29025 - DNA, 302 bp, Glycine max
aggcattgtgagatcttctaaagcctgacgctgcaggggtttaaatcgactgatcaccctatactaaatgtacatacacagttcacttaaacctatttctataaactctatcttcatcaacattcatcagatgaatgatcagtatagcaagcctgcctatttacaacaatggcgagatacaacgtgattgaaggtaatgcaacactctactgaacacggatatacttgtgacaagctttgcatcatgacagaacccatagactgagaaaataaaggttcaacagcatacttgggaccattgc

SEQ ID NO: 29026 - DNA, 425 bp, Glycine max
gacataaatgaagctgtgccttttgttgagtggggaccaaagggaggaaagaaaacacgatctcatgctggaacattgacatttaaccgaaacagcatgtgtggtgaacctgcacgaactgttggttggcgtgaccctggttttatacacacaagtttcttaaaagaactgtggccaaattttaggtacacttacaagttggggcatatgctgtctaacggttcttatgtatggagtaagaagtattcattcaaggcatccccatatcctggacagaactctttgcaacgtgttatcatatttggtgacatgggaaaggctgagcgtgatggttcaaatgaatatgctgattatcaaccgggttctctaaacaccacagaccaacttggtaaggatttagaaaattatgacattggtttccacat

SEQ ID NO: 29027 - DNA, 299 bp, Glycine max
gttgaaaaacgacagctctagaaggtactgagagggtttgcgctgcgtgatttccggtgtcgcgagtcgctgcgcaatgaagaatggcaggtctatgaagtccatacccactatgggtgagcttgggggctaacgatagggtttgtcagaggaagctgtccgggttctggatcttagaagcgattcatggggattttgcgtcgcaaggtgtgcaggtagaatagggtactacggctgttaacactggaacatgccaggacgctggggacacagggactgtgctcacattatgaggggac

SEQ ID NO: 29028 - DNA, 453 bp, Glycine max
gatgatggaaagggtaccttaatctgtgtcacttgtggagtttcctactttggtcttgccttggtcaaccatctcttgctcttaggttactctcttcgagtcaccgttgacaacccagaggacatagagaagctgagggaaatggagaggcgtggtgaagtgagggctacagaaggaaatttggaagtaataatggcaaagctaactgatgttgatgggttggagaaagcatttcagggctgtcgtggcgtctttcacacttctgcatttacagaccccgctggtttatctggctacacaaaatccatggccgagattgaagtaagggctgctgagaatgtgatggaagcatgtgcaagaacaccttccataacaagatgtgtgttcacatcatcactatcggcttgtgtgtggcaagacaattcacaatcagaatttaccccagttattaat

SEQ ID NO: 29029 - DNA, 388 bp, Glycine max
ggcagcaacagcagcattcactgaaggcactcaggggggtttgcggtttcagagattgtgacacacacatccatggccaccaataccaacgccgactcagatatgtcgcaccagctatactagaatgatgccgacatccatatgatgctagccgccgacgtacacatagtcaccaaagactgcgactttcaaaaggaacgttacatcttcaagcgcctgatcgacgggatttacattaacaatccttgggaagacatgggacatgcttcagttagctattagggatactagagcaactgaaaaccctgatgagatcatcgtacaatccttaaggccctatgatcgaagagcagatgtgaaatatgctaaggacactgaagctcatgct

SEQ ID NO: 29030 - DNA, 347 bp, Glycine max
gaaagagggattggaaaaaatagacaaactatcggatttaagcaactgaatttccaatcctgagaccgcaagcgcatgggtagttttcacttggattcatcacaataaactcaaactgcagaaatagacttatgcttttcatttgcattgctacagtgtcgctttaccaaaacgccaagatacagtgagattggttttaaagcaactcctgcgtgaccacaacgccacttgtttcaggcatgcctactgaacagactcaacaacctctgatatcggaggagcaagaagagacagcctacgattcctcggagaaggtggtggtggtcagaatcgacgaccactacggc

SEQ ID NO: 29031 - DNA, 403 bp, Glycine max
ggcacaagtgagtttgttgatcgagataactagaaacagtgtgatgaaaatgaaggtccttgttttcttcgttgctacaattttggtagcatggcaatgccatggcgtacgatatgttccctctgcgaatgaacactggctatggtgcccgtactccggaggtgaaatgcgcaagttggaggcttgctgaggaagcacacaacatgtttggctttgagaccattcctgaagagtgcgttgaagcaacaaaggaatacattcatggcgaacaatatagatcagactccaaaacagttaaccaacaagcttacttttatgccagagacctcgaagtccatcccaaggacacatttgtgttcagtatagatggcaccgtactctctaatattccatactacaaaaa

SEQ ID NO: 29032 - DNA, 412 bp, Glycine max
ggcgctcatttcagaaacactgagtgtccctactctctaaccttttctctctcactaaccctaatcccaactaattcgaatttcgcttccgtcgtgtctccttccatttcacaaggtcaattcatcttaacccaattcttctctttctttttgttctttttctatgtagtctcttgttatttctgttccttaattccgcgcgtaggtacaacatttcacgccgcttaacgttagggtttcaaatttgacaaatcttgccaattcgtttttttcttttctccctcctttttaaagcaattcgccgattcggttaaagattttcaaaatccaaaatttcatgggaagcaacgataatttcggcgacgggattttcaaaacccgtccccatctggcggacgtcacgaatctcccg

SEQ ID NO: 29033 - DNA, 379 bp, Glycine max
ggagacagagagaatgagtacgggagcagaagggctagtgagtagttatggtcattgatgttgcaaatcatgtccaggctatgcttccccacttgaagccatttctggggccagagagtctctcatttatgtaacgctcagtctacacagggaccggaattgagaagccggactatttggcgacagtggatgtggatccagactatgcaacttattgcaaagtcatccataggcttgctggtccttatttaggtgacgaattgcatcacacaggctggaattcatgcagctcttgccctggagaccccttagcagaccgacgatttctcatcgtacctgcactcgtatcaggtcgagtatatgcggttgatgtgaaaac

SEQ ID NO: 29034 - DNA, 422 bp, Glycine max
ggggtgaagagaaaggtgtgctatttttatgatccggaggttgggaattactattatggtcaaggtcacccaatgaagccacatcgtatacggatgacacatgctcttctagcccattatggattgctacagcacatgcaggtccacaagccatttactgctagagacagggacctttgtcgttttcatgctgatgattatgttgcattccttcgaagcataactcctgaaacacagcaggatcatctaaggcaactgaaacgctttaatgttggtgaagattgtcctgtttttgatggcctctactctttctgtcaaacttatgcagggggttcagttgggggtgctgtcaagttaaatcatgaccaatgtgatattgctgtcaactgggctggagggttgcatcatgccaagaagtgtga

SEQ ID NO: 29035 - DNA, 397 bp, Glycine max
gataccaaggtggaggcttacgcagatgacaagcttagtgcgcgagtctctctcccttataacccttcttccacttccgtgtcttttacgagttagatttctcattctttcatggaacaacacattcactctctctctctttagtgattttttcgatttgattgacaaacacaacgaaccaaagttaactactttagagagagagagagagagagagagagagagagagagagatggagagtgaaggaagaagagaaggaggagagagagaaacaacagcagcgacgaggaaggtggagggtgctgagagaagatacataggaataaggatgaggaagtggagcaagtgggtcgctgaaagtagagaacccaataagcgttcaaggattaggctcgg

SEQ ID NO: 29036 - DNA, 409 bp, Glycine max
ggggcaagctgagaagtgtgccgagagaaagaggaagaaccagtatcgtggaatccgtcagcgtccatggggaaagtgggctgctgagatccgtgacccaagaaagggggttcgtgtttggcttggaactttcagcactgctgaagaagctgcaagagcttatgatgctgaagcaaggaggatccggggcaagaaagccaaggtgaatttcccggatgagccttcaggcgctgctgcttcctcaaaacgcctcaaggtgaatccagaggctcagccaatgaaggaaaatctgaacaccgtgaagccgaaaatgaaccagatgttcaattttggtcacaatctggagggctactacagcccaatagatcaggtggaacagaaaccactggttaaccagtatgttaaccct

SEQ ID NO: 29037 - DNA, 312 bp, Glycine max
  modified_base (37)..(38): a, c, g, t, unknown, or other
  modified_base (43)..(43): a, c, g, t, unknown, or other
  modified_base (49)..(49): a, c, g, t, unknown, or other
  modified_base (83)..(84): a, c, g, t, unknown, or other
  modified_base (93)..(93): a, c, g, t, unknown, or other
  modified_base (105)..(105): a, c, g, t, unknown, or other
  modified_base (109)..(109): a, c, g, t, unknown, or other
  modified_base (114)..(114): a, c, g, t, unknown, or other
  modified_base (120)..(120): a, c, g, t, unknown, or other
  modified_base (123)..(123): a, c, g, t, unknown, or other
  modified_base (135)..(135): a, c, g, t, unknown, or other
  modified_base (140)..(140): a, c, g, t, unknown, or other
  modified_base (143)..(143): a, c, g, t, unknown, or other
  modified_base (145)..(145): a, c, g, t, unknown, or other
  modified_base (154)..(155): a, c, g, t, unknown, or other
  modified_base (157)..(158): a, c, g, t, unknown, or other
  modified_base (182)..(182): a, c, g, t, unknown, or other
  modified_base (185)..(185): a, c, g, t, unknown, or other
  modified_base (199)..(200): a, c, g, t, unknown, or other
  modified_base (206)..(206): a, c, g, t, unknown, or other
  modified_base (212)..(212): a, c, g, t, unknown, or other
  modified_base (214)..(214): a, c, g, t, unknown, or other
  modified_base (220)..(220): a, c, g, t, unknown, or other
  modified_base (225)..(225): a, c, g, t, unknown, or other
  modified_base (230)..(230): a, c, g, t, unknown, or other
  modified_base (234)..(234): a, c, g, t, unknown, or other
  modified_base (236)..(238): a, c, g, t, unknown, or other
gacggcgaaaagccaaaaaacaacgaaggacgcagannagcanggctgncacgggggcatcgccgaaagggaacagcagggcnncagcaggcnctacaagcaagncacngagcncaaacnacnaggcaaaaacangcccngangnggaaggcanngnngccaaggcagcgaaggaagccacngcnagggacaaaaccgnnccagcngcacancngcgaangcacnaccangacngnnncggacgggggcgagaagccgcagagccgcgaaaggcaaaaggaagcaacaaagcagaaaaagaagggccaccaa

SEQ ID NO: 29038 - DNA, 396 bp, Glycine max
cgtcgagccgcgtcggcgtggaaagacgccacaggggggcgcatggctctcaactgcggactggcggatccctccgggggtcccatgtcgaggacttctatcagcctagctttgttgatatattctttacaggttggagtgactccatgtaggcggtagggagcgacagtacaggatgaagtagaggaggctggtgcttgggagtgagacgtgctagcgctgagcgtggatggtggaagccgggtggtggggacctgcttggagcggtgaaagaggagtgggaggtaatgagttaggcatgcgcgggaagttacagtggggatcatgatgcatggagcgtggatgggtgaatacacgtgggtagcagagcctgctaaggcatgctagagactgctg

SEQ ID NO: 29039 - DNA, 85 bp, Glycine max
  modified_base (8)..(8): a, c, g, t, unknown, or other
caggaagnggcagagacagacgccacaaaggaggaaaaggacaaaaaaaaaaaaaaaaaaagcggccgaacgagaggagccaagc

SEQ ID NO: 29040 - DNA, 162 bp, Glycine max
  modified_base (9)..(9): a, c, g, t, unknown, or other
  modified_base (12)..(12): a, c, g, t, unknown, or other
  modified_base (17)..(17): a, c, g, t, unknown, or other
  modified_base (28)..(28): a, c, g, t, unknown, or other
ggcggcagnagnggaanagcggaagagngagcgaaggagaaagcagaaagcagaaagacggggcaggaagcggagggagaaaaagcgaggaacgcgacacagaaaaaaaaaggagcccaagacagcgcgagaggggcgagcgagagcaaaaggagcagacac

SEQ ID NO: 29041 - DNA, 428 bp, Glycine max
gacagccgaagctataaggagggactaccctgaggaagatgggttgcacctaactggccttatccatgatcttggcaaggtgctgaatttgcctagttttggaggacttcctcaatgggctgtagtagggggacatattccctgttggttgcagatttgatgagtccattgttcaccacaagtattttaaggaaaatccagactacaacaatccagcatacaacactaaatatgggatttactcagagagatgtggacttaacaatgtgatgatgtcatggggacacgatgactacatgtatctagtggcaaaggagaatgatactacactgccctctgcggctttgttcattataagataccattcattctatgcattacataaagaaggagcctataagcacttgatgaatgatgaagattttgag

SEQ ID NO: 29042 - DNA, 414 bp, Glycine max
  modified_base (404)..(404): a, c, g, t, unknown, or other
ggccgaatattgttatttgttattaatgtttacgcaaatgcctgaattataagatgcaccacgttctgtgaacttttcaccttcactctgtatcactaatccttctctgcttggaggcttttttttttttttttgatggatccggcaaagggattggaagcttcgggggagaagacccttcaagcagaagtgaaagcttttttcgattctgctcctcctttgcagaaaagtgatgagataactcagaagttgaatcagttcattcaacgcatttcttgtccatcagcgaatgggaaagttaggagaattgattgtgtgacttctggtgggaccaccgagccattggaacaacgatgagttcgctatgtggacaatttcagttcaggtcacagaggggccacatncactgagtat

SEQ ID NO: 29043 - DNA, 346 bp, Glycine max
ggctttatatttgagttcaaacttatcatagccgtggccacctccaacttctctagcgctctctccggctacctagccttctttacggtgctacttaccaaggcacactctaccgataccgattctttcaaccttcaacaagttcaacccagtccaaccaaacattatgctccaaaacgatgctagcataacatacagcggggtgttacaactcaccaaagttggcagcaacggcgtgcccacctcgggatctctcggtcgtgctctttacgctgtcccaatccacatttgggacagcgaaaccgacaaggtagccagctgggctacatgctttaaattcaacatt

SEQ ID NO: 29044 - DNA, 411 bp, Glycine max
gagagaagagaaggttacagaggaacaaaaacctgtctctgtttctccgtcgtggcaattgaaggaagcactgtctgtctctgcaactttagtcacattcacatggcagcttctgcatctgctactgctgtgccatatctagacaagacagattttctaaagcttcaaaatggcagtgacattcgtggtgtggctgttgatggtgttgagggagagctagttaacctcactgaacctgttgctgaagcaataggagctgcttttgctgcatggctaatggagaaaaagaaagctgatgcttctcagcatttgagagtttctattggccatgattcccgaatatcagccaaattattacagaatgcaatttctcgaggtcttgctggtgctggcctagaagttgtccactat

SEQ ID NO: 29045 - DNA, 360 bp, Glycine max
  modified_base (148)..(148): a, c, g, t, unknown, or other
  modified_base (227)..(228): a, c, g, t, unknown, or other
agggaaagaaagggaggaaagagtgcttctgcttcaggaaagatgactctgaggtcctatctgataataatgttgagcaatatgatcttgtcccatttagattcccatgtgaactgtgatttggatgagcttctcaaggcttcagctnttgtgttgggtaagagtggaatatggattatgtacaaagtggtgcttgaagatggacttgctttggctgtgagaagatnnggagaggagggtctcaagggttaaagagtttcaacagatgtagaagcaatatggaagttatgacattcaaatattgcaactctgagagcctattactggtctagtgatgagaagcttcacatatatgattat

SEQ ID NO: 29046 - DNA, 402 bp, Glycine max
gggtcacaagaaaaaaaaaaaaacatgactgagttatctttctcaaacaagaagaatgagttatctagtaacctcttctctatcttcttccacttctgttatctccattttttctcaccctttatacttctcctacttcatcttcttctccccttacctcctcaggatcctgtctttcctctcccctttgttcatcaccacaactcttctccttgtggcccttctcactttcactcccaacaatcttgatcaggaaaagggtggttctgagctttctgagtccaaatggggcattctgctttctgttttgcaatcttttctagcatggcttcattccaaagctgatgagatagatgaggaaatggggctcctaggtgaggttgaggcatatcttgtcatgtt

SEQ ID NO: 29047 - DNA, 443 bp, Glycine max
gacacagtcctggctcagcaggaacatcaccagggacttgatccttatagaaaatcaaatccctttctttgtgctacagaaactctatgatgacgttgtcacttgtgtcaaagagaaggaagaacaacacaccagctttgttgatctcaccattgagtactttgcattctatgacagtcagatgtcttctcttaatgaaaatgaaaccaagaaacactatttctgtggcttactccgcaagtcaaagagcaaagatgagagtccaaaacccttcactgttgttcgtagaagcggttctgaggaaccttgtatatcaaagagcgaagataatggttccaaggaaacttgtaagtcagaaaacaaaaatagttgttgtaaaccagaacacttcactgatctgataaggtggttttaccttcccactgagtgcaatattggtcatg

SEQ ID NO: 29048 - DNA, 331 bp, Glycine max
ggggagttgaaggggttagggtttatgaagggatggaagcggcagtggtggacgtcggctctaagctcctcaaagcgggctttgcaattcctgaccagactcctgccatggcccgcacttggagaggttttatctccttcaatgcataattctaagtttctaacccacttagctattctcaagtattactttggacttcacaaccgcacaatcatatcaccactttagtacctacctatacctaactatctatctctgtcagaatccctaattgaccttctttccattggactcagataattcccactcagatgaagcaattactcgatga

SEQ ID NO: 29049 - DNA, 374 bp, Glycine max
  modified_base (255)..(255): a, c, g, t, unknown, or other
  modified_base (317)..(317): a, c, g, t, unknown, or other
  modified_base (322)..(322): a, c, g, t, unknown, or other
ggagttgggtgctggaatattggggaatatttttgatggaattcagaggcctttgaaaactattgctaaaagatctggtgatgtctatattcctcgtggtgtctctgttccagcactcgacaaagatacactttgggaatttcaacctaagaaaattggtgaaggtgaccttttaactggtggagatttatatgctactggtttttgagaacagtctaatgcaacaccatattgcacttcctcctgataacatgngaaaagatacctacattgcaccacctggccaatattccttacaggatactgtattggaactngagtntcaaggtgtcaaaaagaaattcactatgctttagacttggcctgtacgtaca

SEQ ID NO: 29050 - DNA, 411 bp, Glycine max
ggaaggagtgaggtagcaacagcactggcactgccactaccaatagcagaatgggaaccttgggcagagctttctacgccgtcggattttggatccgcgagaccggccaagccatcgatcgcctcggctctcgtctccaaggcaactacctctttcaagaacagctatctaggcatcgacctctgatgaatctgttcgacaaagctccctcggttcacagggatgcatttgtggcccccagtgcctccctcctcggcgatgtccacgttggcccagcttcctccatttggtatggatgcattctcagaggtgatgttaacagcattactattggatctggaactaatatacaagacaattctcttgttcatgttgccaagtctaatttaagtggaaaagtcttgccaacta

SEQ ID NO: 29051 - DNA, 376 bp, Glycine max
  modified_base (308)..(308): a, c, g, t, unknown, or other
acgacaagacgaggagtgagggtgaatatcaggcaaggttatctctcctttgacgacaagatgagcatcccaattccccatcggcagttattcatagacggagactggaaagtccccgtcctcaagaatcggattcccatcatcaacccttccacccaacacatcatcggggatatcccagcagctactaaggaagacgttgatctcgctgtcgctgccgccaaagctgccctctcccgcaacaagggcgccgattgggcctccgctttcggctccgttcgggctcgctacctccgcgccatcgctgncaagatcaccgagaaaaagcctgaactagcaaaactcgaagctattgactgtggaaaaccgctcgatg

SEQ ID NO: 29052 - DNA, 314 bp, Glycine max
gataagaaagaagatcaaaagaaaaaagagaaacaaatggcagcactgggtggctttaccgacatcaccggagcacagaacagcatcgatatcgaaaatctcgctcgctttgctgttgatgaacacaacaaaaaagagaatgcagttctggagtttgtgagggtgattagtgcaaagaaacaagtggtttctggcaccttgtactatatcactttggaggcaaatgatggtgtgacgaaaaaggtttatgaaactaaggtgttggagaaaccatggttgaacatcaaggaggttcaggaattcaagcccatcac

SEQ ID NO: 29053 - DNA, 287 bp, Glycine max
catattatacacaataaaaaaatgaagtaaatagtagaatattcaagaggccttaaaagatcaagataaagacgaaggagccgacttgatattttagcattataaccaaaaagaatagctttcggatctctattttttattatcgtcaaagaaaattagaatcataggattaaataaagaaatttcaaactttctattacacatatctgttttcgttacaagcagtatttgggtatttttgtttgagccgtacgagatgaaattctcatatacggttcttaaggggg

SEQ ID NO: 29054 - DNA, 377 bp, Glycine max
  modified_base (323)..(323): a, c, g, t, unknown, or other
gaataagaaaatggttaatggggggacagttaacaactggttctgcataaacttttcaaggaatgttcaagatagtgttgcccgtggtttttgctatgaacttgctcagatgtgttatatatctggaatggcatttacacctgagccagtagtccccccagtcagtgctcgccctgatcaagtggaaaaggttcttaaaactcggtatcatgatgccaagaacaaactgcaaggaagagagcttgatttgctcatcgttatcttgcccgataataatggatctctttatggtgatctcaaacggatatgtgagactgacctangacttgtttcacaatgttgcttaactaagcatgtcttcaaaatgagcaagcagt

SEQ ID NO: 29055 - DNA, 387 bp, Glycine max
ggggttgaagatgagtgaagatataggtcaatggacttcttaaaacaaatctgtgatgagtaagttcatgataaaagtgactcagtagtgggccatacatattgtccataatggatttaattttgttcccttaagggtatttgggtttgaaaatctgatattgattttagtttccaatctcattgcaagtcaaacaccacaaaattttcttggaagttggtgttaaataatattgtatgtaactgtagttcggaaatttaggactcaagatttagttgggacttaaataatcatagacttgtgtgattatggtcactactatttgtaaatgcctgaaacttttgatgattttggcttagttcctccaacaccttccaataaattcga

SEQ ID NO: 29056 - DNA, 387 bp, Glycine max
gaaatgtggggatgtcaatactgctaggttggtgttcgacaaaatgcctaatagagataggatttcgtggaatgccatgatttctgggtattttgaaaacggggtgtgtttggagggactgagattgtttggcatgatgatcaaatatccggttgatccagatttgatgaccatgaccagtgtgattactgcatgtgaacttctgggtgatgatagattggggaggcagattcatggttatgttctgagaacggagttcgggagagacccttcaattcataattcgttaattccaatgtactcatctgttggacttattgaggaagctgaaacagttttctctcgaacagaatgtagagatgtggtatcgtggactgcgatgatatc

SEQ ID NO: 29057 - DNA, 416 bp, Glycine max
gaatagcaattgcattcacaaagtagtggatgaagactgctttgacttcagggatttatggtctattgtattcccatctgaatcagaaaagattattgcaacagtaacaagaaaatcaaatgaggtagttcatactcaagcaaaagttatgactgatcacgatgtcatgtataagtatgtatcgaagaatgtactttttgtcgcaaatgcagcaccaaaagccagaggggaaattggaacagccaccccagaggaggcattgttggtcatctatatcattgatactgtgactggtcgcgtattgcatcgcatggcacatcatggttgccagggtcctgttcatgctgtatttagtgaaaactgggttgtctaccactattttaatctcagagcacacagatatgagatgtcagttg

SEQ ID NO: 29058 - DNA, 332 bp, Glycine max
gggatatagaagttagaactagtgggccggcgcgtaattcaaggcgaagctccactcacatgtcgaaatcagggcattagggttttccttctcccctgcaactgcaattcccccttttggaagatggttccacagtcagtgataacgcaagtctccgattcaagtggcgtgaatgcgatatcaaacgtttcttctggccacggattctacgattggttgttcgaatgtcacgggttctggcacaatgccactctcaacatcccctcgttcctcttcgtcttctacttggcacttcaagccaggcacagcttactcaaactctcccttgcgcg

SEQ ID NO: 29059 - DNA, 421 bp, Glycine max
ggtggcagactcatccaaagtaccccttgattcgcttacacaacagggacgagtgttattctcggcctacggaaccattggcgtggtgggaaggggaaacgatcttgggtggtaaggatgcactgggcggtggaacatggttgggttcgacaagagacggtaggatagcgtttcttacaaattttagggaagttgagatgctttcgaatcccaagaccagaggggacttgccccttcgttttcttcagggcaataagagtcccgaggagtttgcggagcaagttgtgaaagaggcagatgagtataatggctttaaccttgtattagctgatatttgcacctccagcatggtttatgtctttaatagaccaaaccaagatcatctttctcttgcacaagttgtgttacccctggaattcac

SEQ ID NO: 29060 - DNA, 395 bp, Glycine max
ggagctagatagatatagattaggcagaacgcaaacgaatgacctttctaactaatctacagtccatcctgtaataatctccgtttcaacaccaaacaccaagcgaaacctgaattaagcctcttcttcttcatcgaatcgaaacaacctcgtccgtgctaaggaaactcaacgacagagactgcaacaatgtacgtagatcacgcgttctcgatttcggacgaggattatcatgatgggaacctcgtacaccgtcaacaacaaaccccccatcaaggagattgccctcgccgtttccctcctcgtttgcggcgtcctcggcatcgtcatcggttctctcatggcctacaaccacgtcggcggcgacactgctcacgggatcttctttgcagtac

SEQ ID NO: 29061 - DNA, 362 bp, Glycine max
aacagtaagattgctaaaatgattattttacatgactatccacttcatattgtggaacaccaaggtttcattgattttgttcgagcactacaaccccagttcaatccactgagctttaatgctattcaaggggattgtgtctctatgtacctcagagagaagcaaaacctattgaatcttattgatgggattcctggacgagtcaacctcaccttggacttatggacttcaaaccaaacatcggcctatgtttttgttcgagggcacttcgttgatggtgattggaacttacatcatcctatacttaatgtattcatggtaccatttcctgattctgatggttccttaaatcaaactatagt

SEQ ID NO: 29062 - DNA, 396 bp, Glycine max
gaccccaaaaaacaaaaatcaataccttagagaaaacaaaagcacagaatcgaaagaagagttcttttttgagagagattgggatggcttcgacgaagaagatcacactgaagagttcggacggcgaggccttctaggtggaggaggcggtggcggtggagtcccagacgatcaagcacatgatcgaggacaactgcgccgacagcggaattcctctccccaatgttaccagcaagattctggccaaggttatcgagtattgcaagaagcacgttgaggccaattgcgctgatgagaagcccagtgaggatgaactcaaggcttgggacgctgatttcgtcaaggttgatcaggccacactctttgatctcattctgggctgcaattacttgaata

SEQ ID NO: 29063 - DNA, 418 bp, Glycine max
gatactgattcagaggatgagtaccctaattctagggttctcatagctcccaatgggagcgtttactcacttggtgttcctcttcttgctgattttaagggtacaagcaaccccattttagaagcaagcacatcagacgtgataagcccggtatccactgatcccctggtgtttgatgctgagcagagccttgagagtgagttatattttattcacaaggctaaagaatctggtgttgtgtatcttctgggtcatggggatataagagcaaggaaggactcgtggtttatcaagaagttagttataaactatttttatgcctttttgagaaagaactgcagaagggggatcacaactttaagtgtaccacactcacatctgatgcaagttagcatgacatacatggtctgaaaatcaa

SEQ ID NO: 29064 - DNA, 392 bp, Glycine max
  modified_base (154)..(154): a, c, g, t, unknown, or other
ggtgatagaaaaaggaggaacgcagaccgaggcgtttccagttcgaaagggaaatgaaagtgtctttgttggtgaagggtaggtgagagaaacgaaaggggtgtgtgttgggttgaataggtatagataggatcaatgagcaacaacaacgcangaaaggtggtgtgtgtgacgggtgcttctggtttcatagcttcatggatcgtcaaattccttctccaacgtggttacactgtcagggccaccgttcgctacccaagtaatctgaaaaaggtagatcacttggttaaacttgagggcgcaaaagagaggttgcagctgtttaaggcagatctgttggaagaaggttcctttgactcttgtgtggaaggctgtcatggtgttttcatact

SEQ ID NO: 29065 - DNA, 130 bp, Glycine max
  modified_base (41)..(41): a, c, g, t, unknown, or other
  modified_base (45)..(46): a, c, g, t, unknown, or other
catcctgtaataatctccgtttcaacaccaaacaccaagcnaaanntgaattaagccttttcttctcatcaaaacaaaacaacccatccccgctaaagaaacacaacaacacataccgcaacaatgtaca

SEQ ID NO: 29066 - DNA, 331 bp, Glycine max
gaggggagagagggataagtgagagaaagcagggtgcgtgtttttagagagagagagaggaggaatcaggcgaactgtgtgtggtttggtttggggcatggaagggctgggcatgctgaagcagctcattggtcagcttcagcagctcttggacacttaccagtctcaatctcattcttcttctactctcattcttcaacctcctcacactctcctctttcaacaacaacaccccagatggacgacctcccttgacattgaggatagctctgtagatgacttatgtggccctgtaatgacagctagaaagtcttgcagtttcaggatgtca

SEQ ID NO: 29067 - DNA, 407 bp, Glycine max
ggtgttgaatgggtggaattggaaatcgaagtgaaaagaacggttgaaagtgaaagagtaagatgctattgcaattgcgctgctctcattctcaccacaaactgacacttgcctgcagttgaagaaagaatagaggatcgtggtcgatggcgtctgctagccttggaagtggtggggtcggcagttcgaggtctgttaatggtggcttcaggggttcttccagttccgtcgattggcttggcagagagattccttgagatgaggttgagagaccacgaagacgatagagatagtgagcctgacatcattgatggtgtgggtgctgagacaggtcacgtcataagaaccagcattggtggccgaaatggtcagtctaagcagaaatgtagttatattgcagagcatgt

SEQ ID NO: 29068 - DNA, 358 bp, Glycine max
ggatgaaaagcactatagtactcttagaaatctcctctgcctcttctctctctatatgacaccctcgccttttccctttttctctaattcccatgcttgcttcctctgctctcaaaagctctaaacccattaaaataactaaaaatagaattggagcttcaagttgagaagcaagcatgcctttggaggacttctacaagatatttggtgccaccagtaagttctaaccattattgttacaagtttcatgcaccttttcctcacatcattacatgaaacacagaaaaccaaatgtatgaaaacgacagaaagagagtaattcattttacctagtattcaagttcaaacatagagaaat

SEQ ID NO: 29069 - DNA, 398 bp, Glycine max
  modified_base (79)..(79): a, c, g, t, unknown, or other
  modified_base (131)..(131): a, c, g, t, unknown, or other
  modified_base (137)..(137): a, c, g, t, unknown, or other
  modified_base (220)..(220): a, c, g, t, unknown, or other
  modified_base (387)..(387): a, c, g, t, unknown, or other
ccacgcgtcgaagacacagagggggtgtgagacaatatcacacataatatgggtcggaatactcctattgctatagcantatatgggtgacactgagatcaaaccatcagtgaagtagtcatatgtgcttnatgaancaatacaatagcgcaacaaccacaccctcccaaccgacatcaccaagtcatcacaatcacacttaccaatcttgaccaagctnatgctggtactttttcatatgcctttcctttggccacaagctttgctctggaagagtttgagtaaacacaacaaggactcacaaactctctggcatggattcaatttgatgccttccattgcgtttctactactttggtgtgtggcactgctcactgccactacttngtctttacttt

SEQ ID NO: 29070 - DNA, 362 bp, Glycine max
gacggctaaaagctaaaaatcatcgaagtactcaaattagcatggctgtcacggttgcattcttgaatttgatcatcatgttttcagtagtctctacaagcaagtcactgagcttaaactactattcaaaaacatgccctgatgtggaatgcattgttgccaaggcagtgaaggatgccactgctagggacaaaactgttccagctgcacttctgcgaatgcacttccatgactgtttcgttcgggggtgtgatgcctctgtgctgctaaattccaaaaggaagcaacaaagcagaaaaagatgggccaccaaatgtttctttgcatgcattctatgtcattgatgcagcgaagaaagcact

SEQ ID NO: 29071 - DNA, 306 bp, Glycine max
ggtgtgagagaaagacagagacattactttttggtagtagcaacaagcaaagggaggaaagaaggaaagaaagagagagaatcttcattcatttttttctgctcattttctgtgtacacctttatcgtttctctcactaactttggagtctgctttactccacactccacaacaaagatcgtctgcattccctttcccttctcttttcaccccccttttttttttctctcttcttcttttttctttttgtgggggggccactcaattggtttgagactacataacactactacttttacactcaaa

SEQ ID NO: 29072 - DNA, 370 bp, Glycine max
ggaccaaagaaggagcaaaatcctataacacccaatcctagctacaactccaaaccctctcttaactgcaccaccccatcatcccaaatatgtaacaccccttttgaaagctttctcattagccaccccccccttgccccatgccaccaaacttccttaaccaatttggcatgtgggggtggtggacatgttgtggatggtgtgttttggtgtggctataatggtatcctccttatctttccatgctccttttctttcaaggctatgctaaaacgctccttcttgagggcgggttctcttggaaagggcaacttcaatcctttggcatttttcaactccttcaccttacttcacacactgtgatttgggc

SEQ ID NO: 29073 - DNA, 409 bp, Glycine max
  modified_base (361)..(361): a, c, g, t, unknown, or other
ggaggttaagagaaggagtgaccgaagcgaagatgttacccacagcttccaaaggacgttcttcttcctcctcctcttcctctcgacctaacaatcccatgctgcttccctacctccgcagaatcatcaagtggcaacaaatggatattgaatatactttttggcaaatgcttcatctatgtacgtccccgaaagttgtctatcagcatactaaatatcacaaacaaaccaagaatcaatgggcacgtgatgatcctgcatttgttgtgatctgcagtcttcttttggcagttgcaactttggcttattgtgcggcgtatgaccatagtactgcacatacacttcttgttatcttctcagngttgtttttccactttatattgactggtgtatttctggcaacattttg

SEQ ID NO: 29074 - DNA, 422 bp, Glycine max
gagttaagaatgtgggtatgtgtttcagaatattttagtttgaagagagtgacaaaagctatcatcgaagcagctggccatacctgtcaggatttggatctagagtcacagcaaagaagacttcatgatctgcttcaaagaaaaagatatttgcttgttttggatgacgtgtgggatgataatcaagagaattggcagaggctgaaatctgcactagcttgtggggcaaaaggcgcttcccttttagttactactcgccttttgaaggttgtggcaatcatggggacattgcctcctcatgaattatcggtcctgtccgacaattgattgttgggaattggttaaacaccaaagccttggaccaaatgaggaagaacatgtggagctcgaggacataaggaaagagatggtaaagagtgtcg

SEQ ID NO: 29075 - DNA, 371 bp, Glycine max
gaggggtgatcgatcttttccacactcaaacctaaagagtctcataaaaaaaactatgcaagcttctctcatccgaaccggctccgtgccggtccagaacacggttctccccggttcaccgcgagtctcactcacgcgccaagccttcttctccggcgacaagagccacgcgcattctcccaggttttcaatccattcttcccactccaacaaccgcagatcctcgtcggagcgcgacgacgagaatttcggcgttcgccgggatctgaaccgaaccggatcgccctcgttttcaccaatcgtacctcacgaagaagactttcttttccgacgccgctccgcgcaagctcggaatccggccggaggatcta

SEQ ID NO: 29076 - DNA, 301 bp, Glycine max
gacaaatctttcgctaacactcattaattgcaagaatggcacttcgttgcttggtgatgtccctttctgttctcttcactcttggtcttgcgagagaaagccatgccagagacgaagatttttggcatgctgtttggccaaacactcccattccaagttcattgcgagatcttctaaagcctggccctgcaagtgttgaaatcgatgatcaccctatgcaaattgaagaaacacagtacccgaaaaccttcttctataaagaagaccttcatccaggcaaaacaatgaaagtacaattcag

SEQ ID NO: 29077 - DNA, 390 bp, Glycine max
ggtttgattgtgggtgcaatgcttccttactggttttctgccatgaccatgaagagtgtgggaagtgctgctctgaagatggttgaggaagtacgcaggcaattcaacaccattccaggattgatggagggaactgctaagcctgactacgccacttgtgttaagatctccactgatgcttccattaaagaaatgattccacctggtgctcttgtcatgcttacaccccttgttgttggaaatcctttttggtgtcgaaacactttctggtgtcctagctggatctttggtgtctggtgtacagattgctatctctgcatccaacaccggtggtgcttgggataatgccaagaagtacattgagggctgtgcttttgagcatgcaaggag

SEQ ID NO: 29078 - DNA, 418 bp, Glycine max
ttgggggtgtgaagtgaagtgagtgagagaagcgcagacaagtagaagagaaaatcatggcagtttctgtaaccattttagttctcatcatcgctccgcatctcatagccttcgtctttgccattggggccgaacgacgtcgtagcgaggccaaagtggtccccgacgagtacgacgaccgaaccttctgcgtttacaccaccgacgcttcctccgtctacggcctcgccgccgtcgccctcctgctcctcagccacaccgtccttaacggcgtcacccgatgcctttgctgcggtaaaggcctcgtctccggttgctccgccacttgcgccgtcttctccttcatcctctcatggattagttttttggcggcagaggcgtgtcttgtagcagggtctgcgaggaatgcataccacac

SEQ ID NO: 29079 - DNA, 349 bp, Glycine max
  modified_base (336)..(336): a, c, g, t, unknown, or other
ggagcagagaaggagtttaggaagtgtggggttgcttctgagattctgctgttccttagagagcgagcgatgacggtagcagcaggaatgggttacgctctgctagcgttaggaccctctctctccatcttcgtttctgtcatttccaaaaaacccttcctcattctcaccgttctctccagcacactgctgtggcttataagtttgattgtgctgtctggaatatggaggggggttttgcctctcaacacaacagcttggtggccttttggaatactcattttctcatctgttgcttttcaagaagccctcaggcttttctcctgggaaatatantagacgttacaag

SEQ ID NO: 29080 - DNA, 315 bp, Glycine max
gaattcaaagaatgattccaaattgaaagtaggataagaacaaaggttctacatattcacaaaaaaaaactatgtatgtaggtagagacgaaaaaataaatctcgaagtaattcgtagagttcaataactattattattttcaattcggaattcttattaattactttaaaccgaataaatcttgataattgaaaaattaagtcataatttattggttgattatatcattaactatttctttattttatatttagggtacgaggaaattatcatgaatccaattatttctgctgcttctgttattgctgctgggt

SEQ ID NO: 29081 - DNA, 336 bp, Glycine max
ggaccaacacctgtgcagcagttctctgtcaccaaatttgatctttctttctttctttctttggcgggaatgacagaaacgggggtttctgataatttcaagggcttaatactggcgatgggttctagtgcattcatcggttccagtttcatcttgaagaagaagggtcttaagcgtgctgctgcacgcggtactcgtgcaggagttggtggctatacttatctactagagccgctttggtgggctggcatggtgacaatgattattggggagattgcaaactttgttgcttatatctatgctccggcagttctggttactccccttggggcactt

SEQ ID NO: 29082 - DNA, 330 bp, Glycine max
  modified_base (245)..(245): a, c, g, t, unknown, or other
cagcggtaatgagctctctggggggaggggaaacaagattactgccatgcggattttgaattatctcaacctttcaagaaaccatcttgatgggtccattccaggcaacattgcctctatgcagagtctaacttctgttgatttttcatacaacaatttctctggtttggttcccggcactgggcaattcggctactttaactacacttctttcttaaggaaccctgaactctgtggcccttatntgggtccttgtaaggatggtgttgccaatggccctcgacaacctcatgttaaaggtccattcttttttttttcttaaaacttttg

SEQ ID NO: 29083 - DNA, 302 bp, Glycine max
cctgagtgcggctgaaataagactactgatcgagataactaggagcatggtgatgataaatatggtgattgttttattggttgctacaatgcatggaacatggctatggcatgcgtactatatactgacattgacaatgaacactccctatagggtctgatctaaggacgtgaaatgctcaccttggaggatggctgttgtaacacacatcatttttggatcaccaaccattactaagaaatgcttatgagcgaccacatgatacatacgtggcacactgtctttatctgactccttaacaa

SEQ ID NO: 29084 - DNA, 405 bp, Glycine max
gaggaaagagcggtgctttgataagaaagttagatatagtgtacgtcaagaagttgcactcaggatgcatcgaaataagggtcaatttacttcatcaaagaatcaggatggaactaatagttggggttcagatcaagagtcagggcaggatgctgttcaatcagaaaccttgtgctgcacacattgtggaataagttcaaaatccactccaatgatgcgtaaggggccatctggtccaaggtcactttgcaatgcttgtgggcttttttgggcaaataggggcactttgagggatctttctaagagaaacctggaacactctcttacaccacctgaaccaggttgatgagggcagtaataataatgccttggacatttcgagtggcatccctgcacagcataaca

SEQ ID NO: 29085 - DNA, 328 bp, Glycine max
ggagggaatgaagactattagctcattctctgaatattctgacatccgccaccgccacgtgtcaacctaattgggatccacagtcttcttccttcttcagctccacgcgccctctttccctttcctgtttctagctgttaccgacgtcaattgttactccgattatttattcttatttattttccccatctcactctccttcgattcgggatcactcacaacacaagtactactaccttggaatcaatttttagggtttctgattcctttatgtgtttgtctcgcaattgatcatcgcaaccacaatgtccggtcccctcgatcgttt

SEQ ID NO: 29086 - DNA, 371 bp, Glycine max
gggaaagtgaaagagtaagacaccacaaagtgtaacttgagtgattagatctgatgagtgcagaaagaaggaaggattgttggtgatcgatcatcgatcatcgatcatcgatggcgtctgctagccttggaagcggtggggtgggcagttccaggtctgttaatggtggcttcaggggttcttccagttccgtcgattggcttggcagagagatgcttgagatgtctttgagagaccacgaggacgatagagatagtgagcctgacatcattgatggtttgggtgctgagactggtcacgtgataagaaccagcgttggtgggccgaaatggtcaatctaagcaaaatgttagttatatttttgagcatgt

SEQ ID NO: 29087 - DNA, 369 bp, Glycine max
ggggggaaatgggtatgtgatgagagtgagattggcgtcgttcttcaccggggctgcagcggcatcgtttctggggctctacaccctccacaaggattacaaggtcccgcaccaatcctttactcaacagatcccatcatcatgatagacattgctcgtctcccacactttgtgtaaatcttctcaaaagcaaacaaaagacagaaaacatatattacaaagtgttgttgaaggaaacaacaagtgaaaacatgattcttctcaaagacattgtgcctgcagctcagaacaatatagacaccaaatttatcattttggacaaaggcaagaccacagtagaagggcaaaacaagatatgcctggctcttg

SEQ ID NO: 29088 - DNA, 361 bp, Glycine max
gatgcatttgttggttcaaaaacagtgatccagatacgaagtcatgcacaaaagtattttcttaaagttcagaagaatggaacaagtgaacatgtacctcctcctcggccaaagagaaaagctgctcacccataccctcaaaaagctcctaaaactcctactgtatcccaagttatgggcccattgcaatcttcatctgctttcattgaacctgcatacatttatagcccagattcttcatctgtgcttggaactccagttactaacatgcctttatcatcttggaattataatactacaccacaaccaggcaatgtgccacaagtgaccagagatgacatgggattgactggagctggac

SEQ ID NO: 29089 - DNA, 243 bp, Glycine max
gaaaaagggggccgaccgacgcgatcgtacatttacaattatactacagtattgatatctttaagcggaataacataaaaaccgcacgggttctattcatagtaggcttctattaatataatattattatactttaataaacatatgtaaaaattatgacccttaaacaaaggtttattttttattattttatacaaattatcttatcttcaaaatccacaagtatatcttgatttgaaatca

SEQ ID NO: 29090 - DNA, 338 bp, Glycine max
ggaccgcaacaaaccaataatcttcaccatggcaaggcttgaccgtgtgaagaacatcacggggcttgtcgagtggtacgggaagaacgcacgcctccgcgagttggtgaacctggtggtggtggctggagacaggaggaaggagtcgaaggacttggaagagaaggccgagatgaagaagatgtatggcctcatcgagacctacaagttgaacggccaattcagatggatatcctctcagatgaaccgtgtgaggaacggagagctctaccgtgtcatctgtgacacaagggggtgcctttgtgcagcctgcagtttatgaggcctttgggttgact

SEQ ID NO: 29091 - DNA, 397 bp, Glycine max
ggttgttggaagcgtggaagctagttcctgatgtttcggatgaagtttctccacctcctaaatcgcaatcttcatccaaaggtaattatttgattttggttgtttagtgtttgatcagagaatttgagatgatgggtgatgttagatttctttacagtaatggaaatactgatcgtgttatctttgatgttgtatctttaaaaataaagcatgattagttaaagtaaggataagggaaaaaaggtgatggtcaatttgccattgatcaattttagatgaattcagaatttttgtatgcctaaattttagtgcgtatttggaaagttgttgagaaataagaaatcacgtctcaaatgtgaaagctattactattagcttctcaaacgtgaaaaatcac

SEQ ID NO: 29092 - DNA, 281 bp, Glycine max
cgacgacgacgacgttgctggcgttgacgacgaagacgaaaccgcttcatggctcttgctcaaccctatcaagagtgctactgtccctaacaccaataacaataacaataataacgggttcttgtataacggtgaggttgatgagtatttggaccttgttgataattgtaactcttgtggtgataataatcacttcgcttcagctgctgctactactgatcattacgctcagcaccaacatttcgctggtgtttctcagaagagttatgctcgggacagtg

SEQ ID NO: 29093 - DNA, 316 bp, Glycine max
agtacaggggattatgaaaattatgagaattaccaatatgcctccgaccagtatgctaattattatggcaattatggttcgggtgccgagccagggagttcgggtaccgagtcagaggctggggttgctgcttatggaactgaacagtatgggaattatggtgatgcctatgctgcctatggggattatggacagtatgggaataattggggtgacgtgtcagcggcgacaccggtgccggaagcgtctgggattagtgacagtgtgatgaggattcctgggaagagagggaggcatgagattccaactgaagtga

SEQ ID NO: 29094 - DNA, 338 bp, Glycine max
gggttgttaaaggagcagttgatgtagacattggtgcaaacccttctgctgagggtggaggagaagatgagggagttgatgatgcagctgttaaggttgttgacattgttgacacattcagacttcaggagcaacccgcattcgataagaagcagtttgttaccttcatgaagaggtttatcaagaatttgactcccaagctcgatgcagagcaacaggagttgtttaagaagcacatcgagggagcaactaaatacctgctctctaagattaaagatttccaattttttgttggtgagagcatgggtgatgatgcttgcttggtctttgcctactac

SEQ ID NO: 29095 - DNA, 341 bp, Glycine max
tttggagttaaagaggtggtgctggcgatggggactagtctcacaacaagtgacagagacagagtataaccaaaagattcataataactaacattagaaactaggtgaaagtaactgcacagacacacaacacatcttccttaatttctccgtccatttccctcccataaataaatctttcatttccatctttcttgggtgatccaatggcgacccttttccagggattgggagttgtgaacccatcattggcttcttcaaactccaacaagttccatcttccttcttggaccatccttctcagagaggaaagatggcatttttgtggtcagatctgatgc

SEQ ID NO: 29096 - DNA, 367 bp, Glycine max
gggcaggttagggaatatccggatttacaggggacaaggttagacttaggaggcttgaagggcaacctacattaactacaaatcaggtatattttacatatggacgtgtacctcaatctctaacagaaatacaagggttggtttgtgaagatatcactggaggtcaagaagatatgcccattccggctacaaatttggttgatgacccccctgttccacccacagatttcacaatattgtaagtcactcaaggttgcaaaaaatgtgaagctttccatgaatgccaccggatgcaaatgtgaaagcatttgtaatgacccaacaagctgtgcatgtgcattgcgtaatggctctgattttccctatg

SEQ ID NO: 29097 - DNA, 399 bp, Glycine max
ggcacaaaaaatggagttctacacaaggccaaataggagtgacatccacctctcagcagaggaagaagccaccatagaggcaaagaccagagactactttgatggggttgcaccacaacgccacacaaagcctcaacgaagtgagtattcagctcaatatgtggatgctttctccaatgcccatcactcttcttcttcttcttctataccagaattcatgcaattccaacgcctcgagaatgatccccaagagaagaaattggagtacaatggaagtcaagtaccggaagaatttgtggaaacagagtattaccaagatctcaacagcgtggacaaacaccaccatacgacgggaacaggatttatcaaagtagagaaaaatggaaatgactttcacat

SEQ ID NO: 29098 - DNA, 335 bp, Glycine max
ggaagagaaaagaaaagaatcgagtgattttcgtttgcgttgctgttgcgactgagtgagtgaagatggcgtgcttgcacgaccacagttgcgaagaccatgactgttcctctaactggtctctctacaaacacatcgacctctccaaggtaactgctttgaatgaggcaaatccaggaagtgttaagtcagttttcaaagcttgggaagagcgtctggattcttctggggttcacttggaaagcaatgagggtgatcctgagttacttgtcttcattccatttacttcagatgtcaagattaagagcctatccatagttggtggagctgatgga

SEQ ID NO: 29099 - DNA, 288 bp, Glycine max
gggcagcagaagaacaagtagttgagaactaagggggagaagcaaatggcttcctcaatgatctcttccccagctgttaccactgtcaaccgtgccggtgccggcatggttgctccattcactggcctcaagtccatggctggcttccccaccaggaagaccaacaatgacattacctccattgctagcaacggtggaagagtgcaatgcatgcaggtgtggccaccagttggcaagaagaagtttgagactctttcctacctgccagaccttgatgatgcacaattg

SEQ ID NO: 29100 - DNA, 317 bp, Glycine max
ctgcgagaagacaacacaacgggaggcgcggcgggatcagcacatgattgcaaagtgaaggggaacattgcaaatcccaccactgggtgccagaaaaagctggaaatcgatgacgacctgaagctgttagcattttgggacaagaggatctcccaggaggttcttgatgatgctctgggtgaggagtttaaaggatatgttttcaaaatcaccggtgggtgtgacaaacaaggattccctatgaagcaaggagtgctgacccctggtcgtgttcgacttttgctccatagaggaactccttgtttccgtggatatgg

SEQ ID NO: 29101 - DNA, 344 bp, Glycine max
gacatagaacataaatgtaacagctcaagaacaaataacaagggcacattctccatatgtttctggttgcaagattcatgcaatggtcataatcattcttctttactttttctgctttgttcttaaatagtttgttttgtctcctacactttgacattattttgttctttgacacagctttgtcttattttcgtaaagcaggtttgcaggaagacttgaagattgttttggggaaaattgaatcacagttattgggccttggttttggctgggagaatgtcctttatattcacctttacattgatgacatgaataatttctctgaggcaaatgagacatatgtg

SEQ ID NO: 29102 - DNA, 388 bp, Glycine max
  modified_base (27)..(27): a, c, g, t, unknown, or other
gtgattgcgttgcgattgacgacgacnaggaatcatgtcttccggcggcggcggtggtaagccgttcttctgccacgtgtgcagtcagaggattacgtgctccgatgagtcggaaccattctgcccgatgtgtatggaaagtttcgtaaaagaatgcaaccctaacaatcccaaccctaatctcttccccgacagtgatgaatcttcggatccccgaactccccttccaccgcttctcacttctccctctcttgctctcatcagtctctaggtcccgatccgaacccgacgtgttcgacccgatggtcttcctccagaaccaccttcaggaccttcgcgccgacggtgccaacattcaagttgactttgaccatccttccaacgagaa

SEQ ID NO: 29103 - DNA, 388 bp, Glycine max
catggaatcaaactttacttaactaaggaatggtacaagaaaacgacctggatgtatctggctattcccatcaccatttatgcattggaaagactggttagagcattcagatcgagcattaagtccgtcagaatattgaaggtgactctttatcctggaaacgtgttatcacttaaaatgtcaaagccgcatgggtttagctacaaaagtggacaatacatgtttgtgaactgtgctgctgtgtctccatttgaatggcatccattttccataacttccgcccctgatgatgattaccttagcgttcacataaaaatacttggtgattggactcgaagtctgaaagccaaattcacacaggcgtgccagcaacccctcaatggacaga

SEQ ID NO: 29104 - DNA, 255 bp, Glycine max
gggtgttcaatttgaagataggatcagcatgctggtttcatctgcagtcccagaagggaaaggtgtatcatcttctgcatctgtggaggttgctagtatgtatgctattgcagctgctcatggattaaatatcagcccaaggcatctggccatactctgccagaaggtggaaaaccacattgtaggagcaccatgcggtgtcatggaccagatggcttctgcatgtggtgaagccaacaaacttcttgctatgat

SEQ ID NO: 29105 - DNA, 297 bp, Glycine max
gaagactaaagaagaagaagaaatgattgttgttgcaatgaaggaaaaagttgcctccgtccaagctgaagcttatgctcaagctctagactataccattgtacgtggggtcattaatgttcttactaacactagcatcatggatgaaacaccaaagacatccaatgcagccatagctgatgaagttgtccctcaagacaaggaacttgcattctagaaaagtacaaccttaaatgaagctaccttaagagaaaagggtgaacctgatgttattggtggtggttactctacaagctc

SEQ ID NO: 29106 - DNA, 364 bp, Glycine max
ggcggtgagttagaactgataatcaagagagtgactactggtcggcgacagcgaactacttccgtgtaatggcgacctccgtcgcagtcgccggcgctttgacggcgcatgatcgccggattctgacagcggtgaacgtcggagcgtcgagcctgtcgttggccggttccagcttcattgtagtgtgctacctcctcttcaaggagctccgcaagttctccttcaagctcgtcttctacctcgctctctctgatatgctttgcagtttcttcggcataataagggacccgtccaaaggtttcttttgttatgctcagggctataacacacatttcttttgtgtggcatcttttctatggactac

SEQ ID NO: 29107 - DNA, 361 bp, Glycine max
ggagagaggcagaagaagaagaagaaaagatggtgggaccagtgagacctcagtttgtgctctttggttcttccattgttcagctcagttactctctccaaggttggggcgctattcttgctcatttgtatgctcgcaaggcggatataattctgcgaggatactctggttggaattcaaggcgtgctgtgcaagttctggatgaaattttccctaagaacgccactgagcaaccagattttggtaattgtgtactttggtggtaatgattctcttcttccacatccaagtggtcttggtcaacatgtacctctccaagaatacattgaaaatatgagaaagatggtacccatctaaagag

SEQ ID NO: 29108 - DNA, 353 bp, Glycine max
ttgtggttagagagagagaaaagagagttttgaggagggagggaataaaacaaaagagggtaagcttagtgtggctgtttagtgggtacccttgttgccctcataggaagtgagaaacaaggctagtgagtcccattggaattttttttttttgtggctgaagaaggtgaaaagggggcaagtttcactcttgaagggttttgaggggtgtcaacttgtgtttggagactccgaggttgagtttgaaggtgcattctttgaagggtgtttttgttatgggttctagttgtggttgtggtgtaactcttgttcttgttttctgcttatggggtgggttgatctcccttttttct

SEQ ID NO: 29109 - DNA, 312 bp, Glycine max
agagacacagagggggttgttgtgtgtcattttcggggcgaattttgggtgcagaggcagagaaggagcacccacaccgaccactctactctgcaacacccgaatctcgttacctaaacacctgtttgcgttcttttcccttttcttttctgattagttcaagagaaaaaaggacacaatggactctgcacgtataatctgcaccgcaaaggttttaggatttcaaggccgaaagctgtctataaaccctaaccacgatttgaaatttctacaaccaattgacctgaaagagaattgtgcttgatggctttc

SEQ ID NO: 29110 - DNA, 358 bp, Glycine max
  modified_base (137)..(137): a, c, g, t, unknown, or other
ggagagaaagtgaaaaaaaaacctttttttttagagagagaaagagagggtagccctagaaaaatatgcaaccggataaggacttttgcagctgagacactgcaaaaagagttatatagagagagaaaagaaaaagnatttttttttatatatattttatcctttcaattttgatgttttctttttttatttatttaatatcttttttccattgttgtggagtaatttgcttctttgcagtgcacactgacacagtgacacagtggttctctcacctctccttccctgtgtggaactgtgaaatgtgcaccacagctttttgaatcctgttcctaaaattttcctgtgaaagattctg

SEQ ID NO: 29111 - DNA, 292 bp, Glycine max
tttatactttagaagggggagatggattcaaactatccgtttccttaaagtggagcccaagcaaagaattttagtacactggtcaggttgttagatatgaggataacttttactcaaccacctacttggttttcatcatcatttttactttttagatcctcactttaacatttattttttctttctttatttttaaatataatattttttttttttttatattaaagcaattttttttatttattttctatcccaatttttatttttttttttttatatatttttttttttt

SEQ ID NO: 29112 - DNA, 356 bp, Glycine max
gccacgcgtcgtctgcgagagacgacgaggggacacacagacagaccgctgcgaattattatcctttcccaagccagccagcgagtgaaattacttgcatagatagagcatatggcatgatgaacggctgcttctttcggtcgtcgtactttctatcctccacttaccagaaaccttatgcctcagtgaaaagaaaaaattggggggtgtctacaagggatgagtatgctaattgacccaatttcgggggtgtgtgaggacattggtatacgtgagtggctggatcacgggtcatcagacattgcactgatgacaagaagaccagatttgaactgaaaacacatccagatgcccat

SEQ ID NO: 29113 - DNA, 292 bp, Glycine max
ggcatcagcgggcacagtctcggtggtggcaagcttctgagcagggtaatggacatgctgctttactcattggagatgcgtattactatggtcggggtactgccagggattatgagcgagctgctgaagcttatatgcatgctaaatcacaatcgaatgcacaagccatgttcaatcttggatacatgcatgagcatggccaaggacttccatttgaccttcatctagccaagcgttactatgatgaagctctagaccatgatcctgcagcaaagttgccggtcacactggc

SEQ ID NO: 29114 - DNA, 373 bp, Glycine max
ggagccagggagattgcggtgcgtgcttgggacgaggccctcaacacccaacctgaaaagctcatttggaatgttatgggcatgatgaacaactgctggttcagagtgaaaaccaatgtgtgcaggccccacaagggtgagataggtatagtgtttgaacaccccacccaaccaggcaaccaatccggcggatggatggcaaaagaaaaacacctagagaaatcatctgagtccaacccaaccctcaagaagaatgtctcctccccattcatgaacaccacctcaaaaacctataccatgtctgaagtcagaaggcacaacaacgccgattcggcttggatcatagtccacggtcatgtctatgattgcaccc

SEQ ID NO: 29115 - DNA, 406 bp, Glycine max
ggaattgaaatagtttaacatcccaaacaccaagcttaaagaagagagacaatgagtgacacaaatagagcaacggaggagaagagcaagagaggtttaaaggaatggtttaaatcgtctcaggttctattgagcatgatattagtgcaagtgtttgttactggattgcaactactatcaagggttgtattagttcaaggctctttcatcttttctctcattgcatatcggttttattgttgctaccatttgtgttgccccctttgcactttactttgaaagaggccgcacaaaggattttactccgaaggtttggttttgggtgttcgttaacgcattgatggggatgactttggctcaaggattattctattatggtctcaaagacacttctgctacttatgct

SEQ ID NO: 29116 - DNA, 318 bp, Glycine max
  modified_base (66)..(66): a, c, g, t, unknown, or other
ggtttcaatttattcatttccttcctaaaaatggttcgatacttctctcgaagaacagaacagacnaaaaggccctaaaaccctaatctcccaaaaccctacgcatggcgtcgtcgttaattcacctccgccgcaccgtcagagcactctccggcgtcgcccagactttctatgtgcatgcggcatcgtattccgaccccattcggtgcggtgtttcatggagtttgcagtcaccgaagggtgtggttcagccccgttcattcaggtcaagctcaatttcacttctctcttttcgatcctcgcagcggcagagcaaca

SEQ ID NO: 29117 - DNA, 296 bp, Glycine max
ggagcaggagtgaaaagcgaagagaatggctcccaagggtttaatctttttggctgtgttatccttctcagcactgtcactgagtcgttgtcttgcggaggataatggacttgttatgaacttctacaaggaatcatgccctcaggctgaagacatcatcaaagaacaagtcaagcttctctacaagcgccacaagaacactgctttctcctggctcagaaacatcttccatgactgtgctgttcagagttgtgatgcttcactgttgctggactccacaagaaggagcttgtctg

SEQ ID NO: 29118 - DNA, 417 bp, Glycine max
ggtgcgaagagtgaagagaatggctccgaagggtttaacctttctggctgtgttaatatgcgtttcagcactgtcactgagtccttctgttgcgggggaagggcaaaataatggccttgttatgaacttctacaaggaatcatgccctcaggctgaagacatcatcacagaacaagtcaagcttctctacaagcgccacaagaacactgctttctcctggctcaggaacatttttccatgactgtgctgttcagagttgtgatgcttcactgttgctggactccacaagaaggagcttgtctgagaaggaaacagatagaagctttgggttgagaaatttcagtacattgagaccatcaaagagctttggaaagagaatgccctgaagttggtttatgtgctgatattctcgttctt

SEQ ID NO: 29119 - DNA, 418 bp, Glycine max
tttacttcagaaggggatcctagacatttgggaatgaatggaaagagagtctactttcattaagtgatttattagataatcgaaaacagaaaatcttgagaactattcgaaactcagaagaattacgggaaggggccattgaacagctgggaaaagcccaagcccgcttaaggaaagtcgaaacggaagcagatcgttttcgggtgaatggctattctgagatcgaacgagaaaaattgaatttaattaattcaatttatacgactttggaacaattagaaaattacaaaaacgaagccattcattttgaacaacaaagagtgattaatcaagtccgacaacgggttttacaacaagccttacagggagctctaggaactctaaagagttgctttgacaacgagttacatttacgtac

SEQ ID NO: 29120 - DNA, 372 bp, Glycine max
  modified_base (199)..(199): a, c, g, t, unknown, or other
  modified_base (202)..(202): a, c, g, t, unknown, or other
  modified_base (206)..(206): a, c, g, t, unknown, or other
cgactcacgcctacaacagatccaataagactacagattttgttttatccctcgagagaaaccaatgaggtgtagctcaactggcactgggaatcaatcaattcaaaaaaaaccctaacaataacatggattctcaggttgccgtagctcttgctctttcacttgttggtggtgtcagctcttctatccgggcacttanagnaaangaaatatggctgttactcttcttcaaattgcaagaatatttgctaccaaaattcccggaaaaggtgattctgatgtgttgcaactgctctggaagacttgtcttgttggagctggtcctgatggaaaacataaagcttaaaagcagtcacaattgtacttgatcta

SEQ ID NO: 29121 - DNA, 387 bp, Glycine max
  modified_base (349)..(349): a, c, g, t, unknown, or other
gaatgtgtttatgtaagagccatggtgatcaaggcattaatctggatgcaaggtccatttgactcatttgatgaactagaatctattattgcatcggaactttctgatccagcttggccagcagcactattgaatgatgtactactcactttgcatgctcgttttaaggcttctccagatatggctgttactcttcttcaaattgcaagaatatttgctaccaaagttcccggaaaggttgatgctgatgtgttgcaactgctctggaagacttgtcttgttggagctggtcctgatggaaaacataaagctttagaagcagtcacaattgtacttgatctaccacctncgcagcctgggtcaatgcttggtcttacttcagtggac

SEQ ID NO: 29122 - DNA, 179 bp, Glycine max
gaaggtttaaatatgaaattggagcagcaaatgcctatgctcttggttgagagacaagctctgaatgaggctatggagggagaaaagaatggtcatcaccacttacctgaaactagagggctatgcttgtcagaagagcaaactgtcaccaccatttcaaagaggccaaagattggagc

SEQ ID NO: 29123 - DNA, 421 bp, Glycine max
gatggtatttgatttgtcaaatacatcattattgtgtactcttttatatgtatggcgcaacccaatttttgtttttttttttcaatttttaatctcctatccctttttttaattttggaatcgaaatatctaatctaaataatccaaaaattcactcttaatcttgacagtgatatatgttgtatatgtaaatcctagatgtaaaaataggcagacttctcccgggaaaaaaagtaggtaaaaaaatatgctaagtataaattgtctactgatgaaatacgaaagctgatgatattgaaaaaaaaagaattgtaaataaggttcaagttcgacttccatagagaatatagatgatattgtctataatggtagaaaaaaataaaaaactttcgaaagattttatcccaatgaaattttaaaa

SEQ ID NO: 29124 - DNA, 318 bp, Glycine max
gatggtatttgatttgtcaaatacatcattattggggactcttttatatgtatggcgcaacccaatttttgtttttttttttcaatttttaatctcctatccctttttttaattttggaatcgaaatatctaatctaaataatccaaaaattcactcttaatcttgacagtgatatatgttgtatatgtaaatcctagatgtaaaaataggcagacttctcccgggaaaaaaagtaggtaaaaaaatatgctaaatataaattgtctactggtgaaataccaaagctgatgatatttaaaaaaaaaaaatttgtaaat

SEQ ID NO: 29125 - DNA, 373 bp, Glycine max
ggccattgttgttgctattatcatccgcagctgcgtttattcgcaccgcaaacagtgagccatggccgtcggaaagaacaagcgcatctccaaggggaagaagggtggcaagaagaaggcagctgatccctttgccaagaaggattggtatgacattaaggctccttctgtttttcaagtgaaaaatgttggcaaaaccctcgtctctcgtactcagggtaccaagaatgcttctgaaggactcaagcatagagtgtttgaggtctccttggctgatcttcaaggggatgaggatcatgcattcaagaagattaggttgagagctgaagatgtgcaaggggaagaatgttctgacaaatttctggggaatgga

SEQ ID NO: 29126 - DNA, 377 bp, Glycine max
ggtggtcaacggaagcgagataaataaacagagagagagagagagagagagagaggtgtgtttgttctctgagtagaagaagatcaagatcaaggaagaggatgtcgaaagaggatgtgtttgttggcgcgatcgaccaaggaacgagcagcagcaggttcataatatacgacgcgaagactggagtagtaggatgccaccacgtggagttcacccagttctacccgcaagccggggtgggtggagcatgaccccatggagatcttggagagtgtgaaagtgtgcgtggccaaggccgtcgataaggccaccgctgatggcttcaacgtcgataaaggcttgaaagccattggtctcaccaatcagagagagaccac

SEQ ID NO: 29127 - DNA, 265 bp, Glycine max
  modified_base (31)..(31): a, c, g, t, unknown, or other
  modified_base (250)..(250): a, c, g, t, unknown, or other
gaatgtaagggttttttataacatgacctantaacgattcagcacattatgcgtgccactcctctttaactctctcatcctttttctctttccgtgtcaccctctttcaggttaatttgcaatgactgaaccttccaaggtcattcacgttcgaaatgtggggcacgaaatatctgaaaatgatttacttcagctgtttcaaccttttggagacataacaaagcttgtcatgctgcgtgcaaaaaatcangctcttattcaaatg

SEQ ID NO: 29128 - DNA, 440 bp, Glycine max
ggcagttcaattgatcaactcagatttcagggacctaagtctagctgctaatagactcgcccatcatgccatcaaacttggtggcattggctttggagcctcttttttcggattgtttgctgccattgctgctatttatctgttgattttggatcgtacaaactggaaaacaaatattctcacagcactactcattccatacattttcttcagcttgccttcattaattttcgacgtcttcaggggagagcttggaaaatggattgctgcagttgctgttgtattacgccttttccttccaagacacttccctgattggctggaattgcctggtgctctgattcttcttatcgttgtagctccttctctaattgcaagcacctttagagacaacattggtggggtggtagagtgccttatcatttcatgttatttgctgc

SEQ ID NO: 29129 - DNA, 444 bp, Glycine max
  modified_base (431)..(431): a, c, g, t, unknown, or other
ggataataataaaaacactcgtgccgcaccttcgtcttccccaatgcttctttccacacgcatctcggaagcccttctcttcatcacatagatactttcgctatcgcaccaagtaacccttattattccaatccaccctcgccactccttcgatccgaatcatcttttccgcccacacacaagttgggtttttttgatataattgataatgggtgatagcagtgttccatctgggtctccaaatgcaaaatcagatcttgttgacagagacttggcggtttccaacaacgcgtcgtcgttggaaaccattgtgcaaagtttccaagattcaatgtctcttggtaagagacacaagttctgggaaactcagcctgtggggcaatacaaggatgttggggactcaagtttgcccgagggcccgattgagcccncgacacctttgtc

SEQ ID NO: 29130 - DNA, 433 bp, Glycine max
ggagcctagtagtaatagtgaactggagtgatgctcaagtgtgttgtgtgtcagtgttttagggaccaatggtggagagtgagttttctgagttaagatataagatatatgctatctaatgcctagtgggatataggaaaggacctcaaatctgctatctttcgttcacatacgcatcatattcttttaattgttagttctgagttctgaccaaagttgttgatttgagtgtttttagcatatttggggtgtctgcaaacaccgcaggaattttgctttttctattgaattagattcctctgggaattcaattctgattcttccttagttttcggttttctgtctttctttttttccttctatttatattttgggttggttctctgttgagtcttgacttgcttgctccaactccaacccagtttcacactag

SEQ ID NO: 29131 - DNA, 430 bp, Glycine max
gacaatcaatcttctttatccactctctcttaattaaattaaaacaaaaaatgtgcgctgccatatccgaagtggaacaagaagagttgctcgaaaaattggaggtgttcaagatcaaaggcagggacaagcatggccgcaagatccttcgcattatcgccaaattcttcccaggtagattgattaattaattaattaaatccctaattcctttttttttatgtgcatgaattttttaaatcttcggtaattgtttgaattgaggacagcacggttggtgagtgttgaggttctgaaaaagtacctggaggagagggttttcccgaagctgatggggaagaggaaattcgcggtgctgtacgtgcacaccggcgtccagaggagcgagaattttcccggaatctccgggtctccgtggatctacgatgcg

SEQ ID NO: 29132 - DNA, 401 bp, Glycine max
gagagaaagagagagaaagatgtcgaagcgtggtcgtggtggttcggcggggaacaagttccgcatgtcgctgggtcttccagtggcggcgacggtgaactgcgccgacaacacgggggcgaagaacctctacatcatttcggtgaaagggatcaaaggccgtttgaaccgtcttccctcggcctgcgttggcgacatggtgatggccaccgtgaagaagggaaaacccgatctgaggaagaaggtcttgccagctgtcatcgttcgccagcgcaagccatggcgccgaaaggacggcgtctacatgtacttcgaagataatgctggtgttattgtcaatcccaagggagaaatgaaaggttctgctatcactggtcccattggaaaagagtgtgctgatt

SEQ ID NO: 29133 - DNA, 418 bp, Glycine max
gagagcgagaaatattatagtagctctgcgtttttggggtatcattattcaaccacccattttctctcttcttcttcttccattgagaaaattctctttcatcgtgtgtgatcggtgagatgtacgtagcttccatgcgcaagtctttcaaggactccttgaaagtccttgaagctgatatccagcacgccaataccctggcttcagattttccaagggagtatgatggtgcatgccttcagatgagaatgtcatacagtccagctgcacacctgtttcctttcttggtgcaatggacagattgtcatcttgctggagcccttggactgttaagaatcctaatttacaaggtctatgtggatgggacaaccaccatgtctacacatgaaagaaaagcaagtattagagaattctatgc

SEQ ID NO: 29134 - DNA, 456 bp, Glycine max
agacgacagaaggggagagaaagacaaataaaagaagctgcatttgcagagacgcattcgcgtttgtctgagagagagaattggaaggttgcgacgagtgatgatatacatattgtggcggtagtgaaatcgaggaaaaagaggtagcaatcgtgagttgcaatgagtagcgaaaagtctccttcatcagcttctgcttcagcttcttcttcgagtagctacgagttgagcaaaggcatcaatggcctcgacaaggttattcttcgcgacccacgtggtagctccgctgaggtgtacttgtacggtgctcacgtgacttcatggaagaatgaacaggccgaggaattgctttttctcagtagtaaggctatatttaagcctccaaagccaattcgtggagggatcccaatatgttttcctcaattttcaaacctcggtcctctcgactcgcatgga

SEQ ID NO: 29135 - DNA, 439 bp, Glycine max
ggcatcgaacagagagagagagaatggcagcacttggtgggaatcgtgatgtgacaggaagccagaacagcgttgagatcgatgctctagctcgctttgctgttgaagaacacaacaaaaaacagaatgcccttttggagtttgaaaaggtggtaactgcgaaacagcaagtggtttctggtaccttgtacaccatcactttggaggcaaaagatggtgggcaaaagaaggtttatgaagccaaagtttgggagaagtcatggttgaacttcaaggaggtgcaagagttcaagcttgttggagatgcacctgcatagtctagtgcttaattaggttgctgaagagtgaagaatgagacagcctggttcgaaggggaaaagcctaaggatatatcaaaggatcctatatgtataaaataaatgttgcttttttaccttcg

SEQ ID NO: 29136 - DNA, 433 bp, Glycine max
gacggcgatgatgatgcaaatcaacatcacctccaccacctcaatcgtcacggcgttctcttcggatcattccccgaatgttctaccttgagccatgtccaacctcgttcagattcgcgtcgccgccgacgctagcgatggcttcgactctccggcgaagcagaaagcagccaaccgcagctcctacagcaatcgcccctttctctccctccgccgcgccaaacagttcctcggcgccgccaagttcaagctcttcttagttctttttgctctctccatcgtcgtttttgtctcctccagactcagttcgtggatgggatggaaccctcaccactcctcttcggtttcctccacttcaaggggtggctatactgtgcttataaacacttggaggcataaatctcttctgaaacatactgttgctcattatgca

SEQ ID NO: 29137 - DNA, 432 bp, Glycine max
gatgggagaatcttattgtcaaggagttttgatggttcattgaaggtttgggatctgcgcaaaacaaaagaaccgttaaaagtatttgaggatctgccaaatcactatgcacaaacaaatattgccttcagtcctgatgagcgactctttttgactggaacatctgtggaaagggagagcatgacaggaggtttattgtgcttctttgatagagtaaatcttgagcttgtttcaaaagttggcatatcacccacttgtagtgttgttcagtgttcttggcatcccaaactgaatcagatctttgcaactactggtgataaaagccaaggtgggactcacatactatatgatccaaccgtaagtgaaagaggagctcttgtatgtgttgcacgtgcaccaaggaaaaaatcaattgatgactttgaggcaaaa

SEQ ID NO: 29138 - DNA, 440 bp, Glycine max
caaggacacgaggtggatatatatgagtcaaggccttttattggtggcaaagttggttcttttgttgacaaaggtgggaatcacattgaaatgggattgcatgttttctttggttgctacaacaatcttttccgattgatgaagaaggtgggtgcggataacaatctacttgtaaaggatcacactcacacttttgttaacaaagggggtcaaattggagaactagattttcgcttcccaattggggcaccaatacacgggataagggcgtttttgtccacaaatcagcttaatacttatgataaggctagaaatgctgtggctcttgcactcagtccagttgtcaaagctcttgttgatccagatggtgcactgagggacataaggaatttggatagtattagcttttcagactggtttttatccaaaggtggcacacg

SEQ ID NO: 29139 - DNA, 430 bp, Glycine max
aggggaggaaagaagagagagaacaaagcacttagtgctattcaataattacgaaaaaccaacagcgagtgttgtttttgtttggtccaggctggaccagggaatgaatagagatgagaggctttcggttgaagagaactgagttaagcggcgaagccaaacgcagaatcggcggcagaaattgccaccggaagcacgtcgaagacgggtgaaccaaacacaaaattccatccaccacttctcttttcaatccccaactcaaatctgtgaagaaaatctcaatttctaaattgtaattcttagcactactgctagtagtagtaaaaaaaaacaattagaaagtagtagagtgtttttttttcgttttttcgtttgttttacttttaagatgggtgagaagagcgacgttggcggcgacgcgattaacacg

SEQ ID NO: 29140 - DNA, 428 bp, Glycine max
gacagtattcaagatcggggaatcaatcaggtttatataattggaggagatggaactcagaagggtgcatctgcaatttttgaggaagtcagaaggcgtggtctcaaagtttcagttgtaggtatccccaaaaccatagataatgatatcccggttattgataagtcctttggctttgacactgctgttgaggaggctcaacgagctataaatgcagcacatgttgaagctgaaagtgttgaaaatggcataggtgttgtcaagttgatgggtagaaacagcggatttattgcaatgtatgctacacttgcaagtcgagacgtggactgttgcttaattccagagtcacccttttaccttgaaggtcctggtggactctatgaatatatagagaaaagactcaaagaaaatgggcacatggttatcgt

SEQ ID NO: 29141 - DNA, 426 bp, Glycine max
cgggtctgaaagggaaaaaaaacaaaatcgcatcaaagacaagataaaagggtacctctttcaattttatcccttgttgtgagcttaattcaatttctgctcacacataatggcttgcacgctcgctgattcattactcctattcaagggttcttatcataaaccagttctgaggagagacattgctgcccggtactccccgggtatatttagtctaaacagtaatgggcttatccagaaaaggttcaagcgtcaaaggaattttgttactacgaatacggttactgtcatacatgccgtggcaattccagtacaaccagcttcggtggaaagtgcggagtatagaaaacagctagctgaagactactgtttcaggcaagttggatagccgcttccagatgatgttactttaaaggatgtcatcaa

SEQ ID NO: 29142 - DNA, 442 bp, Glycine max
gacacgtgcgagtgatcaaatattaagaagaggttatggatgtttttaaggtttttcacatgcttgtcttaaaacaattttccagcaaaatccaaatccttcgttctggtaatggcacagaatacatgtctaaaagcatgacacagtatttaaattctcatgtatcaagaggggttgttccttttgtttgattttttttcttcttgccaaactatggcagaagatcattcttcttcgcatatattgccttcaggagctacaagttttcctggtgtgccttttgcagtagctacaggttccactagtgtggctgttggaatagaatttgagtctaatcctaatcaatgattgagctctgttgtactaaatgagttcaattaccttccttggtcaaaagccataactcttgctcttggtggaagatctaaattgagtttcattg

SEQ ID NO: 29143 - DNA, 439 bp, Glycine max
ggagtgagtgagagaaagaagagaaggagttgaagtggttgttgtattgtagtagtgtgtaaagtcttggtgatggatagacacaaatgcaagctttgttcaaggtctttcagcaatggcagagcccttggtgggcacatgaaggctcaccttgcttctctccctctccctctccctccaaagcttcactcttgcttctcttcctctgactcagaacaagaacaatctttaagggagaatcctaagaaaaccttgaggattctggatcctgaagacagagagagcgagacagagtctaataagaacccgactcgtcaacgatccaagcgcaactggaaatctaccatgcccaagctcagcctcggacaccccgaagccgaacctctcagctccgtcttcgacaccttccccgaagaagacctcgccatgtgcctcatga

SEQ ID NO: 29144 - DNA, 416 bp, Glycine max
gggtcgcgagttcaagtcaacaagcctcacaagtcccgcttctcttccaaatcttctcgcaatcttcataaaacctctgtcaaggacagactcgcaatcgcaaaatcagagcgcaatgtcggcaaaggagctcgtgcagctcgaattcagagaaataaaatgatacgagatcaaaaaagagctgctgttttgaaagaaaaacgagaactcagtgggtcgagaagtcctcctcgagtgatagttctcttcgccctctgtgcgtctgtggatttagaatcacttgctgatgatctcttgtcattattatctaaagatacgtgtgtggtgctgtcaggaaccgttgcttcttctgaatataggacaagaataacggtactaaaagcaccccatggtgatctactatcatgcatggaaat

SEQ ID NO: 29145 - DNA, 435 bp, Glycine max
gggttcaaagtctagtaataaaaagagaaaagctttctcagataagccaacttcaaggccaatgaattcccaaaagatgagtgaatttagtactacgcctatggacgatgaattggatgttgttgatccagtgggtcagaaacccaagagacccaagaggataaagaagaatgtgaatgaaaagtttgaagatgcttttactgggattgctgccctgatcccagagcagacccaatttccacctccaccaagcgattttagtgccgggggttctaaagcagaatcaggccaagacaactgaagacatagtgattcttaaccactacaaaaactttggagttactattctcagccctatggattgactttttttgtggagactgctaagttggctctctggtttatcaacagtttctagttccctatttcttggta

SEQ ID NO: 29146 - DNA, 409 bp, Glycine max
gacactaaacaagttaaaagaagagcatcactgaactaacaaagcaaccctatgtcgaaggtggtttgtgtcaccggagccagcggcgccatcggatcatgggtggtcctactcctcctccagcgtggttacaccgtccatgccaccgtccaagatatcaaggatgaaaatgagacgaaacatttggaggaaatggaaggagcaaagagtcatctccatttttttgaaatggatcttcttgacatcgactccattgccgctgccataaagggttgttccggcgtaatccaccttgcatgtcctaacatcattggtcaagtcgaagatcccgagaaacagatattggaaccggcgataaaaggaacggttaatgtgttgaaggcggcgaaggaagcaggggtggagcgcg

SEQ ID NO: 29147 - DNA, 248 bp, Glycine max
gggtttgggaaaggcacggaaggctttgctttcaggttgctcagcaggagggttagcgacttttcaccatatgtgacgccttagctaagtatttgccaacgaatgcttgtgttaaatgcttgagtgatgccaggttttttcctgtaaaatgagatttcagcttgtattacactattagatattattgtaaaagtctagaccaatcatcaggaacagattttaaccttaactggtattatacctttgtt

SEQ ID NO: 29148 - DNA, 429 bp, Glycine max
gaacacactcatccaaacaaccttctttctttttctgtgagcctttctttcaggttcttaacttgatcagtgtgcagtgtccaaatcataagggtagctgcaaattgcaatggctaagcatgatgttgagggtggttccttctctgcaaaggactaccatgatcctcctccagcaccgttgattgatgctgaggaactcacacagtggtccttctacagggctttgattgctgagttcattgccacaatgctcttcctttacatcacagtgctcactgtgattggttacaagagccagagtgatgtaaaggctgggggtgatgtgtgtggtggagttggcattcttggcgttgcttgggcctttggtggcatgatcttcattctggtgtactgcactgctggaatctcagggggtcacataaacccagc

SEQ ID NO: 29149 - DNA, 427 bp, Glycine max
gggatttccaaagtttttaatagagggtaagtctcaaaaaatcgaagaattacagacgaatatgcaaaaaaaactgaattgtgtgaatcgaaaactaaacattgctattgtaaaagttgcaaatgcttataaacaccctaatattattgcagaatttatagctggacaattaaagaatagagtttcgtttcgtaaagcaatgaaaaaagctattgaattaactgaacaggcgggtacaaaaggagttcaagtacaaattgcaggacgtatcgacggaaaagaaattgcacgtgttgaatggatcagagaaggtagagttcctctacaaaccattcgagcgaaaatcgattattgttgctatacagttcgaactatttatggggttttagggatcaaagtgtggatattttctaaataaagaaaaata

SEQ ID NO: 29150 - DNA, 427 bp, Glycine max
gaagatggagatgtatcagatctggagcaggagaatagcgttgggagcgttcgcgtttgttctgcttttcctatcggcctcagcagacgacgtcgttgtgctctctgaagataacttcgagaaggaagttggtcaggacagaggagctctcgttgagttctatgctccttggtgtggacactgcaaaaagcttgctccagaatatgaaaagcttggtagcagcttcaagaaagccaaatctgttttaatcggcaaggttgactgtgatgagcacaagagtttgtgcagcaaatatggagtctctgggtacccaacaattcagtggtttccaaaaggatctcttgaacccaaaaagtatgaagggccacgcactgctgattcacttgctgagtttgtaaatacggaaggaggaacaaatgtgaagatt

SEQ ID NO: 29151 - DNA, 424 bp, Glycine max
ggagcaatcgcgtgaattttcaacgggattttgcagagcttccgcgttgaaaccatccaaccctcttagcctcatattcgttgtctatacttccctccttccttcgtgtaattacatttttttcatcagcagttccaggaccaaattgatacacaagatcactgtttttttagagagagattgagagaggatgtttggttcaaagaaaactcctctgagagatgctaaacctagttctgttggccatgcccataacccctttgattctgatgaagagacaaacgattaaaagtataattcctctaagaagactttgaccaacaccaacccctttgatgatgaagttgatgttgatgccactggccactcctcgtcgtcttcttatggcctttcgtcttcccatcgaaataggtataagagcgat

SEQ ID NO: 29152 - DNA, 437 bp, Glycine max
cactgttgatccactatgctggtccaatgaaaacctctgaagatactccaacaaatggatctactgtgccccctggcagacgccttgttgttccactgcagatttgtgttttgcagggtttgtcttttgtgaaggctcagcttctttcaatggagtttcctgctcatgtcggtgaaactcttccgaagttggatgacttaaataacaagtctactgatgttgaatcagaaacaaaaatggacagattggtgaaaatagatcctttcagaggaagttggggactgcgattccttgaacttgagttatctaatccaactgatgtcgtgtttgaaatcaatgtctctgtcaaactggagaactctagcaacgaggacaatcattttgctgatcagggtgctacagaatatgtctatcctaaaacaagaattgatagagat

SEQ ID NO: 29153 - DNA, 407 bp, Glycine max
gatattattggacatattgttgaatttagctctgatcagcatggaagtcgatttatacagcagaagttggaaagttgtagtggcgaagagaaggcattggtgtttaaagaggttcttccacatgcttctaaattaatgactgatgtatttggtaactacgtaatacagaagttttttgagtatggaagctcggagcagaggagggaacttgcagatcgacttgttggccagatactgcctttgagtttgcagatgtatggctgtcgtgtaatccaaaaggcacttgaggttattgagcttgaacagaaagctcagcttgttcatgagctagatggaaatgttatgagatgtgttcgtgatcaaaatggtaaccatgttattcaaaagtgcattgaatctattcaaac

SEQ ID NO: 29154 - DNA, 415 bp, Glycine max
gttggtgatgacattcagcaacatcaagacataggtttagatgcttatactggatcagtatatggaaaattggatctgaattctgtacaaaagatgtttcttaagggaatgtgtagttttggcagtactgattctgacatagttgagatttaccactgctcatgtgcgtcaatgcaagcacgatgggagctgttccagaagcaagctgaaattaccaaaaaaaatcatggggaagctaacattcggtatgcttggcttgcttcctctaaaggagaactatctacaatgatgaactatggacttagtcattatggactatctggatcaaagtgcacatatggcattggtgttcatcttgctgctgttacttgccctgatgccagtgtgcgttattgtgatgttgactaaaaagggg

SEQ ID NO: 29155 - DNA, 427 bp, Glycine max
ggctttttaggttattttcttaagtaaaaagaaggaaataaataattctcgtagctttgttgctcttataaattctattctggttgacgcttctctcaccatccccatttcgcgttggtgcaaagcatccttcgtttcaatttctctctctcagcgctttctgcaatcgaacctttcatctccaaagggatccacaggccgaaggagaaatggggctgacattcacaaagcttttcagtcggcttttcgcgaagaaggaaatgcgaattctgatggttggtcttgatgctgctggtaagaccactatcctgtacaagctcaagctcggagagatcgttaccacaattcctaccatcgggttcaatgttgagactgtggaatacaagaacattagcttcactgtttgggatgttggtggccaggacaa

SEQ ID NO: 29156 - DNA, 418 bp, Glycine max
atccggcggaattgtcactatcttcattggtatgcttatcgggtgctttgcaagccagcgtggtggcaatagtagcgactcgtcattctgggcttgtggcatgggccttaggttgggacttcaggctctatggccctctctacacggtcagtactccattccaatatttcttggttcctggaccccaaaacctatttttggttcatcttcaaaatctgattttcaaagcaaggtaacacacataataaataagatgaatttagtcggcacaccaaattaatttggtttctctcaatcccagcctattgaatgcaaaaggttacgaggcaagtattgtaactaaaaaagacaaattgttcactccaaaagtaaattcgttggtcggcccattttggccctagttcactattttctttaa

SEQ ID NO: 29157 - DNA, 398 bp, Glycine max
gatgcggaatggggagttccagttcatgatgacaagatgctgtttgaacttttagttttgagcggtgctcaagttggatctgattggacctcaaccttgaagaaacgcctagatttcagggctgcattttcagaatttgatgcagaaaccgtggctaacttgactgataagcaaatgatgtctattagttctgaatatggcattgacataagcagagtccgaggagttgttgataatgctaaccaaattttagagattaagaaagactttggttcatttgacaagtacatttgggggtttgtgaatcataaaccaatctccactcaatacaagtttggccacaagattccagtgaagacatcaaaatcagagagcataagcaaagacatggttagaag

SEQ ID NO: 29158 - DNA, 300 bp, Glycine max
gatcatcatgaagttgaaggggaaccaaccacctccacgagttatctataattgatgtaaattttcccggaaagagggaacactgtaaaatattagtcttggcttctttaatgtctattttaaagtggaagacttgtgtagtaaaagggtctgcatctagtactcccaataaaagaaaaaaaagagaagcaaattccttcttccttaatttactaattaaatgaaactggtagtgtccaaataattggttttaatttttatcctatcccagtcagtgtatcataaattggtatttataac

SEQ ID NO: 29159 - DNA, 437 bp, Glycine max
ggacaaagaactcacgagtgattttgagaggctggttcatctttggacacttgattctgctgaacgtgatgcatttttggcaaacgaggcgactaaaaaatggacttcaagcaatcaggttctggtggaaatagtctgcactaggtcctctgaacaattgtttgctgcgaggaaggcttaccatgttctttataagaagtctctggaggaggatgttgctcatcacacaacaggagacttccgtaagctcatactacctctggttagttcttatcgatatgaaggagatgaggtcaacttgaccctggcaaaaactgaggcaaaattgctgcatgagaagatttcaaacaaggcttataatgatgacgacttcatcaggattttggccacaaggagcagagcacagattaatgctactttgaatcactacaaagatg

SEQ ID NO: 29160 - DNA, 428 bp, Glycine max
gataggcatgatatcttgtttgcaacaccctaatcttgtgaaacttcatggattttgcattgaaggggatcaattgatattggtgtatgagtacatggaaaataatagcctggctcatgctttattcagctcaaaagatcaacttaaacttgattgggcaacaaggcttaggatctgtattggcatagcaaaaggtcttgcatttctacacgaagaatcaagactcaagatttttcatcgagacatcaaagctactaatgtgttactggatgggaatttaaaccctaaaatatctgactttgggctggctaggcttgatgaagagaaaacccatgtcaccacccgaatcgctgggacaataggatatatggcaccagaatatgcattatggggttacttgtcttacaaggctgatgtttacagttatg

SEQ ID NO: 29161 - DNA, 392 bp, Glycine max
gacggcagatcagatccattcttcaacaaatccccttttcagtttcagtttttctcgaggatcccgtgaaacgacatggcgatggtggaccagcctctgtatccgattgccgttttgatcgacgagttgaagaatgaggacattcagctgcgcctcaactcgatccgaaggctctccacgatcgcgcgcgcgctcggcgaggaccgtacgcggaaggagctgattccgttcctcagcgagaacaacgacgatgactacgaagtgctcctcgcaatggccgaggaattaggtgtcttcattccctacgtctgaggcgttgagcacgccaacgtgcttcttcctcccttggagacgctctgtaccgtttaggaaaccagcgtctgagacatgtc

SEQ ID NO: 29162 - DNA, 420 bp, Glycine max
tgccttttcaagtatcagtaagaatagaagggaggaggagtctttcatatttaaaaatgtaagcataaaatgtactgaaaggctgattgtttctcagtatgttctttatgacaggtcaaatgctatatgaagcaattgctatctggccttgagcattgccacagcagaggtgttttgcaccgtgatattaagggttcaaatctgcttattgacaatgaaggaatacttaaaattgcagattttggactggcaactttctttgatcctaagcaaaagcatcccatgactagtagagtcgtgaccctttggtaccgtccacctgagcttcttctggggtctacgtcttatggtgttggtgttgacctttggagtgttggctgcattttggccgagctacttactggaaagccaatcatgcct

SEQ ID NO: 29163 - DNA, 157 bp, Glycine max
gaagaagaggcagagaagagcacgaagaatgctttcgtgaaggtgagcatggatggtgcaccgtatctacgaaaggtggacattaagttgtacaagagctaccatgagctgtcagatgcgctggcttagattatcagctccttaacgattgaaaagt

SEQ ID NO: 29164 - DNA, 411 bp, Glycine max
tgaagaaggttggttacaacccagacaagattccatttgtgcccatctctggtttcgagggtgacaacatgattgagaggtccaccaaccttgactggtacaagggaccaactctccttgaggctcttgaccaaatcaatgagcccaagaggccctcagacaagccactcaggcttccattgcaggatgtctacaaaattggtggtattggtaccgtgccagtgggacgtgttgagactggtgtcgtgaagcccggtatggtggtgacttttggtcccactgggctgacaactgaggttaagtctgttgagatgcaccatgaggctctcacagaggctcttccaggtgacaatgttggctttaatgtgaagaatgttgcagtcaaggatctcaagcgtggttttgttgcat

SEQ ID NO: 29165 - DNA, 426 bp, Glycine max
gatatgtatcttgttgcgaggtgtgaggtgcatagtgttgttgatgtgaacaagcagaggtcgttccttactttgaatgcgttgaacgagtttgatcctaagtattccggtgtggattggaggcagaagttggagactcagaggggtgctgtgttggctactgaacttaagaacaatgcgaataagttggctaagtggactgctcaggctcttttggcgagtgcggatacaatgaagttagggtatgtgtcgaggattcatccccgcgatcatttcaatcatgtgattttggctgtggttggctataaacccagggactttgcagcacagattaatttgaacacgacgaatatgtgggggattgtgaagtctattgtggacttgtgcatgaaattgaatgaggggaagtatgttcttgtgaaggat

SEQ ID NO: 29166 - DNA, 313 bp, Glycine max
ggcacaggtggagaaagtatatatggggggaaatttgcagatgaaaatttcaaactaacacatgatggacctggcattctttctatggctaatagtggtcctaacacaaatggatctcagttctttattacattcaagcgccaacctcatcttgacgggaaacatgttgtttttggaaaagttgtcaacggaatagacattttgaagaaaattgagcaggtgggaacatctgatgggaaacctacccagccagttaaaattattgattgtggtgaagtctctgaaacaaaaattcagcatactgcagagaagg

SEQ ID NO: 29167 - DNA, 432 bp, Glycine max
cacggtcagtcgttggaagaaacctgagattggttgggtgaagctgaacgtggatggttcacgcgacccatacaaaagttcctccgctggttgtggtggtgttctgagggacgcatcagcaaagtggctccgtggctttgctaaaaaactgaaccctacttatgcagtgcaccagacagagttagaagccattctcacgggcttgaaggtggcttcagagatgaatgttaagaaactaattgtggagtcagacagtgactctgtggtgagcatggtggagaatggggttaagcccaatcaccctgactatggtgtcgtggaacttataaggacgaagcggcgtcgttttgactgggaagtgaggtttgtttctgtctccaacaaggcgaatcgtgtggctgataggctcgccaacgatgctcggaaattggc

SEQ ID NO: 29168 - DNA, 425 bp, Glycine max
tacagacagagttggagagttagctaagaagcatggactgaagcttcacattgatggggcccgtatttttaacgcatcagttgcacttggtgttccagtggataggcttgtccaggcggctgattcagtttccgtttgcctatctaaaggtataggtgctccagttggatctgttattgttggttccaagaattttattgccaaggctagacgactccggaaaaccttatgaggtggaatgagacagattggcctcctttgtgccgctgcacttgttgccttgcaggaaaatgttgggaagctggaaagtgatcacaagaaagctagacttttggctgatggattaaaagaagttaaaggactgagagtggatgctggttctgtggagaccaatatggtatttattgacattgaagagggtacaa

SEQ ID NO: 29169 - DNA, 428 bp, Glycine max
gagacacgtgggtggatagcaacttagaacacaagtgaactcaaagtggaacaacccaagcttgtttcacagctcaacaacaatggcttctatctcatgcatcacccaccaccccatcacttccaagctcaataatgccttctcttcaccccacgtctctgcctcaaacttggcctcacggtttctgggcaccagaaaaagagttgggttgcatagcctcacctctagaataattggaccctctaatggctccaaagccacatgctggttcaggttcggcaagaacggtgttgatgccaaaggtgctggcatctatggcagccagggccgtgatgactttgatagagatgacgtggaacagtacttcaactatatggggatgctcgctgtagaaggaacatatgataaaatggaagctcttctaagcc

SEQ ID NO: 29170 - DNA, 430 bp, Glycine max
ggaggataatcaataaacttaaacttatgttatggcattctaactctgaacgatgaaatgaaatggagttccaagataagcgtttatctctgagatcgagcttgacgttcagcgagacgctgtgcgcagtgttcattccgttcataggaatagtcgaagctttggttttcacattcactagttgcttcgatttccaatctcccaggaataagaagaaacattcttctaccttcgacgacattctcaccctcgccgaggattctccatttagtattaatgaaatcgaggccttgcgtgagttgttcaagaagttgagtagttctatcattgatgatggcctcatccacaaggaagaactcacattggcactgttgaagaccaccaccggggagaatcttttccttgacagggtgtttgatgtctttgatga

SEQ ID NO: 29171 - DNA, 424 bp, Glycine max
ggatggagtaattcagctaacagaaagggatgaatgtgcctaccaagaaatgatcactcatcttcctctttgctctattccaaaccctaaaaaggttttggttatcggtggaggtgatggaggggtcatacgagaagtagcacgccattcttcagttgaaaagatagacatttgtgaaattgacaagatggttgttgatgtctccaaacaatacttccctgatgtagctgttgggtatgatgatcctcgtgtgacacttcatattggtgatggagttgcatttttgaaggaagttccagaaggaacttatgatgctgttatagtggattcatccgaccctattggtcctgctcaggagctttttgaaaagcccttctttgcgtcagttgcaaaggctctttgtccccgtggagttgtgtgtact

SEQ ID NO: 29172 - DNA, 423 bp, Glycine max
ggttctagtgtgtgattgtttgttgttgtaactcgttcttcttcttttgttgttctgtgtttgtgtttgttttttctctcacctgaaaatgtcttgctgcggtggtaactgtggttgcggaagctcctgcaagtgcggcaacggctgcagaggctgcaagatgtacccagacttgagctacactgagtcaaccaccaccgagaccttggtcatgggagtggcacctgttaaggctcaatttgagggtgcttaaatgggtgtgcccgctgagaacgatggctgcaaatgtggaccaaactgctcctgcaacccctgcacttgcaagtgaggtgttgtgagagcaagctttaagcatagattgcccttaattaggaataatgataaactattaatgtgtagctaaaaacttatgtattatgtctg

SEQ ID NO: 29173 - DNA, 440 bp, Glycine max
ggatactagaacctgcagatcgtgatgctgttttggccaatgttgccatcaagaatggcaaaaactacaatgtcattgtggaaatcgccactatcctctccccggaagagcttttggccgtgagacgtgcttatctcaaccgctacaagcactccttggaagaagatgttgcagctcatacctctggccatctacgccagcttttagtggggttggtgacctcatataggtatgttggtgatgagatcaatccaaaattggcacaaactgaggctgaaattcttcatgatgctgtgaaagagaagaagggtagctatgaagagaccattagggtcttgaccacaaggagcaggacccaacttgttgcaactttcaaccgctacagagagatccatggcacttccatctctaagaaactggtggatgaaggatctgatgag

SEQ ID NO: 29174 - DNA, 433 bp, Glycine max
  modified_base (348)..(348): a, c, g, t, unknown, or other
gacttcaaagtggagaaaaacacacacggttggttcattctctctcttttctttttcctcaaaaagttgaaaaagaataaagggggaacaatcgagtgaagttgttgctcttcaatagtaaacttacctatggaagagggaagggttgtgagtgagtacacaaaagatggaactgtggatcttaaagggaaacccattctcaaatccaaaagtggtggttggaaagcatgctcctttgttgttggtatctctctctctcactataaattttatatggtcattttcatcttgttttggacattaatttcaaaagcaatttcccaaaacattggaagcttcatgatgttntgttaacaaaaatcttaatttcctctgatcgagagacattgttcaattctttgtgttgtgttgtctcctaaaacatgggaagaga

SEQ ID NO: 29175 - DNA, 442 bp, Glycine max
ggaggaagccacatagagacacaatacagagtgagttgttgctccttcgccacaactctctgccaacatgggtatctccagagattctatgcacaagaggcgtgccactggtggcaagaagaaggcctggaggaaaaagagaaagtatgagcttggtcgccagcctgctaacactaagctgtcaagcaacaagacagtcaggaggatccgtgttagaggtggaaatgtgaaatggagggcattgagattggatactggaaattactcctggggaagtgaagctgtaactcgcaagactcgtgtactagatgtggtttacaatgcctcaaacaatgagcttgtgcgtactcagactcttgtcaaaagtgctatcgttcaggttgatgctgctccattcaaacagtggtatcttcagcactatggtgttgagattggtaggaaa

SEQ ID NO: 29176 - DNA, 309 bp, Glycine max
ggattgagaaggaatgagaatggggggaggtttttgtctgatgatgttggtaggtctagcaatcgagggcgagggcaagggcaatcttctcgaacgaattatgggaggaatggagcggatggtgatggcagaatgaggaagaatgggaatgggagaaggtttttgtccaataatgttgatcggtctagcggtggagaacagtcttctcctttgaattatggcggtgatggaatggatggtgatggtagattgaggaggaatgggaatgggaggagggttttattggacattgaatttaaaagcagtttt

SEQ ID NO: 29177 - DNA, 373 bp, Glycine max
ggccttaagaatggtgatattgaagttacttgggctgatgggatggtatcaatggttggaccccaagcaatctatgtggttggtcgagatgacgatgatgaatcaattgctgctgggagtgaaataagtgatgctgcaagctgggaaactgttaatgacgatgaaatggaagtccttgaggattccagagaggatattgagagggaaaattcaagcagtgttacttctgaggcagaagaaagtggagagaatgattttggtaggactgcagctctctctgttcccctagcagcatttcgatttgtcactagacttgccagtggaatattctcaagaggctcaaggaacttggattctattcctttggagataa

SEQ ID NO: 29178 - DNA, 431 bp, Glycine max
ggaggcagagaagtaagaagaagatagccagaagtataggctaagattgtccacaacatgtggacagcaggaacaacgagtgtatagatcaacaactacctttcccttttcgtctatcagtccaaacactcttcttcttcttcttcttcttcactctacaaccactaaactaagtggttggttttggtttagtttcatttttttgaagctcttaaacttaaggcttaagccatggcatcctcatcctctctgcatctatctcaggcccttctggcacgtgctgtgtaccttcatggctcttcttcttctgaccgtgtcttactctccttcccatcattctctggcctgaagtcacattctacatgcaaagcagcagcagccacgtcctcgcgtagaaggggtgcttgtccattcaccaactttgttcgagc

SEQ ID NO: 29179 - DNA, 428 bp, Glycine max
gggggaattgactagtgcggcgcgctcctattatcaccgtagacggcggaggtggcggtggtggtgtagacacggcgtgacggcgatctcttgagataaatgttggttgaaagaggaagaagaagaagagttgtattgtagaatgagccaaccaacggtgatacttgccactgcgagctatgatcacactattcgtttttgggaggccaagagtggccgttgctaccgcaccatccaatatcctgattcgcaagtaaaccggctggagataaccccggataaacgcttcctggctgcagctggcaatccacacatacgactgtttgatgttaactcaaatagtcctcaaccagtaatgagctatgattcacataccaataatgtaatggctgttgggtttcaatgtgatggtaattggatgtattctg

SEQ ID NO: 29180 - DNA, 445 bp, Glycine max
gaaagaagagaaaataataatatgaataacaacccacaaaacttgggtcttgcaaattaagttcattttcctccctttcactctcgtagacatcacaaaccttccctccattcatcccacgcatggctgccatgaactctagcgtattggcctgtagctatgccatatcaggtgcagcgtgttcggagctcaatgggaaggtcacttccgtggcctatgttgcatgctctggctacaagttgccattgatcaaagctgaggccagagttcctaaagccaaagaatctgaaggaggaaggagaggtgcccttgttctcttggcagctacccttttcacctctgcagcttccaattcttctgccaatgctgggatcattgaagattaccttgagaggagcaaggccaacaaggaaatgaatgacaagaagagggtagctactactgg

SEQ ID NO: 29181 - DNA, 414 bp, Glycine max
gggcaaacaagtagtggaaagacatacacgatggttggaataactgaatacgctgttgcagatatttttgactatatagagaggcatgaagaaagagcatttatattgaagttctcagcaattgaaatttacaatgaagttgttagagacctcctcagcactgacaacaacactccacttagactacgtgatgatcctgagaaagggcccattttagagaaactcacagaggagactctacgggactgggagcatttaaaagagcttctagccttcagtgaagctcagagacaggtgggagagacatacctaaatgaaaagagttctagatctcaccaaatcatcagattgacaatggagagttctgccagggaattcctgggcaaaggcaactcagccaccctaatagctagt

SEQ ID NO: 29182 - DNA, 443 bp, Glycine max
gagttagggaagggaagcatctttagctccaatggcggatacctcaggtcgatccagggacctcgacaagctccttctccgccctggcaatctcgtcggtcccaggttcgaaccaggcgctgagttgcgagatgaccttcaggccttcgccaaagtgttggtggtaggggccggtggcttacgttgtgagttgctgaaggatttagccctctctggtttccgaaaccttgaggtcattgatatggatcgcatagaggttactaatctcaaccgccaattcttgttcagacttgaagatgttggcaaacccaaagccgaggtagctgccaagcgtgtcatggagagaattactggtgtcgaaattgtgccccacttttgcaggattgaggacaaggaaatagaattttacaatgaatttagcattattgcccttgggcttgatt

SEQ ID NO: 29183 - DNA, 433 bp, Glycine max
ggcagatgtgaatgtgagagacacccatgaatgacagaatgaaatgaactgagtaacaccaacgctgctttcttcattctttcattcattcgaatgtgttcttttgcgattgaatttgagggaacaataatcgattttcgctttctgggcacccctgaattcccctgcatcgctgtgaaagtagttcagttcgaacaacgaaaacgatgtcggctcgattgatgaagaaggttctgaacgagcagcatcacctttcgcaacacgtgagcgaagaagaagaagaagaagagaacgattctgagcccatcactcgttcctccatcaaccccttcgaccttctcaacgacaacgattctgagcccgaagaccaaggagatgagttgatgtccaccaatgaaatattgacaagttatgatgacaaagaggagtcagc

SEQ ID NO: 29184 - DNA, 433 bp, Glycine max
aggaacagcaatgaagaagaggcagagaagagcacgaagaatgctttcgtgaaggtgagcatggatggtgcaccgtatctacgaaaggtggacataaagttgtacaagagctaccaggagctgtcagatgcgctggctaagatgttcagttccttcacgattgaaaagtgtgggtcccaagggatgaaggattttatgaatgagaccaatggctctgactatgtacccacatatgaagacaaggacggagactggatgctcgtcggtgatgtgccctgggagatgttcgttgaatcatgcaagcgtcttcgcataatgaaaggctccgaggcaatcggtcttgcgccaagagccgtggaaaagtgcaagaacagaagctgaagaagtgatttcatctgcgtcacaaggaagcaaattgactcgagcaagatcg

SEQ ID NO: 29185 - DNA, 406 bp, Glycine max
ggcagttcaattgatcaactcagatttcagggacctaagtcgagctgctaatagactcgcccatcatgccatcaaacttggtggcattggctttggagcctcttttttcggattgtttgctgccattgctgctatttatctgttgattttggatcgtacaaactggaaaacaaatattctcacagcactactcattccatacattttcttcagcttgccttcattaattttcgacgtcttcaggggagagcttggaaaatggattgctgcagttgctgttgtattacgccttttccttccaagacacttccctgattggctggaattgcctggtgctctgattcttcttatcgttgtagctccttctctaattgcaagcacctttagagacaacattggtggggtg

SEQ ID NO: 29186 - DNA, 401 bp, Glycine max
ggataataataaaaacactcgtgccgcaccttcgtctgccccaatgcttctttccacacgcatctcggaagcccttctcttcatcacatagatactttcgctatcgcaccaagtaacccttattattccaatccaccctcgccactccttcgatccgaatcatcttttccgcccacacacaagttgggtttttttgatataattgataatgggtgatagcagtgttccatctgggtctccaaatgcaaaatcagatcttgttgacagagacttggcggtttccaacaacgcgtcgtcgttggaaaccattgggcaaagtttccaagattcaatgtctcttggtaagagacacaagttctgggaaactcagcctgtggggcaatacaaggatgttggggact

SEQ ID NO: 29187 - DNA, 384 bp, Glycine max
ggagcctagtagtaatagtgaactggagtgatgctcaagtgtgttgtgtgtcagtgttttagggaccaatggtggagagtgagttttctgagttaagatataagatatatgctatctaatgcctagtgggatataggaaaggacctcaaatctgctatctttcgttcacatacgcatcatattcttttaattgttagttctgagttctgaccaaagttgttgatttgagtgtttttagcatatttggggtgtctgcaaacaccgcaagaattttgctttttctattgaattagattcctctgggaattcaattctgattcttccttagttttcggttttctggctttctttttttccttctatttatattttgggttggttttc

SEQ ID NO: 29188 - DNA, 302 bp, Glycine max
gacaatcaatcttctttatccactctctcttaattgaattaaaacaaaaaatgtgcgctgccatatccgaagtggaacaagaagagttgctcgaaaaattggaggtgttcaagatcaaaggcagggacaagcatggccgcaagatccttcgcattatcgccaaattcttcccaggtagattgattaattaattaattaaatccctaattcctttttttttatgtgcatgaattttttaaatcttcggtaattggttgaattgaagacagcacggttggtgagtgttgaggttctgaaaaagt

SEQ ID NO: 29189 - DNA, 308 bp, Glycine max
gagagaaagagagagaaagatgtcgaagcgtggtcgtggtggttcggcggggaacaagttccgcatgtcgctgggtcttccagtggcggcgacggtgaactgcgccgacaacacgggggcgaagaacctctacatcatttcggtgaaagggatcaaaggccgtttgaaccgtcttccctcggcctgcgttggcgacatggtgatggccaccgtgaagaagggaaaacccgatctgaagaagaaggtcttgccagctgtcatcgttcgccagcgcaagccatggcgccgaaaggacggcgtctacatgt

SEQ ID NO: 29190 - DNA, 283 bp, Glycine max
gagagcgagaaatattatagtagctctgcgtttttggggtatcattattcaaccacccattttctctcttcttcttcttccattgagaaaattctctttcatcgtgtgtgatcggtgagatgtacgtagcttccatgcgcaagtctttcaaggactccttgaaagtccttgaagctgatatccagcacgccaataccctggcttcagattttccaagggagtatgatggtgcatgccttcagatgagaatgtcatacagtccagcttgcacacctgttccttt

SEQ ID NO: 29191 - DNA, 331 bp, Glycine max
agacgacagaaggggagagaaagacaaataaaagaagctgcatttgcagagacgcattcgcgtttgtctgagagagagaattggaaggttgcgacgagtgatgatatacatattgtggcggtagtgaaatcgaggaaaaagaggtagcaatcgtgagttgcaatgagtagcgaaaagtctccttcatcagcttctgcttcagcttcttcttcgagtagctacgagttgagcaaaggcatcaatggcctcgacaaggttattcttcgcgacccacgtggtagctccgctgaggtgtacttgtacggtgctcacgtgacttcatggaagaatg

SEQ ID NO: 29192 - DNA, 331 bp, Glycine max
ggcatcgaacagagagagagagaatggcagcacttggtgggaatcgtgatgtgacaggaagccagaacagcgttgagatcgatgctctagctcgctttgctgttgaagaacacaacaaaaaacagaatgcccttttggagtttgaaaaggtggtaactgcgaaacagcaagtggtttctggtaccttgtacaccatcactttggaggcaaaagatggtgggcaaaagaaggtttatgaagccaaagtttgggagaagtcatggttgaacttcaaggaggtgcaagagttcaagcttgttggagatgcacctgcatagtctagtgcttaatt

SEQ ID NO: 29193 - DNA, 328 bp, Glycine max
  modified_base (286)..(286): a, c, g, t, unknown, or other
gacggcgatgatgatgcaaatcaacatcaccttcaccagcctcaatcgtcacggcgttctcttcggatcattccccgaatgttctaccttgagccatgtccaacctcgttcagattcgcgtcgccgccgacgctagcgatggcttcgactctccggcgaagcagaaagcagccaaccgcagctcctacagcaatcgcccctttctctccctccgccgcgccaaacagttcctcggcgccgccaagttcaagctcttcttagttctttttgctctctccatcgtcgnttttgtctcctccagactcagttcgtggatgggatggaaccc

SEQ ID NO: 29194 - DNA, 351 bp, Glycine max
gatgggagaatcttattgtcaaggagttgtgatggttcattgaaggtttgggatctgcgcaaaacaaaagaaccgttaaaagtatttgaggatctgccaaatcactatgcacaaacaaatattgccttcagtcctgatgagcgactctttttgactggaacatctgtggaaagggagagcatgacaggaggtttattgtgcttctttgatagagtaaatcttgagcttgtttcaaaagttggcatatcacccacttgtagtgttgttcaatgttcttggcattccaaactgaatcagatctttgcaactactggtgataaaagccaaagtgggactcacatactatatgat

SEQ ID NO: 29195 - DNA, 395 bp, Glycine max
caaggacacgaggtggatatatatgagtcaaggccttttattggtggcaaagttggttcttttgttgacaaaggtgggaatcacattgaaatgggattgcatgttttctttggttgctacaacaatcttttccgattgatgaagaaggtgggtgcggataacaatctacttgtaaaggatcacactcacacttttgttaacaaagggggtcaaattggagaactagattttcgcttcccaattggggcaccaatacacgggataagggcgtttttgtccacaaatcagcttaatacttatgataaggctagaaatgctgtggctcttgcactcagtccagttgtcaaagctcttgttgatccaaatggtgcactgagggacataaggaatttgga

SEQ ID NO: 29196 - DNA, 385 bp, Glycine max
aggggaggaaagaagagagagaacaaagcacttagtgctattcaataattacgaaaaaccaacagcgagtgttgtttttgtttggtccaggctggaccagggaatgaatagagatgagaggctttcggttgaagagaactgagttaagcggcgaagccaaacgcagaatcggcggcagaaattgccaccggaagcacgtcgaagacgggtgaaccaaacacaaaattccatccaccacttctcttttcaatccccaactcaaatctgtgaagaaaatctcaatttctaaattgtaattcttagcactactgctagtagtagtaaaaaaaaaccattagaaagtagtagaatgtttttttttccgttttttcgttggtttactttt

SEQ ID NO: 29197 - DNA, 356 bp, Glycine max
gacagtattcaagatcggggaatcaatcaggtttatgtaattggaggagatggaactcagaagggtgcatctgcaatttttgaggaagtcagaaggcgtggtctcaaagtttcagttgtaggtatccccaaaaccatagataatgatatcccggttattgataagtcctttggctttgacactgctgttgaggaggctcaacgagctataaatgcagcacatgttgaagctgaaagtgttgaaaatggcataggtgttgtcaagttgatgggtagaaacagcggatttattgcaatgtatgctacacttgcaagtcgagacgtggactgttgcttaattccagagtcaccctttta

SEQ ID NO: 29198 - DNA, 417 bp, Glycine max
cttaattatatcattttaatcttattgtcaattatttagtatttttggtttaatcagggggatctgctcaaaacatattaaccgttaaaactatttcttgatcttcctaatcactatgcacaaacatatattgccttcactccttattagcaactttatttgactggaacatctgttgaaagggatagcattacattattgttattgtacttcttttatagaataaaattttaactttatttaaaagtttgcatattacccactttgttttttgttcattgttcttgccatacgaaactgtatcatatcttttcaactactggttataaaatcctaatttgtacttacatactatattatccataccttaagttaaatatcaacctttgtataaatttctcattcactcatttaaaa

SEQ ID NO: 29199 - DNA, 326 bp, Glycine max
cgggtctgaaagggaaaaaaaacaaaatcgcatcaaagagaggataaaaggttacctctttcaattttatcccttgttgtgagcttaattcaatttctgctcacacataatggcttgcacgctcgctgattcattactcctattcaagggttcttatcagaaaccagctctgatgagagacattgctgcccggtactccccgggtatatttagtctaaacagttatgggcttatccagaaaaggatcaagcgtcaaacgaattttgttactaagaataaggttactgtcatacatgccgtggcaattgcagtgcaaccagattcgg

SEQ ID NO: 29200 - DNA, 378 bp, Glycine max
gacacgtgcgagtgatcaaatattaagaagaggttatggatgtttttaaggtttttcacatgcttgtcttaaaacaattttccagcaaaatccaaatccttcgttctggtaatggcacagaatacatgtctaaaagcatgacacagtatttaaattctcatgtatcaagaggggttgttccttttgtttgattttttttcttcttgccaaactatggcagaagatcattcttcttcgcatatattgccttcaagagctacaagttttcctggtgtgccttttgcagtagctacaggttccactagtgtggcttgtggaatagaatttgagtctaatcctaatcaatgattgagctcttgtgtactaaatgagttcaat

SEQ ID NO: 29201 - DNA, 351 bp, Glycine max
ggagtgagtgagagaaagaagagaaggagttgaagtggttgttgtattgtagtagtgtgtaaagtcttggtgatggatagacacaaatgcaagctttgttcaaggtctttcagcaatggcagagcccttggtgggcacatgaaggctcaccttgcttctctccctctccctctccctccaaagcttcactcttgcttctcttcctctgactcagaacaagaacaatctttaagggagaatcctaagaaaaccttgaggattctggatcctgaagacagagagagcgagacagagtctaataagaacccgactcgtcaacgatccaagcgcaactggaaatctaccatgccc

SEQ ID NO: 29202 - DNA, 336 bp, Glycine max
gggtcgcgagttcaagtcaacaagcctcacaggtcccgcttctcttccaaatcttctcgcaatcttcataaaacctctgtcaaggacagactcgcaatcgcaaaatcagagcgcaatgtcggcaaaggagctcgtgcagctcgaattcagagaaataaaatgatacgagatcaaaaaagagctgctgttttgaaagaaaaacgagaactcagtgggtcgagaagtccttctcgagtgatagttctcttcgccctctgtgcgtctggggatttagaatcacttgctgatgatctcttgtcattattatctaaagatacgtgtgtggtgctttcaaga

SEQ ID NO: 29203 - DNA, 376 bp, Glycine max
gggttcaaagtctagtaataaaaagagaaaagctttgtcagataagccaacttcaaggccaatgaattcccaaaagatgagtgaatttagtactacgcctatggacgatgaattggatgttgttgatccagtgggtcagaaacccaagagacccaagaggataaagaagaatgtgaatgaaaagtttgaagatgcttttactgggattgctgccctgatcccagagcagacccaatttccaccttcaccaagcgattttagtgccgggggttctaaagcagaatcaggccaagacaactgaagacatagtgattcttaaccactacaaaaactttggagttactattctcagccctatggattgactttttttggg

SEQ ID NO: 29204 - DNA, 359 bp, Glycine max
gacactaaacaagttaaaagaagagcatcactgaactaacaaagcaaccctatgtcgaaggtggtttgtgtcaccggagccagcggcgccatcggatcatgggtggtcctactcctcctccagcgtggttacaccgtccatgccaccgtccaagatatcaaggatgaaaatgagacgaaacatttggaggaaatggaaggagcaaagagtcatctccatttttttgaaatggatcttcttgacatcgactccattgccgctgccataaaaggttgttccggcgtaatccaccttgcatgtcctaacatcattggtcaagtcgaagatcccgagaaacagatattggaaccggcgattaa

SEQ ID NO: 29205 - DNA, 123 bp, Glycine max
tgggggtttgggaaaggcacggaaggcttcggtttcagggggctcatcaggaggtttatcaacctttaaccatattgtactccttcaccaagtatttgccaactaatgctagtgttaaatgct

SEQ ID NO: 29206 - DNA, 267 bp, Glycine max
gaacacactcatccaaacaaccttctttctttttctgtgagcctttctttcaggttcttaacttgatcagtgtgcagtgtccaaatcataagggtagctgcaaattgcaatggctaagcatgatgttgagggtggttccttctctgcaaaggactaccatgatcctcctccagcaccgttgattgatgctgaggaactcacacagtggtccttctacagggctttgattgctgagttcattgccacaatgctcttcctttacatcac

SEQ ID NO: 29207 - DNA, 325 bp, Glycine max
gggatttccaaagtttttaatagagggggggtctcagaaaatcgaagaattacagacgaatatgcaaaaaaaactgaattgtgtgaatcgaaaactaaacattgctattgtaaaagttgcaaatgcttataaacaccctaatattattgcagaatttatagctggacaattaaagaatagagtttcgtttcgtaaagcaatgaaaaaagctattgaattaactgaacaggcgggtacaaaaggagttcacgtacaaattgcaggacgtatcgacgggaaagaattgcacgtgttgatggatcagagaagtagaagtctttacaac

SEQ ID NO: 29208 - DNA, 383 bp, Glycine max
gaagatggagatgtatcagatctggagcaggagaatagcgttgggagcgttcgcgtttgttctgcttttcctatcggcctcagcagacgacgtcgttgtgctctctgaagataacttcgagaaggaagttggtcaggacagaggagctctcgttgagttctatgctccttggtgtggacactgcaaaaagcttgctccagaatatgaaaagcttggtagcagcttcaagaaagccaaatctgttttaatcggcaaggttgactgtgatgagcacaagagtttgtgcagcaaatatggagtctctgggtacccaacaattcagtggtttccaaaaggatctcttgaacccaaaaagtatgaagggccacgcactgctgattcac

SEQ ID NO: 29209 - DNA, 340 bp, Glycine max
ggagcaatcgcgtgaattttcaacgggattttgcagagcttccgcgttgaaaccatccaaccctcttagcctcatattcgttgtctatacttccctccttccttcgtgtaattacatttttttcatcagcagttccaggaccaaattgatacacaagatcactgtttttttagagagagattgagagaggatgtttggttcaaagaaaactcctctgagagatgctaaacctagttctgttggccatgcccataacccctttgattctgatgaagagacaaacgataaaaagtataattcctctaaaaagactttgaccaacaccaacccctttgatgat

SEQ ID NO: 29210 - DNA, 420 bp, Glycine max
cactgttgatccactatgctggtccaatgaaaacctctgaagatactccaacaaatggatctactgtgccccctggcagacgccttgttgttccactgcagatttgtgttttgcagggtttgtcttttgtgaaggctcagcttctttcaatggagtttcctgctcatgtcggtgaaactcttccgaagttggatgacttaaataacaagtctactgatgttgaatcagaaacaaaaatggacagattggtgaaaatagatcctttcagaagaagttggggactgcgattccttgaacttgagttatctaatccaactgatgtcgtgtttgaaatcaatgtctcttgcaaactggagaactctagcaacgaggacaatcattttgctgatcaaggtgctacagaatatgtctattctaaaa

SEQ ID NO: 29211 - DNA, 386 bp, Glycine max
  modified_base (300)..(300): a, c, g, t, unknown, or other
gatattattggacatattgttgaatttagctctgatcagcatggaagtcgatttatacagcagaagttggaaagttgtagtggcgaagagaaggcattggtgtttaaagaggttcttccacatgcttctaaattaatgactgatgtatttggtaactacgtaatacagaagttttttgagtatggaagctcggagcagaggagggaacttgcagatcgacttgttggccagatactgcctttgagtttgcagatgtatggctgtcgtgtaatccaaaaagcacttgaagttattgagctngaacagaaagctcagcttgttcatgagctagatggaaatgttatgagatgtgttcgtgatccaaatggtaaccattgtattcaaaa

SEQ ID NO: 29212 - DNA, 321 bp, Glycine max
ttgggttggtgattacattcagcaacatcaagacatgggtttagaggcttatactgaatcagtatatggaaaattggatctgaattctgtacaaaagatgtttcttaagggaatgtgtagttttggcagtactgattctgacatagttgagatttaccactgctcaggtgcgtcaatgcaagcacgatgggagctgttccagaagcaagctgaaattaccaaaaaaaatcatggggaagctaacattcggtatgcttggcttgcttcctctaaaggagaactatctacaatgatgaactattgacttaatcattattgact

SEQ ID NO: 29213 - DNA, 335 bp, Glycine max
ggctttttaggttattttcttaagtaaaaagaaggaaataaataattctcgtagctttgttgctcttataaattctattctggttgacgcttctctcaccatccccatttcgcgttggtgcaaagcatccttcgtttcaatttctctctctcagcgctttctgcaatcgaacctttcatctccaaagggatccacaggccgaaggagaaatggggctgacattcacaaagcttttcagtcggcttttcgcgaagaaggaaatgcgaattctgatggttggtcttgatgctgctggtaagaccactatcctgtacaagctcaagctcggagagatc

SEQ ID NO: 29214 - DNA, 431 bp, Glycine max
atccggcggaattgtcactatcttgattggtatgcttatcgggtgctttgcaagccagcgtggtggcaatagtagcgactcgtcattctgggcttgtggcatgggccttaggttgggacttcaggctctatggccctctctacacggtcagtactccattccaatatttcttgtttcctggaccccaaaacctatttttgtttcatcttcaaaatctgattttcaaagcaaggtaacacacataataaataagatgaatttagtcggcacaccaaattaatttggtttctctcaatcccagcctattgaatgcaaaaggttacgaagcaagtattggaacttaaaaagacaaattgttcacttcaaaagtaaattcggtggtcggcccattttggccctagttcactattttctttaagcccaaattatct

SEQ ID NO: 29215 - DNA, 291 bp, Glycine max
gatgcggaatggggaggtccaggtgatgatgacaagatgctgcttgaacttttagttttgagcggtgctcaagttggatctgattggacctcaaccttgaagaaacgcctagatttcaggtctgcattttcagaatttgatgcataaaccgtggctaacttgactgataagcaaatgatgtctattagttctgaatatggcattgacataagcagagtccgaagagctgatgataatgctaaccaaatcttagagattaagaaagactatggttcatttgacaagtacatt

SEQ ID NO: 29216 - DNA, 300 bp, Glycine max
gatcatcatgaagttgaaggggaaccaaccacctccacgagttatgtataattgatgtaaattttcccggaaagagggaacactgtaaaatattagtcttggcttctttaatgtctattttaaagtggaagacttgtgtagtaaaagggtctgcatctagtactcccaataaaagaaaaaaaagagaagcaaattccttcttccttaatttactaattaaatgaaactggtagtgtccaaataattggttttaatttttatcctatcccaatcagtgtatcataaattggtatttattac

SEQ ID NO: 29217 - DNA, 256 bp, Glycine max
ggacaaagaactcacgagtgattttgagaggctggttcatctttgggacacttgattctgctgaacgtgatgcatttttggcaaacgaggcgactaaaaaatggacttcaagcaatcaagttctggtggaaatagtctgcactaagtcctttgaacaattggttgctgccaagaaggcttaccatggtctttataagaagtctctggaagaagatgttgctcattacacaacaggagactttcgtaagctcatact

SEQ ID NO: 29218 - DNA, 335 bp, Glycine max
gataggcatgatatcttgtttgcaacaccctaatctggtgaaacttcatggattttgcattgaaggggatcaattgatattggtgtatgagtacatggaaaataatagcctggctcatgctttattcagctcaaaagatcaacttaaacttgattgggcaacaaggcttaggatctgtattggcatagcaaaaggtcttgcatttctacacgaagaatcaagactcaagatttttcatcgagacatcaaagctactaatgtgttactggatgggaatttaaaccctaaaatatctgactttgggctggctaagcttgatgaagagaaaacccatg

SEQ ID NO: 29219 - DNA, 310 bp, Glycine max
gacggcagatcagatccattcttcaacaaatcccctgttcagtttgagtttttctcgaggatcccgtgaaacgacatggcgatggtggaccagcctctgtatccgattgccgttttgatcgacgagttgaagaatgaggacattcagctgcgcctcaactcgatccgaaggctctccacgatcgcgcgcgcgctcggcgaggaccgcacgcggaaggagctgattccgttcctcagcgagaacaacgacgatgactacgaagtgctcctcgcaatggccgaggaattaggtgtcttcattccctacgtct

SEQ ID NO: 29220 - DNA, 287 bp, Glycine max
tgccttttcaagtatcagtaagaatagaagggaggaggagtctttcatatttaaaaatgtaagcataaaatgtactgaaaggctgattgtttctcagtatgttctttatgacaggtcaaatgctatatgaagcaattgctatctggccttgagcattgccacagcagaggtgttttgcaccgtgatattaagggttcaaatctgcttattgacaatgaaggaatacttaaaattgcagattttggacttgcaactttctttgatcctaagcaaaagcatcccatgac

SEQ ID NO: 29221 - DNA, 438 bp, Glycine max
gaagaagaggcagagaagagcacgaagaatgctttggggaaggtgagcatggatggtgcaccgtatctacgaaaggtggacataaagttgtacaagagctaccaggagctgtcagatgcgctggctaagatgttcagttccttcacgattgaaaagtgtggattccaagttatgatggattttatgaatgatatctatagctctaactatgtaatcacatatgatgacattttcgttgactgatactttgtctgtgttgttttttatggttttgaattttatttatttcaatttgttttttgtttaataatttttttattattttttatttattaaattttattctattttttttatttttgttttttttattatgattttttgtttattatttttattttttatttttattcttatttttatatttttctatttttt

SEQ ID NO: 29222 - DNA, 258 bp, Glycine max
tgaagaaggttggttacaacccagacaagattccatgtgtgcccatctctggtttcgagggtgacaacatgattgagaggtccaccaaccttgactggtacaagggaccaactctccttgaggctcttgaccaaatcaatgagcccaagaggccctcagacaagccactcaggcttccattgcaggatgtctacataattggtggtattggtaccgttccagtgggacgatttgagactggtgtcttgtaacccggta

SEQ ID NO: 29223 - DNA, 343 bp, Glycine max
gatatgtatcttgttgcgaggtgtgaggggcatagtggtgttgatgtgaacaagcagaggtcgttccttactttgaatgcgttgaacgagtttgatcctaagtattccggtgtggattggaggcagaagttggagactcagaggggtgctgtgttggctactgaacttaagaacaatgcgaataagttggctaagtggactgctcatgctcttttggcgagtgcggatacaatgaagttagggtatgtgtcgaggattcatccccgcgatcatttcaatcatgtgattttggctgtggttggctataaacccagggactttgcagcacagattaatttgaaca

SEQ ID NO: 29224 - DNA, 313 bp, Glycine max
ggcacaggtggagaaagtatatatggggggaaatttgcagatgaaaatttcaaactaacacatgatggacctggcattctttctatggctaatagtggtcctaacacaaatggatctcagttctttattacattcaagcgccaacctcatcttgacgggaaacatgttgtttttggaaaagttgtcaacggaatagacattttgaagaaaattgagcaggtgggaacatctgatgggaaacctacccagccagttaaaattattgattgtggtgaagtctcttgaacaaaaattcagcatactgcagagaagg

SEQ ID NO: 29225 - DNA, 373 bp, Glycine max
cacggtcagtcgttggaagaaacctgagattggttgggtgaagctgaacgtggatggttcacgcgacccatacaaaagttcctccgctggttgtggtggtgttctgagggacgcatcagcaaagtggctccgtggctttgctaaaaaactgaaccctacttatgcagtgcaccagacagagttagaagccattctcacgggcttgaaggtggcttcagagatgaatgttaagaaactaattgtggagtcagacagtgactctgtggtgagcatggtggagaatggggttaagcccaatcaccctgactatggtgtcgtggaacttataaggacgaagcggcgtcgttttgactgggaagtgaggtttggttct

SEQ ID NO: 29226 - DNA, 362 bp, Glycine max
tacagacagagttggagagttagctgagaagcatggactgaagcttcacattgatggggcccgtatttttaacgcatcagttgcacttggtgttccagtggataggcttgtccaggcggctgattcagtttccgtttgcctatctaaaggtataggtgctccagttggatctgttattgttggttccaagaattttattgccaaggctagacgactccggaaaaccttaggaggtggaatgagacagattggcctcctttgtgccgctgcacttgttgccttgcaagaaaatgttgggaagcttgaaagtgatcacaagaaagctagacttttggctgatggattaaaagaagttaaaggac

SEQ ID NO: 29227 - DNA, 387 bp, Glycine max
gagacacgtgggtggatagcaacttagaacacaggtgaactcaaagtggaacaacccaagcttgtttcacagctcaacaacaatggcttctatctcatgcatcacccaccaccccatcacttccaagctcaataatgccttctcttcaccccacgtctctgcctcaaacttggcctcacggtttctgggcaccagaaaaagagttgggttgcatagcctcacctctagaataattggaccctctaatggctccaaagccacatgctggttcaggttcggcaagaacggtgttgatgccaaaggtgctggcatctatggcagccagggccgtgatgactttgatagagatgacgtggaacagtacttcaactatatggggatgctcgc

SEQ ID NO: 29228 - DNA, 215 bp, Glycine max
tttatggtacttacagagttggatagttagctgggaatcaggaactgtatcttcacattgatggggcccatatttttaacgcatcatttgcacttggtgttccagtggataggcttgtccagtctgctgattcagtttccttttgcctatctaaaggtataggtgctccagttggatctgttattgttggttccaagaattttattgccattgct

SEQ ID NO: 29229 - DNA, 369 bp, Glycine max
ggaggataatcaataaacttaaacttatgttatggcgttctaactctgaacgatgaaatgaaatggagttccaagataagcgtttatctctgagatcgagcttgacgttcagcgagacgctgtgcgcagtgttcattccgttcataggaatagtcgaagctttggttttcacattcactagttgcttcgatttccaatctcccaggaataagaagaaacattcttctaccttcgacgacattctcaccctcgccgaggattctccatttagtattaatgaaatcgaagccttgcgtgagttgttcaagaagttgagtagttctatcattgatgatggcctcatccacaaggaagaactcacattggcac

SEQ ID NO: 29230 - DNA, 284 bp, Glycine max
ggattgagtaattcagctaacagaaagggatgaatgggcctaccaagaaatgatcactcatcttcctctttgctctattccaaaccctaaaaaggttttggttatcggtggaggtgatggaggggtcatacgagaagtagcacgccattcttcagttgaaaagatagacatttgtgaaattgacaagatggttgttgatgtctccaaacaatacttccctgatgtaactgttgggtatgatgatcctcctgtgacacttcatattggtgatggaattgcatttt

SEQ ID NO: 29231 - DNA, 334 bp, Glycine max
ggttctagtgtgtgattgtttgttgttgtaactcgtgcttcttcttttgttgttctgtgtttgtgtttgttttttctctcacctgaaaatgtcttgctgcgttggtaactgtggttgcgtaagctcctgcaagtgcttcaacgtctgccgaggctgcaagatgtacccagacttgagctacactgagtcatccaccaccgagaccttggtcatgggagtggcacctgttaaggctcaatttgagtgtgctgtaatgggtgtacccgctgagaacgatggctgcaaatgcgtaccaaactgctcctgcatcccctgcacttgcaagttatgtgat

SEQ ID NO: 29232 - DNA, 292 bp, Glycine max
ggatactagaacctgcagatcgtgatgctgttttggccaatgttgccatcaagaatggcaaaaactacaatgtcattgtggaaatcgccactatcctctccccggaagagcttttggccgtgagacgtgcttatctcaaccgctacaagcactccttggaagaagatgttgcagctcatacctctggccatctacgccagcttttagtggggttggtgacctcatataggtatgttggtgatgagatcaatccaaaattggcacaaactgaagctgaaattcttcatgatgc

SEQ ID NO: 29233 - DNA, 397 bp, Glycine max
  modified_base (390)..(390): a, c, g, t, unknown, or other
gacttcaaagtggagaaaaacacacacggttggttcattctctcgcttttctttttcctcaaaaagttgaaaaagaataaagggggaacaatcgagtgaagttgttgctcttcaatagtaaacttacctatggaagagggaagggttgtgagtgagtacacaaaagatggaactgtggatcttaaagggaaacccattctcaaatccaaaagtggtggttggaaagcatgctcctttgttgttggtatctctctctctcactataaattttatatggtcattttcatcttgttttggacattaatttcaaaagcaatttcccaaaacattggaagcttcatgatgttttgttaacaaaaatcttaatttcctctgatcgagagacattgntcaattc

SEQ ID NO: 29234 - DNA, 237 bp, Glycine max
tggtactttaaattggttacaaactcaaccagattccataggctctcgtttatgttttctatgatgacaacattattgaaaagtccaccaacactttactggtacaaggtactatctaatcttgaacctacctaccaaataaataatcccaataagccattacacaaaccactcaagctttcattttaaaatgtctaccaattttataatcttaataccttgccaataagaattctt

SEQ ID NO: 29235 - DNA, 447 bp, Glycine max
ggaggaagccacatagagacacaatacagagtgaggggttgctcgtgtcgccacaactctctgccaacatgggtatctccagagattctatgcacaagaggcgtgccactggtggcaagaagaaggcctggaggaaaaagagaaagtatgagcttggtcgccagcctgctaacactaagctgtcaagcaacaagacagtcaggaggatccgtgttagaggtggaaatgtgaaatggagggcattgagattggatactggaaattactcctggggaagtgaagctgtaactcgcaagactcgtgtactagatgtggtttacaatgcctcaaacaatgagcttgtgcgtactcagactcttgtcaaaagtgctatcgttcaagttgatgctgctccattcaaacaagtgtatctttaacactatggtgttgagattggtggaaaaagaa

SEQ ID NO: 29236 - DNA, 280 bp, Glycine max
tggggatgtgttaaattatattgagtttatagccttcacgagtgagaatgctgacatgcagatgtcacaagtttggggatccggtcaaaataaaaaaaattgataaaatttcaagaacaaaggcagcgttacttctcaaccaatgctgtaaactaccgtcaagagccccaaacctctgtcttccaccgacgatgagtccttcttaccgaatgaactgatctaggagatctttcttagggttctggttagatcccttctgcaaaatacggaaaaccctaat

SEQ ID NO: 29237 - DNA, 282 bp, Glycine max
ggattgagaaggaatgagaatggggggaggtttttggctgatgatgttggtaggtctagcaatcgagggcgagggcaagggcaatcttctcgaacgaattatgggaggaatggagcggatggtgatggcagaatgaggaagaatgggaatgggagaaggtttttgtccaataatgttgatcggtctagcggtggagaacagtcttctcctttgaattatggcggggatggaatggatggtgatggtagattgaggaggaatgggaatgggaagagggttttg

SEQ ID NO: 29238 - DNA, 447 bp, Glycine max
ggccttaagaatggtgatattgaagttacttgggctgatgggatggtatcaatggttggaccccaagcaatctatgtggttggtcgagatgacgatgatgaatcaattgctgctgggagtgaaataagtgatgctgcaagctgggaaactgttaatgacgatgaaatggaagtccttgaggattccagagaggatattgagagggaaaattcaagcagtgttacttctgaggcagaagaaagtggagagaatgattttggtaggactgcagctctctctgttcccctagcagcatttcgatttgtcactagacttgccagtggaatattctcaagaagctcaaggaacttggattctattcccttggagattaaagctgaacgtgaacattcattacctgtaggtaatgatgagtctacttcacagaaacatattgcaattgatgct

SEQ ID NO: 29239 - DNA, 329 bp, Glycine max
ggaggcagagaagtaagaagaagatagcgagaagtggaggctaagattgtccacaacatgtggacagcaggaacaacgagtgtatagatcaacaactacctttcccttttcgtctatcagtccaaacactcttcttcttcttcttcttcttcactctacaaccactaaactaagtggttggttttggtttagttacatttgtatgaagctcttaaacttaaggcttaagccatggcatcctcatcctctctgcatctatctcaggcccttctgtcacgtgctgtgtacatacatggctcatcttcttctgaccgtgtctcactcttatt

SEQ ID NO: 29240 - DNA, 334 bp, Glycine max
gggggaattgactagtgcggcgcgctcctatgatcaccgtagacggcggaggtggcggtggtggtgtagacacggcgtgacggcgatctcttgagataaatgttggttgaaagaggaagaagaagaagagttgtattgtagaatgagccaaccaacggtgatacttgccactgcgagctatgatcacactattcgtttttgggaggccaagagtggccgttgctaccgcaccatccaatatcctgattcgcaagtaaaccggctggagataaccccggataaacgctttctggctggagctggcaatccacacatacgactggttgatggtaac

SEQ ID NO: 29241 - DNA, 386 bp, Glycine max
gaaagaagagaaaataataatatgaataacaacccacggaacttgggtcttgcaaattaagttcattttcctccctttcactctcgtagacatcacaaaccttccctccattcatcccacgcatggctgccatgaactctagcgtattggcctgtagctatgccatatcaggtgcagcgtgttcggagctcaatgggaaggtcacttccgtggcctatgttgcatgctctggctacaagttgccattgatcaaagctgaggccagagttcctaaagccaaagaatctgaaggaggaaggagaggtgcccttgttctcttggcagctacccttttcacctctgcagcttccaattcttttgccaatgcttggatcattgaagattac

SEQ ID NO: 29242 - DNA, 332 bp, Glycine max
gggcaaacaagtggtggaaagacatacacgatggttggaataactgaatacgctgttgcagatatttttgactatatagagaggcatgaagaaagagcatttatattgaagttctcagcaattgaaatttacaatgaagttgttagagacctcctcagcactgacaacaacactccacttagactacgtgatgatcctgagaaagggcccattttagagaaactcacagaggagactctacgggactgggagcatttaaaagagcttctagccttcagtgaagctcagagacaggtgggagagacatacctaaatgaaaagagttctagatc

SEQ ID NO: 29243 - DNA, 415 bp, Glycine max
gagcgagggaagggaagcatctttagctccaatggcggatacctgaggtcgatccagggacctcgacaagctccttctccgccctggcaatctcgtcggtcccaggttcgaaccaggcgctgagttgcgagatgaccttcaggccttcgccaaagtgttggtggtaggggccggtggcttaggttgtgagttgttgaaggatttagccctctctggtttccgaaaccttgaggtcattgatatggatcgcatagaggttactaatctcaaccgccaattcttgttcagacttgaagatgttggcaaacccaaagccgaagtagctgccaagcgtgtcatggagagaattactggtgtcgaaattgtgccccacttttgcaggattgaggacaaggaaatagaattttacaatgat

SEQ ID NO: 29244 - DNA, 297 bp, Glycine max
gggcaaacaagtgggggaaatgcatacactatggttggaataactgaatacgctgttgcagatatttttgactatatagagaggcatgaagaaagagcatttatattgaagttctcaccaattgaaatttacaatgaagttgttagagacctgctcagcactgacaacaacacttcacttagactacgtgatgatcctgaaaaagggcccattttagagaaactcacagaggagactttacgggactgggagcatttaaaagagcttctagccttcagtgaaacttaaaaacaagtt

SEQ ID NO: 29245 - DNA, 448 bp, Glycine max
ggcagatgtgaatgtgagagacacccatgaatgacagagtgaaatgaactgagtaacaccaacgctgctttcttcattctttcattcattcgaatgtgttcttttgcgattgaatttgagggaacaataatcgattttcgctttctgggcacccctgaattcccctgcatcgctgtgaaagtagttcagttcgaacaacgaaaacgatgtcggctcgattgatgaagaaggttctgaacgagcagcatcaccttccgcaacacgtgagcgaagaagaagaagaagaagagaacgattctgagcccatcactcgttcctccatcaaccccttcgacctcctcaacgacaacgattctgagcccgaagaccagggagatgagttgatgtccaccaatgaaatattgacaagttatgatgacaaagaggagtcagcttcattgaaacctac

SEQ ID NO: 29246 - DNA, 284 bp, Glycine max
aggaacagcaatgaagaagaggcagagaagagcacgaagaatgctttcgtgaaggtgagcatggatggtgcaccgtatctacgaaaggtggacataaagttgtacaagagctaccaggagctgtcagatgcgctggctaagatgttcagttccttcacgattgaaaagtgtgggtcccaagggatgaaggattttatgaatgagaccaatggctctgactatgtacccacatatgaagacatggacggagactggatgctcgtcggtgatgtgccctgggagat

SEQ ID NO: 29247 - DNA, 151 bp, Glycine max
aattcgagcggccgctgtttttttatgttgttttttttttattttgtgttttttgaatccgatcgatatgtacgcagcttcttctgggtgtgttgaaatttgggcattatatggtcggatattggcgttgggattagcttagggtttcaaa

SEQ ID NO: 29248 - DNA, 405 bp, Glycine max
ggcagttcaattgatcaactcagatttcagggacctaagtctagctgctaatagactcgcccatcatgccatcaaacttggtggcattggctttggagcctcttttttcggattgtttgctgccattgctgctatttatctgttgattttggatcgtacaaactggaaaacaaatattctcacagcactactcattccatacattttctttagcttgccttcattaattttcgacgtcttcaggggagagcttgggaaatggattgctgcatttgctgttgtattacgcctttttgcttcaagacactttcctgaatggctggaattgcctggtgctctgattcttcttatcgtgggagcctcttctctaattgcaagcacctttagagacaacattgttggggt

SEQ ID NO: 29249 - DNA, 255 bp, Glycine max
ggataataataaaaacactcgtgccgcaccttcgtcttccccaatggctctttccacacgccattttggaagcccttttctttattacatagaatcctttggctattggaaccagtaaaccctaataattccaatcaaccttggcaattctttgaatccgaataatcttttcggccaaaacacaagtggggttttttggatttaatggttaaggggtgatagcagggttcaatctgggtttccaaaggcaaaata

SEQ ID NO: 29250 - DNA, 399 bp, Glycine max
ggagcctagtagtaatagtgaactggagtgatgctcaagtgtgttgtgtgtcagtgttttagggaccaatggtggagagtgagttttctgagttaagatataagatatatgctatctaatgcctagtgggatataggaaaggacctcaaatctgctatctttcgttcacatacgcatcatattcttttaattgttagttctgagttctgaccaaagttgttgatttgagtgtttttagcatatttggggtgtctgcaaacaccgcaggaattttgctttttctattgaattagattcctctgggaattcaattctgattcttccttagttttcggttttctgtctttctttttttccttctatttatatttttgggtgggttttctggtgagtcttgac

SEQ ID NO: 29251 - DNA, 401 bp, Glycine max
gacaatcaatcttctttatccactctctcttaattaaattaaaacaaaaaatgtgcgctgccatatccgaagtggaacaagaagagttgctcgaaaaattggaggtgttcaagatcaaaggcagggacaagcatggccgcaagatccttcgcattatcgccaaattcttcccaggtagattgattaattaattaattaaatccctaattcctttttttttatgtgcatgaattttttaaatcttcggtaattgtttgaattgaggacagcacggttggtgagtgttgaggttctgaaaaagtacctggaggagagggttttcccgaagctgatggggaagaggaaattcgcggtgctgtacgtgcacaccggcgttcagaggagcgagaaatttcccggaa

SEQ ID NO: 29252 - DNA, 393 bp, Glycine max
gagagaaagagagagaaagatgtcgaagcgtggtcgtggtggttcggcggggaacaagttccgcatgtcgctgggtcttccagtggcggcgacggtgaactgcgccgacaacacgggggcgaagaacctctacatcatttctgtgaaagggatcaaaggccgtttgaaccgtcttccctcggcctgcgttggcgacatggtgatggccaccgtgaagaagggaaaacccgatctgaggaagaaagtcttgccagctgtcatcggtcgccagcgcaagccatggcgcctaaaggacggcgtctacatgtacttcgaagataatgctggtgttattgtcaatcccaagggagaaatgaaaggttctggtatcactggtcccattggaaaagagtg

SEQ ID NO: 29253 - DNA, 331 bp, Glycine max
gagagcgagaaatattatagtagctctgcgtttttggggtatcattattcaaccacccattttctctcttcttcttcttccattgagaaaattctctttcatcgtgtgtgatcggtgagatgtacgtagcttccatgcgcaagtctttcaaggactccttgaaagtccttgaagctgatatccagcacgccaataccctggcttcagattttccaagggagtatgatggtgcatgccttcagatgataatgtcatacagtccagctgcacacctgttgtctttcttggtgcattggacagattgtcatcttgcttgaaccctttgactgtt

SEQ ID NO: 29254 - DNA, 435 bp, Glycine max
tcgagacgacagaaggggagagaaagacaaataaaagaagctgcatttgcagagacgcattcgcgtttgtctgagagagagaattggaaggttgcgacgagtgatgatatacatattgtggcggtagtgaaatcgaggaaaaagaggtagcaatcgtgagttgcaatgagtagcgaaaagtctccttcatcagcttctgcttcagcttcttcttcgagtagctacgagttgagcaaaggcatcaatggcctcgacaaggttattcttcgcgacccacgtggtagctccgctgaggtgtacttgtacggtgctcacgtgacttcatggaagaatgaacaggccgaggaattgctttttctcagtagtaaggctatatttaagcctccaaagccaattcgtggagggatcccaatatgttttccttaattttcaaac

SEQ ID NO: 29255 - DNA, 408 bp, Glycine max
ggcatcgaacagagagagagagaatggcagcacttggtgggaatcgtgatgtgacaggaagccagaacagcgttgagatcgatgctctagctcgctttgctgttgaagaacacaacaaaaaacagaatgcccttttggagtttgaaaaggtggtaactgcgaaacagcaagtggtttctggtaccttgtacaccatcactttggaggcaaaagatggtgggcaaaagaaggtttatgaagccaaagtttgggagaagtcatggttgaacttcaaggaggtgcaagagttcaagcttgttggagatgcaccttcatagtctagtgcttaattaggttgctgaagagtgaagaatgagacagcctggttcgaaggggaaaagcctaaggatatatcaaaggatcctatat

SEQ ID NO: 29256 - DNA, 385 bp, Glycine max
gacggcgatgatgatgcaaatcaacatcacctccaccacctcaatcgtcacggcgttctcttcggatcattccccgaatgttctaccttgagccatgtccaacctcgttcagattcgcgtcgacgccgacgctagcgatggcttcgactctccggcgaagcagaaagcagccaaccgcagctcctacagcaatcgcccctttctctccctccgccgcgccaaacagttcctcggcgccgccaagttcaagctcttcttagttctttttgctctctccatcgtcgtttttggcttctgcagactcaattcgtggatgggatggaaccctcaccactcctcttcggtttccttcacttcaaagggtggctatactgagcttattaac

SEQ ID NO: 29257 - DNA, 411 bp, Glycine max
gatgggagaatcttattgtcaaggagttttgatggttcattgaaggtttgggatctgcgcaaaacaaaagaaccgttaaaagtatttgaggatctgccaaatcactatgcacaaacaaatattgccttcagtcctgatgagcgactctttttgactggaacatctgtggaaagggagagcatgacaggaggtttattgtgcttctttgatagagtaaatcttgagcttgtttcaaaagttggcatatcacccacttgtagtgttgttcaatgttcttggcatcccaaactgaatcacatctttgcaactactggtgataaaagccaaagtgggactcacatactatatgatccaaccgtaagtgaaagatgagctcttgtatgtggtgcacgtgcaccaaggaaaaaatca

SEQ ID NO: 29258 - DNA, 331 bp, Glycine max
caaggacacgaggtggatatatatgagtcaaggccttttattggtggcaaagttggttcttttgttgacaaaggtgggaatcacattgaaatgggattgcatgttttctttggttgctacaacaatcttttccgattgatgaagaaggtgggtgcggataacaatctacttgtaaaggatcacactcacacttttgttaacaaagggggtcaaattggaaaactagattttcgcttcccaattggggcaccaatacacgggataagggcgtttttgtccacaaatcaacttaatacttatgataaggcttgaaatgctgtggcttttgcac

SEQ ID NO: 29259 - DNA, 405 bp, Glycine max
aggggaggaaagaagagagagaacaaagcacttagtgctattcaataattacgaaaaaccaacagcgagtgttgtttttgtttggtccaggctggaccagggaatgaatagagatgagaggctttcggttgaagagaactgagttaagcggcgaagccaaacgcagaatcggcggcagaaattgccaccggaagcacgtcgaagacgggtgaaccaaacacaaaattccatccaccacttctcttttcaatccccaactcaaatctgtgaagaaaatctcaatttctaaattgtaattcttagcactactgctagtagtagtaaaaaaaaacaattagaaagtagtagagtgtttttttttcggtttttcggttggtttacttttaagatgggtgagaagagcga

SEQ ID NO: 29260 - DNA, 394 bp, Glycine max
gacagtattcaagatcggggaatcaatcaggtttatataattggaggagatggaactcagaagggtgcatctgcaatttttgaggaagtcagaaggcgtggtctcaaagtttcagttgtaggtatccccaaaaccatagataatgatatcccggttattgataagtcctttggctttgacactgctgttgaggaagctcaacgagctataaatgcagcacatgttgaagctgaaagtgttgaaaatggcataggtgttgtcaaagttgatgggtataaacagcgtatttattgcaatggatgctacacttgcaagtcgagacgtggacttgtgcttaattccagagtcacccttttaccttgaaaggcctgggggactctatgaatatatagag

SEQ ID NO: 29261 - DNA, 348 bp, Glycine max
gtctgaaagggaaaaaaagcaaagtcgcatcaaagacaagaaaaaaggttacctctttcaattttatccctgggtgtgagcttaattcaatttctgctcacacataatggcttgcacgctcgctgattcattactcctattcaagggttcttatcagaaaccagttctgaggagagacattgctgcccggtactccacgggtatatttagtctaaacagtaatgggcttatccagaaaaggttcatgcgtcaaaggaattttgttactacgaataaggttactggcatacatgccgtggcaatttcaagtcaaccagctccggtggaaagtgcagagtatataaaaca

SEQ ID NO: 29262 - DNA, 266 bp, Glycine max
gacacgtgcgagtgatcaaatattaagaagaggttatggatgtttttaaggtttttcacatgcttgtcttaaaacaattttccagcaaaatccaaatccttcgttctggtaatggcacagaatacatgtctaaaagcatgacacagtatttaaattctcattgtatcaagaggggttgttccttttgtttgattttttttcttcttgccaaactatggcagaagatcattcttcttcgcatatattgccttcaggagctacaagtt

SEQ ID NO: 29263 - DNA, 378 bp, Glycine max
ggagtgagtgagagaaagaagagaaggagttgaagtggttgttgtattgtagtagtgtgtaaagtcttggtgatggatagacacaaatgcaagctttgttcaaggtctttcagcaatggcagagcccttggtgggcacatgaaggctcaccttgcttctctccctctccctctccctccaaagcttcactcttgcttctctttctctgactcagaacaagaacaatctttaagggagaatcctaagaaaaccttgaggattctggatcctgaagacagagagagcgagacagagtctaataagaacccgacttgtcaacgatccaagcgcaactggaaatctaccatgcccaagctcagcctttgacaccccgaagcc

SEQ ID NO: 29264 - DNA, 404 bp, Glycine max
gggtcgcgagttcaagtcaacaagcctcacaagtcccgcttctcttccaaatcttctcgcaatcttcataaaacctctgtcaaggacagactcgcaatcgcaaaatcagagcgcaatgtcggcaaaggagctcgtgcagctcgaattcagagaaataaaatgatacgagatcaaaaaagagctgctgttttgaaagaaaaacgagaactcagtgggtcgagaagtcctcctcgagtgatagttctcttcgccctctgtgcgtctgtggatttagaatcacttgctgatgatctcttggcattattatctaaagatacgtgtgtggtgctgtcaggaacccgtgcttcttctgaatataagacaagaattaccggtacttaaaagcaccccatggtgatctacta

SEQ ID NO: 29265 - DNA, 397 bp, Glycine max
gggttcaaagtctagtaataaaaagagaaaagctttctcagataagccaacttcaaggccaatgaattcccaaaagatgagtgaatttagtactacgcctatggacgatgaattggatgttggtgatccagtgggtcagaaacccaagagacccaagaggataaagaagaatgtgaatgaaaagtttgaagatgcttttactgggattgctgccctgatcccagagcagacccaatttccaccttcaccaagcgattttagtgccgggggttctaaagcagaatcaggccaagacaactgaagacatagtgattcttaaccactacaaaaactttggaggtactattctcagccctatggattgactctttttgtggagactgctaagttggctctc

SEQ ID NO: 29266 - DNA, 378 bp, Glycine max
gacactaaacaagttaaaagaagagcatcactgaactaacaaagcaaccctatgtcgaaggtggtttgtgtcaccggagccagcggcgccatcggatcatgggtggtcctactcctcctccagcgtggttacaccgtccatgccaccgtccaagatatcaaggatgaaaatgagacgaaacatttggaggaaatggaaggagcaaagagtcatctccatttttttgaaatggatcttcttgacatcgactccattgccgctgccataaagggttgttccggcgtaatccaccttgcatgtcctaacatcattggtcaagtcgaagatcccgagaaacagatattggaaccggcgataaaaggaacggttaatgtgttg

SEQ ID NO: 29267 - DNA, 397 bp, Glycine max
gaacacactcatccaaacaaccttctttctttttgtgtgagcctttctttcaggttcttaacttgatcagtgtgcagtgtccaaatcataagggtagctgcaaattgcaatggctaagcatgatgttgagggtggttccttctctgcaaaggactaccatgatcctcctccagcaccgttgattgatgctgaggaactcacacagtggtccttctacagggctttgattgctgagttcattgccacaatgctcttcctttacatcacagtgctcactgtgattggttacaagagccagagtgatgtaaaggctgggggtgatgtgtgtggtggagttggcattcttggcgttgcttgggcctttggtggcatgatcttcattctggtgtactgcact

SEQ ID NO: 29268 - DNA, 260 bp, Glycine max
gggatttccaaagtctttaatagagggtaagtctcaaaaaatcgaagaattacagacgaatatgcaaaaaaatctgaattgtgtgaatcgaaaactaaacattgctattgtaaaagtggcaaatgcttataaacaccctaatattattgcataattgatagctggacaattaaagaatagagtttcgtttcgtaaagcaatgaaaaaagctattgaattaactgatcaggcgtgtacaaaaggagttttagttcaaattg

SEQ ID NO: 29269 - DNA, 312 bp, Glycine max
gaagatggagatgtatcagatctggagcaggagaatagcgttgggagcgttcgcgtttgttctgcttttcctatcggcctcagcagacgacgtcgttgtgctctctgaagataacttcgagaaggaagttggtcaggacagaggagctctcgttgagttctatgctccttggtgtggacactgcaaaaagcttgctccagaatatgaaaagcttggtagcagcttcaagaaagccaaatctgttttaatcggcaaggatgactgtgatgagcacattgatttgtgcagcaaatatggatgctctgtgtaccc

SEQ ID NO: 29270 - DNA, 278 bp, Glycine max
ggagcaatcgcgtgaattttcaacgggattttgcagagcttccgcgttgaaaccatccaaccctcttagcctcatattcgttgtctatacttccctccttccttcgtgtaattacatttttttcatcagcagttccaggaccaaattgatacacaagatcactgtttttttagagagagattgagagaggatgtttggttcaaagaaaactcctctgagagatgctaaacctagttctgttggccatgcccataacctctttgattctgatgaagaga

SEQ ID NO: 29271 - DNA, 425 bp, Glycine max
  modified_base (382)..(382): a, c, g, t, unknown, or other
cactgttgatccactatgctggtccaatgaaaacctctgaagatactccaacaaatggatctactgtgccccctggcagacgccttgttgttccactgcagatttgtgttttgcagggtttgtcttttgtgaaggctcagcttctttcaatggagtttcctgctcatgtcggtgaaactcttccgaagttggatgacttaaataacaagtctactgatgttgaatcagaaacaaaaatggacagattggtgaaaatagatcctttcagaggaagttggggactgcgattccttgaacttgagttatctaatccaactgatgtcgtgtttgaaatcaatgtctctgtcaaactggagaactctagcaacgaggacaatcattntgctgatcagggtgctacagaatatgtctatcctaaaaccaga

SEQ ID NO: 29272 - DNA, 324 bp, Glycine max
gatattattggacatattgttgaatttagctctgatcagcatggaagtcgatttatacagcataagttggaaagttgtagtggcgaagagaaggcattggtgtttaaagaggttcttccacatgcttttaaattaatgactgatgtatttggtaactacgtaatacagaagtattgtgagtattgaagctctgagcataggaaggaacttgcaaatcgacttgttggccagatactggctttgagtttgcagatgtatgggtggcgtgtgattcataaggcacttgaggttattgagcttgaacagaaagctcatcttgttcat

SEQ ID NO: 29273 - DNA, 274 bp, Glycine max
ggctttttaggttattttcttaagtaaaaagaaggaaataaataattctcgtagctttgttgctcttataaattctattctggttgacgcttctctcaccatccccatttcgcgttggtgcaaagcatccttcgtttcaatttctctctctcagcgctttctgcaatcgaacctttcatctccaaagggatccacaggccgaaggagaaatggggctgacattcacaaagcttttcagtcggcttttctcgaagaaggaaatgcaaattctgat

SEQ ID NO: 29274 - DNA, 412 bp, Glycine max
atccggcggaattgtcactatcttcattggtatgcttatcgggtgctttgcaagccagcgtggtggcaatagtagcgactcgtcattctgggcttgtggcatgggccttaggttgggacttcaggctctatggccctctctacacggtcagtactccattccaatatttcttgtttcctggaccccaaaacctatttttgtttcatcttcaaaatctgattttcaaagcaaggtaacacacataataaataagatgaatttagtcggcacaccaaattaatttgttttctctcaatcccagcctattgaatgcaaaaggttacgaggcaagtattgtaactaaaaaagacaaattgttcactccaaaagtaaaattcgttggtcgggccatattggccctaattcactattt

SEQ ID NO: 29275 - DNA, 212 bp, Glycine max
gatacggaatgttgaggtccagttcatgaggacaagatgctgtttgaacttttagttttgagcggttctcaagttgcatctgattggaccttaaccttgaagaaatgcctagatttcagggctgtatattcagaatttgatgcagaaaccgtggttaacttgactgataagcaaatgatgtctattaggttttgaatatggcattgacataa

SEQ ID NO: 29276 - DNA, 336 bp, Glycine max
gatcatcatgaagttgaaggggaaccaaccacctccacgagttatctataattgatgtaaattttcccggaaagagggaacactgtaaaatattagtcttggcttctttaatgtctattttaaagtggaagacttgtgtagtaaaagggtctgcatctagtactcccaataaaagaaaaaaaagagaagcaaattccttcttccttaatttactaattaaatgaaactggtagtgtccaaataattggttttaatttttatcctatcccaggcagtgtatcataaattgggatttataacatagtatgtttgaaaattaaacaaaaaagcggccgc

SEQ ID NO: 29277 - DNA, 371 bp, Glycine max
ggacaaagaactcacgagtgattttgagaggctggttcatctttggacacttgattctgctgaacgtgatgcatttttggcaaacgaggcgactaaaaaatggacttcaagcaatcaggttctggtggaaatagtctgcactaggtcctctgaacaattgtttgctgcgaggaaggcttaccatgttctttataagaagtctctggaggaggatgttgctcatcacacaacaggagacttccgtaagctcatactacctctggttagttcttatcgatatgaaggagatgaagtcaacttgaccctggcaaaaactgaagcaaaattgctgcatgagaagatttcaaacaaggcttaatatgatgacgact

SEQ ID NO: 29278 - DNA, 422 bp, Glycine max
gataggcatgatatcttgtttgcaacaccctaatcttgtgaaacttcatggattttgcattgaaggggatcaattgatattggtgtatgagtacatggaaaataatagcctggctcatgctttattcagctcaaaagatcaacttaaacttgattgggcaacaaggcttaggatctgtattggcatagcaaaaggtcttgcatttctacacgaagaatcaagactcaagatttttcatcgagacatcaaagctactaatgtgttactggatgggaatttaaaccctaaaatatctgactttgggctggctaggcttgatgaagagaaaacccatgtcaccacccgaatcgctgggacaataggatatatggcaccagaatatgcattatggggttacttgtcttacaaggctgatgtttaca

SEQ ID NO: 29279 - DNA, 242 bp, Glycine max
gacggcagatcagatccattcttcaacaaatccccttttcagtttcagtttttctcgaggatcccgtgaaacgacatggcgattgtggaccagcctctgtatccgattgccgttttgatcgacgagttgaagaatgaggacattcagctgtgccttaactcgatccgaaggctcttcacgatcgcgcgcgcgctcggctaggacctgacgcggaatgtgctgattccgttcctcagctagaa

SEQ ID NO: 29280 - DNA, 419 bp, Glycine max
tgccttttcaagtatcagtaagaatagaagggaggaggagtctttcatatttaaaaatgtaagcataaaatgtactgaaaggctgattgtttctcagtatgttctttatgacaggtcaaatgctatatgaagcaattgctatctggccttgagcattgccacagcagaggtgttttgcaccgtgatattaagggttcaaatctgcttattgacaatgaaggaatacttaaaattgcagattttggactggcaactttctttgatcctaagcaaaagcatcccatgactagtagagtcgtgaccctttggtaccgtccacctgagcttctctggggtctacgtcttaatgtgttggtgttgacctttggcagtgtggctgcattttggccgagctacttactggaaaagccatcatgcct

SEQ ID NO: 29281 - DNA, 243 bp, Glycine max
tgaagaatgttggttacaacccagacaagagtccatttgtgcccatctctggtttcgagggtgacaacatgattgataggtccaccaaccttgactggtacaagggactcaactctgcttgaggctcttgaccaaatcaatgagcccaataggccctcagacaagccactcaggcttccattgcatgatgtctacaaaattggtggtattggtaccgtgccagtgggacgtgttgagactggt

SEQ ID NO: 29282 - DNA, 345 bp, Glycine max
gatatgtatcttgttgcgaggtgtgaggtgcatagtgttgttgatgtgtacaagcagaggtcgttccttactttgaatgcgttgaacgagtttgatcctaagtattccggtgtggattggaggcagaagttggagactcatatggttgctgtgttggctactgaacttaagaacaatgcgaataagttggctaagtggactgatcatgctcttttggcgagtgcggatacaatgaagttagggtatgtgtcgaggattcatctcttggatcattttaattaatgtgattttgtgttgggtttggctttgaacctaaggactttgcagcacagattaatttgaaca

SEQ ID NO: 29283 - DNA, 357 bp, Glycine max
cacggtcagtcgttggaagaaacctgagattggttgggtgaagctgaacgtggatggttcacgcgacccatacaaaagttcctccgctggttgtggtggtgttctgagggacgcatcagcaaagtggctccgtggctttgctaaaaaactgaaccctacttatgcagtgcaccagacagagttagaagccattctcacgggcttgaaagtggcttcagagatgaatgttaagaaactaattgtggagtcagacagtgactctgtggtgagcatggtggagaaaggggttaagcccagtgaccctgactaatgggtcgtggaacttataaaggcgaagcggcgtcgttttgactggga

SEQ ID NO: 29284 - DNA, 333 bp, Glycine max
tacagacagagttggagagttagctaagaagcatggactgaagcttcacattgatggggcccgtatttttaacgcatcagttgcacttggtgttccagtggataggcttgtccaggctgctgattcagtttccgtttgcctatctaaaggtataggtgctccagttggatctgttattgttggttccaagaattttattgccaaggctagacgactccggaaaaccttaggaggtggaatgagacagattggccttctttgtgccgctgtacttggttgtctgcatgaaaatgtttggaagctggaaagtgatcacaagaaagctagactttt

SEQ ID NO: 29285 - DNA, 247 bp, Glycine max
gagacacgtgggtggatagcaacttagaacacaagtgaactcaaagtggaacaacccaagcttgtttcacagctcaacaacaatggcttctatctcatgcatcacccaccaccccatcacttccaagctcaataatgccttctcttcaccccacgtctctgcctcaaacttggcctcacggtttctgggcaccagaaaaagagttgggttgcatagcctcacctctagaataattggaccctttaat

SEQ ID NO: 29286 - DNA, 439 bp, Glycine max
ggaggataatcaataaacttaaacttatgttatggcattctaactctgaacgatgaaatgaaatggagttccaagataagcgtttatctctgagatcgagcttgacgttcagcgagacgctgtgcgcagtgttcattccgttcataggaatagtcgaagctttggttttcacattcactagttgcttcgatttccaatctcccaggaataagaagaaacattcttctaccttcgacgacattctcaccctcgccgaggattctccatttagtattaatgaaatcgaggccttgcgtgagttgttcaagaagttgagtagttctatcattgatgatggcctcatccacaaggaagaactcacattggcactgttgaagaccaccaccggggagaatcttttccttgacaaggtgtttgatgtctttgatgaaaaaagaaa

SEQ ID NO: 29287 - DNA, 428 bp, Glycine max
  modified_base (403)..(403): a, c, g, t, unknown, or other
ggatactagaacctgcagatcgtgatgctgttttggccaatgttgccatcaagaatggcaaaaactacaatgtcattgtggaaatcgccactatcctctccccggaagagcttttggccgtgagacgtgcttatctcaaccgctacaagcactccttggaagaagatgttgcagctcatacctctggccatctacgccagcttttagtggggttggtgacctcatataggtatgttggtgatgagatcaatccaaaattggcacaaactgaggctgaaattcttcatgatgctgtgaaagagaagaagggtagctatgaagagaccattaaggtcttgaccacaaagagcaagacccaacttgttgcaactttcaaccgctacagagagatccatggcacttncatctctaagaaactggtggatgaa

SEQ ID NO: 29288 - DNA, 392 bp, Glycine max
gacttcaaagtggagaaaaacacacacggttgggtcattctctctcttttctttgtcctcaaaaagttgaaaaagaataaagggggaacaatcgagtgaagttgttgctcttcaatagtaaacttacctatggaagagggaagggttgtgagtgagtacacaaaagatggaactgtggatcttaaagggaaacccattctcaaatccaaaagtggtggttggaaagcatgctcctttgttgttggtatctctctctctcactataaattttatatggtcattttcatcttggtttggacattaatttcaaaagcaatttcccaaaacattggaagcttcatgatggtttgttaacaaaaatcttaatttcctctgatcgaaagacattggtc

SEQ ID NO: 29289 - DNA, 354 bp, Glycine max
ggaggaagccacatagagacacaatacagagtgagttgttgctccttcgtcacaactctctgccaacatgggtatcttcagagattctatgcacaagaggcgtgccactggtggcaagaagaatgcctggaggaaaaagagaaagtatgagcttggtcgccagcctgctaacactaagctgtcaagcaacaagacagtcaggaggatccgtgttagaggtggaaatgtgaaatggagggcattgagattggatactggaaattactcctggggaagtgaagctgtgacttcgaagactcgtgtactagatgtggtttacaatgcctcaaacaatgagcttgtgcgtactcagac

SEQ ID NO: 29290 - DNA, 262 bp, Glycine max
ggattgagaaggaatgagaatggggggaggtttttgtctgatgatgttggtaggtctagcaatctatggcgagggcaatggcaatcttctcgaacgaattatgggaggaatggagcggatggtgatggcagaatgaggaagaatgtgaatgggataatgtttttgtccaataatgttgatcggtctagcggtggagaacagtcttctcctttgaattatggcggggatggaatggatggtgatggtagattgaggaggaatg

SEQ ID NO: 29291 - DNA, 435 bp, Glycine max
ggccttaagaatggtgatattgaagttacttgggctgatgggatggtatcaatggttggaccccaagcaatctatgtggttggtcgagatgacgatgatgaatcaattgctgctgggagtgaaataagtgatgctgcaagctgggaaactgttaatgacgatgaaatggaagtccttgaggattccagagaggatattgagagggaaaattcaagcagtgttacttctgaggcagaagaaagtggatagaatgattttggtaggactgcagctctgtctgttcccctagcatcatttcgatttggcactagacttgccagtggaatattcttaagaggctcaatgaacttggattctatttccttggagataaaagcttaacgtgaacatccatcacctgtagttaatgatgagtctacttcacagaaacatatt

SEQ ID NO: 29292 - DNA, 233 bp, Glycine max
gggggaattgactagtgcggcgcgctcctattatcaccgtagacggcggatgtggcggtggtggtgtagacacggcgtgactgcgatctcttgagataaatgttggttgaaagaggaagaagaagaagagttgtattggagaatgagccaaccaacggtgatacttgccactgcgagctatgatcacactattcgattttgggaggccaagagtggccggtgctaccgcacca

SEQ ID NO: 29293 - DNA, 373 bp, Glycine max
gaaagaagagaaaataataatatgaataacaacccacaaaacttgggtcttgcaaattaagttcattttcctccctttcactctcgtagacatcacaaaccttccctccattcatcccacgcatggctgccatgaactctagcgtattggcctgtagctatgccatatcaggtgcagcgtgttcggagctcaatgggaaggtcacttccgtggcctatgttgcatgctctggctacaagttgccattgatcaaagctgaggccagagttcctaaagccaaagaatctgaaggaggaaggagatgtgcccttgttctcttggcagctacccttttcacctctgcagcttgcaattcttctggcaatgctgggat

SEQ ID NO: 29294 - DNA, 375 bp, Glycine max
gggcaaacaagtagtggaaagacatacacgatggttggaataactgaatacgctgttgcagatatttttgactatatagagaggcatgaagaaagagcatttatattgaagttctcagcaattgaaatttacaatgaagttgttagagacctcctcagcactgacaacaacactccacttagactacgtgatgatcctgagaaagggcccattttagagaaactcacagaggagactctacgggactgggagcatttaaaagagcttgtagcgcttcagtgaagcttagagacaggtgggagagacatacctaaatgaaaagagttctagatctcaccaaatcatcagattgacaatggagaggtcttggcagga

SEQ ID NO: 29295 - DNA, 354 bp, Glycine max
gagcgagggaagggaagcatctttagctccaatggcggatacctcaggtcgatccagggacctcgacaagctccttctgcgccctggcaatctcgtcggtcccaggttcgaaccaggcgctgagttgcgagatgaccttcaggccttcagcaaagtgttggtggtaggggccggtggcttaagttgagagttgttgaaggatttagccctatttgggttccgaaaccttgaggtcattgatatggatcgcatagaggtgtactaatctcaaccgtcaattcttgtttagactgtgaaattgtgtgatacccaaatccgatgtagctgacaagcgtgtcatggagagaattactg

SEQ ID NO: 29296 - DNA, 400 bp, Glycine max
ggcagatgtgaatgtgagagacacccatgaatgacagaatgaaatgaactgagtaacaccaacgctgctttcttcattctttcattcattcgaatgtgttcttttgcgattgaatttgagggaacaataatcgattttcgctttctgggcacccctgaattcccctgcatcgctgtgaaagtagttcagttcgaacaacgaaaacgatgtcggctcgattgatgaagaacgttctgaacgagcagcatcacctttccgaaacacgtgagcgaagaagacgaggaagaatagaacgattctgagcccatcactcgttcctgcatcaaccccttcgacctcctaaacgacaacgattctgagcccgaggaacaaggagatgaagtgatggccaccaatgaaa

SEQ ID NO: 29297 - DNA, 424 bp, Glycine max
  modified_base (411)..(411): a, c, g, t, unknown, or other
aggaacagcaatgaataagaggcagagaagagcacgaagaatgctttcgtgaaggtgagcatggatggtgcaccgtatctacgaaaggtggacataaagttgtacaagagctaccaggagctgtcagatgcgctggctaagatgttcagttccttcacgattgaaaagtgtgggtcccaagggatgaaggattttatgaatgagaccaatggctctgactatgtacccacatatgaagacaaggacggatactggatgctcgtcggtgatgtgccctgggagatgttcgttggatcatgcaagcgtcttcgcataatgaaaggctccgaggcaatcgggcttgcgccaagagccgtggaaaagtgcaagaacagaagctgaagaagtgatttcatctgcgtcacaatgaancaaattgactcga

SEQ ID NO: 29298 - DNA, 164 bp, Glycine max
aatacgcgcggccgcttaactctattgattttgtttccttaacacgagcttgatgcatcgcgtcgatatgaacgcaccttcctcttggctcactgaaagatgggcattaaacgggcggtcttcggcgctgggatgagctcatgattccaaaaatgcactaccct

SEQ ID NO: 29299 - DNA, 333 bp, Glycine max
ggcagcataaagtagcaaagtcttgcaggccacaatgcaaaactttgcagaatctcatcaactttcagttatgtgttcttcttattcatctaatgttgatgtctttgacactggcaagtacaccgccaagctgctaagggttgaatctgaatcagaatcatatacacacaacaacaattttccaccaccaccaaagtctctcttgattgccactcctcttgaaggtggagatttccctcttctgccgcttctgcatggctatcttctttacaattcattttactcccagctaataccacatggtgcttctcatgggttcattggcattgcccc

SEQ ID NO: 29300 - DNA, 289 bp, Glycine max
gattatcaatggatgctagaattgaaaatgtccatgctggaagctcagcagatggtatgacaaggggtcttggttctgagaaaaaacgacatagtgtgtctggttttactcctcaacatgctaattcacaagccactgaaaagattaggatgagcgagaggcagattttgggtataaaccgtacaaaaattgaagagatatggttagaggtgcttgagaggatacaaattactggtctgaaagagtttttgtttaaagaaggcaagctgatctctgttagttttggggc

SEQ ID NO: 29301 - DNA, 270 bp, Glycine max
cacaatgcattgaactaaggatttgatatcccatttcattcttggtctagcagtattagggatgttttttgtacttggggggaatagtatataaaatttacagatcttgtgtgtcggtggttacctagtttacagcaagatctttgattccctaatacttgttctgtatattgtattagttaaccatagttctgctcctgttgatgctatgctgtatgtaaatcacgaccacttgtactgctttcactattatttataatatatatctag

SEQ ID NO: 29302 - DNA, 395 bp, Glycine max
ggcagttcaattgatcaactcagatttcagggacctaagtctagctgctaatagactcgcccatcatgccatcaaacttggtggcattggctttggagcctcttttttcggattgtttgctgccattgctgctatttatctgttgattttggatcgtacaaactggaaaacaaatattctcacagcactactcattccatacattttcttcagcttgccttcattaattttcgacgtcttcaggggagagcttggaaaatggattgctgcagttgctgttgtattacgccttttccttccaagacacttccctgattggctggaattgcctggtgctctgattcttcttatcgttgtagctccttctctaattgcaagcacctttagagacaaca

SEQ ID NO: 29303 - DNA, 408 bp, Glycine max
ggataataataaaaacactcgtgccgcaccttcgtcttgcccaatgcttctttccacacgcatctcggaagcccttctcttcatcacatagatactttcgctatcgcaccaagtaacccttattattccaatccaccctcgccactccttcgatccgaatcatcttttccgcccacacacaagttgggtttttttgatataattgataatgggtgatagcagtgttccatctgggtctccaaatgcaaaatcagatcttgttgacagagacttggcggtttccaacaacgcgtcgtcgttggaaaccattgtgcaaagtttccaagattcaatgtctcttggtaagagacacaagttctgggaaactcagcctgtggggcaatacaaagatgttggggactcaagttt

SEQ ID NO: 29304 - DNA, 393 bp, Glycine max
ggagcctagtagtaatagtgaactggagtgatgctcaagtgtgttgtgtgtcagtgttttagggaccaatggtggagagtgagttttctgagttaagatataagatatatgctatctaatgcctagtgggatataggaaaggacctcaaatctgctatctttcgttcacatacgcatcatattcttttaattgttagttctgagttctgaccaaagttgttgatttgagtgtttttagcatatttggggtgtctgcaaacaccgcaggaattttgctttttctattgaattagattcctctgggaattcaattctgattcttccttagttttcggctttctggctttctttttttccttctatttatattttggggtggttttctggtgagtc

SEQ ID NO: 29305 - DNA, 403 bp, Glycine max
gacaatcaatcttctttatccactctctcttaattaaattaaaacaaaaaatgtgcgctgccatatccgaagtggaacaagaagagttgctcgaaaaattggaggtgttcaagatcaaaggcagggacaagcatggccgcaagatccttcgcattatcgccaaattcttcccaggtagattgattaattaattaattaaatccctaattcctttttttttatgtgcatgaattttttaaatcttcggtaattgtttgaattgaggacagcacggttggtgagtgttgaggttctgaaaaagtacctggaggagagggttttcccgaagctgatggggaagaggaaattcgcggtgctgtacgtgcacaccggcgtccagaggagcgagaattttcccggaatc

SEQ ID NO: 29306 - DNA, 398 bp, Glycine max
gagagaaagagagagaaagatgtcgaagcgtggtcgtggtggttcggcggggaacacgttccgcatgtcgctgggtcttccagtggcggcgacggtgaactgcgccgacaacacgggggcgaagaacctctacatcatttcggtgaaagggatcaaaggccgtttgaaccgtcttccctcggcctgcgttggcgacatggtgatggccaccgtgaagaatggaaaacccgatctgaggaagaaggtcttgccagctgtcatcgttcgccagcgcatgccatggcgccgaaaggacggcgtctacatgtacttcgaagataatgctggtgttattgtcaatcccaacggagaaatgaaaggttctgctatcactggtcccattggaaaagagtgtgctg

SEQ ID NO: 29307 - DNA, 392 bp, Glycine max
gagagcgagaaatattatagtagctctgcgtttttggggtatcattattcaaccacccattttctctcttcttcttcttccattgagaaaattctctttcatcgtgtgtgatcggtgagatgtacgtagcttccatgcgcaagtctttcaaggactccttgaaagtccttgaagctgatatccagcacgccaataccctggcttcagattttccaagggagtatgatggtgcatgccttcagatgagaatgtcatacagtccagctgcacacctgtttcctttcttggtgcaatggacagattgtcatcttgctggagcccttggactgttaagaatcctaatttacaaggtctatgtggatgggacaaccaccatgtctacacatgaaaga

SEQ ID NO: 29308 - DNA, 417 bp, Glycine max
  modified_base (382)..(382): a, c, g, t, unknown, or other
  modified_base (385)..(385): a, c, g, t, unknown, or other
agacgacagaaggggagagaaagacaaataaaagaagctgcatttgcagagacgcattcgcgtttgtctgagagagagaattggaaggttgcgacgagtgatgatatacatattgtggcggtagtgaaatcgaggaaaaagaggtagcaatcgtgagttgcaatgagtagcgaaaagtctccttcatcagcttctgcttcagcttcttcttcgagtagctacgagttgagcaaaggcatcaatggcctcgacaaggttattcttcgcgacccacgtggtagctccgctgaggtgtacttgtacggtgctcacgtgacttcatggaagaatgaacaggccgaggaattgctttttctcagtagtaaggctatatttaagcctncanagcccaatcgtggagggatcccaatatgtttt

SEQ ID NO: 29309 - DNA, 243 bp, Glycine max
ggaagatgaaagggaagaagaacaccatgaccaaaaacgacgttgaagacgacggagctccggttccttcaccaacagtatccgattccgactctgattacgaggactcttcagcagatgacgacgacaaatcttctgactcgctggattctcaatctgaatcggaattagaagatgcttcacctgagaatggtggctccggcgatgtagaatctgcagaagatgaggacactgtcaatgatg

SEQ ID NO: 29310 - DNA, 429 bp, Glycine max
  modified_base (399)..(399): a, c, g, t, unknown, or other
tggggcatcgaacagagagagagagaatggcagccctgggtgggaatcatgatgtgccaggaacccagaccagcgttaaaatcgttcctctacctcgctttgctgttgaagaacacaacaaaaaacagaatgcccttttggagtttgaaaaggtggtaactgcgaaacagcaagtggtttctggtaccttgtacaccatcactttggaggcaaaagatggtgggcaaaagaaggtttatgaagccaaagtttgggagaagtcatggttgaacttcaaggaggtgcaagagttcaagcttgttggagatgcacctgcatagtctagtgcttaattaggttgctgaagagtgaagaatgagacagcctggttcgaaggggaaaagcctaaggatatatcanaggatcctatatgtataaaataaatgttgc

SEQ ID NO: 29311 - DNA, 402 bp, Glycine max
ggcagcataaagtagcaaagtcttgcaggccacaatgcagggctttgcagaatctcatcaactttcagttatgtgttcttcttattcatctaatgttgatgtctttgacactggcaagtacaccgccaagctgctaagggttgaatctgaatcagaatcatatacacacaacaacaattttccaccaccaccaaagtctttcttgattgccactcctcttgaaagtggaaatttccctcttctggcgcttctgcatggctatcttctttacaattcattttactcccagctaatacaacatgttgcttctcatggcttcattgtcattgcccctcacgtgtacacagtggctggaccagatacaagtgatgagattcattctgcagctgcaataacaaactg

SEQ ID NO: 29312 - DNA, 347 bp, Glycine max
gggatgactatgctcatgggaaaggagtttatgtttctgatgatgcattggtcaggtatgaaggtgaatggtttcaaaacgatgtggagggtcatggtgtagttgaagtcgatatacctgttatagaacctgctcctgggtccaagcttgaagcaaagatgcgagctcaaggaaagataatagcaagggattttctgtccccataagacagagaatggcttgagaaggatattgaagatatgtattatcttgcagatgggaactatgaaatccccttttatgagaatgaggaatgggttacgcaatttggaagaaagccggagaaaggtcgctatcgttatgctggc

SEQ ID NO: 29313 - DNA, 429 bp, Glycine max
ggatgcagagaaggtactagtttagtgtcacgaaaataagccgcagacgcaaacgtgaaaacacagacaagacgcatacgtccgtctcaacgtgtttgagattataaagacttagtggaagggtaagctgaagttgaagagttgaggggaaaacaagcagtgaaggaggttgaggtactcaataaagttttgatttgtttgaattggggggcttgttgccaatgttggatacagttgtatgtgctagaaacagtcaacagtcgcttcataaggtgaagttgacattctagtagtggaaagggccagagtcgagatgattatatatgtttgatttgcctctacacactggcaatccttaagtctgacagatgggcttttataatgaagaagagaagactgaagactacctcttcaagattgttttaattg

SEQ ID NO: 29314 - DNA, 435 bp, Glycine max
gacggcgatgatgatgcaaatcaacatcacctccaccacctcaatcgtcacggcgttctcttcggatcattccccgaatgttctaccttgagccatgtccaacctcgttcagattcgcgtcgccgccgacgctagcgatggcttcgactctccggcgaagcagaaagcagccaaccgcagctcctacagcaatcgcccctttctctccctccgccgcgccaaacagttcctcggcgccgccaagttcaagctcttcttagttctttttgctctctccatcgtcgtttttgtctcctccagactcagttcgtggatgggatggaaccctcaccactcctcttcggtttcctccacttcaaggggtggctatactgtgcttataaacacttggaggcataaatctcttctgaaacaaactgttgctcattatgcatc

SEQ ID NO: 29315 - DNA, 422 bp, Glycine max
  modified_base (387)..(387): a, c, g, t, unknown, or other
gatgggagaatcttattgtcaaggagttttgatggttcattgaaggtttgggatctgcgcaaaacaaaagaaccgttaaaagtatttgaggatctgccaaatcactatgcacaaacaaatattgccttcagtcctgatgagcgactctttttgactggaacatctgtggaaagggagagcatgacaggaggtttattgtgcttctttgatagagtaaatcttgagcttgtttcaaaagttggcatatcacccacttgtagtgttgttcagtgttcttggcatcccaaactgaatcacatctttgcaactactggtgataaaagccaaggtgggactcacatactatatgatccaaccgtaagtgaaagaggagctctcgtatgtgtngcacgtgcaccaaagaaaaaatcaattgatgactt

SEQ ID NO: 29316 - DNA, 400 bp, Glycine max
  modified_base (232)..(232): a, c, g, t, unknown, or other
  modified_base (237)..(237): a, c, g, t, unknown, or other
caaggacacgaggtggatatatatgagtcaaggccttttattggtggcaaagttggttcttttgttgacaaaggtgggaatcacattgaaatgggattgcatgttttctttggttgctacaacaatcttttccgattgatgaagaaggtgggtgcggataacaatctacttgtaaaggatcacactcacacttttgttaacaaagggggtcaaattggagaactagattttngcttnccaattggggcaccaatacacgggataagggcgtttttgtccacaaatcagcttaatacttatgataaggctagaaatgcttgggctcttgcactcagtccagttgtcaaagctcttgttgatccagatggtgcactgagggacataaagaaattggatagta

SEQ ID NO: 29317 - DNA, 349 bp, Glycine max
cccacgcgtccggcgagaagacgacagatagggggggaaggaagagagagaccaaggcccttagtgcttttcattatttacgaaaaaccaacagcgagggtggtttttgtttggtccaggctggcccagggattgattaaagttgaaaggcttccggtgaagagaaccgagttaagcggcgaatccaaacgcagaatcggcggcagaaattggcaccggaagcacgttaataccggtgaaccaaacacaaaattccatccaccacttctcttttcaatccccaactcaaatctgggaagaaaatctcaatttctaaattgtaattcttagcactactgctagtagtagt

SEQ ID NO: 29318 - DNA, 426 bp, Glycine max
gacagtattcaagatcggggaatcaatcaggtttatataattggaggagatggaactcagaagggtgcatctgcaatttttgaggaagtcagaaggcgtggtctcaaagtttcagttgtaggtatccccaaaaccatagataatgatatcccggttattgataagtcctttggctttgacactgctgttgaggaggctcaactagctataaatgcagcacatgttgaagctgaaagtgttgaaaatggcataggtgttgtcaagttgatgggtagaaacagcggatttattgcaatgtatgctacacttgcaagtcgagacgtggactgttgcttaattccagagtcacccttttaccttgaacgtcctggtggactctatgaatatatagagaaaagcctcacagaaaatgggcacatggttatc

SEQ ID NO: 29319 - DNA, 288 bp, Glycine max
cccacgcgtccgctaactcgcccgctgaccttgttaaaaattcaaaataacacggggctggtttttaagggcttgagctcctcttcctaaaaccatttttccatcaaataccaattccttattcctgctataactccaaaatccctttttttacccctacccctgattttcatttctcttctactatgaacagctgtttaatttgagaacatttctttacgtttctccatcttcttgtaataaaacaatccttttgctctattataccctcaacatacctcccccttc

SEQ ID NO: 29320 - DNA, 333 bp, Glycine max
gtctgaaagggaaaaaaaaaaaaatcgcatcagattctggataaaaggttacctctttcaattttatccctggttgtgagcttaattcaatttctgctcacacataatggcttgcacgctcgctgattcattactcctattcaagggttcttatcataaaccagttctgaggagagacattgctgccctgtactccccgggtttatttagactaaacagcaatgggcttatacagaaaaggttcaagcgtgaaacgaattttgttactacgaatacggttactgtcatacatgccgtggcaattccagtacaaccagctccggtggaaagtgc

SEQ ID NO: 29321 - DNA, 113 bp, Glycine max
gggggggaacggaatcgcccatccaatcgaaaccctagtgggtgactgcgaggcgcactggaatcatccaccctatgaatctatgtgcactgaagaagtggactaaatgacca

SEQ ID NO: 29322 - DNA, 406 bp, Glycine max
gacacgtgcgagtgatcaaatattaagaagaggttatggatgtttttaaggtttttcacatgcttgtcttaaaacaattttccagcaaaatccaaatccttcgttctggtaatggcacagaatacatgtctaaaagcatgacacagtatttaaattctcatgtatcaagaggggatgttccttttgtttgatttttcttcttcttgccaaactatggcagaacatcattcttcttcgcatatattgccttcaggagctacacgttttcctggcgtgccttttgcagtagctacaggttccactagtgtggctgttggaatagaatttgagtctaatcctaatcaatgattgagctctgttgtactaaatgagttcaattaccctacttggtcaaaagccataactc

SEQ ID NO: 29323 - DNA, 378 bp, Glycine max
gacggacgagggtttcgtttcgggtttgacgttgttcacggtcactttctgcgcttcactcactcccttcgtgcggttttctttctttgtcgaactcgtgcgaaaatgcgtgagattcttcacatacagggagggcaatgcggaaaccacatcggagcgaacttctgggaggtggtgtgcgcggagcacggcatcgattccacggggaggtaccagggggacaacgagttgcaactcgagcgagtcaacgtctattacaatgaagcgagttgcggaaggttcgtgccgagggcggtgctcatggatctagagccagggaccatggacagcgtcagatctggtccctacggtcagattttccgacctgataacttcgtc

SEQ ID NO: 29324 - DNA, 378 bp, Glycine max
ggagtgagtgagagaaagaagagaaggagttgaagtggttgttgtattgtagtagtgtgtaaagtcttggtgatggatagacacaaatgcaagctttgttcaaggtctttcagcaatggcagagcccttggtgggcacatgaaggctcaccttgcttctctccctctccctctccctccaaagcttcactcttgcttctcttcctctgactcagaacaagaacaatctttaagggagaatcctaagaaaaccttgaggattctggatcctgaagacagagagagcgagacagagtctaataagaacccgactcgtcaacgatccaagcgcaactggaaatctaccatgcccaagctcagcctcggacaccccgaagcc

SEQ ID NO: 29325 - DNA, 416 bp, Glycine max; identical to SEQ ID NO: 29144

SEQ ID NO: 29326 - DNA, 423 bp, Glycine max
  modified_base (368)..(368): a, c, g, t, unknown, or other
gggttcaaagtctagtaataaaaagagaaaagctttctcagataagccaacttcaaggccaatgaattcccaaaagatgagtgaatttagtactacgcctatggacgatgaattggatgttgttgatccagtgggtcagaaacccaagagacccaagaggataaagaagaatgtgaatgaaaagtttgaagatgcttttactgggattgctgccctgatcccagagcagacccaatttccacctccaccaagcgattttagtgccgggggttctaaagcagaatcaggccaagacaactgaagacatagtgattcttaaccactacaaaaactttggagttactattctcagccctatggattgactnttttgtggagactgctaagttggctctctgttttataacagtttctagttcccta

SEQ ID NO: 29327 - DNA, 378 bp, Glycine max; identical to SEQ ID NO: 29266

SEQ ID NO: 29328 - DNA, 191 bp, Glycine max
ggtttttgcaaagtcacaaagagttggggtgtctgttatatcggaataatgtctcacgtctttgcaaaagatactcacatttgcgagctgtgttcaaggccatgcaacggtggcagagcccttggtgggcacatacaacgctcaccttgcttatcttcctgttactctaccttcaaagcttaactcttgct

SEQ ID NO: 29329 - DNA, 425 bp, Glycine max
  modified_base (410)..(410): a, c, g, t, unknown, or other
gaacacactcatccaaacaaccttctttctttttctgtgagcctttctttcaggttcttaacttgatcagtgtgcagtgtccaaatcataagggtagctgcaaattgcaatggctaagcatgatgttgagggtggttccttctctgcaaaggactaccatgatcctcctccagcaccgttgattgatgctgaggaactcacacagtggtccttctacagggctttgattgctgagttcattgccacaatgctcttcctttacatcacagtgctcactgtgattggttacaagagccagagtgatgtaaaggctgggggtgatgtgtgtgggggagttggcattcttggcgttgcttgggcctttggtggcatgatcttcattctggtgtactgcactgctggaatctcanggggtcacataaacc

SEQ ID NO: 29330 - DNA, 416 bp, Glycine max
gggatttccaaagtttttaatagaggggaagtctcaaaaaatcgaagaattacagacgaatatgcaaaaaaaactgaattgtgtgaatcgaaaactaaacattgctattgtaaaagttgcaaatgcttataaacaccctaatattattgcagaatttatagctggacaattaaagaatagagtttcgtttcgtaaagcaatgaaaaaagctattgaattaactgaacaggcgggtacaaaaggagttcaagtacaaattgcaggacgtatcgacggaaaagaaattgcacgtgttgaatggatcagagaaggtagagttcctctacaaaccattcgagcgaaaatcgattattgttgctatacagttcgaactatttatgggggtttagggatcaaagtttggaaattttctaaat

SEQ ID NO: 29331 - DNA, 319 bp, Glycine max
gaagatggagatgtatcagatctggagcaggagaatagcgttgggagcgttcgcgtttgttctgcttttcctatcggcctcagcagacgacgtcgttgtgctctctgaagataacttcgagaaggaagttggtcaggacagaggagctctcgttgagttctatgctccttggtgtggacactgcataaagcttgctccagaatatgatatgcttggtagcagcttcaagaaagccatatctgttttaatcctcaaggatgactgtgatgagcacatgagtctgtgcagcaaatatggagtctctgggtacccaacaatt

SEQ ID NO: 29332 - DNA, 395 bp, Glycine max
  modified_base (341)..(341): a, c, g, t, unknown, or other
  modified_base (373)..(373): a, c, g, t, unknown, or other
ggtgcaatgaaaccatctatatttataggcatttatgagtgacagtagaaccacgttttgcttcctaatgtttattattattatacttatattgtaccattcctcttgagcctagtagtaatagtgaactggagtgatgctcaagtgtgttgtgtgtcagtgttttagggaccaatggtggagagtgagttttctgagttaagatataagatatatgctatctaatgcctagtgggatataggaaaggacctcaaatctgctatctttcgttcacatacgcatcatattcttttaatcgttagttctgagttctgaccaaagatgttgatttgagtgtttntagcatatttggggtgtctgcaaacaccgcangaattttgctttttctattgaa

SEQ ID NO: 29333 - DNA, 313 bp, Glycine max
gggagctgtagcagtaccagtaccagcactaccagctcaacaagcaacagcaacagtggtgctagcagcagtgtatttgcaagcttgtttgcctcatcatcagcatccgcaactgcaagcctccactctcaaacaccagcattcactgacctaattagggccatggggcatccggatcatccagcagacctctcaaggccttcatcttcagagcccatttctctgtgcccagccaccaatcatggctcatccatttttggaacgggaaggcaggaacgccgtcagtatgccccaccgccacagccagccatgt

SEQ ID NO: 29334 - DNA, 406 bp, Glycine max
gggctttgaggttggagtgtttttccaagaatggaactgcgggtatctacgtgaggcccattagtggcataaacattctcgctgatcttgacacaatgaagattgttgagtaccatgataacgttgttgagcctgttcctaaggcggagaacaccgaataccgggcttcgcatttgaagccaccgttcagtccacggcttcattcttttgcctcgcatcaacccgaaggacccgggttcactatcaaaagacatagtataagctgggccaattggaagttccacatatgttatgatgtgcgagctggtgtgataatttcaactgcatcaatttacgaccctgaagtgcataagtcacgtcaagtattatacagagggtacatttctgaattatttgtgccatatca

SEQ ID NO: 29335 - DNA, 402 bp, Glycine max
  modified_base (333)..(333): a, c, g, t, unknown, or other
ggagcaatcgcgtgaattttcaacgggattttgcagagcttccgcgttgaaaccatccaaccctcttagcctcatattcgttgtctatacttccctccttccttcgtgtaattacatttttttcatcagcagttccaggaccaaattgatacacaagatcactgtttttttagagagagattgagagaggatgtttggttcaaagaaaactcctctgagagatgctaaacctagttctgttggccatgcccataacccctttgattctgatgaagagacacacgataaaaagtataattcctctaagaagactttgaccaacaccaacccctntgatgatgaagttgatgttgatgccactggccactcctcgtcgtcttcttatggcccttcgtcttccca

SEQ ID NO: 29336 - DNA, 425 bp, Glycine max
cactgttgatccactatgctggtccaatgaaaacctctgaagatactccaacaaatggatctactgtgccccctggcagacgccttgttgttccactgcagatttgtgttttgcagggtttgtcttttgtgaaggctcagcttctttcaatggagtttcctgctcatgtcggtgaaactcttccgaagttggatgacttaaataacaagtctactgatgttgaatcagaaacaaaaatggacagattggtgaaaatagatcctttcagaggaagttggggactgcgattccttgaacttgagttatctaatccaactgatgtcgtgtttgaaatcaatgtctctgtcaaactggagaactctagcaacgaggacaatcattttgctgatcagggtgctacagaatatgtctatcctaaaacaaga

SEQ ID NO: 29337 - DNA, 358 bp, Glycine max
gatattattggacatattgttgaatttagctctgatcagcatggaagtcgatttatacagcagaagttggaaagttgtagtggcgaagagaaggcattggtgtttaaagaggttcttccacatgcttctaaattaatgactgatgtatttggtaactacgtaatacagaagttttttgagtatggaagctcggagcagaggagggaacttgcagatcgacttgttggccagatactgcctttgagtttgcagatgtatggctgtcgtgtaatccaaaaggcacttgtggttattgagctcgaacagaaagctcagcttggtcatgagctagattgaaatgttatgagatgtgttcgtg

SEQ ID NO: 29338 - DNA, 422 bp, Glycine max
cccacgcgtccgcgccggaaggggttggtgaatacattcagcaacatctatacagggggggagatgcttatactgaatcagtatcttgaaaattgcatctgaattctgtacaaaagacgttgcttacgggaatgtgcatctttggcagtactgattctgacatacttgttattaaccagtgctcaggtgcgtctatgcaagcactatgggagctgtctcagaagcatgctgaaattaccataaaaaatcatggggaagctaacattaggtatgcttggcttgcttcctatataggagaactatctacaatgatgaactatggacttagtcattatggactatctggatcatagtgcacatatggcagtggtgttcatcttgctgatgacacttgccgtgatgccagtgttcgttaatgtgat

SEQ ID NO: 29339 - DNA, 383 bp, Glycine max
ggctttttaggttattttcttaagtaaaaagaaggaaataaataattctcgtagctttgttgctcttataaattctattctggttgacgcttctctcaccatccccatttcgcgttggtgcaaagcatccttcgtttcaatttctctctctcagcgctttctgcaatcgaacctttcatctccaaagggatccacaggccgaaggagaaatggggctgacattcacaaagcttttcagtcggcttttcgcgaagaaggaaatgcgaattctgatggttggtcttgatgctgctggtaagaccactatcctgtacaagctcatgctcggagagatcgttaccacaattcctaccatcgggttcaatgttgagactgtggaatac

SEQ ID NO: 29340 - DNA, 382 bp, Glycine max
atccggcggaattgtcactatcttcattggtatgcttatcgggtgctttgcaagccagcgtggtggcaatagtagcgactcgtcattctgggcttgtggcatgggccttaggttgggacttcaggctctatggccctctctacacggtcagtactccattccaatatttcttgtttcctggaccccaaaacctatttttgtttcatcttcaaaatctgattttcaaagcaaggtaacacacataataaataagatgaatttagtcggcacaccaaattaatttgttttctctcaatcccagcctattgaatgcaaaaggttacgaggcaagtattgtaactaaaaaagacaaattgttcactccaaaagtaaattcgttggt

SEQ ID NO: 29341 - DNA, 265 bp, Glycine max
gatgcggaatggggaggtccagttcatgatgacaagatgctgtttgaacttttagttttgtgcggtgctcaacttgtatctgattggacctcaaccttgaagaaacgcctagatttgagggctgtattttcagaattcgatgcataaaccgtgggtaacttgactgattagcatatgatgtctattagttcggaatatggcatcgacataagcagagtacgaggagttgctgataatgctcaccaaattttatatattaagaaag

SEQ ID NO: 29342 - DNA, 407 bp, Glycine max
ggaaagagaagcaaggagaaagagaagggttagaaggcgaagaagcatggcttcactcaagaagaagaaaccctattacccgcttccgttaattcctatctattactacttcttattcaaagggtgatatgatcttcttcttccaagagtctcatgcatgctactttcttctctcttctcggggaattgaagcgttgtggtccgattgtttgctacatcaagcaaattaacctgtatactgggttatatatcttcaccttgcacctttctctctctctctctatctctctctctctatatatatatatggggtgaatctcttactttctttatcttttcactttttttcagttttggcttgatttaattacgtgattaaaatttacatatatggatttgaatatata

SEQ ID NO: 29343 - DNA, 376 bp, Glycine max
  modified_base (358)..(358): a, c, g, t, unknown, or other
ggacaaagaactcacgagtgattttgagaggctggttcatctttggacacttgattctgctgaacgtgatgcatttttggcaaacgaggcgactaaaaaatggacttcaagcaatcaggttctggtggaaatagtctgcactaggtcctctgaacaattgtttgctgcgaggaaggcttaccatgttctttataagaagtctctggaggaggatgttgctcatcacacaacaggagacttccgtaagctcatactacctctggttagttcttatcgatatgaaggagatgaggtcaacttgaccctggcaaaaactgaggcaaaattgctgcatgagaagatttcaaacaaggcttantatgatgacgacttcatc

SEQ ID NO: 29344 - DNA, 421 bp, Glycine max
gataggcatgatatcttgtttgcaacaccctaatcttgtgaaacttcatggattttgcattgaaggggatcaattgatattggtgtatgagtacatggaaaataatagcctggctcatgctttattcagctcaaaagatcaacttaaacttgattgggcaacaaggcttaggatctgtattggcatagcaaaaggtcttgcatttctacacgaagaatcaagactcaagatttttcatcgagacatcaaagctactaatgtgttactggatgggaatttaaaccctaaaatatctgactttgggctggctaggcttgatgaagagaaaacccatgtcaccacccgaatcgctgggacaataagatatatggcaccagaatatgcattatggggttacttgtcttacaaagctgatgtttac

SEQ ID NO: 29345 - DNA, 358 bp, Glycine max
gacggcagatcagatccattcttcaacaaatccccttttcagtttcagtttttctcgaggatcccgtgaaacgacatggcgatggtggaccagcctctgtatccgattgccgttttgatcgacgagttgaagaatgaggacattcagctgcgcctcaactcgatccgaaggctctccacgatcgcgcgcgcgctcggcgaggaccgcacgcggaaggagctgattccgttcctcagcgagaacaacgacgatgacgacgaattgctcctcgcaatggccgaggaattaggtgtcttcattccctacgtctgaggcgttgagcacgccaacgtgctttttttcttccttggagacgctc

SEQ ID NO: 29346 - DNA, 421 bp, Glycine max
tgccttttcaagtatcagtaagaatagaagggaggaggagtctttcatatttaaaaatgtaagcataaaatgtactgaaaggctgattgtttctcagtatgttctttatgacaggtcaaatgctatatgaagcaattgctatctggccttgagcattgccacagcagaggtgttttgcaccgtgatattaagggttcaaatctgcttattgacaatgaaggaatacttaaaattgcagattttggactggcaactttctttgatcctaagcaaaagcatcccatgactagtagagtcgtgaccctttggtaccgtccacctgagcttcttctggggtctacgtcttatggtgttggtgttgacctttggagtgttggctgcattttggccgagctacttactggaaagccaatcatgcctg

SEQ ID NO: 29347 - DNA, 382 bp, Glycine max
gaatatgaggctgagaatagcacgaagagcgcttttttgtacgcgtgattgtactgaacaccatacatactttgggtacgcgtaaacttatatatgctccccattcaatcgtggtatgcgggaaataagttgacatttatactgttaacaattgttttatccgacgtatgatcaccatgttctttataacaagtctgtagaggaagatgtttctcatcaaacaacaatagacttacgttagcgtcatactacctgtggttagttcttatacatatgaaagaaatgaagtctacctgacccttgctaaaaatgaagcgacattgctgcataaaaaaatttcaaaccaagctttttatgatgacaactttatcatgatttttgc

SEQ ID NO: 29348 - DNA, 350 bp, Glycine max
tgaagaaggttggttacaacccatacaagattccatttgtgcccatctctggtttcgagggtgacaacatgattgagaggtccaccaaccttgactggtacaagggaccaactctccttgaggctcttgaccaaatcaatgagcccaagatgccctcatacaagccactcatgcttccattgcaggatgtctacaaaattggtggtattggtaccgtgccagtgggacgtgttgagactggtgtcgtgaagcccggtatggtggtgacttttgttcccactgggctgacaactgaggttaagtctgttgagatgcaccatgaggctctcacagaggctcttacaggtgac

SEQ ID NO: 29349 - DNA, 343 bp, Glycine max
gatatgtatcttgttgcgaggtgtgaggtgcatagtgttgttgatgtgaacaagcaaaggtcgttccttactttgaatgcgttgaacgagtttgatcctaagtattccggcgtggattggaggcagaagttggagactcagaggggtgctgtgttggctactgaacttaagaacaatgcgaataagttggctaagtggactgctcaggctcttttggcgagtgcggatacaatgaagttagggtatgtgtcgaggattcatccccgcgatcatttcaatgatgtgattttggctgtggctggctataaacccatggactttgcaacacagattaatttgaaca

SEQ ID NO: 29350 - DNA, 363 bp, Glycine max
gacactctaatttaaaagagtcttattgaacggtgagggtctccttggaaatccatccatgccatggctcccactcttacattcaattcatcttttttaagcaccagtcctcattcaagggtgagccttcggaattcaaggctgagagtctttgccaagaagtctgcatcattcccattatttggactatgcaagcccaaagatgattcttcttctgctgaagaaaaagataactcatccaattccaacctctttcgcttggactttggaaagataccctatgtaacgtctttgatcccatttccaaacaacacttctgcgccaggcttttcttttgtaatcacaatgcgcatggacccttta

SEQ ID NO: 29351 - DNA, 327 bp, Glycine max
ggcacaggtggagaaagtatatatggggggaaatttgcagatgaaaatttcaaactaacacatgatggacctggcattctttctatggctaatagtggtcctaacacaaatggatctcagttctttattacattcaagcgccaacctcatcttgacgggaaacatgttgtttttggaaaagttgtcaacggaatagacattttgaagaaaattgagcaggtgggaacatctgatgggaaacctacccagccagttaaaattattgattgtggtgaagtctctgaaacaaaaattcagcatactgcagagaaggaaataaactacaaa

SEQ ID NO: 29352 - DNA, 432 bp, Glycine max
aggtccctgaagtttggaaagttcttgacaagatccaggagttctctgagcagattcgcaatggttcttgggttggtgctacaggaaaggctttgaaggacgttgttgcaattggtattgggggaagcttcttaggtccactgtttgtacacactgcacttcaaacagaccccgaagctgttgaatctgcaaggggtcgtcagctgcgctttcttgcaaatgttgatcctattgacgtggctagaaatatcacaggattaaatcctgaaacaacacttgttgtggttgtttcaaagacttttacaactgctgagactatgctgaatgctcgaactcttagagaatggatttcatcagcacttgggccctctgcagttgcaaagcatatggtggctgttagcacaaatctcacgcttgtggaaaagtttggta

SEQ ID NO: 29353 - DNA, 412 bp, Glycine max
ggcagttcaattccaatatattccattgtctctgtgtatttccctacctctcccttcaagatgcagatcttcgtcaagaccctcaccggcaagaccatcacccttgaggtggaaagctctgacaccatcgacaacgtcaaggccaagatccaggacaaggaaggaatccccccggaccagcaacgtctcattttcgccggaaagcaacttgaggacggccgtacccttgctgactacaacattcagaaggagagtactcttcacctcgtcctccgtctccgtggtggcatgcacatcttcgttaagacactcaccggcaagaccataaccctagaagttgaaagctccgacaccatcgataacgtcaaggccaaaatccaagacaaggaaggtattcccccggaccaacaac

SEQ ID NO: 29354 - DNA, 396 bp, Glycine max
cacggtcagtcgttggaagaaacctgagattggttgggtgaagctgaacgtggatggttcacgcgacccatacaaaagttcctccgctggttgtggtggtgttctgagggacgcatcagcaaagtggctccgtggctttgctaaaaaactgaaccctacttatgcagtgcaccagacagagttagaagccattctcacgggcttgaaggtggcttcagagatgaatgttaagaaactaattgtggagtcagacagtgactctgtggtgagcatggtggagaatggggttaagcccaatcaccctgactatggtgtcgtggaacttataaggacgaagcggcgtcgttttgactgggaagtgaggtttgtttctgtctccaacaaggcgaatcgtgt

SEQ ID NO: 29355 - DNA, 412 bp, Glycine max
tacagacagagttggagagttagctaagaagcatggactgaagcttcacattgatggggcccgtatttttaacgcatcagttgcacttggtgttccagtggataggcttgtccaggcggctgattcagtttccgtttgcctatctaaaggtataggtgctccagttggatctgttattgttggttccaagaattttattgccaaggctagacgactccggaaaaccttatgaggtggaatgagacagattggcctcctttgtgccgctgcacttgttgccttgcaagaaaatgttgggaagctggaaagtgatcacaagaaagctagacttttggctgatggattaaaagaagttaaaggactgagagtggatgctggttctgtggagaccaatatggtatttattgacatt

SEQ ID NO: 29356 - DNA, 390 bp, Glycine max
gagacacgtgggtggatagcaacttagaacacaagtgaactcaaagtggaacaacccaagcttgtttcacagctcaacaacaatggcttctatctcatgcatcacccaccaccccatcacttccaagctcaataatgccttctcttcaccccacgtctctgcctcaaacttggcctcacggtttctgggcaccagaaaaagagttgggttgcatagcctcacctctagaataattggaccctctaatggctccaaagccacatgctggttcaggttcggcaagaacggtgttgatgccaaaggtgctggcatctatggcagccagggccgtgatgactttgatagagatgacgtggaacagtacttcaactatatggggatgctcgctgt

SEQ ID NO: 29357 - DNA, 364 bp, Glycine max
gtataactgtcgggtactcgacatgtcttttctacttagtctctgatctcacaaggataggtctcatccccattgtagactctagtactactttctcctcgatacactctacttcttctatgcacagtgtgaatggcgtctgaatgctgcagaaacaagctatataataacatgtacatatctctacttacatgcaatcatgattgatctggatgaacactccctacattctacgttcaactaaataaggatgctgtcaaatcatcttataggatcactacagccactaattgaagataacattgactccatcactctcttaagagactccaccactgttgtgtgcctggatgattaccactct

SEQ ID NO: 29358 - DNA, 408 bp, Glycine max
ggaggataatcaataaacttaaacttatgttatggcattctaactctgaacgatgaaatgaaatggagttccaagataagcgtttatctctgagatcgagcttgacgttcagcgagacgctgtgcgcagtgttcattccgttcataggaatagtcgaagctttggttttcacattcactagttgcttcgatttccaatctcccaggaataagaagaaacattcttctaccttcgacgacattctcaccctcgccgaggattctccatttagtattaatgaaatcgaggccttgcgtgagttgttcaagaagttgagtagttctatcattgatgatggcctcatccacaaggaagaactcacattggcactgttgaagaccaccaccggggagaatcttttccttgaca

SEQ ID NO: 29359 - DNA, 425 bp, Glycine max
ggatggagtaattcagctaacagaaagggatgaatgtgcctaccaagaaatgatcactcatcttcctctttgctctattccaaaccctaaaaaggttttggttatcggtggaggtgatggaggggtcatacgagaagtagcacgccattcttcagttgaaaagatagacatttgtgaaattgacaagatggttgttgatgtctccaaacaatacttccctgatgtagctgttgggtatgatgatcctcgtgtgacacttcatattggtgatggagttgcatttttgaaggaagttccagaaggaacttatgatgctgttatagtggattcatccgaccctattggtcctgctcaggagctttttgaaaagcccttctttgcgtcagttgcaaaggctctttgtcccggtggagttgtgtgtactc

SEQ ID NO: 29360 - DNA, 228 bp, Glycine max
tgggttctagtgtgacattgtttgatgttggatctcgatcttcttcttttgacggtctgagttcgcgttcgttttttatatcacctgaaaatgtgtttctaccttgtgaactacggttgcggaagctcctgcaagtgcggcaacggctgctgatgctgcaacgatgtacccatacttgagctacactgagtcatcctccaccgaaaccttggtcatggtgagtggcac

SEQ ID NO: 29361 - DNA, 331 bp, Glycine max
caaggtttaactatatggaccctctgtacgaaaccctaggggctgattccgagttggacttggatcgtgccctttaggactctatgcgcgctaaaattgacgacgagctcaccaagctcgacgaaaagattgttgatgcctaggaaaacttatgatagagtgaagatcgagaggctcatttggcaaaatacttgctttttatcctgattatggacaaggagaaagccttggtacatttgaaggtaacagaaaccaaaacagttgcatttgggcagaaaatgcatcttggtgtatatacattgcagcttagtttacttgacatggattttga

SEQ ID NO: 29362 - DNA, 350 bp, Glycine max
ggatactagaacctgcagatcgtgatgctgttgtggccaatgttgccatcaagaatggcaaaaactacaatgtcattgtggaaatcgccactatcctctccccggaagagcttttggccgtgagacgtgcttatctcaaccgctacaagcactccttggaagaagatgttgcagctcatacctctggccatctacgccagcttttagtggggttggtgacctcatataggtatgttggtgatgagatcaatccaaaattggcacaaactgaggctgaaattcttcatgatgctgtgaaagagaagaagggtagctatgaagagaccattagggtcttgaccacaaggagc

SEQ ID NO: 29363 - DNA, 404 bp, Glycine max
gagagaaagagatagaaagatgtcgaagcgtggtcgtggtcgttcggcggtgaacaagttccgcatgtcacttcgtcttccagtggcggcgacggtgaactgcgccgacaacacgggggcgaagaacctctacatcatttctgtgaaagggatcaaaggccgtttgaaccgtcttccctcggcctgcgttggcgacatggtgatggccaccgtgaagaagggaaaaccccatctgaggaagaaggtcttgccagctgtcatcgttcgccagcgcaagccatggcgccgaaaggactgcgtctacatgtacttcgaaaataatgctggtgttattgtcaatcccaagggagaaatgaaaagttctgctatcactggtcccattggaaaagaatgtgctgatttgt

SEQ ID NO: 29364 - DNA, 336 bp, Glycine max
gaccgagtggaagtgaagtggtagaatagcctacaatagggaaagaaagtgttgctgctaattccatttcagtgacccctaattatgatggaggaattgaacaaaccaatggacggatcagcaaccagctggttatccgatttggaaatggatgattacaatttatttccagatgaatgtcccttggaccttgaacttgtttgatgaccaagagtttctctcacaagacattgctagtgcccttcaagaacagacacagaccttgcaacaatctttgtcttcagagtgcccttcaaaaactgtgagcaactcatccaccgatgaaaccacttttga

SEQ ID NO: 29365 - DNA, 402 bp, Glycine max
ggacaacaaatcatgcgtttcgaatagattatcctaagtcgttggaaatagagctgcaatggcttcaagtcaggacgaggtgacccttttgggagctactgcaagcccatttgtgtgcaaggttcatattgccctcacgatgaagggagttcaatacacatatgtcgaacaaaatttgatgaacaagactgaactgcttctcaaatccaacccacttcacaagaaggctccagtgtttattcacaatgacaagcccataacagagtctcttgtgattgttgaatacattgatgagacatcgaagaacaaccccatcttgccttatgatccttaccaaatagccttggctcgcatatggtccaaattcatttatgacaatgttttttgtgcttcatgcaaatc

SEQ ID NO: 29366 - DNA, 377 bp, Glycine max
gacttcaaagtggagaaaaacacacacgggtggttcattctctctcttttctttttcctcaaaaagttgaaaaagaataaagggggaacaatcgagtgaagttgttgctcttcaatagtaaacttacctatggaagagggaagggttgtgagtgagtacacaaaagatggaactgtggatcttaaagggaaacccattctcaaatccaaaagtggtggttggaaagcatgctcctttgttgatggtatctctctctctcactataaattttatatggtcattttcatcttgttttggacattaatttcaaaagcaatttcccaaaacattggaagcttcatgatgttttgttaacaaaaatcttaatttcctctgat

SEQ ID NO: 29367 - DNA, 280 bp, Glycine max
ggctcctacgtggtgaagatcgccatgctgtgggggacggtgtcggtatccttaatggtgaatacgacaatgtcgaagactggcagcgccactatcctgatacccggaagacatcctttccgacagacgctcttatctaagccgctgacagtcactcattcgaagaagaagggacaggttgaacttaaggggatacacaccctcaaatactgaagggcgggacgccatgtacgctctgtggtgatgacatcaatccatagtagtatcaaactgatgctga

SEQ ID NO: 29368 - DNA, 388 bp, Glycine max
ggaggaagccacatagagacacaatacagagtgagttgttgctccttcgccacaactctctgccaacatgggtatctccagagattctatgcacaagaggcgtgccactggtggcaagaagaaggcctggaggaaaaagagaaagtatgagcttggtcgccagcctgctaacactaagctgtcaagcaacaagacagtcaggaggatccgtgttagaggtggaaatgtgaaatggagggcattgagattggatactggaaattactcctggggaagtgaagctgtaactcgcaagactcgtgtactagatgtggcttacaatgcctcaaacaatgagcttgtgcgtactcagactctcgtcaaaagtgctatcgttcacgttgatgct

SEQ ID NO: 29369 - DNA, 233 bp, Glycine max
ctcactcgtccgataattcgtccctttcgatctaaagaagaattgtttataaatcggcagggacaatacctgcgttatagtgtaaactaactatctttgccgatccctcaacctattactatctaagtatattcttttcatcaatgcttgttacagacacggctccttgatagacacaaactacgtaccattcatgagtgttgcttctccatctacaaacccattctaacaac

SEQ ID NO: 29370 - DNA, 268 bp, Glycine max
ggattgagaaggaatgagaatggggggaggtttgtgtctgatgatgttggtaggtctagcaatcgagggcgagggcaaggtcaatcttctcgaacgaattatgggaggaatggagcggatggtgatggcagaatgaggaagaatgggaatgggagaaggtttttgtccaataatgttgatcggtctagcggtggagaacagtcttctcctttgaattatggcggggatggaatggatggtgatggtagattgaggaggaatgggaatg

SEQ ID NO: 29371 - DNA, 425 bp, Glycine max
ggccttaagaatggtgatattgaagttacttgggctgatgggatggtatcaatggttggaccccaagcaatctatgtggttggtcgagatgacgatgatgaatcaattgctgctgggagtgaaataagtgatgctgcaagctgggaaactgttaatgacgatgaaatggaagtccttgaggattccagagaggatattgagagggaaaattcaagcagtgttacttctgaggcagaagaaagtggagagaatgattttggtaggactgcagctctctctgttcccctagcagcatttcgatttgtcactagacttgccagtggaatattctcaagaggctcaaggaacttggattctattcccttggagataaaagctgaacgtgaacatccatcacctgtaggtaatgatgagtctacttcaca

SEQ ID NO: 29372 - DNA, 324 bp, Glycine max
ggaggcagagaagtaagaagaagatagccagaagtataggctaagattgtccacaacatgtggacagcatgaacatcgagtgtatagatcaacaactacctttcccttttcgtctatcagtccaaacactcttcttcttcttcttcttcttcactctacaaccactaaactaagtggttggttttggtttagattcatactttcgaagctcttaaactttaggcttaagccatggcatcctcatcctatcagcatctatctcatgcccttctggcacgtgctgtgtaccttcatggctcttcttcttctgaccgtgtgatactc

SEQ ID NO: 29373 - DNA, 328 bp, Glycine max
ggaggtctggccttgtttaaaagaatagcagcggtgccacttgggcgggggatgatgaggaggaggaagaacatccacaacacatcaccaaacaaccttatggagatttgggccaacatgttttttcccctcatgcgtgtctggctttctctctctgctcgcctcaagcctcgcaaaaacggagcaggactgctcaagcttcatgatgatgtacagacttgtggatattaagatgtacaagtgatgtgggaaatgctactgagaaccgaaggtgaagttatagaaaaccaccataagcgcaagcctgtttccttttggaggatctttg

SEQ ID NO: 29374 - DNA, 387 bp, Glycine max
gggggaattgactagtgcggcgcgctcctattatcaccgtatacggcggaggtggcggtggtggtgtatacacggcgtgacggcgatctcttgagataaatgttggttgaaagaggaagaagaagaagagttgtattgtagaatgagccaaccaacggtgatacttgccactgcgagctatgatcacactattcgtttttgggaggccaagagtggccgttgctaccgcaccatccaatatcctgattcgcaagtaaaccggctggagataaccccggataaacgcttcctggctgcagctggcaatccacacatacgactgtttgatgttaactcatatagtcctcaaccagtaatgagctatgattcacataccaataatgtaat

SEQ ID NO: 29375 - DNA, 314 bp, Glycine max
tacatacacacccatattcacacttatcgtcatataaaaacgcctcatcgtcacaacaaaatttctctcaacacaaacttaacacacactctacttcatctactaccctcttaataacaacttcactcttaaaacttacataccaaacattctctatcttttaaacaaaaaaactcactactatattcctaaattatttaagaaatttgtttttaacaatatcatttacttccaaactatcatcatccacatcatgacttacttttatcataatccacacattaaaacaccactaaaaaacatccatatacttt

SEQ ID NO: 29376 - DNA, 433 bp, Glycine max
  modified_base (226)..(226): a, c, g, t, unknown, or other
gtgaagggaaggtgggagaaaccgggtcacagcccactatttgggtatgacttttggtaccaaccacgtcacaataccatgattagcacatcatggggtgctcctagtgcttttacaaaaggttttaacttacagcatctctctgatggattatacgggaggcatctccatgtatatagctggcctgggggcgaactgagacaaacaatggaccttggtgattcanggcttatacccttagagataaggtttttgcatgatcctgctaaagatacaggttttgtcggcagtgcattgacaagtaacatgatacgattttttaagacccaagatgaatcatggagccatgaggttgccatatcagtgaaaccattgaaagtgcaaaactggattcttcctgaaatgcctgggcttataactgattttctgattt

SEQ ID NO: 29377 - DNA, 367 bp, Glycine max
gaagaagaagaaggttggttgattggtcccattgattccgaagagaaaagaaaagatgtttgagccacaacagctatacactcgcgcgaagaccgaggaattcgacctcgaatcaggagaaaccctctacccagggctgagcgtcggcgagaaccagctccgatggggtttcatccgcaaggtctacggcatcctctccgcgcagatcgtcctcaccaccctcgtctccgtcaccaccgttttctatactccaatcaatgacctcctcaagggcaattccaccctcctcctcatcctcctcttacttcccttcatctttttgattcccctgttgaagtaccagcagaagcatcctcataattacatc

SEQ ID NO: 29378 - DNA, 357 bp, Glycine max
gaaagaagagaaaataataatatgaataacaacccacaaaacttgggtcttgcaaattaagttcattttcctccctttcactctcgtagacatcacaaaccttccctccattcatcccacgcatggctgccatgaactctagcgtattggcctgtagctatgccatatcaggtgcagcgtgttcggagctcaatgggaaggtcacttccgtggcctatgttgcatgctctggctacaagttgccattgatcaaagctgaggccagagttcctaaagccaaagaatctgaaggaggaaggagaggtgcccttgttctcttggcagctacccttttcacctctgcagcttccaattctt

SEQ ID NO: 29379 - DNA, 377 bp, Glycine max
gggcaaacaagtagtggaaagacatacacgatggttggaataactgaatacgctgttgcagatatttttgactatatagagaggcatgaagaaagagcatttatattgaagttctcagcaattgaaatttacaatgaagttgttagagacctcctcagcactgacaacaacactccacttagactacgtgatgatcctgagaaagggcccattttagagaaactcacagaggagactctacgggactgggagcatttaaaagagcttctagccttcagtgaagctcagagacaggtgggagagacatacctaaatgaaaagagttctagatctcaccaaatcatcagattgacaatggagagttctgccagggaatt

SEQ ID NO: 29380 - DNA, 414 bp, Glycine max
gagcgagggaagggaagcatctttagctccaatggcggatacctcaggtcgatccagggacctcgacaagctccttctccgccctggcaatctcgtcggtcccaggttcgaaccaggcgctgagttgcgagatgaccttcaggccttcgccaaagtgttggtggtaggggccggtggcttatgttgtgagttgttgaaggatttagccctctctggtttccgaaaccttgaggtcattgatatggatcgcatagaggttactaatctcaaccgccaattcttgttcagacttgaagatgttggcaaacccaaagccgaggtagctgccaagcgtgtcatggagagaattactggtgtcgaaattgtgccccacttttgcaggattgaggacaaggaaatagaattttacaatga

SEQ ID NO: 29381 - DNA, 217 bp, Glycine max
cacatttgtacggtgtatacaaatgttggtggattactcagaaatgtagcaaacagggtgggtcaaaagacttcctgactgtggtctatcatcaatctccccatcgaactttttgtgacttttatgatatctttaactaaaataatctgtactattgtgctacttttatatacattacacttgaatatgtgaaaagcttcttccaacgggacacata

SEQ ID NO: 29382 - DNA, 306 bp, Glycine max
ggcagatgtgaatgtgagagacacccatgaatgacagaatgaaatgaactgagtaacaccaacgctgctttcttcattctttcattcattcgaatgtgttcttttgcgattgaatttgagggaacaataatcgattttcgctttctgggcacccctgaattcccctgcatcgctgtgaaagtagttcagttcgaacaacgaaaacgatgtcggctcgattgatgaagaaggttctgaacgagcagcatcacctttcgcaacacgtgagcgaagaagaagaagaagaagagaacgattctgagccca

SEQ ID NO: 29383 - DNA, 404 bp, Glycine max
aggaacagcaatgaagaagaggcagagaagagcacgaagaatgctttcgtgaaggtgagcatggatggtgcaccgtatctacgaaaggtggacataaagttgtacaagagctaccaggagctgtcagatgcgctggctaagatgttcagttccttcacgattgaaaagtgtgggtcccaagggatgaaggattttatgaatgagaccaatggctctgactatgtacccacatatgaagacaaggacggagactggatgctcgtcggtgatgtgccctgggagatgttcgttgaatcatgcaagcgtcttcgcataatgaaaggctccgatgcaatcggtcttgcgccaagagccgtggaaaagtgcaagaacagaagctgaagaagtgatttcatctgcgtaac

SEQ ID NO: 29384 - DNA, 423 bp, Glycine max
gacatacacacgcatgtacaccttaatggttatatagggtggtttcttcttggtgttattcttgttctggcttgtgctttaatgcattcttcttcttcttcaaacctcttaataactactgtgccttgaatgttgggtttgagtatatctctttctcctccaaaagtagtgccacttacgtagggcatgatgatgaagaagagtgggtttgagaagatggtgatgttgcagaagaacaacatgaacaagggaagctatgatgatgagaaaccaaggagtgagacgtttttggtgaacatcaatatcattgggagtgcaaggcctattaagtttgtggtgaatgacaaaaaactttgttcttgggtcattgatactggtcttaaatcttattcccgtggaaggaagctttcttttcttggtttt

SEQ ID NO: 29385 - DNA, 479 bp, Glycine max
gcccgacgtcgcatgcttcttccgattgacatgcatactctaagcttattttatgtctctgattatgttaatgtactatgagcattttatcaagcataggagatgcacattcatacttacctcatctataaccattatatcatgcacttattattgattactcttattaatttaatttcttattatacttttatatatttatttctttcatatttactctataaacttttgtgataattttatcatttatttttttatcatttcttttttcttttttatatattttttctttctatttttttttttttttttttatttctctatttttcttttaattttttttctttatttttttatatttttttttttttctctttttttttttttattatttcttattttattatttttttttttttttccatttataattttattatttatatatattatttttattttatatttatatttttttt

SEQ ID NO: 29386 - DNA, 281 bp, Glycine max
gtcatggccgcaggattttcgtggtcgcggtttatgtgccagctactggtcgattcatcatgaacctgttctaatgaaccagggacagttgacaaagtgtgtgagattgtgaataaacaactggctcttactgatgataatgtaatcaacggagagtcaaaatttacagcacttgatgcttattctctagacacggttgagattgtgatgggacttgatgaatcgtttggaatcactgttgaataatataatgctcagactattgcaacagtttaagatgc

SEQ ID NO: 29387 - DNA, 417 bp, Glycine max
aattcgagcggccgccctccttaggggctcatcattttgtgctaggggtttgatgaaccctgccgatatcaacgcaacttcttctcggtgtgtctaaattttggcattaaacggccttaattgggcggtttgacttagcatacaggctcaaaaaaatcacacgcagatatttggttcgacgagaggcattattatgggatccaccgtacagaaattgaatacatctggtccgaggtacctgtgaggatacaaattactggtctgatagagtgactgttaatgaaagcaatctgatcgttgctagttttggggcagctgcaactgtgcaactaatgttcagttcttaagtgaccaaatctactgccgagaagttgagaggtcacatcttacaagcatttgaatctgtccttggatctt

SEQ ID NO: 29388 - DNA, 326 bp, Glycine max
ggcagcataaagtagcaaagtcttgcaggccacaatgcaaaactttgcagaatctcatcaactttcagttatgtgttcttcttattcatctaatgttgatgtctttgacactggcaagtacaccgccaagctgctaagggttgaatctgaatcagaatcatatacacacaacaacaattttgcaccaccaccaaagtctctcttgattgccactcctcttgaaggtggagatttccctcttctgccgcttctgcatggctatcttctttacaattcattttactcccagctaatacaacatgttgcttctcatggtttcattgtca

SEQ ID NO: 29389 - DNA, 432 bp, Glycine max
gattatcaatggatgctagaattgaaaatgtccatgctggaagctcagcagatggtatgacaaggggtcttggttctgagaaaaaacgacatagtgtgtctggttttactcctcaacatgctaattcacaagccactgaaaagattaggatgagcgagaggcagattttgggtataaaccgtacaaaaattgaagagatatggttagaggtgcttgagaggatacaaattactggtctgaaagagtttttgtttaaagaaggcaagctgatctctgttagttttggggcagctccaactgtgcagctaatgttcagttctcaattgaccaaatctactgccgagaagttcagaggtcacatcttacaagcatttgaatctgtccttggatcttctataacaatagaaattagatgtgagttaaataaagata

SEQ ID NO: 29390 - DNA, 431 bp, Glycine max
ggcagttcaattgatcaactcagatttcagggacctaagtctagctgctaatagactcgcccatcatgccatcaaacttggtggcattggctttggagcctcttttttcggattgtttgctgccattgctgctatttatctgttgattttggatcgtacaaactggaaaacaaatattctcacagcactactcattccatacattttcttcagcttgccttcattaattttcgacgtcttcaggggagagcttggaaaatggattgctgcagttgctgttgtattacgccttttccttccaagacacttccctgattggctggaattgcctggtgctctgattcttcttatcgttgtagctccttctctaattgcaagcacctttagagacaacattgttggggtggtagtgtgcctcatcattgcatgtt

SEQ ID NO: 29391 - DNA, 402 bp, Glycine max
ggataataataaaaacactcgtgccgcaccttcgtcttccccaatgcttctttccacacgcatctcggaagcccttctcttcatcacatagatactttcgctatcgcaccaagtaacccttattattccaatccaccctcgccactccttcgatccgaatcatcttttccgcccacacacaagttgggtttttttgatataattgataatgggtgatagcagtgttccatctgggtctccaaatgcaaaatcagatcttgttgacagagacttggcggtttccaacaacgcgtcgtcgttggaaaccattgtgcaaagtttccaagattcaatgtctcttggtaagagacacaagttctgggaaactcagcctgtggggcaatacaaggatgttggggactc

SEQ ID NO: 29392 - DNA, 398 bp, Glycine max
  modified_base (338)..(338): a, c, g, t, unknown, or other
ggagcctagtagtaatagtgaactggagtgatgctcaagtgtgttgtgtgtcagtgttttagggaccaatggtggagagtgagttttctgagttaagatataagatatatgctatctaatgcctagtgggatataggaaaggacctcaaatctgctatctttcgttcacatacgcatcatattcttttaattgttagttctgagttctgaccaaagttgttgatttgagtgtttttagcatatttggggtgtctgcaaacaccgcaggaattttgctttttctattgaattagattcctctgggaattcaattctgattcttccttagttttcggctntctgtctttctttttttccttctatttatattttggggtggctttctggtgagtcttgac

SEQ ID NO: 29393 - DNA, 423 bp, Glycine max
gacaatcaatcttctttatccactctctcttaattaaattaaaacaaaaaatgtgcgctgccatatccgaagtggaacaagaagagttgctcgaaaaattggaggtgttcaagatcaaaggcagggacaagcatggccgcaagatccttcgcattatcgccaaattcttcccaggtagattgattaattaattaattaaatccctaattcctttttttttatgtgcatgaattttttaaatcttcggtaattgtttgaattgaggacagcacggttggtgagtgttgaggttctgaaaaagtacctggaggagagggttttcccgaagctgatggggaagaggaaattcgcggtgctgtacgtgcacaccggcgtccagaggagcgagaattttcccggaatctccggtctccggtggatcta

SEQ ID NO: 29394 - DNA, 403 bp, Glycine max
gagagaaagagagagaaagatgtcgaagcgtggtcgtggtggttcggcggggaacaagttccgcatgtcgctgggtcttccagtggcggcgacggtgaactgcgccgacaacacgggggcgaagaacctctacatcatttcggtgaaagggatcaaaggccgtttgaaccgtcttccctcggcctgcgttggcgacatggtgatggccaccgtgaagaagggaaaacccgatctgaggaagaaggtcttgccagctgtcatcgttcgccagcgcaagccatggcgccgaaaggacggcgtctacatgtacttcgaagataatgctggtgttattgtcaatcccaagggagaaatgaaaggttctgctatcactggtcccattggaaaagagtgtgctgatttg

SEQ ID NO: 29395 - DNA, 371 bp, Glycine max
gagagcgagaaatattatagtagctctgcgtttttggggtatcattattcaaccacccattttctctcttcttcttcttccattgagaaaattctctttcatcgtgtgtgatcggtgagatgtacgtagcttccatgcgcaagtctttcaaggactccttgaaagtccttgaagctgatatccagcacgccaataccctggcttcagattttccaagggagtatgatggtgcatgccttcagatgagaatgtcatacagtccagctgcacacctgtttcctttcttggtgcaatggacagattgtcatcttgctggagcccttggactgttaagaatcctaatttacaaggtctatgtggatgggacaacc

SEQ ID NO: 29396 - DNA, 400 bp, Glycine max
ggaagatgaaagggaagaagaacaccatgaccaaaaacgacgttgaagacgacggagctccggttccttcaccaacagtatccgattccgactctgattacgaggactcttcagcagatgacgacgacaaatcttctgactcgctggattctcaatctgaatcggaattagaagatgcttcacctgagaatggtggctccggcgatgtagaatctgcagaagatgaggacactgtcaatgatgaagacggtggaagtgagagctctgatctccatcaggaaggagctgagagtgattcctccgaggatgaggtggctcctcgaaacaccattggagatgtgccattgaagtggtatgaggatgagcctcatattggatacgacatcaaggcgaaaaagat

SEQ ID NO: 29397 - DNA, 357 bp, Glycine max
ggcgttgcacagagagagagagaatggcagcacttggtgggaatcgtgacgcgacaggaagccagaacagcgttgacatcgatgctctagctcgctttgctgttgaagaacacaacaaaaaacagaatgcccttttggagtttgaaaaggtggtaactgcgaaacagcaagtggtttctggtaccttgtacaccatcactttggaggcaaaagatggtgggcaaaagaaggtctatgaagccaaactttgggagaagtcatggttgaacttcaaggaagtgcaagagttcaagcttgttggagatgcacctgcatagtctagtgcttaattaggttgctgaagagtgaagaatgaga

SEQ ID NO: 29398 - DNA, 401 bp, Glycine max
ggcagcatattttagcaaagtcttgcaggccacaatgcaaggctttgcagaatctcatcaactttcacttatgtgttcttcttattcatctaatgttgatgtctttgacactggcaagtacaccgccaagctgctaagggttgaatctgaatcagaatcatatacacacaacaacaattttccaccaccaccaaagtctctcttgattgccactcctcttgaaagtggagatttccctcttctgccgcttctgcatggctatcttctttacaattcattttactcccagctaatacaacatgttgcttctcatggcttcattggcattgcccctcacttgtacacaggggctggaccagatacaagtgatgagattcattctgcagctgcaataacaaact

SEQ ID NO: 29399 - DNA, 442 bp, Glycine max
  modified_base (419)..(419): a, c, g, t, unknown, or other
gggatgactatgctcatgggaaaggagtttatgtttctgatgatgcattggtcaggtatgaaggtgaatggtttcaaaacgatgtggagggtcatggtgtagttgaagtcgatatacctgttatagaacctgctcctgggtccaagcttgaagcaaagatgcgagctcaaggaaagataatagcaagggattttctgtccccagaagacagagaatggcttgagaaggatattgaagatatgtattatcttgcagatgggaactatgaaatccccttttatgagaatgaggaatgggttaggcaatttggaagaaagccggagaaaggtcgctatcgttatgctggccagtggaagcatgggaggatgcatggatgtggtgtatatgaagttaatgagcgtatcttatatggtagattntattttggagaatatgtagatga

SEQ ID NO: 29400 - DNA, 435 bp, Glycine max
ggatgcagagaaggtactagtttagtgtcacgaaaataacccgcagacgcaaacgtgaaaacacagacaagacgcatacgtccgtctcaacgtgtttgagattataaagacttagtggaagggtaagctgaagttgaagagttgaggggaaaacaagcagtgaaggaggttgaggtactcaataaagttttgatttgtttgaattggggggcttgttgccaatgttggatacagttgtatgtgctagaaacagtcaacagtcgcttcataaggtgaagttgacattctagtagtggaaagggccagagtcgagatgattatatatgtttgatttgcctctacacactggcaatccttaggtctgacagatggctttttataatgaagaagagaagactgaagactacctcttcaagattgttttaattggtgatt

SEQ ID NO: 29401 - DNA, 327 bp, Glycine max
gacggcgatgatgatgcaaatcaacatcacctccaccacctcaatcgtcacggcgttctcttcggatcattccccgaatgttctaccttgagccatgtccaacctcgttcagattcgcgtcgccgccgacgctagcgatggcttcgactctccggcgaagcagaaagcagccaaccgcagctcctacagcaatcgcccctttctctccctccgccgcgccaaacagttcctcggcgccgccaagttcaagctcttcttagttctttttgctctctccatcgtcgtttttgtctcctccagactcagttcgtggatgggatggaaccc

SEQ ID NO: 29402 - DNA, 407 bp, Glycine max
gatgggagaatcttattgtcaaggagttttgatggttcattgaaggtttgggatctgcgcaaaacaaaagaaccgttaaaagtatttgaggatctgccaaatcactatgcacaaacaaatattgccttcagtcctgatgagcgactctttttgactggaacatctgtggaaagggagagcatgacaggaggtttattgtgcttctttgatagagtaaatcttgagcttgtttcaaaagttggcatatcacccacttgtagtgttgttcagtgttcttggcatcccaaactgaatcagatctttgcaactactggtgataaaagccaaagtgggactcacatactatatgatccaacccgtagtgaaagaggagctcttgtatgtgttgcacgtgcaccaaagaaaaa

SEQ ID NO: 29403 - DNA, 401 bp, Glycine max
caaggacacgaggtggatatatatgagtcaaggccttttattggtggcaaagttggttcttttgttgacaaaggtgggaatcacattgaaatgggattgcatgttttctttggttgctacaacaatcttttccgattgatgaagaaggtgggtgcggataacaatctacttgtaaaggatcacactcacacttttgttaacaaagggggtcaaattggagaactagattttcgcttcccaattggggcaccaatacacgggataagggcgtttttgtccacaaatcagcttaatacttatgataaggctagaaatgctgtggctcttgcactcattccagttgtcaaagctcttgttgatccagatggtgcactgagggacataaggaattttggatagta

SEQ ID NO: 29404 - DNA, 405 bp, Glycine max
aggggaggaaagaagagagagaacaaagcacttagtgctattcaataattacgaaaaaccaacagcgagtgttgtttttgtttggtccaggctggaccagggaatgaatagagatgagaggctttcggttgaagagaactgagttaagcggcgaagccaaacgcagaatcggcggcagaaattgccaccggaagcacgtcgaagacgggtgaaccaaacacaaaattccatccaccacttctcttttcaatccccaactcaaatctgtgaagaaaatctcaatttctaaattgtaattcttagcactactgctagtagtagtaaaaaaaaacaattagaaagtagtagagtgtttttttttccgtttttcgtttggtttacttttaagatgggtgagaagagcga

SEQ ID NO: 29405 - DNA, 411 bp, Glycine max
gacagtattcaagatcggggaatcaatcaggtttatataattggaggagatggaactcagaagggtgcatctgcaatttttgaggaagtcagaaggcgtggtctcaaagtttcagttgtaggtatccccaaaaccatagataatgatatcccggttattgataagtcctttggctttgacactgctgttgaggaggctcaacgagctataaatgcagcacatgttgaagctgaaagtgttgaaaatggcatacgtgttgtcaagttgatgggtagaaacagcggatttattgcaatgtatgctacacttgcaagtcgagacgtggactgttgcttaattccagagtcacccttttaccttgaaagtcctggtggactctatgaatatatagagaaaagactcaaaagaaat

SEQ ID NO: 29406 - DNA, 372 bp, Glycine max
gtctgaaagggaaaatataaaaagtcgcatcctcgtctggatgaaagggtacctctttcaagttgaaccatgtggttgaagcacatatcaaggcctgctcacacttaatggcttgcacgctccctgcttcattactcctaattaagggttcttatcataaaccagctctgatgagagacattgctgcccgttactccccgggtatatttagtctaaacagcaatgggcttatccagaaaaggtccaagcgtcaaacgaattttgttactacgaatacggttactgccatacatgccgtggcaattccagtacaaccagctccggtggaaagtgcggagtatataaaacagctagctgaatactactgtttca

SEQ ID NO: 29407 - DNA, 238 bp, Glycine max
gggtgggagtggtatcgccaatccgatggaaaccctagtcggtgactgcgaggcgcactggaatcatgcactctatgaatcaatgtgcactgaagaagaggaataactgaccaacatcagacgaaaacattgcctgctgctctccgaaaactgaaaagatagtgaagtacgcgaggctaatcagccataaattcctgatccatatccaaattatggacaccgtgatagcctaggaaca

SEQ ID NO: 29408 - DNA, 406 bp, Glycine max
gacacgtgcgagtgatcaaatattaagaagaggttatggatgtttttaaggtttttcacatgcttgtcttaaaacaattttccagcaaaatccaaatccttcgttctggtaatggcacagaatacatgtctaaaagcatgacacagtatttaaattctcatgtatcaagaggggttgttccttttgtttgattttttttcttcttgccaaactatggcagaagatcattcttcttcgcatatattgccttcaggagctacaagttttcctggtgtgccttttgcagtagctacaggttccactagtgtggctgttggaatagaatttgagtctaatcctaatcaatgattgagctcttgtgtactaaatgagttcaattaccttccttggtcaaaagccataactc

SEQ ID NO: 29409 - DNA, 297 bp, Glycine max
ggataactattttcatatgaaaagaacagatgtgttttcggggacataggcattcgataagcgtgaataggttcaaaacggtacatatggtaatgtgtacagatcaagacaaaatgcctcttgtaaaatctgctctttgatcaaaacttgtatccacgatgacaactaaagtgtacatactaccactctacgttatgtttccattctacaaatgctgtcttgagatccatatgtcagaaaggtattggatgtcaaatatggacatatcaatgaacttttatcagaactatacttggt

SEQ ID NO: 29410 - DNA, 428 bp, Glycine max
  modified_base (309)..(309): a, c, g, t, unknown, or other
gacgtacgatgttttcgtttcgggtttgacgttgttcacgggcactttctgcgcttcactcgctcccttcgtgcggatttctttctttgtcgaactcgtgcgaaaatgcgtgagattcttcacatacagggagggcaatgcggaaaccacatcggagcgaagttctgggaggtggtgtgcgcggagcacgggatcgattccacggggaggtaccagggggacaacgagttgcaactcgagcgagtcaacgtctattacaatgaagcgagttgcggaaggttcgtgccgagggcggtgctcatggatctnagagccaggaccatggacagcgtcagatctggtccctaccgtcagatttttcgacctgataacttcgtcttcgggccagccggcgcctgaaacaactgggccaaaggcactacaccgaa

SEQ ID NO: 29411 - DNA, 333 bp, Glycine max
ggagtgagtgagagaaagaagagaaggagttgaagtggttgttgtattgtagtagtgtgtaaagtcttggtgatggatagacacaaatgcaagctttgttcaaggtctttcagcaatggcagagcccttggtgggcacatgaaggctcaccttgcttctctccctctccctctccctccaaagcttcactcttgcttctcttcctctgactcagaacaagaacaatctttaagggagaatcctaagaaaaccttgaggattctggatcctgaagacagagagagcgagacagagtctaataagaacccgactcgtcaacgatccaagcgcaac

SEQ ID NO: 29412 - DNA, 410 bp, Glycine max
gggtcgcgagttcaagtcaacaagcctcacaagtcccgcttctcttccaaatcttctcgcaatcttcataaaacctctgtcaaggacagactcgcaatcgcaaaatcagagcgcaatgtcggcaaaggagctcgtgcagctcgaattcagagaaataaaatgatacgagatcaaaaaagagctgctgttttgaaagaaaaacgagaactcagtgggtcgagaagtcctcctcgagtgatagttctcttcgccctctgtgcgtctgtggatttagaatcacttgctgatgatctcttgtcattattatctaaagatacgtgtgtggtgctgtcaggataccgtgcttcttctgaatataggacaagaataacggtacttaaagcaccccatggtgatctactatcatgcat

SEQ ID NO: 29413 - DNA, 373 bp, Glycine max
gggttcaaagtctagtaataaaaagagaaaagctttctcagataagccaacttcaaggccaatgaattcccaaaagatgagtgaatttagtactacgcctatggacgatgaattggatgttgttgatccagtgggtcagaaacccaagagacccaagaggataaagaagaatgtgaatgaaaagtttgaagatgcttttactgggattgctgccctgatcccagagcagacccaatttccaccttcaccaagcgattttagtgccgggggttctaaagcagaatcaggccaagacaactgaagacatagtgattcttaaccactacaaaaactttggagttactattctcagccctatggattgacttttttt

SEQ ID NO: 29414 - DNA, 364 bp, Glycine max
gacactaaacaagttaaaagaagagcatcactgaactaacaaagcaaccctatgtcgaaggtggtttgtgtcaccggagccagcggcgccatcggatcatgggtggtcctactcctcctccagcgtggttacaccgtccatgccaccgtccaagatatcaaggatgaaaatgagacgaaacatttggaggaaatggaaggagcaaagagtcatctccatttttttgaaatggatcttcttgacatcgactccattgccgctgccataaagggttgttccggcgtaatccaccttgcatgtcctaacatcattggtcaagtcgaagatcccgagaaacagatattggaaccggcgataaaaggaa

SEQ ID NO: 29415 - DNA, 122 bp, Glycine max
gggtttgggaaaggcacggaaggctttgctgtctggtttctcaccacgagggtgcgcaaccatttcaccatagagacgccttcttcaagcttttgccatcgaacgctaatttgatatgcttg

SEQ ID NO: 29416 - DNA, 396 bp, Glycine max
  modified_base (308)..(308): a, c, g, t, unknown, or other
  modified_base (316)..(316): a, c, g, t, unknown, or other
gaacacactcatccaaacaaccttctttctttttctgtgagcctttctttcaggttcttaacttgatcagtgtgcagtgtccaaatcataagggtagctgcaaattgcaatggctaagcatgatgttgagggtggttccttctctgcaaaggactaccatgatcctcctccagcaccgttgattgatgctgaggaactcacacagtggtccttctacagggctttgattgctgagttcattgccacaatgctcttcctttacatcacagtgctcactgtgattggttacaagagccagagtgatgtanaggctggnggtgatgtgtgtggtggagttggcattcttggcgttgcttgggcctttgtggcatgatcttcattctggtgtactgcact

SEQ ID NO: 29417 - DNA, 340 bp, Glycine max
gggatttccaaagtttttaatagagggtaggtctcaaaaaatcgaagaattacagacgaatatgcaaaaaaaactgaattgtgtgaatcgaaaactaaacattgctattgtaaaagttgcaaatgcttataaacaccctaatattattgccgaatttatagctggacaattgaagaataaagtttcagatcgtatagcagtgaataaagctattgaatcaaatgaacaggcggttacaaaaggagttcaagttcatattgcaggacgtatctacggaaaagaaattgcacgcgtctgatggatcagagaatgtagagctcctctacaaaccatgcgagcg

SEQ ID NO: 29418 - DNA, 202 bp, Glycine max
gaagatggagatgtatcagatctggagcaggagaatagcgttgggagcgttcgcgtttgttctgcttttcctatcggcctcagcagacgacgtcgttgtgctctctgaagataacttcgagaaggaagttggtcaggacagaggagctctcgttgagttctatgctccttggtgtggacactgctaaatgcttgctccagaa

SEQ ID NO: 29419 - DNA, 397 bp, Glycine max
  modified_base (342)..(342): a, c, g, t, unknown, or other
ttgtgcaatgaaaccatctatatttatagccatttatgagtgacagtagaaccacgttttgcttcctaatgtttattattattatacttatattgtaccattcctcttgagcctagtagtaatagtgaactggagtgatgctcaagtgtgttgtgtgtcagtgttttagggaccaatggtggagagtgagttttctgagttaagatataagatatatgctatctaatgcctagtgggatataggaaaggacctcaaatctgctatctttcggtcacatacgcatcatattcttttaattgttagttctgagttctgaccaaagttgttgatttgagtgtttntagcatatttggggtgtctgcaaacaccgcaagaattttgcttttctattgaatt

SEQ ID NO: 29420 - DNA, 442 bp, Glycine max
gggagctgtagcagtaccagtaccagcactaccagctcaacaagcaacagcaacagtggtgctagcagcagtgtatttgcaagcttgtttgcctcatcatcagcatccgcaactgcaagcctccactctcaaacaccagcattcactgacctaattagggccatggggcatccggatcatccagcagacctctcaaggccttcatcttcagagcccatttctctgtgcccagccaccaatcatggctcatccatttttggaacgggaaggcaggaacgccgtcagtatgccccaccgccacagccagccatgtctgccactgcattgctgcagaaagccgcccaaatgggtgcagctgcaacaaatgcctcttttcttcgtgggttaggcattgtatcatcttctgcatcaacgtcatcagttcagcaagataatttgcaat

SEQ ID NO: 29421 - DNA, 412 bp, Glycine max
gggcctttgaggtttggagtcgtttttccaagcaatggaacctgcgaatatctacgtagaggcccattcagtggcataaacattcgtcgctgatcgttgacactaatgaatgattggttgagtacccatgataaccgttgttgacgcctgttcctaagggcggagaacaaccgaatgaccgggcgttcgctatttgaacgccacgcgttccagtcctacggcgttccattctttttgcactcgcaatcaactccgaagggacgccggcgttcacttatcgaaaggacatgagtatgaagctgggccacattggacagttgcacatagtgttatgatgtgcgagctggtgtgataatttcaactgcatcaatttacgaccctgaagtgcataagtcacgtcaagtattataca

SEQ ID NO: 29422 - DNA, 354 bp, Glycine max
ggagcaatcgcgtgaattttcaacgggattttgcagagcttccgcgttgaaaccatccaaccctcttagcctcatattcgttgtctatacttccctccttccttcgtgtaattacatttttttcatcagcagttccaggaccaaattgatacacaagatcactgtttttttagagagagattgagagaggatgtttggttcaaagaaaactcctctgagagatgctaaacctagttctgttggccatgcccataacccctttgattctgatgaagagacaaacgataaaaaggttaattcctctaagaagactttgaccaacaccaacccccttgatgatgaagttgatgttga

SEQ ID NO: 29423 - DNA, 390 bp, Glycine max
cactgttgatccactatgctggtccaatgaaaacctctgaagatactccaacaaatggatctactgtgccccctggcagacgccttgttgttccactgcagatttgtgttttgcagggtttgtcttttgtgaaggctcagcttctttcaatggagtttcctgctcatgtcggtgaaactcttccgaagttggatgacttaaataacaagtctactgatgttgaatcagaaacaaaaatggacagattggtgaaaatagatcctttcaaaagaagttggggactgcgattccttgaacttgagttatctaatccaactgatgtcgtgtttgaaatcaatgtctctgtcaaactggagaactctagcaacgaggacaatcattttgctgatc

SEQ ID NO: 29424 - DNA, 259 bp, Glycine max
gatattattggacatattgttgaatttagctctgatcagcatggaagtcgatttatacagcagaagttggaaagttgtagtggcgaagagaaggcattggtgtttaaagaggttcttccacatgcttctaaattaatgactgatgtatttggtaactacgtaatacagaagttttttgagtatggaagctcggagcagaggagggaacttgcagatcgacttgttggccagatactgcctttgagtttgcagatgtatg

SEQ ID NO: 29425 - DNA, 348 bp, Glycine max
ggctttttaggttattttcttaagtaaaaagaaggaaataaataattctcgtagctttgttgctcttataaattctattctggttgacgcttctctcaccatccccatttcgcgttggtgcaaagcatccttcgtttcaatttctctctctcagcgctttctgcaatcgaacctttcatctccaaagggatccacaggccgaaggagaaatggggctgacattcacaaagcttttcagtcggcttttcgcgaaaaaagaaatgcgaattctgaatgttggtcttgatgctgctggtaagaccactatcctgtacaagctcaagctcggagagatcgttaccacaattc

SEQ ID NO: 29426 - DNA, 374 bp, Glycine max
atccggcggaattgtcactatcttcattggtatgcttatcgggtgctttgcaagccagcgtggtggcaatagtagcgactcgtcattctgggcttgtggcatgggccttaggttgggacttcaggctctatggccctctctacacggtcagtactccattccaatatttcttgtttcctggaccccaaaacctatttttgtttcatcttcaaaatctgattttcaaagcaaggtaacacacataataaataagatgaatttagtcggcacaccaaattaatttgttttctctcaatcccagcctattgaatgcaaaaggttacgaggcaagtattgtaactaaaaaagacaaattggtcactccaaaagtaaat

SEQ ID NO: 29427 - DNA, 367 bp, Glycine max
gatgcggaatggggagtgtgcagttcatgatgacaagatgctgtttgaacttttagttttgagcggtgctcaagttggatctgattggacctcaaccttgaagaaacgcctagatttcagggctgcattttcagaatttgatgcagaaaccgtggctaacttgactgataagcaaatgatgtctattagttctgaatatggcattgacataagcagagtccgaggagttgttgataatgctaaccaaattttagagattaagaaagactttggttcatttgacacgtacatttgggggtttgggaatcataaaccaatctccactcaatacaagtttggccacaagattccagtgaagacatctttt

SEQ ID NO: 29428 - DNA, 407 bp, Glycine max
ggaaagagaagcaaggagaaagagaagggttagaaggcgaagaagcatggcttcactcaagaagaagaaaccctattacccgcttccgttaattcctatctattactacttcttattcaaagggtgatatgatcttcttcttccaagagtctcatgcatgctactttcttctctcttctcggggaattgaagcgttgtggtccgattgtttgctacatcaagcaaattaacctgtatactggtttatatatcttcaccttgcacctttctctctctctctctatctctctctctctatatatatatatgggtttaatctcttactttctttatcttttcactttttttcagttttggtttgatttaattacgtgattaaaatttacatatatggatttgaatatata

SEQ ID NO: 29429 - DNA, 303 bp, Glycine max
  modified_base (302)..(302): a, c, g, t, unknown, or other
gatcatcatgaagttgaaggggaaccaaccacctccacgagttatctataattgatgtaaattttcccggaaagagggaacactgtaaaatattagtcttggcttctttaatgtctattttaaagtggaagacttgtgtagtaaaagggtctgcatctagtactcccaataaaagaaaaaaaagagaagcaaattccttcttccttaatttactaattaaatgaaactggtagtgtccaaataattggttttaatttttatcctatcccagtcagtgtatcataaattggtatttataacana

SEQ ID NO: 29430 - DNA, 280 bp, Glycine max
ggacaaagaactcacgagtgattttgagaggctggttcatctttggacacttgattctgctgaacgtgatgcatttttggcaaacgaggcgactaaaaaatggacttcaagcaatcaggttctggtggaaatagtctgcactaggtcctctgaacaattgtttgctgcgaggaaggcttaccatgttctttataagaagtctctggaggaggatgttgctcatcacacaacaggagacttccgtaagctcatactacctctggttagttcttatcgatat

SEQ ID NO: 29431 - DNA, 281 bp, Glycine max
gataggcatgatatcttgtttgcaacaccctaatcttgtgaaacttcatggattttgcattgaaggggatcaattgatattggtgtatgagtacatggaaaataatagcctggctcatgctttattcagctcaaaagatcaacttaaacttgattgggcaacaaggcttatgatctgtattggcatagcaaaaggtcttgcatttctacacgaagaatcaagactcaagatttttcatcgagacatcaaagctactaatgtgttactggatgggaatttaa

SEQ ID NO: 29432 - DNA, 357 bp, Glycine max
gacggcagatcagatccattcttcaacaaatccccttttcagtttcagtttttctcgaggatcccgtgaaacgacatggcgatggtggaccagcctctgtatccgattgccgttttgatcgacgagttgaagaatgaggacattcagctgcgcctcaactcgatccgtaggctcttcactatcgctcgcgcgctctgctaggaccgcacgcggaaggagctgattccgttcctcagcgagaacaacgacgattactactaagtgctcctcgcaatggccgaggaattaggtgtcttcattccctacgtctgaggcgtttagcacgccaacgtgcttcttcctccctttgagtcgctc

SEQ ID NO: 29433 - DNA, 420 bp, Glycine max; identical to SEQ ID NO: 29162

SEQ ID NO: 29434 - DNA, 86 bp, Glycine max
gaagtagaggcagagaatagcactaaaaaggcggtcgtgtaagatgatcttttatggttcaccctaaatattcatggtgaacctaa

SEQ ID NO: 29435 - DNA, 339 bp, Glycine max
tgaagaaggttggttacaacccagacaagatgtccatttgtgcccatctctggtttcgagggtgacaacatgattgagaggtccaccaaccttgactggtacaagggaccaactctccttgaggctcttgaccaaatcaatgagcccaagaggccctcagacaagccactcaggcttccattgcaggatgtctacaaaattggtggtattggtaccgtgccagtgggacgtgttgagactggtgtcgagaagcccggtatggtggtgacttttggttccactgggctgacaactgacgttaagtctgttgagatgctccatgaggctctcacataggct

SEQ ID NO: 29436 - DNA, 359 bp, Glycine max
gatatgtatcttgttgcgaggtgtgaggtgcatagtgttgttgatgtgaacaagcagaggtcgttccttactttgaatgcgttgaacgagtttgatcctaagtattccggtgtggattggaggcagaagttggagactcagaggggtgctgtgttggctactgaacttaagaacaatgcgaataagttggctaagtggactgctcaggctcttttggcgagtgcggatacaatgaagttagggtatgtgtcgaggattcatccccgcgatcatttcaatcatgtgattttggctgtgggtggctataaacccaaggactttgcagcacagattaaatttgacacgacgaatatgtgggg

SEQ ID NO: 29437 - DNA, 444 bp, Glycine max
cggacggatccaagaaaagacagaaggggacatttccatctttttatactctaacacgaacgatgagggtcacgcttggaaatccatccatgccgtggctcccactcttacatccaattcatcttttttaatcaccagtcctcattcaagggtgagcctccggaatccaaggctgagagtctttgccaagaagtctggatcattcccatcatttggactacgcaagcccaaagatgattcttcttctgctgaagaaaaagataactcatccaatttcaacccctttcttttggactttggaaagatacccgatgtaacgtctttcatcccatctacaagcaacacttgtgcgccaagcttttctttaagaaacacaaagcgcaaggaccctttaaacatgttttttttcttcgcaacctaggcatgctggtattctcattgcac

SEQ ID NO: 29438 - DNA, 314 bp, Glycine max
ggcacaggtggagaaagtatatatggggggaaatttgcagatgaaaatttcaaactaacacatgatggacctggcattctttctatggctaatagtggtcctaacacaaatggatctcagttctttattacattcaagcgccaacctcatcttgacgggaaacatgttgtttttggaaaagttgtcaacggaatagacattttgaagaaaattgagcaggtgggaacatctgatgggaaacctacccagccagttaaaattattgattgtggtgaagtctctgaaacaaaaattcagcatactgcagagtaggg

SEQ ID NO: 29439 - DNA, 335 bp, Glycine max
aggtccctgaagtttggaaagttcttgacaagatccaggagttctctgagcagattcgcaatggttcttgggttggtgctacaggaaaggctttgaaggacgttgttgcaattggtattgggggaagcttcttacgtccactgtttgtacacactgcacttcaaacagaccccgaagctgttgaatctgcaaggggtcgtcagctgcgctttcttgcaaatgttgatcctattgacgtggctagaaatatcacaggattaaatcctgaacaacacttgttgtggttggttcaaagacttttacaactgctgagactatgctgaatgctcgaactc

SEQ ID NO: 29440 - DNA, 387 bp, Glycine max
aggtccctgaagtttggaaagttcttgacaagatccaggagtggtctgagcagattcgcaatgggtcttgggttggtgctacaggaaaggctttgaaggacgttgttgcaattggtattgggggaagcttcttaggtccactgtttgtacacactgcacttcaaacagaccccgaagctgttgaatctgcaaggggtcgtcagctgcgctttcttgcaaatgttgatcctattgacgtggctagaaatatcacaggattaaatcctgaaacaacacttgttgtggttgtttcaaagacttttacaactgctgagactatgctgaatgctcgaactcttaaaaaatggatttcatcagcacttgggccctttggagttgcaaagcata

SEQ ID NO: 29441 - DNA, 363 bp, Glycine max
ggcagttcaattccaatatattccattctctctgtgtatttccctacctctcccttcaagatgcagatcttcgtcaagaccctcaccggcaagaccatcacccttgaggtggaaagctctgacaccatcgacaacgtcaaggccaagatccaggacaaggaaggaatccccccggaccagcaacgtctcattttcgccggaaagcaacttgaggacggccgtacccttgctgactacaacattcagaaggagagtactcttcacctcgtcctccgtctccgtggtggcatgcacatcttcgttaagacactcaccggcaagaccataaccctagaggttgaaagctccgacaccatcgataac

SEQ ID NO: 29442 - DNA, 424 bp, Glycine max
cacggtcagtcgttggaagaaacctgagattggttgggtgaagctgaacgtggatggttcacgcgacccatacaaaagttcctccgctggttgtggtggtgttctgagggacgcatcagcaaagtggctccgtggctttgctaaaaaactgaaccctacttatgcagtgcaccagacagagttagaagccattctcacgggcttgaaggtggcttcagagatgaatgttaagaaactaattgtggagtcagacagtgactctgtggtgagcatggtggagaatggggttaagcccaatcaccctgactatggtgtcgtggaacttataaggacgaagcggcgtcgttttgactgggaagtgaggtttgtttctgtctccaacaaggcgaatcgtgtggctgataggctcgccaacgatgctcgg

SEQ ID NO: 29443 - DNA, 349 bp, Glycine max
tacagacagagttggagagttagctaagaagcatggactgaagcttcacattgatggggcccgtatttttaacgcatcagttgcacttggtgttccagtggataggcttgtccaggcggctgattcagtttccgtttgcctatctaaaggtataggtgctccagttggatctgttattgttggttccaagaattttattgccaaggctagacgactccggaaaaacctaggaggtggaatgagacagattggcctctttgtgccgctgcacttgttgccttgcaggaaaatgttgggaagcttggaagtgatcacaagaaagctagacttttggctgatggattaaaag

SEQ ID NO: 29444 - DNA, 411 bp, Glycine max
  modified_base (392)..(392): a, c, g, t, unknown, or other
gagacacgtgggtggatagcaacttagaacacaagtgaactcaaagtggaacaacccaagcttgtttcacagctcaacaacaatggcttctatctcatgcatcacccaccaccccatcacttccaagctcaataatgccttctcttcaccccacgtctctgcctcaaacttggcctcacggtttctgggcaccagaaaaagagttgggttgcatagcctcacctctagaataattggaccctctaatggctccaaagccacatgctggttcaagttcggcaagaacggtgttgatgccaaaggtgctggcatctatggcagccagggccgtgatgactttgatagagatgacgtggaacagtacttcaactatatggggatgctcgctgtanaaggaacatatgataaaat

SEQ ID NO: 29445 - DNA, 419 bp, Glycine max
  modified_base (403)..(403): a, c, g, t, unknown, or other
ggaggataatcaataaacttaaacttatgttatggcattctaactctgaacgatgaaatgaaatggagttccaagataagcgtttatctctgagatcgagcttgacgttcagcgagacgctgtgcgcagtgttcattccgttcataggaatagtcgaagctttggttttcacattcactagttgcttcgatttccaatctcccaggaataagaagaaacattcttctaccttcgacgacattctcaccctcgccgaggattctccatttagtattaatgaaatcgaggccttgcgtgagttgttcaagaagttgagtagttctatcattgatgatggcctcatccacaaggaagaactcacattggcactgttgaagaccaccaccgggggagaaatcttttnctgacaggggtgttga

SEQ ID NO: 29446 - DNA, 380 bp, Glycine max
ggatggagtaattcagctaacagaaagggatgaatgtgcctaccaagaaatgatcactcatcttcctctttgctctattccaaaccctaaaaaggttttggttatcggtggaggtgatggaggggtcatactagaagtagcacgccattcttcagttgaaaagatagacattcgtgaaattgacaagatggttgttgatgtctccaaacaatacttccctgatgtagctgttgggtatgatgatcctcgtgtgacacttcatattggtgatggagttgcatttttgaaggaagttccagaaggaacttatgatgctgttatagtggattcatccgaccctattggtcctgctcaggagcttattgaaaagcccttctttg

SEQ ID NO: 29447 - DNA, 177 bp, Glycine max
cggcgttctagtgtgcgcttgtttgttgttggagctagaacacattcttttgcagatcggaactacccatgcttttttttctaacctgaaaagtgtttgctctgttgtgaactgtggttccggaagctcctgcaagtccgaaaacggctgcgaaggctccaaaatttccccaaactt

SEQ ID NO: 29448 - DNA, 334 bp, Glycine max
aaaggaaactacaaaattttaactaaaatgtttttttccatcataacaaaaccttaatctgtgattttttaataaactattgtcctacccatatatactcaaaactcactaaaatttactactagctcaccaatctaaactaaaacatttcctatccctatgaaatcttatgatatatttaattatctatatttaatttttcaaaatccttttttttcatctcatttataatcatatataaatccttttaacattttatcgtaacatataccaatacatttttcttttaccataaaataaactttatcttttatacatatcaacttattttttt

SEQ ID NO: 29449 - DNA, 293 bp, Glycine max
ggatactagaacctgcagatcgtgatgctgttttggccaatgttgccatcaagaatggcaaaaactacaatgtcattgtggaaatcgccactatcctctccccggaagagcttttggccgtgagacgtgcttatctcaaccgttacaagcactccttggaggagaatgtggcagttatatacctgtggccatatacgcaagcttttagtggggttggtgacctcatataggtatgttggtgatgagatcaatccaaaattggcacaaactgaggctgaaattcttcatgatgc

SEQ ID NO: 29450 - DNA, 441 bp, Glycine max
gaccgagtggttttgaagtggtagaatagcctagaatagcgaaagaaagtgttgctgctaattccatttcagtgacccctaattatgatggaggaattgaacaaaccaatggacggatcagcaaccagctggttatccgatttggaaatggatgattacaatttatttccagatgaatgtcccttgaacttgaacttgtttgatgaccaagagtttctctcacaagacattgctagtgcccttcaagaacagacacagaccttgcaacaatctttgtcttcagagtgcccttcaaaaactgtgagcaactcatccaccgatgaaaccacttttgactttgagagaccagccaagttgctgaaaacgacaacaagcagtagttgttgtaactctgactcatccaccatcaccaaaagcctttcacccaaactttgcccatcg

SEQ ID NO: 29451 - DNA, 224 bp, Glycine max
ggccaacaatttatgtgtttcgaatatatcctcctactgcgttggaaataaatctggcatggctccaactaaagacgactaaaccctattgagaactactacaaacccatttacgtacaaacatcatattgcccttacgttgaagggagttaaatacacatatgtcgaacaaaattatatgaacaaaactgaacttcttttgaaatccaacccatttcacaaca

SEQ ID NO: 29452 - DNA, 358 bp, Glycine max
gacttcaaagtggagaaaaacacacacggttggttcattctctctcttttctttttcctcaaaaagttgaaaaagaataaagggggaacaatcgagtgaagttggtgctcttcaatagtaaacttacctatggaagagggaagggttgtgagtgagtacacaaaagatggaactgtggatcttaaagggaaacccattctcaaatccaaaagtggtggttggaaagcatgctcctttgttgttggtatctctctctctcactataaattttatatggtcattttcatcttggtttggacattaatttcaaaagcaatttcccaaaacatttgaagcttcatgatgttttgtaacaaaa

SEQ ID NO: 29453 - DNA, 422 bp, Glycine max
ggaggaagccacatagagacacaatacagagtgagttgttgctccttcgccacaactctctgccaacatgggtatctccagagattctatgcacaagaggcgtgccactggtggcaagaagaaggcctggaggaaaaagagaaagtatgagcttggtcgccagcctgctaacactaagctgtcaagcaacaagacagtcaggaggatccgtgttagaggtggaaatgtgaaatggagggcattgagattggatactggaaattactcctggggaagtgaagctgtaactcgcaagactcgtgtactagatgtggtttacaatgcctcaaacaatgagcttgtgcgtactcagactcttgtcaaaagtgctatcgttcaggttgatgctgctccattcaaacagtggtatcttcagcactatg

SEQ ID NO: 29454 - DNA, 303 bp, Glycine max
ggattgagaaggaatgagaatggggggaggtttttgtctgatgatgttggtaggtctagcaatcgagggcgagggcaagggcaatcttctcgaacgaattatgggaggaatggagcggatggtgatggcagaatgaggaagaatgggaatgggagaaggtttttgtccaataatgttgatcggtctagcggtggagaacagtcttctcctttgaattatggcggggatggaatggatggtgatggtagattgaggaggaatgggaatgggaggagggtttttttcggtttagacatttacttt

SEQ ID NO: 29455 - DNA, 420 bp, Glycine max
ggccttaagaatggtgatattgaagttacttgggctgatgggatggtatcaatggttggaccccaagcaatctatgtggttggtcgagatgacgatgatgaatcaattgctgctgggagtgaaataagtgatgctgcaagctgggaaactgttaatgacgatgaaatggaagtccttgaggattccagagaggatattgagagggaaaattcaagcagtgttacttctgaggcagaagaaagtggagagaatgattttggtaggactgcagctctctctgttcccctagcagcatttcgatttgtcactagacttgccagtggaatattctcaagaggctcaaggaacttggattctattcccttggagataaaagctgaacgtgaacatccatcacctgtagttaatgatgagtctact

SEQ ID NO: 29456 - DNA, 186 bp, Glycine max
ggaggcagagaagtaagaagaagatagcgagaagtataggctaagattgtccacatcttgtggacagcaggtacaacgagtgtatatatcaacaactacctttcccttttcgtctatcattgcaaacactcttattattcttcttcttcttcactctacaaccactaaacttattgtttggtgttg

SEQ ID NO: 29457 - DNA, 367 bp, Glycine max
  modified_base (37)..(37): a, c, g, t, unknown, or other
  modified_base (46)..(46): a, c, g, t, unknown, or other
ggggaggtctggccgggttttttagaatagcagcggngccacttgnacatgtgaggtttaagaggatgaaggacatccacaacacatcaccaaacaaccttatggagatttgtgccaacatgttttttcccctcaagcgtgtctggctttctctctctgctcgcctcaagcctcgcaaaaacggaacaggactgctcaagctttatgatgatgtacagacttgtggatatcaatatgtacaagtgatgtgggaaatgctacataaaaccgaatgtgaagttatagataaccaccataagcgcaagcagtttcccttctggaggatctttttatgtgccaaccatactatatttgtaaatacgcttta

SEQ ID NO: 29458 - DNA, 296 bp, Glycine max
gggggaattgactagtgcggcgcgctcctattatcaccgtatacggcggaggtggcggtcgtggtgtagacacggcgtgacggcgatctcttgagataaatgttggttgaaagaggaagaagaagaagagctgtatggtaaaacgagccaaccaacggtgatacttgccagtgtgagctatgatcacactattcgttgttgggaggccaatagtggccgatgctaccgcaccattcgttatcctgatgcgcatgctaaccggctggagataaccccggttaaacgcctcctggctg

SEQ ID NO: 29459 - DNA, 387 bp, Glycine max
cacagaggggttaagaattagttggtgatggtcccattgattccgaggagaaaagaaaagatgtggagcccaacagctatacactcgcgcgaagaccgaggaattcgacctctaatcatgagaaaccctctacccacggctgagcgtcggcgagaaccacctccgatggggtttcatccgcaaggtctacggcattctctccgcgcacatcgtcctcaccaccctcgtgtgcggcaccaccgttttctatactccaatcaatgacctcctcaagggcaattacaccctcctcctcatactcctcttgcttcccttcatctttttgattcccctgttgaagtaccagcagaagcatcctcataattacatcttgcttgcactctttac

SEQ ID NO: 29460 - DNA, 343 bp, Glycine max
gtgaagggaaggtgggagaaaccgggtcacagcccactatttgggtatgacttttggtaccaaccacgtcacaataccatgattagcacatcatggggtgctcctagtgcttttacaaaaggttttaacttacagcatctctctgatggattatacgggaggcatctccatgtatatagctggcctgggggcgaactgagacaaacaatggaccttggtgattcaaggcttatacccttagagataaggtttttgcatgatcctgctaaagatacaagttttgtcggcagtgcattgacaagtaacatgatacgattttttaagacccaagatgaatcatgga

SEQ ID NO: 29461 - DNA, 369 bp, Glycine max
gaagaagaagaaggttggttgattggtcccattgattccgaagagaaaagaaaagatgtttgagccacaacagctatacactcgcgcgaagaccgaggaattcgacctcgaatcaggagaaaccctctacccagggctgagcgtcggcgagaaccagctccgatggggtttcatccgcaaggtctacggcatcctctccgcgcagatcgtcctcaccaccctcgtctccgtcaccaccgttttctatactccaatcaatgacctgctcaagggcaattccaccctcctcctcatcctactcttccttcccttcatctttttgattcccctgttgaagtaccagcagaagcatgctcataattacatctt

SEQ ID NO: 29462 - DNA, 428 bp, Glycine max
gaaagaagagaaaataataatatgaataacaacccacaaaacttgggtcttgcaaattaagttcattttcctccctttcactctcgtagacatcacaaaccttccctccattcatcccacgcatggctgccatgaactctagcgtattggcctgtagctatgccatatcaggtgcagcgtgttcggagctcaatgggaaggtcacttccgtggcctatgttgcatgctctggctacaagttgccattgatcaaagctgaggccagagttcctaaagccaaagaatctgaaggaggaaggagaggtgcccttgttctcttggcagctacccttttcacctctgcagcttccaattcttctgccaatgctgggatcattgaagattaccttgagaggagcaaggccaacaaggaattgaatgacaagaag

SEQ ID NO: 29463 - DNA, 384 bp, Glycine max
gggcaaacaagtagtggaaagacatacacgatggttggaataactgaatacgctgttgcagatatttttgactatatagagaggcatgaagaaagagcatttatattgaagttctcagcaattgaaatttacaatgaagttgttagagacctcctcagcactgacaacaacactccacttagactacgtgatgatcctgagaaagggcccattttagagaaactcacagaggagactctacgggactgggagcatttaaaagagcttctagccttcagtgaagctcagagacaggtgggagagacatacctaaatgaaaagagttctagatctcaccaaatcatcagattgacaatggagagttctgccagggaattcctgggc

SEQ ID NO: 29464 - DNA, 435 bp, Glycine max
gagcgagggaagggaagcatctttagctccaatggcggatacctcaggtcgatccagggacctcgacaagctccttctccgccctggcaatctcgtcggtcccaggttcgaaccaggcgctgagttgcgagatgaccttcaggccttcgccaaagtgttggtggtaggggccggtggcttaagttgtgagttgttgaaggatttagccctctctggtttccgaaaccttgaggtcattgatatggatcgcatagaggttactaatctcaaccgccaattcttgttcagacttgaagatgttggcaaacccaaagccgaggtagctgccaagcgtgtcatggagagaattactggtgtcgaaattgtgccccacttttgcaggattgaggacaaggaaatagaattttacaatgattttagcattattggccttgg

SEQ ID NO: 29465 - DNA, 419 bp, Glycine max
ggcagatgtgaatgtgagagacacccatgaatgacagaatgaaatgaactgagtaacaccaacgctgctttcttcattctttcattcattcgaatgtgttcttttgcgattgaatttgagggaacaataatcgattttcgctttctgggcacccctgaattcccctgcatcgctgtgaaagtagttcagttcgaacaacgaaaacgatgtcggctcgattgatgaagaacgttctgaacgagcagcatcaccttccgcaacacgtgagcgaagaagaagaagaagaagagaacgattctgagcccatcactcgttcctccatcaaccccttcgacctcctcaacgacaacgattctgagcccgaagaccaaggtgatgagttgatgtccaccaatgaaatattgacaagttatgatgac

SEQ ID NO: 29466 - DNA, 423 bp, Glycine max
aggaacagcaatgaagaagaggcagagaagagcacgaagaatgctttcgtgaaggtgagcatggatggtgcaccgtatctacgaaaggtggacataaagttgtacaagagctaccaggagctgtcagatgcgctggctaagatgttcagttccttcacgattgaaaagtgtgggtcccaagggatgaaggattttatgaatgagaccaatggctctgactatgtacccacatatgaagacaaggacggagactggatgctcgtcggtgatgtgccctgggagatgttcgttgaatcatgcaagcgtcttcgcataatgaaaggctccgaggcaatcggtcttgcgccaagagccgtggaaaagtgcaagaacagaagctgaagaagtgatttcatctgcgtcacaaggaagcaaattgactcg

SEQ ID NO: 29467 - DNA, 427 bp, Glycine max
tgacatacacacgcatgtacaccttaatggttatatagggtggcttcttcttggtgttattcttgttctggcttgtgctttaatgcattcttcttcttcttcaaacctcttaataactactgtgccttgaatgttgggtttgagtatatctctttctcctccaaaagtagtgccacttacgtagggcatgatgatgaagaagagtggttttgagaagatggtgatgttgcagaagaacaacaagaacaagggaagctatgatgatgagaaaccaaggagtaagacgtttttggtgaacatcaatatcatggggagtgcagggcctattacgtttgtggtgaatgagaaagagcttgtttctggggtcattgatactgctctcaaatcttattcccgtgaagggaggcttcctgttcttggttttgat

SEQ ID NO: 29468 - DNA, 324 bp, Glycine max
ctatacgagttcttgcgaaaacctaccaaacctatggctcactctattacgctacactttaatgggatggacctgaaacttcctttgtaaaacagattgatacacagcatcactgattagatttcatgtcttgcaattgcagtggcacccttcaatgtgaaactcatgtttaacagtatctccaactttcagaaacagaaccttaggatattgtttgataccgtccataataacgttggcatatcccgttaagtatgtaactagctggctgactacatttttatttatttatctaataaaatgtaccacctggatttcttgatt

SEQ ID NO: 29469 - DNA, 371 bp, Glycine max
gggggaaagagagtggattcttggtgactttcttgaccagaaaagtagcaaccgcagcaccaaagactttgctttgcatctatcgaattctaatccaattctctctgcatctacatatacaatatcataatcgttcataagattgcatttgcattgatttcaaaaatgcagatcaggggatcgagtcacagactctccagtatgggcaataatcgatcccgcattcccgcgctcctcatctccatgttcgccactttcgcttctatctacgtcgctggaaggctgtggcaggacgcagagaatcgcgtttatctcatcaaagagctcgataggatcactggccagggacaatctgctatatctgtggatga

SEQ ID NO: 29470 - DNA, 321 bp, Glycine max
  modified_base (273)..(273): a, c, g, t, unknown, or other
ggatccaatcaagaatacaataacatagcatagagtgagaagtgagaagagaaaaatggcaatctccatacccagtagacaacttttcatagatggagagtggaaagtccctcttctcaacaatcggtttccgatcatcaaccccgctactgaagacatcatagggcatattccagccgctactaaggaagatgttgaccttgcggtggatgctgctaaaagagccttttcccataacaaagggcaagattggtcttcagcttctggctctgntcgtgctcgctatcttcgagccatcggttcaaagattacagagaaaaa

SEQ ID NO: 29471 - DNA, 405 bp, Glycine max
  modified_base (308)..(308): a, c, g, t, unknown, or other
ggaagcaatgaggcgttgatttgatatcagtatcggtgatgaagcaacacgagttatctctgttactgtgtctcccatgggcactaacccttctctatggtgagatgttcgcttactgggttccacccctcttcacctgttcctggccccatcttcttcgcagttcttcttcttcttcttcaacgcaggttcaaacagacagtgggaattatcagggtgattatgttaaagtggctgttattgcagatccacagctcatggataaaacttctctccgtcttcctgcaagatcacttgcactggaactngcagaattctacactgatttaaacatgcgtagatcattctttgcatctgtcctgcctttcaaacctgatgtcatatgggttttaggtgattactttg

SEQ ID NO: 29472 - DNA, 402 bp, Glycine max
gacacgcagttgtattgtagaactgaacaagggtttctctttctctttctctgtctgcttcttcactttctctcgtttcaatcgaaaaaaatcatgggcagaaaattcttcgtcggtggcaactggaaatgcaatgggaccactgaggaggtgaagaagattgttactactttaaatgaagctaaagtccctggagaagatgttgtagaagttgttgtgagccctccttttgtgttccttccttttgtaaaaagtttgctgcgccctgatttccatgtctcggcccaaaattgttgggttcgcaaaggtggtgcttatactggagaggttagtgctgaaatgcttgttaatttgggaattccttgggttattattggtcactctgaacggaagcagcttttg

SEQ ID NO: 29473 - DNA, 411 bp, Glycine max
ggagagggcgattctggaaaataagatggaaggattacaaagagtatagagggaagggagggcaaagccaaaggggatttcgttgtgttgtgttcctccgccagcgttagagatgagttccgccgataccgtcaatgcgagttctgctgagtctgtcaaagaacctgtcataaggtcaagtctggaagcaaaacaggatgatactgaaataaaatctcaagttgatgccatgtgggaacaaatgaataaaggagtatctaataagaccctcaacagatttacaagcaagcctaattctgctccaaaaaaaaactgcaaagaagacatcatctaactggatgtcttatttggccttggcaccgaaggcaactgaatcccttgggcaaagtgcttccaagaatggacctggca

SEQ ID NO: 29474 - DNA, 223 bp, Glycine max
ggttgaagaatttgacagagtgagaaatatagaaatggcgtcgtggtgcggtgctcggagcttccagattccggcgatggaagacagcgcactgcgcaaccgtgcttcattggccgccggagtagggcgtttgtcggtggccggaacctccttctggcgctcctcttcgtaaccgaagcgctctttgccatacacatgctggcgcatttcttccgacactcgt

SEQ ID NO: 29475 - DNA, 415 bp, Glycine max
ctacacgaagactctcacaactgcattatacatcgcgacataaaggcaagtaacatcttactcgatgaaaattgggtgcccaagattgcagatttcggcctcgcacgactcttccccgaagaccaaacccatgtcaacacacgtgtggctggaaccaatggctatttggctccggagtatctaatgcatggacatttaaccgtgaaggctgacgtatttagctatggggttttggtgttggaattggtcagtggccagcgaaattcatcctttgatatggacgtgagtgcacagaatctcgtcgactgggcatacaggctatacaagaaagggaaggccttaaaaatcgtggacccaacactggcctcatcagtggtagcagaacaagcagaaatgtgcattcaactgggtctac

SEQ ID NO: 29476 - DNA, 431 bp, Glycine max
  modified_base (397)..(397): a, c, g, t, unknown, or other
gatggaagaaaagaaataaaaaaaagtaagataaaaatgcagtagaagagtcctgattccaaacgaaaaaattcaaacttgattgaaaaggatctttctgattattgaagaatgggacaaaaggattgatcgcgaaaaagatttcttgttcttattagaagatcgtgattggatccacatatgtttggtaaaaagaaagaaaaatattcttctttgagaataataaaaaaggaaagtgttcaattggaacatgaaaacgtgacagaattggtcctagttactcttcggaacggaatagaagaaggggagagattctcgaaccgaactaggaaacggatccaatgacttcaaaagaattgaacgaagagccatatgaagtgaaaatctcatgtacggntctgtagagtggcagtaagggtgacttatctgtc

SEQ ID NO: 29477 - DNA, 151 bp, Glycine max
ggattcaacgaggcgtcgatttcatatcggtatgggtgatgaatcaacacgagtcatccctattactgcgtctgccatcagcactaacccttctctatcgtgagatgtccgcttactgcgctccacgtctcatcacctgctcctgtactca

SEQ ID NO: 29478 - DNA, 434 bp, Glycine max
gttggtgaaaggagaacctaatgtttcttacatctgttcaagatactaccgtgctccggaacttatatttggggccaccgaatatacaactgccatagatatatggtcaactggttgtgtaatggctgaattacttcttggacagcccttgtttcctggagagagtggagttgatcagctagttgaaatcatcaaggttttgggaactccaaccagggaggagataaagtgcatgaacccaaattatactgaatttaaagttttccacagaataaacctcatccgtggcacaaggtctttcagaaacgtttacccccagaagcagtggaccttgtctgtaagttctttcagtactcccccaatttgagatgcactgcatttggaagcttgcattcatccattttttgatgaattgagggacccaaaacacccgc

SEQ ID NO: 29479 - DNA, 439 bp, Glycine max
  modified_base (278)..(278): a, c, g, t, unknown, or other
ggcgagaaataacgaagcacgttactgaagtggaacctctggatctctctctctctctgtctctgcgatggagtttcgcgtttccgtcatttggagccttctcctcattgtctctttattctctcctgaaatcaagggtgaggcttctggttccgtcttcttcgtcgatagctccagtaatcaattccttcgcgctagatcatccaacgatgagcaactttcaatgttgcttcaagaagttggtgctgctgtgtcagtcttgcttggttttgcacctncttccaccttttctgctgccagctcatccaagttgaatgaggttctaattcctaacccattcaagaggccccgcgctgtgtttttgctggaaagtaatggaatcaatgctcttggaaaaattgtccaggataatccaatgttcagcaattcattttggagt

SEQ ID NO: 29480 - DNA, 278 bp, Glycine max
ggagggagacggtagcagatagacctaaacacgaaactcgcatattccatcaacactggagtcgctggaaaatctattctgggactcatgctacgacctgcccttgcttaatataccatgagactcattctaagaaggctctggatagtctcagacattatctgacaacgcgaatcggatccgttaattgatgctcggtttgaaccatacgataatcagtgctatgattatgatgtggagtatcgttaatcatctaattggtatctgatttcgacata

SEQ ID NO: 29481 - DNA, 398 bp, Glycine max
ggaggctcggaattgcatagagattggaatcagagatgctaacaatagcaatagcgttgtttactcttatttaatttcattcgtcgtatcggagtttgatggtttcatcgaagaaacaatacccccattcttcttcaactctctccctccctccgagagaggatcctaaattctaatcattcaaatctaatctcataataatggcggctgtgtcaggaggagggagtgagatatggaaggcccacacggcaatggccatggtgcagttattcaacggaggttatcacgtcatcaccaaagttgctctcaacgttggggtcaaccaaatcgtcttctgcgtcttccgcgacctcattgccctcgccattctcgctccactcgcttacatccgcgtaaag

SEQ ID NO: 29482 - DNA, 449 bp, Glycine max
  modified_base (427)..(427): a, c, g, t, unknown, or other
ctgcacgtactcggtctcgtgaattcccgggttcgatcccacgtcgtctcgtatcggctgtcgagaagttcgacatgaaggggggaggtggagagagggagagaagtgagagtagtgagaggggagcatcagtgaatgaagtagaatcgaagggaactgaagaatggagatcttcctcctctcgtcaacatagggtcgtggtgatagatagaagggagacataggggtccgaaaatcccaagtccgaatagacgaacatcgccaagtgcgttgaagggaagggagaaaaacacatgcatcatacatacatgatcagtcagcatcatactacaacagcaacatcataaccttcggtggactgagaaatacatctcagttggaagtcccttggttcctgtcctctacgactgggctcgccaaccacaancctcgtctggcccctctctctc

SEQ ID NO: 29483 - DNA, 410 bp, Glycine max
ggtgattgtttgttgttgtaactcgttcttcttcttttgttgttctgtgtttgtgtttgttttttctctcacctgaaaatgtcttgctgcggtggtaactgtggttgcggaagctcctgcaagtgcggcaacggctgcggaggctgcaagatgtacccagacttgagctacactgagtcaaccaccaccgagaccttggtcatgggagtggcacctgttaaggctcaatttgagggttcctgaaatgggtgtgcccgctgagaacgatggctgcaaatgtggaccaaacttggtctgcaacccctgcacttgcaagtgaggtgttgggagagcaagcttcaagcagagatagcccttaattaggaataatgataaactattaatgtgtagctaaaaacttatgtattatg

SEQ ID NO: 29484 - DNA, 407 bp, Glycine max
ggagagaaaaaatggccaaatcaatcaaattctttgagttgaacacaggggccaagattccttctcttgggttagggacttggcaagctgaacctggtgttgtagctgaagctctcaccacagccattcaggttggatacaggcatattgactgtgctagtgcgtataagaatcaagcagagattggttctgctcttaagaagctttttgatgatggtgtggtgaagcgtgaggacttatggatcacttccaaactctggtgttcagatcatgcaccagaagatgtgccaaaagcattggataaaacattacaggaattgcaactttgactatctgacctctatctgatccactggccagtccgcatgaaaagtggaacatttggtactcataaggatatcttgagc

SEQ ID NO: 29485 - DNA, 439 bp, Glycine max
gatctttatatggaaatgaaagaatctggagtaattaatgaacaaaatattgcagaatcaaaagtagctctagtatatggtcaaatgaatgaaccgcccggagctcgtatgagagttggtttaactgccctgactatggcggaatattttcgagatgtcaatgaacaagatgtacttctatttatcgacaatatctttcgcttcgtccaagcaggatctgaagtatctgccttattgggtcgaatgccttctgctgtgggttatcaacccactcttagtactgaaatgggttctttacaagaaagaatcacttctaccaaagaggggtccataacttctattcaagcagtttatgtacccgcagacgatttaaccgatcctgcgcctgctacgacatttgcacatttagatgctactactgtactatcaagaggattag

SEQ ID NO: 29486 - DNA, 279 bp, Glycine max
ggcgcattgaacgaaaattagggtttgtagtgtagcaggaagaagcagcaatggcgccgaagataacacgtaaggttagcagaaaccctgaattgataaggggaatcggaaagtactcgaggtcgcagatgtaccacatgaggggcatttgggctatcaaggccaaaaacggtggcgttttacctcgccacgaccctaaacccaagcctgaagctcctgctgaaaaaccacccaaattttaccctgctgatgatatcaagaagccccttgtcaacaagc

SEQ ID NO: 29487 - DNA, 416 bp, Glycine max
ggcactggtggtgcgccaccgcatgattagttcccggaagtggagtcgcgccatggcgatactgaaggagtttgaggacaagtgtgggaccccaattgtgaagcttagacaagtggctgatgccatggatgttgagatgcacgcaggtctcgcatctgaaggtggtagcaagctcaatatgttgatcagttttgtcgataatctcccaactggggatgaggaaggactctattatgcactggatcttggaggcacaaacttccgtgtccttcgtgtacatttaggcgggaaagacaaaggtgttatcggccaggagtttgaagaagtttcaattcctccaaatttgatgactggctcttcagaagcattgtttgattttatagcagcagctcttgcaaagtttggtggttcaaaac

SEQ ID NO: 29488 - DNA, 342 bp, Glycine max
ggcgtcttggggtgtgagatcaaaccctagattttagacactggaacagtagcatcagcagccatggcgagtatgaggtgcctgcgagcgttaactcaaacgagaccgtatatcttgcgaaaagcatactatgttcgctcactcgacgtgcttccatttgccaactgcaacgcttttgcacactctttcaccgcacacgcctatgtttttgcgcagtgcccgcacctgcgttgtgtctcttacgacacagaagacgaccacagcgacgaacaagatgaatgcgacgaggattaacgtgaacagacaagaatattgtgacgatgatgacgtacatgtgtcaag

SEQ ID NO: 29489 - DNA, 407 bp, Glycine max
gaagaaagaacggtgtttgtcgacttcagcttgtgggtcttggatgaatacaaagtggtagaaattgacgaccacgaaatcaaaatcctcccttgaacttgagggctgcgttagtggcagtgcagagggtaacagcttacgatgggtaagagcgagagaagaggagttgctgaatttgaagagaggcttttggaattgcaacacaagacttgtgttggaaaaagaagcagtaactataggagcgagagcgagtgcatgtgcatgtgcaccggacccagacacagagaagacctggctgcaccacctcatcctttcttgcccctctatccgatgccaccgtgaccgagtctgtgaatcagttgttaacaaaatcttggataacagctaaggcccaagcccaactcatg

SEQ ID NO: 29490 - DNA, 399 bp, Glycine max
ggttcttcgcgttaattgaacatgactgatcctcaatcaatcaccatgaacaaatcctcagatgcagcagcgtctccatattgcagaggcaggtccaagaaacccaatctccgaagctccaaatcccaacccccaagccacgttgagttcagctccaagacgccggagaagctgccgcagcgaatccgcaaccgcggcgtagcgctctccgtcgccgacatcagaaagggccgcctgcaagcgcttgcaagatcagaagcaatgcactgaaacgacgtcgtcatcgttgtcgtcgtcgtcgtcgctcagcaaaagtgtcaggaggcagatctcactggggccttcttctcccagtaaacccatggctactgaagatgaatcctctaatcttcccgaaaa

SEQ ID NO: 29491 - DNA, 414 bp, Glycine max
ggttctagtgtgtgattgtttgttgttgtaactcgttcttcttcttttgttgttctgtgtttgtgtttgttttttctctcacctgaaaatgtcttgctgcggtggtaactgtggttgcggaagctcctgcaagtgcggcaacggctgcggaggctgcaagatgtacccagacttgagctacactgagtcaaccaccaccgagaccttggtcatgggagtggcacctgttaaggctcaatttgagggtgctgaaatgggtgtgcccgctgagaacgatggctgcaaatgtggaccaaactgctcctgcaacccctgcacttgcaagtgaggtgttgggagagcaagcttcaagcagagatagcccttaattaggaataatgataaactattaatgtgtagctaaaaacttatgtt

SEQ ID NO: 29492 - DNA, 414 bp, Glycine max
gccgccaaagccggagaggatcgtctctctaaggtgccggtgcgtaatataaggaacttctgcatcattgcgcatattgaccacgggaaatccacgttggcggataagttgcttcaggttaccggcacggtgcaccagcgagagatgaaggatcagtttctcgataacatggatttggagagagaaagaggcatcactattaagctccaggcagctagaatgcgttatgtgtttgaaaatgaaccttattgcttgaatctaatagatactccggggcatgttgacttctcgtatgaagtttctcggtcactcgctgcatgtgaaggtgctcttctagtagtggacgcttctcacggcgttgaagcacaaaccctaactaatggttatttggctttggagaacaacctggaaatt

SEQ ID NO: 29493 - DNA, 401 bp, Glycine max
tgaagggggagcctaaggtgtatgaaataagacgacaatattttgttccgatgggaccggacaagggacgatgaaatcagtgtagtggaagaagttgtgtttttgttgggacaattggtggctctcaaattgtgaaccgcacatatacccaccctgcttcccacgccacatcgatctcacgttctctctctttcttttttcttgttgaaactgtgagtctatgttatttgtggcggagcatgaactcctgcaccaacacctcgaattctcagtcaatggctgcagcatccagtgatgggtctgggaagaaggtaagaaaaccttacaccatatccaagtccaaggagagttggactgatgaggagcacgacaagtttctcgaagctcttcaatatttgaca

SEQ ID NO: 29494 - DNA, 415 bp, Glycine max
gggtgtgagttcatttgatgcaaacagcattacaagtctgtcgcaatatgtgaagccacttaccaacttccttgaaaaacttttggaaggcgaaaaggtgatcttggttggacatgattttggaggggtatgtatatcatatgcaatggagatgtttcctcttaagatttccaaggctgtctttattgctgcagcaatgctgactaatggacaaagcactcttgatattatttctcaacaggcaggttcaaatgatcttatgcgacaagcccagacttttgtatatgctaatgggaatgatcatcctcccacttcttttgatctggacaagtcattgtcgagggatttgttattcaaccaaagtcccaccaaagatattgcactggcatgtgtctcaatgaagtctgtaccattt

SEQ ID NO: 29495 - DNA, 296 bp, Glycine max
tggggatctacttataacgttataaaaatacacacgtgttgctggtcacatgatacaaactccactaatactaaaagtatttctattattactccaaaaataccaaaataactcattgtgatatgcatttcatcaaatttaactgaattaaatttcattatacaagtcaccactcataactagacatacctgtcacctgattctcaaaaactccaaagtataaattctataaactccttcataaaattatcctctacatcttaacgaacttaaatatcaatgtgtccatttacact

SEQ ID NO: 29496 - DNA, 422 bp, Glycine max
tgggagagtgagaaagagacagagagaattgggaaggcctaatttcggaaagatcggcgatgactgcctccaaggatcgcgagaacttcgtctacatcgccaaactcgccgagcaggccgagcgttacgaagagatggtggaatcaatgaagaacgttgcgaatctcgacgttgaactgacggtggacgagcggaatttgctttctgttgggtacaagaatgtgattggtgctcgcaaagcgtcctggaggatcctgtctttcattgggcacaaagaagaaacaaaagggaacgagttgaatgcgaagcggattaaggagtacagacacgaggttgaattggagctatcgaacatctgtaatgatgttatgagagtgattgatgagcaccttatcccttcagctgcagctggtgaatccact

SEQ ID NO: 29497 - DNA, 325 bp, Glycine max
ggggaccaattctttaatgagcgagagagagagggcgcgatagtcgccatagccataatttattgttattatttagggatgagtgaagtgaatgaatgaaaacaaaaacaccggcatcgctcttgtctctcacggctgactctgcggttcttaatctctacgacatctccgatctcttccatgtacctgatcacatcctcctcgacctattcctgagaatattgaaggctgggaagctgactgagaaagttctgagactttctatagcaactggtaacgatgaaggcctctcatttgatcatgcactcaatatcgcacatatttt

SEQ ID NO: 29498 - DNA, 420 bp, Glycine max
  modified_base (382)..(382): a, c, g, t, unknown, or other
ggttctagtgtgtgattgtttgttgttgtaactcgttcttcttcttttgttgttctgtgtttgtgtttgttttttctctcacctgaaaatgtcttgctgcggtggtaactgtggttgcggaagctcctgcaagtgcggcaacggctgcggaggctgcaagatgtacccagacttgagctacactgagtcaaccaccaccgagaccttggtcatgggagtggcacctgttaaggctcaatttgagggtgctgaaatgggtgtgcccgctgagaacgatggctgcaaatgtggaccaaactgctcctgcaacccctgcacttgcaagtgaggtgttgggagagcaagcttcaagcagagatagcccttaattaagaataatgantaactattaatgtgtagcttaaaacttatgtattatgt

SEQ ID NO: 29499 - DNA, 409 bp, Glycine max
gagagaaagagagagaaagatgtcgaagcgtggtcgtggtggttcggcggggaacaagttccgcatgtcgctgggtcttccagtggcggcgacggtgaactgcgccgacaacacgggggcgaagaacctctacatcatttcggtgaaagggatcaaaggccgtttgaaccgtcttccctcggcctgcgttggcgacatggtgatggccaccgtgaagaagggaaaacccgatctgaggaagaaggtcttgccagctgtcatcgttcgccagcgcaagccatggcgccgaaaggactgcgtctacatgtacttcgaagataatgctggtgttattgtcaatcccaagggagaaatgaaaggttctgctatcactggtcccattggaaaagagtgtgctgatttgtggcct

SEQ ID NO: 29500 - DNA, 427 bp, Glycine max
ggtgtaagagtgaagagtgaagagtgaagagtgaagagtgaagtaacaaagcaaaaagagcggagggaaagtcgtgggaacgaagaagccaacaaagacaaatcaaggtgaaaaggaaaaagcccttatgcttttttgagtttgtttctcaccagcttgagttgtttagaagctcatcttaagcattgtggcagacctgagtgagcattttttgagtggaaaatatgagctacagtggctcctcaatgagttctggtagtggatcttctagaaggacatttgagtttggaaggacccatgtggtcagacctaaagggaaacaccaggcaactatagtttggctacatggccttggtgataatggctcaagctggtcccaactcttggaaactcttcctcttccaaatattaaatggatttgcccaac

SEQ ID NO: 29501 - DNA, 312 bp, Glycine max
ggaagctaagcgaagcaaaatgggtggatcagtgagggacgtgaagtcgaagggcgaggccgacgaggtggtggcgagtggctctccggttatcctccacttctgggcgtcgtggtgcgaagcttccaagcacatggaccaactcttctctcacctttccactgatttccccaacgcccgcttcttaaaggtcgaggccgaagagcaacccgagatttctgaggcttactccgtctccgctgttcctttctttgccttctgcaaggatgggaagacctttgatacattgggagggagctgatccgtcaagct

SEQ ID NO: 29502 - DNA, 367 bp, Glycine max
gaatggaaaggggagtttttccctgacattcccaaaattaaatatgagggtccgtcaagtaagaatgtgctttcatttaaatggtataatgcagaggaggaaattcttgggaagaagatgaaggattggttaagatttagtgttgcattttggcatacattccgtggaacaggtgctgacccatttggtgcacctaccaaatactggctatgggaagatggtaccaattcattaaacatggctaaaagacgaatgagagctaactttgagttcataagcaaactcggtgttgacttttggtgtttccacgacagggatatagcccctgatggaaaaacctttgaagaatctaatgcaaacttggatg

SEQ ID NO: 29503 - DNA, 403 bp, Glycine max
tacgaaaagaatttcaagaaaggcttgttaacagacaacactctgcctttactcacagacagtgctctcagagatgtcaggattcctcctggacctaggcttttgattcttgaccatatccagagggacgcggatttgaaagagaagcgaggacgccgaaagtgactgatatgaagagtttgctgcctttgaactttgaaatccattgaaaaatggatagtaggaagtttgtgttccaaatgaattttgtctttttttgtttgttagctctgttcaattgttgttgcagaatacttgatacaatttggttaaccaatcagttatattttagttgtgccatgaaacgtaaatggcttgaaaagtaattaaggagcatgaaattgttcactctaaaataagaaaa

SEQ ID NO: 29504 - DNA, 414 bp, Glycine max
gcttgaagctgatattcaccatgccaataccctggcgtcagattttccaagggaatatgatgggacctgccttcagatgagaatgtcatacagtccagcagcacacctgtttctcttttttgtgcaatggacagactgcaatcttgctggagcccttggactgttaagaatcctaatatacaaagtgtatgtggatgggacaactaccatgtctacccttgaaagaaaagcaagtattagggaattctatgcaatcatatatccctctttagtgcaactgcaagaaagtgtggcagatacagaggattaaaaacagaaggctgtatgcatggagaggtatcgcaaaagagatgatgaggagcacagacagccttcagacatagacattgaaagagaagaagaatgtggaatatg

SEQ ID NO: 29505 - DNA, 409 bp, Glycine max
gggcgccgcaattgtcatgacccaaaattatatggttctatcgagtaacctttacaaccttgtgtcgtcaaccaccctccaccgcatcgtcgaacacccgtatgtcgtcgtcgtctcaccaccacagcgcctcgcattagagcaccgggccgtcggagcaggttttaaggctcttaatcatgttgagatttattttctcgaggaagtcgcaccactttgctgttgcaattacattgcaatttccactgttgacaaaataaagtacccacaatcagctaaacaggaaaaactcaattttaacactacttgttgtatcttcaggttcaacccaaccaagtgtggtgtgaggaagaggtaaaaagtaacatagaggtgaaagagaaaggaagagatgtctaggacgctagtg

SEQ ID NO: 29506 - DNA, 387 bp, Glycine max
ggaaccgagcattagttatattcccacgaacccagtccctgtttctctgtcttttttttctttatccatgcgcgttgtggaggacagacagaatgcaccaagtttagatctagcctgtgataccaatcgcatatatagagcaagctctataacactgcatagaacattgtacggatccgtgtccagaacagaatatactatataacatcgttgtggtgattgaatcatgtcgcggagaccggtgaatccgtctcggcgattcggagacagtggaggtggattgttttcatcttcgaaatcaaagtcgtcaccggttgtgtcggttgggctcataattgtgggatgcctgtatctcattgcgtatgtgtacaagggctcaggcgtttt

SEQ ID NO: 29507 - DNA, 382 bp, Glycine max
ttagattaaggatgagctttgtgctgatctgtagcgtaatcaagttatagatcgtcatgctggtgatctttcgggtggtgagctccaaaggtttgccattgcggttgttgcgatccaaaatgctgatatatacatgtttgatgaaccttctaattatcttgatgttaaacagaggctgaaagctgcccaagctattcgatcattgcttaagcctaatagctatgtaattgttgttgagcatgatcttagtgtcttggactacttatcggactttatttgctgactatatggtaaacctggcgcatatgctgtggtgacacttcctttctcactctagaatgaattcacattttctttgctgcctttgttccaacataaaatc

SEQ ID NO: 29508 - DNA, 403 bp, Glycine max
gacgggggtgaaaagggactatatgtaaagaagtgcttgagagactaatctgcacacagcaatacaaagtgaagaagcagaagcatattcagagagagaaatggaagcagcatgggtcaatattctgatgctgatactgatactgactctgatatgggcatggaagaagctcaactcattatggctcacgccaaagaggcttgaaaagatcttaagagaacaaggccttcgaggcagtccatacaggtttaaggttggggacacgaaggagacattgaagatgcaaatgcaagccatgtccaaacccatgaatctcttctctaatgacataggaccgcgtgtgtctccctatgatcattacattgtcaacaaacatggcaaaaattcttttatttggaatgga

SEQ ID NO: 29509 - DNA, 429 bp, Glycine max
ggatgactgatgaagaatttgctagagaaacgagtgctggtgttaatccaaatgtcattaagattcttgaggagttcccaccacgtagcaagctagattctcaagcctacggtgatcatacctctataataacaaaacaacacttggagcctaacttgggtgggctcaccgttgagcaggctatccagagcaagaagttgttcatcttagatcaccatgactatctcattccatatttgaggaaaataaatgcaactaccacaaagacttacgctacaagaaccatatttttcttgaaaagtgatggaaccttgacgccattggccattgagttaagtaagccgcatcctcagggtgaaggatatggtccttgtagcgaagtctacgtgcctttgatcgaaggaattgaagcttacatttggttactgg

SEQ ID NO: 29510 - DNA, 410 bp, Glycine max
ggaacgagcgagcactgagcagcggttgcaggaaaagccgtgtcagcgagcgtcgcattcacggcgatggcggagacggtgagacttcgcgtggtgttcgaggatcgtggcatgttgagcaagtcaaagaagaagcaagggctcaagcgttgctggtttctgcttaaaccccaacacaccaccatttccgatgttgcctctcatctactcaacactttccgcctccaccgcacctgtccccatgacatcgtcctatcgatggatggttttgttttgccatcttttgagttcacttgcattttgaaggataaggacattgtgtgtgtgaaaagaaaaggaagtgtatcaactgatgataaatctgcaatgctgcggcccgcgacatgtgagaatcaggctattgagcttca

SEQ ID NO: 29511 - DNA, 405 bp, Glycine max
ggccatttctgtgtgtgatcacattgtttccctgtatcgtcttctccctccttgttcaatggtcttagggtttccggtgtccatgcgtagaagctagcaataatgcgtttttgaaacccgtattcatctgtatccaacgatttactagaaggagatcgcaatttctccatcttctcgtttcggtggctcgtgaaatcgaaagttatcgaaactttcgcgcgacacgaagtattgggaaccaagcaaaatttctatggctgacgaaccactatatccaatagcagtgcttatagatgaagtgaaaaatgatgacatccagctgcggttaaactcaattcgcaggctatcaacaattgcgcgtgctcttggggaggagcgaacccgtcgagaattaattccattttt

SEQ ID NO: 29512 - DNA, 289 bp, Glycine max
gatcttctttgtgaatgattattgaagaccatgtatgtgaatgttcatgcaggatgatttatgtcagtgcgcttggggtaagatgaagctcatggcatatgacattcattgcagctcatctggctatacaagaaatgctcctttacctggtatactaaatgcgaagtttctgctgattttaccaagattgaatgagcagttgatagcctgagcaggaagatactgaccatacactccactggtgattactagacttccaggtcacttgtgctgaaataatgagtgttga

SEQ ID NO: 29513 - DNA, 411 bp, Glycine max
ggaacctacgccgagcgaaaccccaaataccaatccaatgctctcccaactcacaaagccatgtctccaggtcccgttgtcgacgcttcccctgaggttgatgcagagcaacaacttccctccgtcgatgacgccactcagaagaagataccccaaccacaggaggacgatgctccccttgtcgaggacttgaaggatgatgacaaagacgacgacgatgaagacgacgacgacgacgacgaagatgacaaggaagacgatgctcaagatcaactaggtgagcacctcattgaatctggcacacctcaatttgaagagggatgaccctttttggaaatcttcagagtactgcttctgatcactgagctctttcttataccaacattataatttttgtgattctttttcttg

SEQ ID NO: 29514 - DNA, 382 bp, Glycine max
caaagaccagctaaacttcattttgaaacacagaaacaacccaaaaaaaaaaaaacctctctactttctctctctacattctccgccatttcccgagaaaatctcgccaggtttggtatgctagctaaatctcatgctttccaaataattctcatggtggatgtatctgctttcaacacatgcttccaaaggatgatagttggtattgatatttgattatcagttacatagcagactaaaaagaaagaattgaatcttgcactgctaatcagtgaaagttttcctacagttatttctttgaatctgatataccatctgcatcccttttttttcttctatgtttggttcctccataattaccacaagggattgtatgaaagat

SEQ ID NO: 29515 - DNA, 417 bp, Glycine max
ggtggtggaatgtggaatacaaatgttgctcttgatgtaataagaaaagatgatgtttctgccgcaatatttgctcctggatgggtctacgagactaagcaagcaccagattttgagactgctcagaatcgttggtggagtctcgtggaaaaatcttggggcatagtgcgaaagtatcttggaacactaccattttacacaaattttgatcagggacgcggttatcatatttcagttgatggagaccaagtatcagatgctacttggtgcaatatttcttcccaaggtgttcagccactccttgagtttgctgattctactgcaaattctattcaacctcttgtagacttgaaggaagtatcatatagtggagggggaaatattacattcaaaggatctcttgaaaaggataattac

SEQ ID NO: 29516 - DNA, 385 bp, Glycine max
ggcattcactctgtgagagaaagagatagggtgggggagagagaggagcggaagtgagaaaatgactacgaggttcaagatgatcatgacgactagaggccacgtctgctcctgtcacggtacgtatcgtgaagcaccgtaagcatccagatagtcgagataacgtcagtggcatgcaccatcaccgggtactcttagacaagtaccatccgggattcttcggaaaggtggctatgcgctacttccacatgctccacatcaaattctactgagccatcgtctacattgatatgctgtggtccctcctactatacgaggctctggacatggccacggccgacaatgcgccattgctcgatgtcacccagttatgttgctttaaggt

SEQ ID NO: 29517 - DNA, 294 bp, Glycine max
tggtgcacgacgactactgattccggacttacatcagtatgacagcataagtgggatgggttaataattaagtcgcttagtgacacggatcattcaccggattttcatgacccttcatgtatgaaggcacaattaagaagacctgcatttatagtgagcactcatactatagaatacagagaggaccaccattgcaaacactattattgagttctataagagaaaatgatgtttaacacaaattttcagagaaccatggtgtgcacaagccaaaacacatagaggggcttctag

SEQ ID NO: 29518 - DNA, 332 bp, Glycine max
cggtcttgaattccgacccagacgtacgcacacgcgcgcgtacacctgccagaagacttcagattacgattgggctgaatgcaagttcgttcagcttattgatgttaatgttaaaaacctctactgtgctgatactggtgatctattgacgattgctagtgatacatcattctatatcctgaagtacaatcataataatcatacatcatatctatatagttacactgctatatatctgcaaggcgtttaatattccttttaactacatcattaaatgaatgaacgtatcatgacttatatctagaataggcattgcattatctactgcaatt

SEQ ID NO: 29519 - DNA, 429 bp, Glycine max
ggttgcagcagcaaacagcgaagagaagggctagcaaatcttcaatcacctcacatacggaacctttctacaacctgcatttgagtctctgcactgcaatgcaacaacaccaatcttatgaactggtgcctttgaacaaggcatatgcctatgtacatcttaacactgcaaatgaagctgctgttcaagtcatggtggccgcaaggatagctcttatgatcaacatgatcatgcttcatctaatgaagaggctcttcatatgacaatgcctttgcagcacatgatggatgctaagacagctggagccaaataggcatcattggataagcaaagacaaattcatgagctcgatgcacaattgaatgaaaccggagatctcataacagatctaacggcatagtttaagcttgcatatctgcagttagagat

SEQ ID NO: 29520 - DNA, 395 bp, Glycine max
  modified_base (297)..(297): a, c, g, t, unknown, or other
  modified_base (382)..(382): a, c, g, t, unknown, or other
ggggttgaagaaaagaaagggtgtttacactttacttgagtgagactgagagtctcaagagagtgtgtgtgagtgtttgatattctcgattaaataaatctcactgtctctttctctctctctctctgtctctgtgtttttgttgtgttctctttactacctcttgaaaccaaaagggtcactctctgtgctgtggcctctgttttcaaaggaaacccttgttcttttccttgcctttctttcttagcactgtcttccaactcccaactcatataatttcattttccctagtctttnttggtttcactctttccttgtgaaatctgcaaaaccagctattcagtttagttatcataccaagccgaagctcttacattatttntatatataagtag

SEQ ID NO: 29521 - DNA, 410 bp, Glycine max
gacaacaataattctcaaagtggagaagctcccagagaaaatttcattcacgtgagagctagaagaggtcaagccactaacagccacagccttgcagaaagagtgagaagagaaaagattagtgagcgaatgaggttgcttcaagaacttgttccaggttgcaacatgataactggcaaagctgtaatgcttgatgagataataaactacgtgcaatcacttcagcaacaggttgagtttctgtccatgaaacttgccacaatgaacccagaactgaactttgatgtagacaggatcctatccaaggatattctccaatcacgcataggacatggaattggtgcatatggtcctggtatcaattcctctcacaccttccccaatggaagtttccatggaacattggctgg

SEQ ID NO: 29522 - DNA, 406 bp, Glycine max
gaagatgaaaaaaaactcaattaaacaaagaaatactcctacactcaattaaatactccaagtgtgtgtttggatggagcaattaaagtaagtaaagtattttaattgagatattaaaatgcttacttgtaaaatgatctgattggatagggtattttagaagtaattaaaatgtcatcattttattgaagcattttaataaagtaaattggcagaatttcaaattctcactgaaaatagaggaattaaaattcccagccactcttaggctctctctccctgtcagccacatgctctctcttcatctcagccactctcacgatgatagttctctctcagctgcacgctctctctcacgatgctagcgcgctctctctctctcagcacactatctctgtccgtacct

SEQ ID NO: 29523 - DNA, 402 bp, Glycine max
gataccaaaaacaaaacacaagccaagtgaaagtgagaaaaaataaaaatcaaagagcataatgtcagggatcattcacaggattggggagacccttcatgtgggagggcacaagaaggaggaggagcataagggtgagcaccatgctggagaatacaaaggggagcaccatggtgaacacagtagtgagtacaaaggagagcatcatggtgaacacaaagctggagagtaccatggtgagcacaagccagagcacaaagaagggttcctagacaaagtcaaggacaagatccatggtgagggcggcgccgtcgaaggcgaagaagaagaagaaagagaagaagaagaaggagcatggccatgagcatggccatgacagcagcagcagtgacagtgattaaa

SEQ ID NO: 29524 - DNA, 413 bp, Glycine max
ggaagttaagtagtactctagtgatactgagtctcaagatgaagcctatagaaaatggcaataccgttagcatcaactatcaaaatagctggttaggcttctccctctccccacaaatgaatataggtgttccttcacaccttcatcagacacagccttcatcagcagctgttgaagcagttccaccaaacttttaccatcatacacctctccataattatggcctttactatgaactggaaggtgaacacgttggaatgagttcatccttgcctatcatgccccttaagtccaatgcttctctctctggaatagaagctctgagtagatcacaagcacaaggttagttccaactcaaatttctgttatgttattttttttctgttttggtaagtatttattatgtgactact

SEQ ID NO: 29525 - DNA, 410 bp, Glycine max
  modified_base (369)..(369): a, c, g, t, unknown, or other
ggtggtagatctggcggcttggtttgttctacttcctcttacactgggattagaacaaggcgtttgtgcacttctaacaacaccacctttcccttcccccaacaacctcaatcactctctttcgctaaacctctcaaactcatgtctcaacctttgaccaccaactctgttcttgttgaagaggctgctgctgatggtgattcctccgccgccgcacctcccctcttcgattatcatcgtatcgaccaaaaactggctccaaacataatttacgatgctcttgtctggagcaccctcaactgcctccttgttggtgacaaatctgttcagagatcaggaagagttcctggtgtgggcctggtacatctnccactttccttattacctgggccatttcctgaaagtcattg

SEQ ID NO: 29526 - DNA, 395 bp, Glycine max
gtatgatgtggatcttgttcagaggctgttagagcattttattattcaggaacacactgaaagttcaagtccaagcagacagtccttttctgataaacagcatatgggaatgggatgcatcctaaatgccaaggcaagagtggcaaggcttgttgacagttatcttacagaggtgtccagagataggaacctttccctcaccaagtttcaggtacttgcagaggctttgcctgagtcagctaggacctgcgatgatggactatacagagcaattgattcctatcttaaggcacaccctacactttctgagcatgaaaggaagcgactatgccgtgtaatggattgttagaaactgtccattgatgcctgcctgcatgctgctcaaaatgaaagac

SEQ ID NO: 29527 - DNA, 419 bp, Glycine max
gctatctccgaaggtgcaacatcctttcgggtcggtgaatatcaatatgtggggatcttgatggttgcttttgcaatactgatcttcctttctctgggctctgtggaaggcttcagtactaatagccagccctgcacatatgataagagcaagctatgcaagccatcccttgcgactgcattgtatagcactgtatctttcttgcttgatgctataacttcagtcctatctggtttccttgggatgaaaagtgcaacctatgccaatgcaaggacaaccttggaagccagaaagggagttggaaaggctttcattactgcatctaggtctggtgcagtgatgggtttccttcttgcagcaaatggtcttttggagctctacattaccatcaatctctataagctatattatggtgatga

SEQ ID NO: 29528 - DNA, 409 bp, Glycine max
ggggattcaaattcaaagaggcgtgtcagcagaagcactgaatccaaaaacacacaggacataaacataaacataattgaagggaataataacccaaaagcgcaggtgcaagaacgtgctgcagtttttgaccaacatttctacgatggaatcccattctttgctgataataagccttctagaaccaacgagaaggcttctaccactgcgggtgaagagttctacgacggaatcccgcgcttccccgaggactccttgccgaacaagcctaagtcaaaggtctcagaggtgagtttacgcttgggcaaagctgttactactggaattgctattggattagagaaagcagtagaggttttggacactcttgggagcagcctgacaaatttaaatgtgagcagtgggtttt
